United States Patent Application Publication US 2023/0026259 A1 - sequence listing, part 72

SEQ ID NO: 173184 - DNA, 2945 bp, Homo sapiens
  Payload ID: 14038
  Gene Symbol: RAB35
  Gene Name: RAB35, member RAS oncogene family
  Uniprot ID: Q15286
  ENST ID: ENST00000229340
  CDS Start-End: 190-795
aaggagggaggcggtggtagcggcggcggctgctgaggaggaggagggggagcggagggaggtgtttctgtcagttccggctgtttgttcgggaagtggatccgccgctgccggagcagcccgaagggagctgcggatcgcgaggccagtaccgaccccgcccgcccgcgcgcaccgcccccgcccgccatggcccgggactacgaccacctcttcaagctgctcatcatcggcgacagcggtgtgggcaagagcagtttactgttgcgttttgcagacaacactttctcaggcagctacatcaccacgatcggagtggatttcaagatccggaccgtggagatcaacggggagaaggtgaagctgcagatctgggacacagcggggcaggagcgcttccgcaccatcacctccacgtattatcgggggacccacggggtcattgtggtttacgacgtcaccagtgccgagtcctttgtcaacgtcaagcggtggcttcacgaaatcaaccagaactgtgatgatgtgtgccgaatattagtgggtaataagaatgacgaccctgagcggaaggtggtggagacggaagatgcctacaaattcgccgggcagatgggcatccagttgttcgagaccagcgccaaggagaatgtcaacgtggaagagatgttcaactgcatcacggagctggtcctccgagcaaagaaagacaacctggcaaaacagcagcagcaacaacagaacgatgtggtgaagctcacgaagaacagtaaacgaaagaaacgctgctgctaatggcacccagtccactgcagagactgcactgcggtccctcccccagcccgaggcccacggaggttcctcgggggacagtctcagtttcgtgccgttatttaaagaattctctccatgtttttgtatcgggaggtgccatcggcacttcctcccccgccctcctcgagtgccaagaaggtgttggaccagcccgcccttccctactggtgccccctcctccccggccaaggcgcctggacctggcgaggacgctgcccgccgagcggactgattcgcagagtctgtacatagtgtatattgctctacccggccgcacaccacgtcctgctctggcttttgccttcttgatgccagcctgctgcaacagaccctccccgcgcccctccccagcccatcttactgcaagcagcgtcctgaggagacagcggcacgttctagctgcgtctgcggccagcccgtgccagtggagtgggctccgcgttgctcattctctccgacaggttgtcagcctctgtccccgctgcacagggtcttgccccttctccggggcctgtgccagctcccttccctccccgttgtcctgtccccacagccattctgggagctggggaacctggtctcaaggcaggccctgcagttccacagaggtggcaggtcttgccctttggccaacagatttcttgtcctgccttctagatgcctctgagctccaaacccagggcagccatggcttctcatttacaccaacaggtttcagttccaacagaaaggtcggggtaggttcgtgcagagatggggctggcaggggggctatgggaggattattttaacagatcaagaaaatgaagccaaatcaagtgaattaaattcctcacaattattttctttccctgaggtttgattggcacagcagcaaaagttgaggccaccccacttgtgtccactgtttttagaaaaaaatgaatggcttcctgccattgtggggctggactcttgggctttcttggtgggagcggagaaggggcctcccacccttgtccgagttgcctcccactggaggtcaggagtctacactgcagcctcgggcactgtggggagtgcatgcctggggcctctgggtggggaccatggacaggccctggtcactgtcctaacctttgtcaggacaaaggtagcaagaggatttcctggcgggtgggaaggaatggctggggcggccagttttgacacgccccagtgccctggagaacaaccagggtcatctgcacttgatgactgctccccgacccccagcccggacacctcattcccctcccactacagggatcaagtgacctgggaagaaccgagtttaacaccaggatgtgtttccttagatttcctttcctaggcgatttccagggagagccctgattggacaatcacatcacagatcacactgcagtttccatgttagcactgtggatgggtttttaatcaataaaaactgggggtttcttctcaccgactctccacttgcccaaactgccaaaagctggtgattctgggacaggccttcactttggagccacgggatggggtgggggagccccatgggcctgggaaggagggtgctgtggagggggctgcagggctgaccagcaggcagcctcatctggtcgggggcgggggcggcaggagcagaagcggggtctccgtccttgggactgtcctggttggccacgggccctgaggatgcacggtgcctggggctcctgtgccggtgggcggggggcatgctggcctctgagcgatcaggcgaggccagcgagggtgtgcttgcaaattcaagcaataagaggggggttcctgggggcttccagcccaggctagaagcccccatggcttctggcagctggacatcagccccaggtattggggtgattttggtcatgacagtgtgcctgtcccactgttacacgcatgaatgggggttatggggtgggggtggggactcagggctggaccgacgtcctagtggacctgatgtgaaattcctgtcaaacaaacaccacttttcaatggtttgctaggagtatttctgtattgaaagtttctaattatgctttttaaaaaaatactaaaaataaaggttcaagctgccaaatttt

SEQ ID NO: 173185 - DNA, 939 bp, Homo sapiens
  Payload ID: 14038
  Gene Symbol: RAB35
  Gene Name: RAB35, member RAS oncogene family
  Uniprot ID: Q15286
  ENST ID: ENST00000534951
  CDS Start-End: 118-576
agttccggctgtttgttcgggaagtggatccgccgctgccggagcagcccgaagggagctgcggatcgcgaggccagtaccgaccccgcccgcccgcgcgcaccgcccccgcccgccatggcccgggactacgaccacctcttcaagctgctcatcatcggcgacagcggtgtgggcaagagcagtttactgttgcgttttgcagacaacactttctcaggcagctacatcaccacgatcggagtggatttcaagatccggaccgtggagatcaacggggagaaggtgaagctgcagatctgggacacagcggggcaggagcgcttccgcaccatcacctccacgtattatcgggggacccacggggtcattgtggtttacgacgtcaccagtgccgagtcctttgtcaacgtcaagcggtggcttcacgaaatcaaccagaactgtgatgatgtgtgccgaatattagatgttcaactgcatcacggagctggtcctccgagcaaagaaagacaacctggcaaaacagcagcagcaacaacagaacgatgtggtgaagctcacgaagaacagtaaacgaaagaaacgctgctgctaatggcacccagtccactgcagagactgcactgcggtccctcccccagcccgaggcccacggaggttcctcgggggacagtctcagtttcgtgccgttatttaaagaattctctccatgtttttgtatcgggaggtgccatcggcacttcctcccccgccctcctcgagtgccaagaaggtgttggaccagcccgcccttccctactggtgccccctcctccccggccaaggcgcctggacctggcgaggacgctgcccgccgagcggactgattcgcagagtctgtacatagtgtatattgctctacccggccgcacaccacgtcctgctctggcttttgcc

SEQ ID NO: 173186 - DNA, 2449 bp, Homo sapiens
  Payload ID: 14038
  Gene Symbol: RAB35
  Gene Name: RAB35, member RAS oncogene family
  ENST ID: ENST00000544304
  CDS Start-End: 853-1296
attcagctcccaggctcggctcggagctggaccactccctcccctccaccaaagaggcaatgtgggctccaagaggtcacagcgctgggatgggatttcgaccccgcgctgccctcaaaggccacctcctcgcagctctgctcccgccggcagctcccgttctgtccaactcggaagccgcccgccgccctcggcgtccactccacaggcccggggccggggccagctccgcgggggaggggtcggtgcggaaggggcggggtaccgggccttccccgcgcgactctgccttctacggccccggcccctgcctctggaaacccggagctcgtgcgagccccgccccacggtcgcggcgtgcctgtcatttcctctccgcagggcgtgcgggtctcgaagatgagggagcaacaacgtccacgaccgggcttctccggcaccttgggcttctttccgctgggactcgacagcggctcggctccgcaagctctcagcgcccagggtggcggcgacgacgctccccgaggagacgcgaggaagacgggcccgcgcttgctgggactccgtcagggcgcgtgcgcgacccgggcgcggccggctcaggctgcggctgcgcaaggcggtgccagacgctgcgcctgcgcagtggtggggcggggcgggaaggagggaggcggtggtagcggcggcggctgctgaggaggaggagggggagcggagggaggtgtttctgtcagttccggctgtttgttcgggaagtggatccgccgctgccggagcagcccgaagggagctgcggatcgcgaggccagtaccgaccccgcccgcccgcgcgcaccgcccccgcccgccatggcccgggactacgaccacctcttcaagctgctcatcatcggcgacagcggggatttgggagcagcttgtcttacacaaggacgaaggaaaaggtcagggatcgagtggaagagatgttcttggtgtgtggccgctcagggaggtggaaagagcattgagaagtgtgggcaagagcagtttactgttgcgttttgcagacaacactttctcaggcagctacatcaccacgatcggagtggatttcaagatccggaccgtggagatcaacggggagaaggtgaagctgcagatctgggacacagcggggcaggagcgcttccgcaccatcacctccacgtattatcgggggacccacggggtcattgtggtttacgacgtcaccagtgccgagtcctttgtcaacgtcaagcggtggcttcacgaaatcaaccagaactgtgatgatgtgtgccgaatattagtgggtaataagaatgacgaccctgagcggaaggtggtggagacggaagatgcctacaaattcgccgggcagatgggcatccagttgttcgagaccagcgccaaggagaatgtcaacgtggaagagatgttcaactgcatcacggagctggtcctccgagcaaagaaagacaacctggcaaaacagcagcagcaacaacagaacgatgtggtgaagctcacgaagaacagtaaacgaaagaaacgctgctgctaatggcacccagtccactgcagagactgcactgcggtccctcccccagcccgaggcccacggaggttcctcgggggacagtctcagtttcgtgccgttatttaaagaattctctccatgtttttgtatcgggaggtgccatcggcacttcctcccccgccctcctcgagtgccaagaaggtgttggaccagcccgcccttccctactggtgccccctcctccccggccaaggcgcctggacctggcgaggacgctgcccgccgagcggactgattcgcagagtctgtacatagtgtatattgctctacccggccgcacaccacgtcctgctctggcttttgccttcttgatgccagcctgctgcaacagaccctccccgcgcccctccccagcccatcttactgcaagcagcgtcctgaggagacagcggcacgttctagctgcgtctgcggccagcccgtgccagtggagtgggctccgcgttgctcattctctccgacaggttgtcagcctctgtccccgctgcacagggtcttgccccttctccggggcctgtgccagctcccttccctccccgttgtcctgtccccacagccattctgggagctggggaacctggtctcaaggcaggccctgcagttccacagaggtggcaggtcttgccctttggccaacagatttcttgtcctgccttctagatgcctctgagctccaaacccagggcagccatggcttctcatttacaccaacaggtttcagttccaacagaaaggtcggggtaggttcgtgcagagatggggctggcaggggggctatgggaggattattttaacagatcaagaaaatgaagccaaatcaagtgaattaaattcctcacaatt

SEQ ID NO: 173187 - DNA, 643 bp, Homo sapiens
  Payload ID: 14038
  Gene Symbol: RAB35
  Gene Name: RAB35, member RAS oncogene family
  ENST ID: ENST00000538903
  CDS Start-End: 87-643
gccgctgccggagcagcccgaagggagctgcggatcgcgaggccagtaccgaccccgcccgcccgcgcgcaccgcccccgcccgccatggcccgggactacgaccacctcttcaagctgctcatcatcggcgacagcggtgtgggcaagagcagtttactgttgcgttttgcagacaacactttctcaggcagctacatcaccacgatcggagtggatttcaagatccggaccgtggagatcaacggggagaaggtgaagctgcagatctgggacacagcggggcaggagcgcttccgcaccatcacctccactgccgagtcctttgtcaacgtcaagcggtggcttcacgaaatcaaccagaactgtgatgatgtgtgccgaatattagtgggtaataagaatgacgaccctgagcggaaggtggtggagacggaagatgcctacaaattcgccgggcagatgggcatccagttgttcgagaccagcgccaaggagaatgtcaacgtggaagagatgttcaactgcatcacggagctggtcctccgagcaaagaaagacaacctggcaaaacagcagcagcaacaacagaacgatgtggtgaagctcacgaagaacagtaaacgaaagaaacgctgctgcta

SEQ ID NO: 173188 - DNA, 3828 bp, Homo sapiens
  Payload ID: 14039
  Gene Symbol: RAB36
  Gene Name: RAB36, member RAS oncogene family
  Uniprot ID: O95755
  ENST ID: ENST00000263116
  CDS Start-End: 41-1042
ctgccagccccgcccagactccaggcaggttctcgttgctatggtgatcgccggtgcaagctggatgcttggacgcgccgctgccagtccaacgcagaccccgcccacgacgtcgacgattcgtgtagcccgcaggtcccgcgtggctctcgttgccatggtgatcgccgccgctggctcaggcggaccaggccgcgcggagccccagctttcacagccatcgctggactgtggaagaatgaggtcctccctgacacctttggggccccctgtgagccgcgaccgtgtcatcgccagcttccctaagtggtacacgccggaagcctgtttgcagctcagggagcacttccacgggcaggtcagcgctgcctgccaacgcaggaacacggggactgtcgggctcaaactctccaaggtggtggtggttggcgatctctacgtggggaagaccagcctcatccacaggttttgcaagaatgtttttgatcgagactacaaggccaccattggggtggactttgaaattgagcgctttgagattgctgggattccctatagcctccagatctgggacacagctgggcaggagaagttcaagtgcatcgcatctgcctactaccggggtgcccaggtgatcatcacggcctttgacctcactgacgtgcagaccctggagcataccaggcagtggttggaggatgctctgagggagaacgaggcaggctcctgcttcatcttcctcgtgggaaccaagaaggaccttctgtcaggggccgcatgtgagcaggccgaagcagacgctgtgcacctggccagggagatgcaggccgagtactggtcagtgtcggccaagactggcgagaacgtgaaggcattcttcagccgcgtagccgccctggcattcgagcagtcggtgctgcaggacctggagaggcagagcagtgcccggctccaggtcggcaatggagacctaatccaaatggaagggagtccgcccgagacccaggagagcaagaggccctccagcctgggctgctgctaactggggcctgcgtggaaggcctccgctccctgcacacacacggacaggaatttccgtgactgtggtgtggagactggagcccaagctctgcagcgtgtcgccctcaagctgtaggcccatgttccagtccctccacccacccaccgggctcagctccagggcacagtcacttgtccgttgcaggttgggcactagaaaaggcccccactggctgcctgggagccccacaccaccgggccagtgcaggcactgtggtgatcccataaaaggccagtccatttgcagggtcatcagacagtcacctttggcctcaagaggcctcagaactgcaaactcctgcgtcggtctatactactcggccatggcccacatcagcagtcaaccctgcactctttcccagcgatcttggatgtgtccccaggatccgtcacagtgttccaggcaacctggacttgtcaaagtcagcacctgaaggagaggccacctgccattccccctgggagttttctgttgtcagcaggacttatggttctgggtctcagagcttcaggcctcactgtccttctgccacggatgctcaaggttcctgggcagaccagcacctctggaggacaatggacaaaatgtctcttagacctgttctggctgaagggctatctctggcacctctgagatccctaggtcctgccctcctggtccgtgggccaggatgtgcagaacaaccactcaggcctttctggcccacctggacagtgcatttacctgtgtgctgcgggaggcagactgcacagctgtcctagggtaactcactctgcagcccttgaacatggcactgccctcctctggcactcatgctgggcctgtgcccactgctgcctctccatccctctctcattggcctatacatctcttaggacctttgtaatggtgtccatgcacctttagaggacttcagaggccctgccaagtctagcatgttcctgtctccaacaccgcctcctgcacatgcagagcagacagaaataccccacacattccccagcctctctgcccagtatgctcatccacagggttttctcactgctatgaaccagccccacagccccaggcccctgtcacctggctatgcccactcatcccacccgtctcgtgctgttgcttcccgtagatggcgagcaccttgcaggcagccttctgatcagtactgctctcctagggcctggcacactgcagctgccctgtaaatgttcagctcagcgattgccaaataccagttagggaagaacactggcatctttttctattcattcccccttcaacatattttttgtagttttttatataaatgacttttttttttttttgagatggagtttcacccttgttgcccaggctggagtgcaatggcgtaatctcggctcagtgcaacctctgcctcccaggttgaagcgattctcctgcctcagcctcccaagtagctgggattacaggcatgcaccaccatgcctggctaattttgtatttttagtagagatggggtttctccatgttggtcaggctgctctcggactcctgatctcaggtgacctgcccacctcggcctcccgaagtgctgggattacaagggtgagccaccatgcccggccataaatgattttattcatttttatgttttcttttgggcggcgggatggagtctctgtcacccaggctggcgtgcaatggcacgatcttggctcactgcaagcttccccttccgggttcatgccattctcctgcctcagcctcccgagtagctgggactacaggcacgtgtgaccatgccgggctaattttttatatttttagtagagagaggtttcaccgtgttagccaggatggtctcgatgatctgacctcgtgatctgcccgcctcggcctcccaaagtgctgggattacaggcctgagccaccgcgtccggcctccataaatgacttttaaaggggttgtatgtttagtgtgaacaaagacagtacaaagcatataaaatacaaggtgaaagccccccccccgccacattagctgcgcccctgaagtgtctccagcagaagagatggatgaatggaaggacacacagatggacagagagcaggaaagactgttagctctgctaacagtcaggactattccttctggactctgtgcctttgcctgcacagctagtgttgatggcttgtttgttgttttcaccagagtgagctccttctggacatactgcctggcagcctgccttcctagggagctggcgccaaggcctctccctgatggcacacaaggagcctccttcctgtagcagcgcccagttttcatgtggatggattgtagttcatttgaccctccccatccgcgggccatccggcttgtgtccagcttttagctcttgccaatggtgctgcagtggccattcttgtagttatagctttgcgtactcaggaaggcccttctcccgactgcggcccccagcctggtccactaaatgcagcctgtggtcgggcagacagcattggggtccattaggaagaccaggtttgctgggcataagcttcacaggacgggagaacctgcccatggtggactgtcgttctccacagctcccttcccttgccccttcgggcctccaggatatgtttgcgggggtgggtgtggtgtccagctgttaccagcttctgagctagagctgtactgcctcacgtacacccccacctctgtaaatggtccttgattaaatcgtcctcatattacctcc

SEQ ID NO: 173189 - DNA, 936 bp, Homo sapiens
  Payload ID: 14039
  Gene Symbol: RAB36
  Gene Name: RAB36, member RAS oncogene family
  Uniprot ID: O95755
  ENST ID: ENST00000341989
  CDS Start-End: 1-936
atggtgatcgccggtgcaagctggatgcttggacgcgccgctgccagtccaacgcagaccccgcccacgacgtcgacgattcgtgtagcccgcaggtcccgcgtggctctcgttgccatggtgatcgccgccgctggctcaggcggaccaggccgcgcggagccccagctttcacagccatcgctggactgtggaagaatgaggtcctccctgacacctttggggccccctgtgagccgcgaccgtgtcatcgccagcttccctaagtggtacacgccggaagcctgtttgcagctcagggagcacttccacgggcaggtcagcgctgcctgccaacgcaggaacacggggactgtcgggttttgcaagaatgtttttgatcgagactacaaggccaccattggggtggactttgaaattgagcgctttgagattgctgggattccctatagcctccagatctgggacacagctgggcaggagaagttcaagtgcatcgcatctgcctactaccggggtgcccaggtgatcatcacggcctttgacctcactgacgtgcagaccctggagcataccaggcagtggttggaggatgctctgagggagaacgaggcaggctcctgcttcatcttcctcgtgggaaccaagaaggaccttctgtcaggggccgcatgtgagcaggccgaagcagacgctgtgcacctggccagggagatgcaggccgagtactggtcagtgtcggccaagactggcgagaacgtgaaggcattcttcagccgcgtagccgccctggcattcgagcagtcggtgctgcaggacctggagaggcagagcagtgcccggctccaggtcggcaatggagacctaatccaaatggaagggagtccgcccgagacccaggagagcaagaggccctccagcctgggctgctgctaa

SEQ ID NO: 173190 - DNA, 554 bp, Homo sapiens
  Payload ID: 14039
  Gene Symbol: RAB36
  Gene Name: RAB36, member RAS oncogene family
  ENST ID: ENST00000420895
  CDS Start-End: 1-397
ggtcagcgctgcctgccaacgcaggaacacggggactgtcgggctcaaactctccaaggtggtggtggttggcgatctctacgtggggaagaccagcctcatccacaggttttgcaagaatgtttttgatcgagactacaaggccaccattggggtggactttgaaattgagcgctttgagattgctgggattccctatagcctccagatctgggacacagctgggcaggagaagttcaagtgcatcgcatctgcctactaccggggtgcccagggtgagcaacatgccacgtcggggctcaactgcatgcagcagcggggtccctgccgggctccacagtgggaatcccgagttctctgcacaggcaccagttttttgtcctccaagacccactgagaaaacaccaggccactgcttgggaacagggaagctgccttcatccccaggcactggctgactttggcgatcacaccctttaaggaccctgtggtagtgggtgctggctttaagtctcagccccagtttcagctcataaagatgctcagagatgaaa

SEQ ID NO: 173191 - DNA, 3804 bp, Homo sapiens
  Payload ID: 14040
  Gene Symbol: RAB37
  Gene Name: RAB37, member RAS oncogene family
  ENST ID: ENST00000340415
  CDS Start-End: 1010-1558
ttcatcccctgccaggagagcatagtagctcacatttattgagttcttagtacacgctgggcactgttctaggctttttacatgaattaactcattaaatactcagaacaaaaccatgaggcaggtactattataatattatctccattttgtggacacttaggaaagattaatttgcccgagtttgcacgactaataattttcagaatcgagatttgaatcctggagcctgtgctcctaaccaaaccaccatctgcctctcctgagcccattgtccttaacttcttgcggtcatgtgtgctggagagaatgtgatcaaagccctggaccttctccctaggaaaacgcaggtaaacagaattttgcatatttcagggactttggggacacctaagacccatctactgtcgacctcagacttagaagctctatttatctcatacatcctggagagaattgtccagggacaaaaacagaagcgccgccagcgccgcaggacttcgcctctgcaaacgtgtgaggagagctgcgctgcgctgagctgcgtggtgacggagatgcccgttcgctcgggatcaggaacggtgagctcctgggaccgcaatgccctgagaacgcagccgggtgctgagcctccggagtccggtagctgaatgaaatacgcagggatcaccagccggacccaaatcttgcgtccctgccagcatcctggagtcctaagaggcagggattggagcggacaggatctcagaactctggtcccgggcgcacaacggcggagtcgctgttcctggtgctgaaacgctcagtcctggaagaacgtggccgcctgcccgcctggtaccgcgccgcggccgctgcggggaactgtccagtgctgaaaacggatgcggcccggcccgcagagctcagacccaagcctgccgcacccagcggagctcgaaccgagctcctggaagcgctgacgcagagcgcagggagagccggagcggcgagctccaagcctggcatggacctgcagagacccgattcctaccagggaggagctggccctgacttcaacgaccacgtcctgcataagaccatcctggtgggtgacagtggtgtgggaaagacgtctctgctggttcagttcgatcagggcaagttcatccccggctccttctcggccactgtgggcatcggattcacgaacaaggtggtgactgtggatggcgtgagagtgaagctgcagatctgggacaccgctgggcaggaacggttccgaagcgtcacccatgcttattacagagatgctcaggccttgcttctgctgtatgacatcaccaacaaatcttctttcgacaacatcagggcctggctcactgagattcatgagtatgcccagagggacgtggtgatcatgctgctaggcaacaaggcggatatgagcagcgaaagagtgatccgttccgaagacggagagaccttggccagggagtacggtgttcccttcctggagaccagcgccaagactggcatgaatgtggagttagcctttctggccatcgccaagtgagagctgggcagggaagggaagtgtgcggggcagggcggcacactccaggaatccagtagggcccggcccctggcccagcccctggacacacctgcattctgcaggctgaggtccatttgctctgggagcactgggccactgggagaggggagggggcggctcagctcctcaccccagcccagcccagcccagcccagcccattgtctcttcttcaagggaactgaaataccgggccgggcatcaggcggatgagcccagcttccagatccgagactatgtagagtcccagaagaagcgctccagctgctgctccttcatgtgaatcccagggggcagagaggaggctctggaggcacacaggatgcagccttccccctcccaggcctggcttattccaagaggctgagccaatggggagaaagatggaggactcactgcacagccgcttcctagcagggagctatactccaactcctacttgagttcctgcggtctccccgcatccacagggagggtaaaacacttagcttttattttaatagtacataatttaataccaaaaaaggcgcctggatccccaaaaaaccgaggctgggagctagtggcccttttgctttctaggacttggggggccggccctccctcctaagcataacaaaggtggtgttgctccagctcagccccaggggacacagatgcactttgggggtgagggcaggtaatgactccatcgcaccctcagttcagctggacagaggctcaggtgaccccagccttcactgtctcccgctctccaggagcttatcttcgccccatctcccaaataagtgggcccttgtgctgtgaggaagaccaaagcctcagggaagataagagatatggagatgggagggggaggacaaggggcagagagtagggtctagctggctatctctggccttactaacacccccctggaggcatgccccttttctccagcacacaagcacattggggcacctggaaatattggttccaggctcctgttctctggacttcagatcctgggggagcccctcccccccctgaatccctggcttagctaccttcctgcctgtgcacctaaaaacctcaggtcagaactaggaaaagagttttgtttttatttttttgaaatggagtctcgttctgtcgcccaggctgaggtgcagtagtgcaatctccgctcactacaacctccactccctggggctcaagcgatcctcccacctcagccgccgaagtagctgggactataggtgtgtaccatcacacctggctaatttttgtattttttgtagacacagggtttcgccatgttgcccaggctggtcttgaattcctgagctcaagcaacctgccggcctcggcctcccaaagtactgggattacacgcagaaggcaccatgcccaggctagatgtgtcttatcccaatcctttggcaggcatgcagctccacaggcgatttcttcaagcagctgaagtgtttagccctcctgggttaagagccagataaggagaaatccctttcctaggtttggaatgtgttgtgaaaaaaaagagaaatccctggctcctggagctggtgggagacaagattaagcaaacctcccctgacatgtatccctttgaccccaagctctgcctcctccctgaccacccatgccctttcctttaacttctcaaacagataccagggcctaaactgctttacctcccctcctactgagtcaggttaggtggtgggaggtcacccatttccgagttaaaccaatgcaatatgagtaaaacaaagtcatgtgggtatgtctggggtagagagaggggtagcaagttcatgtgtcctccttggtcacatatctcccaaagctccgatccctgccatgggaagtggacaggaaacatgaggtcatgacctgcaggcatctttactgcagctctgccggcctggagggggagagggggaggaagaagtatgcgctgcacatttctgaggctactgcatttgctttcaaggcagaaatcttgctctgagcagtcagcggctccagtttgggcccgataaggaagttctccgtggcctccctcaggcagagcagggaggaggctgacattgccagtctcttctggggcccaaggcaggttgcaggagatccaatcccatagacagctctgggcctcttgcatttgagtttttcagaattaaactgcagtattttggaaagc

SEQ ID NO: 173192 - DNA, 2858 bp, Homo sapiens
  Payload ID: 14040
  Gene Symbol: RAB37
  Gene Name: RAB37, member RAS oncogene family
  ENST ID: ENST00000392610
  CDS Start-End: 42-611
ttcgcctgcgggccggcactgctcacctctcgtccagggacatgacgggcacgccaggcgccgttgccacccgggatggcgaggcccccgagcgctccccgccctgcagtccgagctacgacctcacgggcaaggtgatgcttctgggagacacaggcgtcggcaaaacatgtttcctgatccaattcaaagacggggccttcctgtccggaaccttcatagccaccgtcggcatagacttcaggaacaaggtggtgactgtggatggcgtgagagtgaagctgcagatctgggacaccgctgggcaggaacggttccgaagcgtcacccatgcttattacagagatgctcaggccttgcttctgctgtatgacatcaccaacaaatcttctttcgacaacatcagggcctggctcactgagattcatgagtatgcccagagggacgtggtgatcatgctgctaggcaacaaggcggatatgagcagcgaaagagtgatccgttccgaagacggagagaccttggccagggagtacggtgttcccttcctggagaccagcgccaagactggcatgaatgtggagttagcctttctggccatcgccaagtgagagctgggcagggaagggaagtgtgcggggcagggcggcacactccaggaatccagtagggcccggcccctggcccagcccctggacacacctgcattctgcaggctgaggtccatttgctctgggagcactgggccactgggagaggggagggggcggctcagctcctcaccccagcccagcccagcccagcccagcccattgtctcttcttcaagggaactgaaataccgggccgggcatcaggcggatgagcccagcttccagatccgagactatgtagagtcccagaagaagcgctccagctgctgctccttcatgtgaatcccagggggcagagaggaggctctggaggcacacaggatgcagccttccccctcccaggcctggcttattccaagaggctgagccaatggggagaaagatggaggactcactgcacagccgcttcctagcagggagctatactccaactcctacttgagttcctgcggtctccccgcatccacagggagggtaaaacacttagcttttattttaatagtacataatttaataccaaaaaaggcgcctggatccccaaaaaaccgaggctgggagctagtggcccttttgctttctaggacttggggggccggccctccctcctaagcataacaaaggtggtgttgctccagctcagccccaggggacacagatgcactttgggggtgagggcaggtaatgactccatcgcaccctcagttcagctggacagaggctcaggtgaccccagccttcactgtctcccgctctccaggagcttatcttcgccccatctcccaaataagtgggcccttgtgctgtgaggaagaccaaagcctcagggaagataagagatatggagatgggagggggaggacaaggggcagagagtagggtctagctggctatctctggccttactaacacccccctggaggcatgccccttttctccagcacacaagcacattggggcacctggaaatattggttccaggctcctgttctctggacttcagatcctgggggagcccctcccccccctgaatccctggcttagctaccttcctgcctgtgcacctaaaaacctcaggtcagaactaggaaaagagttttgtttttatttttttgaaatggagtctcgttctgtcgcccaggctgaggtgcagtagtgcaatctccgctcactacaacctccactccctggggctcaagcgatcctcccacctcagccgccgaagtagctgggactataggtgtgtaccatcacacctggctaatttttgtattttttgtagacacagggtttcgccatgttgcccaggctggtcttgaattcctgagctcaagcaacctgccggcctcggcctcccaaagtactgggattacacgcagaaggcaccatgcccaggctagatgtgtcttatcccaatcctttggcaggcatgcagctccacaggcgatttcttcaagcagctgaagtgtttagccctcctgggttaagagccagataaggagaaatccctttcctaggtttggaatgtgttgtgaaaaaaaagagaaatccctggctcctggagctggtgggagacaagattaagcaaacctcccctgacatgtatccctttgaccccaagctctgcctcctccctgaccacccatgccctttcctttaacttctcaaacagataccagggcctaaactgctttacctcccctcctactgagtcaggttaggtggtgggaggtcacccatttccgagttaaaccaatgcaatatgagtaaaacaaagtcatgtgggtatgtctggggtagagagaggggtagcaagttcatgtgtcctccttggtcacatatctcccaaagctccgatccctgccatgggaagtggacaggaaacatgaggtcatgacctgcaggcatctttactgcagctctgccggcctggagggggagagggggaggaagaagtatgcgctgcacatttctgaggctactgcatttgctttcaaggcagaaatcttgctctgagcagtcagcggctccagtttgggcccgataaggaagttctccgtggcctccctcaggcagagcagggaggaggctgacattgccagtctcttctggggcccaaggcaggttgcaggagatccaatcccatagacagctctgggcctcttgcatttgagtttttcagaattaaactgcagtattttggaaagca

SEQ ID NO: 173193 - DNA, 2528 bp, Homo sapiens
  Payload ID: 14040
  Gene Symbol: RAB37
  Gene Name: RAB37, member RAS oncogene family
  Uniprot ID: Q96AX2
  ENST ID: ENST00000392612
  CDS Start-End: 44-604
ccttcgcctgcgggccggcactgctcacctctcgtccagggacatgacgggcacgccaggcgccgttgccacccgggatggcgaggcccccgagcgctccccgccctgcagtccgagctacgacctcacgggcaagaacaaggtggtgactgtggatggcgtgagagtgaagctgcagatctgggacaccgctgggcaggaacggttccgaagcgtcacccatgcttattacagagatgctcaggccttgcttctgctgtatgacatcaccaacaaatcttctttcgacaacatcagggcctggctcactgagattcatgagtatgcccagagggacgtggtgatcatgctgctaggcaacaaggcggatatgagcagcgaaagagtgatccgttccgaagacggagagaccttggccagggagtacggtgttcccttcctggagaccagcgccaagactggcatgaatgtggagttagcctttctggccatcgccaaggaactgaaataccgggccgggcatcaggcggatgagcccagcttccagatccgagactatgtagagtcccagaagaagcgctccagctgctgctccttcatgtgaatcccagggggcagagaggaggctctggaggcacacaggatgcagccttccccctcccaggcctggcttattccaagaggctgagccaatggggagaaagatggaggactcactgcacagccgcttcctagcagggagctatactccaactcctacttgagttcctgcggtctccccgcatccacagggagggtaaaacacttagcttttattttaatagtacataatttaataccaaaaaaggcgcctggatccccaaaaaaccgaggctgggagctagtggcccttttgctttctaggacttggggggccggccctccctcctaagcataacaaaggtggtgttgctccagctcagccccaggggacacagatgcactttgggggtgagggcaggtaatgactccatcgcaccctcagttcagctggacagaggctcaggtgaccccagccttcactgtctcccgctctccaggagcttatcttcgccccatctcccaaataagtgggcccttgtgctgtgaggaagaccaaagcctcagggaagataagagatatggagatgggagggggaggacaaggggcagagagtagggtctagctggctatctctggccttactaacacccccctggaggcatgccccttttctccagcacacaagcacattggggcacctggaaatattggttccaggctcctgttctctggacttcagatcctgggggagcccctcccccccctgaatccctggcttagctaccttcctgcctgtgcacctaaaaacctcaggtcagaactaggaaaagagttttgtttttatttttttgaaatggagtctcgttctgtcgcccaggctgaggtgcagtagtgcaatctccgctcactacaacctccactccctggggctcaagcgatcctcccacctcagccgccgaagtagctgggactataggtgtgtaccatcacacctggctaatttttgtattttttgtagacacagggtttcgccatgttgcccaggctggtcttgaattcctgagctcaagcaacctgccggcctcggcctcccaaagtactgggattacacgcagaaggcaccatgcccaggctagatgtgtcttatcccaatcctttggcaggcatgcagctccacaggcgatttcttcaagcagctgaagtgtttagccctcctgggttaagagccagataaggagaaatccctttcctaggtttggaatgtgttgtgaaaaaaaagagaaatccctggctcctggagctggtgggagacaagattaagcaaacctcccctgacatgtatccctttgaccccaagctctgcctcctccctgaccacccatgccctttcctttaacttctcaaacagataccagggcctaaactgctttacctcccctcctactgagtcaggttaggtggtgggaggtcacccatttccgagttaaaccaatgcaatatgagtaaaacaaagtcatgtgggtatgtctggggtagagagaggggtagcaagttcatgtgtcctccttggtcacatatctcccaaagctccgatccctgccatgggaagtggacaggaaacatgaggtcatgacctgcaggcatctttactgcagctctgccggcctggagggggagagggggaggaagaagtatgcgctgcacatttctgaggctactgcatttgctttcaaggcagaaatcttgctctgagcagtcagcggctccagtttgggcccgataaggaagttctccgtggcctccctcaggcagagcagggaggaggctgacattgccagtctcttctggggcccaaggcaggttgcaggagatccaatcccatagacagctctgggcctcttgcatttgagtttttcagaattaaactgcagtattttggaaagca

SEQ ID NO: 173194 - DNA, 2617 bp, Homo sapiens
  Payload ID: 14040
  Gene Symbol: RAB37
  Gene Name: RAB37, member RAS oncogene family
  Uniprot ID: Q96AX2
  ENST ID: ENST00000392613
  CDS Start-End: 57-728
gttcctgcgctctccttcgcctgcgggccggcactgctcacctctcgtccagggacatgacgggcacgccaggcgccgttgccacccgggatggcgaggcccccgagcgctccccgccctgcagtccgagctacgacctcacgggcaaggtgatgcttctgggagacacaggcgtcggcaaaacatgtttcctgatccaattcaaagacggggccttcctgtccggaaccttcatagccaccgtcggcatagacttcaggaacaaggtggtgactgtggatggcgtgagagtgaagctgcagatctgggacaccgctgggcaggaacggttccgaagcgtcacccatgcttattacagagatgctcaggccttgcttctgctgtatgacatcaccaacaaatcttctttcgacaacatcagggcctggctcactgagattcatgagtatgcccagagggacgtggtgatcatgctgctaggcaacaaggcggatatgagcagcgaaagagtgatccgttccgaagacggagagaccttggccagggagtacggtgttcccttcctggagaccagcgccaagactggcatgaatgtggagttagcctttctggccatcgccaaggaactgaaataccgggccgggcatcaggcggatgagcccagcttccagatccgagactatgtagagtcccagaagaagcgctccagctgctgctccttcatgtgaatcccagggggcagagaggaggctctggaggcacacaggatgcagccttccccctcccaggcctggcttattccaagaggctgagccaatggggagaaagatggaggactcactgcacagccgcttcctagcagggagctatactccaactcctacttgagttcctgcggtctccccgcatccacagggagggtaaaacacttagcttttattttaatagtacataatttaataccaaaaaaggcgcctggatccccaaaaaaccgaggctgggagctagtggcccttttgctttctaggacttggggggccggccctccctcctaagcataacaaaggtggtgttgctccagctcagccccaggggacacagatgcactttgggggtgagggcaggtaatgactccatcgcaccctcagttcagctggacagaggctcaggtgaccccagccttcactgtctcccgctctccaggagcttatcttcgccccatctcccaaataagtgggcccttgtgctgtgaggaagaccaaagcctcagggaagataagagatatggagatgggagggggaggacaaggggcagagagtagggtctagctggctatctctggccttactaacacccccctggaggcatgccccttttctccagcacacaagcacattggggcacctggaaatattggttccaggctcctgttctctggacttcagatcctgggggagcccctcccccccctgaatccctggcttagctaccttcctgcctgtgcacctaaaaacctcaggtcagaactaggaaaagagttttgtttttatttttttgaaatggagtctcgttctgtcgcccaggctgaggtgcagtagtgcaatctccgctcactacaacctccactccctggggctcaagcgatcctcccacctcagccgccgaagtagctgggactataggtgtgtaccatcacacctggctaatttttgtattttttgtagacacagggtttcgccatgttgcccaggctggtcttgaattcctgagctcaagcaacctgccggcctcggcctcccaaagtactgggattacacgcagaaggcaccatgcccaggctagatgtgtcttatcccaatcctttggcaggcatgcagctccacaggcgatttcttcaagcagctgaagtgtttagccctcctgggttaagagccagataaggagaaatccctttcctaggtttggaatgtgttgtgaaaaaaaagagaaatccctggctcctggagctggtgggagacaagattaagcaaacctcccctgacatgtatccctttgaccccaagctctgcctcctccctgaccacccatgccctttcctttaacttctcaaacagataccagggcctaaactgctttacctcccctcctactgagtcaggttaggtggtgggaggtcacccatttccgagttaaaccaatgcaatatgagtaaaacaaagtcatgtgggtatgtctggggtagagagaggggtagcaagttcatgtgtcctccttggtcacatatctcccaaagctccgatccctgccatgggaagtggacaggaaacatgaggtcatgacctgcaggcatctttactgcagctctgccggcctggagggggagagggggaggaagaagtatgcgctgcacatttctgaggctactgcatttgctttcaaggcagaaatcttgctctgagcagtcagcggctccagtttgggcccgataaggaagttctccgtggcctccctcaggcagagcagggaggaggctgacattgccagtctcttctggggcccaaggcaggttgcaggagatccaatcccatagacagctctgggcctcttgcatttgag

SEQ ID NO: 173195 - DNA, 2704 bp, Homo sapiens
  Payload ID: 14040
  Gene Symbol: RAB37
  Gene Name: RAB37, member RAS oncogene family
  Uniprot ID: Q96AX2
  ENST ID: ENST00000392614
  CDS Start-End: 94-780
gactacgggaactcttccgcagcagacggggtccccgcggcccgctcccccaggggcaagcaagcgaccacaggggaccggtcccggggctggatgtggctcatgtccgaagcgcacggagccgagccggtgttgctcagggaggctgcccgccccttcacgcagaccctgcggctctgcgtgccctcagggaacagcaaggtgatgcttctgggagacacaggcgtcggcaaaacatgtttcctgatccaattcaaagacggggccttcctgtccggaaccttcatagccaccgtcggcatagacttcaggaacaaggtggtgactgtggatggcgtgagagtgaagctgcagatctgggacaccgctgggcaggaacggttccgaagcgtcacccatgcttattacagagatgctcaggccttgcttctgctgtatgacatcaccaacaaatcttctttcgacaacatcagggcctggctcactgagattcatgagtatgcccagagggacgtggtgatcatgctgctaggcaacaaggcggatatgagcagcgaaagagtgatccgttccgaagacggagagaccttggccagggagtacggtgttcccttcctggagaccagcgccaagactggcatgaatgtggagttagcctttctggccatcgccaaggaactgaaataccgggccgggcatcaggcggatgagcccagcttccagatccgagactatgtagagtcccagaagaagcgctccagctgctgctccttcatgtgaatcccagggggcagagaggaggctctggaggcacacaggatgcagccttccccctcccaggcctggcttattccaagaggctgagccaatggggagaaagatggaggactcactgcacagccgcttcctagcagggagctatactccaactcctacttgagttcctgcggtctccccgcatccacagggagggtaaaacacttagcttttattttaatagtacataatttaataccaaaaaaggcgcctggatccccaaaaaaccgaggctgggagctagtggcccttttgctttctaggacttggggggccggccctccctcctaagcataacaaaggtggtgttgctccagctcagccccaggggacacagatgcactttgggggtgagggcaggtaatgactccatcgcaccctcagttcagctggacagaggctcaggtgaccccagccttcactgtctcccgctctccaggagcttatcttcgccccatctcccaaataagtgggcccttgtgctgtgaggaagaccaaagcctcagggaagataagagatatggagatgggagggggaggacaaggggcagagagtagggtctagctggctatctctggccttactaacacccccctggaggcatgccccttttctccagcacacaagcacattggggcacctggaaatattggttccaggctcctgttctctggacttcagatcctgggggagcccctcccccccctgaatccctggcttagctaccttcctgcctgtgcacctaaaaacctcaggtcagaactaggaaaagagttttgtttttatttttttgaaatggagtctcgttctgtcgcccaggctgaggtgcagtagtgcaatctccgctcactacaacctccactccctggggctcaagcgatcctcccacctcagccgccgaagtagctgggactataggtgtgtaccatcacacctggctaatttttgtattttttgtagacacagggtttcgccatgttgcccaggctggtcttgaattcctgagctcaagcaacctgccggcctcggcctcccaaagtactgggattacacgcagaaggcaccatgcccaggctagatgtgtcttatcccaatcctttggcaggcatgcagctccacaggcgatttcttcaagcagctgaagtgtttagccctcctgggttaagagccagataaggagaaatccctttcctaggtttggaatgtgttgtgaaaaaaaagagaaatccctggctcctggagctggtgggagacaagattaagcaaacctcccctgacatgtatccctttgaccccaagctctgcctcctccctgaccacccatgccctttcctttaacttctcaaacagataccagggcctaaactgctttacctcccctcctactgagtcaggttaggtggtgggaggtcacccatttccgagttaaaccaatgcaatatgagtaaaacaaagtcatgtgggtatgtctggggtagagagaggggtagcaagttcatgtgtcctccttggtcacatatctcccaaagctccgatccctgccatgggaagtggacaggaaacatgaggtcatgacctgcaggcatctttactgcagctctgccggcctggagggggagagggggaggaagaagtatgcgctgcacatttctgaggctactgcatttgctttcaaggcagaaatcttgctctgagcagtcagcggctccagtttgggcccgataaggaagttctccgtggcctccctcaggcagagcagggaggaggctgacattgccagtctcttctggggcccaaggcaggttgcaggagatccaatcccatagacagctctgggcctcttgcatttgagtttttcagaattaaactgcagtattttggaaagca

SEQ ID NO: 173196 - DNA, 2655 bp, Homo sapiens
  Payload ID: 14040
  Gene Symbol: RAB37
  Gene Name: RAB37, member RAS oncogene family
  ENST ID: ENST00000392615
  CDS Start-End: 191-766
ggaggcgcagcccaggggtccccagctccccgcctcgccacctggggacagcccacggcccggggctcgggcgccgcctgctgtcgcggtgcgcagcgactacgggaactcttccgcagcagacggggtccccgcggcccgctcccccaggggcaagcaagcgaccacaggggaccggtcccggggctggatgtggctcatgtccgaagcgcacggagccgagccggtgttgctcagggaggctgcccgccccttcacgcagaccctgcggctctgcgtgccctcagggaacagcaagaacaaggtggtgactgtggatggcgtgagagtgaagctgcagatctgggacaccgctgggcaggaacggttccgaagcgtcacccatgcttattacagagatgctcaggccttgcttctgctgtatgacatcaccaacaaatcttctttcgacaacatcagggcctggctcactgagattcatgagtatgcccagagggacgtggtgatcatgctgctaggcaacaaggcggatatgagcagcgaaagagtgatccgttccgaagacggagagaccttggccagggagtacggtgttcccttcctggagaccagcgccaagactggcatgaatgtggagttagcctttctggccatcgccaaggaactgaaataccgggccgggcatcaggcggatgagcccagcttccagatccgagactatgtagagtcccagaagaagcgctccagctgctgctccttcatgtgaatcccagggggcagagaggaggctctggaggcacacaggatgcagccttccccctcccaggcctggcttattccaagaggctgagccaatggggagaaagatggaggactcactgcacagccgcttcctagcagggagctatactccaactcctacttgagttcctgcggtctccccgcatccacagggagggtaaaacacttagcttttattttaatagtacataatttaataccaaaaaaggcgcctggatccccaaaaaaccgaggctgggagctagtggcccttttgctttctaggacttggggggccggccctccctcctaagcataacaaaggtggtgttgctccagctcagccccaggggacacagatgcactttgggggtgagggcaggtaatgactccatcgcaccctcagttcagctggacagaggctcaggtgaccccagccttcactgtctcccgctctccaggagcttatcttcgccccatctcccaaataagtgggcccttgtgctgtgaggaagaccaaagcctcagggaagataagagatatggagatgggagggggaggacaaggggcagagagtagggtctagctggctatctctggccttactaacacccccctggaggcatgccccttttctccagcacacaagcacattggggcacctggaaatattggttccaggctcctgttctctggacttcagatcctgggggagcccctcccccccctgaatccctggcttagctaccttcctgcctgtgcacctaaaaacctcaggtcagaactaggaaaagagttttgtttttatttttttgaaatggagtctcgttctgtcgcccaggctgaggtgcagtagtgcaatctccgctcactacaacctccactccctggggctcaagcgatcctcccacctcagccgccgaagtagctgggactataggtgtgtaccatcacacctggctaatttttgtattttttgtagacacagggtttcgccatgttgcccaggctggtcttgaattcctgagctcaagcaacctgccggcctcggcctcccaaagtactgggattacacgcagaaggcaccatgcccaggctagatgtgtcttatcccaatcctttggcaggcatgcagctccacaggcgatttcttcaagcagctgaagtgtttagccctcctgggttaagagccagataaggagaaatccctttcctaggtttggaatgtgttgtgaaaaaaaagagaaatccctggctcctggagctggtgggagacaagattaagcaaacctcccctgacatgtatccctttgaccccaagctctgcctcctccctgaccacccatgccctttcctttaacttctcaaacagataccagggcctaaactgctttacctcccctcctactgagtcaggttaggtggtgggaggtcacccatttccgagttaaaccaatgcaatatgagtaaaacaaagtcatgtgggtatgtctggggtagagagaggggtagcaagttcatgtgtcctccttggtcacatatctcccaaagctccgatccctgccatgggaagtggacaggaaacatgaggtcatgacctgcaggcatctttactgcagctctgccggcctggagggggagagggggaggaagaagtatgcgctgcacatttctgaggctactgcatttgctttcaaggcagaaatcttgctctgagcagtcagcggctccagtttgggcccgataaggaagttctccgtggcctccctcaggcagagcagggaggaggctgacattgccagtctcttctggggcccaaggcaggttgcaggagatccaatcccatagacagctctgggcctcttgcatttgag

SEQ ID NO: 173197 - DNA, 1560 bp, Homo sapiens
  Payload ID: 14040
  Gene Symbol: RAB37
  Gene Name: RAB37, member RAS oncogene family
  Uniprot ID: Q96AX2
  ENST ID: ENST00000402449
  CDS Start-End: 447-1097
gttcgctcgggatcaggaacggtgagctcctgggaccgcaatgccctgagaacgcagccgggtgctgagcctccggagtccggtagctgaatgaaatacgcagggatcaccagccggacccaaatcttgcgtccctgccagcatcctggagtcctaagaggcagggattggagcggacaggatctcagaactctggtcccgggcgcacaacggcggagtcgctgttcctggtgctgaaacgctcagtcctggaagaacgtggccgcctgcccgcctggtaccgcgccgcggccgctgcggggaactgtccagtgctgaaaacggatgcggcccggcccgcagagctcagacccaagcctgccgcacccagcggagctcgaaccgagctcctggaagcgctgacgcagagcgcagggagagccggagcggcgagctccaagcctggcatggacctgcagagacccgattcctaccagggaggagctggccctgacttcaacgaccacgtcctgcataagaccatcctggtgggtgacagtggtgtgggaaagacgtctctgctggttcagttcgatcagggcaagttcatccccggctccttctcggccactgtgggcatcggattcacgaacaaggtggtgactgtggatggcgtgagagtgaagctgcagatctgggacaccgctgggcaggaacggttccgaagcgtcacccatgcttattacagagatgctcaggccttgcttctgctgtatgacatcaccaacaaatcttctttcgacaacatcagggcctggctcactgagattcatgagtatgcccagagggacgtggtgatcatgctgctaggcaacaaggcggatatgagcagcgaaagagtgatccgttccgaagacggagagaccttggccagggagtacggtgttcccttcctggagaccagcgccaagactggcatgaatgtggagttagcctttctggccatcgccaaggaactgaaataccgggccgggcatcaggcggatgagcccagcttccagatccgagactatgtagagtcccagaagaagcgctccagctgctgctccttcatgtgaatcccagggggcagagaggaggctctggaggcacacaggatgcagccttccccctcccaggcctggcttattccaagaggctgagccaatggggagaaagatggaggactcactgcacagccgcttcctagcagggagctatactccaactcctacttgagttcctgcggtctccccgcatccacagggagggtaaaacacttagcttttattttaatagtacataatttaataccaaaaaaggcgcctggatccccaaaaaaccgaggctgggagctagtggcccttttgctttctaggacttggggggccggccctccctcctaagcataacaaaggtggtgttgctccagctcagccccaggggacacagatgcactttgggggtgagggcaggtaatgactccatcgcaccctcagttcagctggacagaggctcaggtgaccccagccttcactgtct

SEQ ID NO: 173198 - DNA, 1494 bp, Homo sapiens
  Payload ID: 14040
  Gene Symbol: RAB37
  Gene Name: RAB37, member RAS oncogene family
  ENST ID: ENST00000528438
  CDS Start-End: 123-713
aaagctctcccctggtgggacattctgggcacaaccaacaggccgggggaaatgagaggtgatccatactaaagggtcaaagtccccgcaccaggcagaggccccaaaacaccgcagcgtacatgtgctgcaaggtgatgcttctgggagacacaggcgtcggcaaaacatgtttcctgatccaattcaaagacggggccttcctgtccggaaccttcatagccaccgtcggcatagacttcaggaacaaggtggtgactgtggatggcgtgagagtgaagctgcagatctgggacaccgctgggcaggaacggttccgaagcgtcacccatgcttattacagagatgctcaggccttgcttctgctgtatgacatcaccaacaaatcttctttcgacaacatcagggcctggctcactgagattcatgagtatgcccagagggacgtggtgatcatgctgctaggcaacaaggcggatatgagcagcgaaagagtgatccgttccgaagacggagagaccttggccagggagtacggtgttcccttcctggagaccagcgccaagactggcatgaatgtggagttagcctttctggccatcgccaaggaactgaaataccgggccgggcatcaggcggatgagcccagcttccagatccgagactatgtagagtcccagaagaagcgctccagctgctgctccttcatgtgaatcccagggggcagagaggaggctctggaggcacacaggatgcagccttccccctcccaggcctggcttattccaagaggctgagccaatggggagaaagatggaggactcactgcacagccgcttcctagcagggagctatactccaactcctacttgagttcctgcggtctccccgcatccacagggagggtaaaacacttagcttttattttaatagtacataatttaataccaaaaaaggcgcctggatccccaaaaaaccgaggctgggagctagtggcccttttgctttctaggacttggggggccggccctccctcctaagcataacaaaggtggtgttgctccagctcagccccaggggacacagatgcactttgggggtgagggcaggtaatgactccatcgcaccctcagttcagctggacagaggctcaggtgaccccagccttcactgtctcccgctctccaggagcttatcttcgccccatctcccaaataagtgggcccttgtgctgtgaggaagaccaaagcctcagggaagataagagatatggagatgggagggggaggacaaggggcagagagtagggtctagctggctatctctggccttactaacacccccctggaggcatgccccttttctccagcacacaagcacattggggcacctggaaatattggttccaggctcctgttctctggacttcagatcctgggggagcccctcccccccctgaatccctggcttagctaccttcctgcctgtgcacct

SEQ ID NO: 173199 - DNA, 1654 bp, Homo sapiens
  Payload ID: 14040
  Gene Symbol: RAB37
  Gene Name: RAB37, member RAS oncogene family
  Uniprot ID: Q96AX2
  ENST ID: ENST00000481224
  CDS Start-End: 3-674
acatgacgggcacgccaggcgccgttgccacccgggatggcgaggcccccgagcgctccccgccctgcagtccgagctacgacctcacgggcaaggtgatgcttctgggagacacaggcgtcggcaaaacatgtttcctgatccaattcaaagacggggccttcctgtccggaaccttcatagccaccgtcggcatagacttcaggaacaaggtggtgactgtggatggcgtgagagtgaagctgcagatctgggacaccgctgggcaggaacggttccgaagcgtcacccatgcttattacagagatgctcaggccttgcttctgctgtatgacatcaccaacaaatcttctttcgacaacatcagggcctggctcactgagattcatgagtatgcccagagggacgtggtgatcatgctgctaggcaacaaggcggatatgagcagcgaaagagtgatccgttccgaagacggagagaccttggccagggagtacggtgttcccttcctggagaccagcgccaagactggcatgaatgtggagttagcctttctggccatcgccaaggaactgaaataccgggccgggcatcaggcggatgagcccagcttccagatccgagactatgtagagtcccagaagaagcgctccagctgctgctccttcatgtgaatcccagggggcagagaggaggctctggaggcacacaggatgcagccttccccctcccaggcctggcttattccaagaggctggtcttgaattcctgagctcaagcaacctgccggcctcggcctcccaaagtactgggattacacgcagaaggcaccatgcccaggctagatgtgtcttatcccaatcctttggcaggcatgcagctccacaggcgatttcttcaagcagctgaagtgtttagccctcctgggttaagagccagataaggagaaatccctttcctaggtttggaatgtgttgtgaaaaaaaagagaaatccctggctcctggagctggtgggagacaagattaagcaaacctcccctgacatgtatccctttgaccccaagctctgcctcctccctgaccacccatgccctttcctttaacttctcaaacagataccagggcctaaactgctttacctcccctcctactgagtcaggttaggtggtgggaggtcacccatttccgagttaaaccaatgcaatatgagtaaaacaaagtcatgtgggtatgtctggggtagagagaggggtagcaagttcatgtgtcctccttggtcacatatctcccaaagctccgatccctgccatgggaagtggacaggaaacatgaggtcatgacctgcaggcatctttactgcagctctgccggcctggagggggagagggggaggaagaagtatgcgctgcacatttctgaggctactgcatttgctttcaaggcagaaatcttgctctgagcagtcagcggctccagtttgggcccgataaggaagttctccgtggcctccctcaggcagagcagggaggaggctgacattgccagtctcttctggggcccaaggcaggttgcaggagatccaatcccatagacagctctgggcctcttgcatttgagtttttcagaattaaactgcagtattttggaaagca

SEQ ID NO: 173200 - DNA, 1653 bp, Homo sapiens
  Payload ID: 14040
  Gene Symbol: RAB37
  Gene Name: RAB37, member RAS oncogene family
  Uniprot ID: Q96AX2
  ENST ID: ENST00000613645
  CDS Start-End: 3-674
acatgacgggcacgccaggcgccgttgccacccgggatggcgaggcccccgagcgctccccgccctgcagtccgagctacgacctcacgggcaaggtgatgcttctgggagacacaggcgtcggcaaaacatgtttcctgatccaattcaaagacggggccttcctgtccggaaccttcatagccaccgtcggcatagacttcaggaacaaggtggtgactgtggatggcgtgagagtgaagctgcagatctgggacaccgctgggcaggaacggttccgaagcgtcacccatgcttattacagagatgctcaggccttgcttctgctgtatgacatcaccaacaaatcttctttcgacaacatcagggcctggctcactgagattcatgagtatgcccagagggacgtggtgatcatgctgctaggcaacaaggcggatatgagcagcgaaagagtgatccgttccgaagacggagagaccttggccagggagtacggtgttcccttcctggagaccagcgccaagactggcatgaatgtggagttagcctttctggccatcgccaaggaactgaaataccgggccgggcatcaggcggatgagcccagcttccagatccgagactatgtagagtcccagaagaagcgctccagctgctgctccttcatgtgaatcccagggggcagagaggaggctctggaggcacacaggatgcagccttccccctcccaggcctggcttattccaagaggctggtcttgaattcctgagctcaagcaacctgccggcctcggcctcccaaagtactgggattacacgcagaaggcaccatgcccaggctagatgtgtcttatcccaatcctttggcaggcatgcagctccacaggcgatttcttcaagcagctgaagtgtttagccctcctgggttaagagccagataaggagaaatccctttcctaggtttggaatgtgttgtgaaaaaaaagagaaatccctggctcctggagctggtgggagacaagattaagcaaacctcccctgacatgtatccctttgaccccaagctctgcctcctccctgaccacccatgccctttcctttaacttctcaaacagataccagggcctaaactgctttacctcccctcctactgagtcaggttaggtggtgggaggtcacccatttccgagttaaaccaatgcaatatgagtaaaacaaagtcatgtgggtatgtctggggtagagagaggggtagcaagttcatgtgtcctccttggtcacatatctcccaaagctccgatccctgccatgggaagtggacaggaaacatgaggtcatgacctgcaggcatctttactgcagctctgccggcctggagggggagagggggaggaagaagtatgcgctgcacatttctgaggctactgcatttgctttcaaggcagaaatcttgctctgagcagtcagcggctccagtttgggcccgataaggaagttctccgtggcctccctcaggcagagcagggaggaggctgacattgccagtctcttctggggcccaaggcaggttgcaggagatccaatcccatagacagctctgggcctcttgcatttgagtttttcagaattaaactgcagtattttggaaagc

SEQ ID NO: 173201 - DNA, 1465 bp, Homo sapiens
  Payload ID: 14041
  Gene Symbol: RAB38
  Gene Name: RAB38, member RAS oncogene family
  Uniprot ID: P57729
  ENST ID: ENST00000243662
  CDS Start-End: 84-719
ttgcgctccccaagtctctctcgtgcgcagagcccaggctgcgcttccctggtcaggcacggcacgtctggccggccgccaggatgcaggccccgcacaaggagcacctgtacaagttgctggtgattggcgacctgggcgtggggaagaccagtatcatcaagcgctacgtgcaccagaacttctcttcgcactaccgggccacaatcggcgtggacttcgcgctcaaggtgctccactgggacccggagactgtggtgcgcctgcagctctgggatatcgcaggtcaagaaagatttggaaacatgacgagggtctattaccgagaagctatgggtgcatttattgtcttcgatgtcaccaggccagccacatttgaagcagtggcaaagtggaaaaatgatttggactccaagttaagtctccctaatggcaaaccggtttcagtggttttgttggccaacaaatgtgaccaggggaaggatgtgctcatgaacaatggcctcaagatggaccagttctgcaaggagcacggtttcgtaggatggtttgaaacatcagcaaaggaaaatataaacattgatgaagcctccagatgcctggtgaaacacatacttgcaaatgagtgtgacctaatggagtctattgagccggacgtcgtgaagccccatctcacatcaaccaaggttgccagctgctctggctgtgccaaatcctagtaggcacctttgctggtgtctggtaggaatgacctcattgttccacaaattgtgcctctatttttaccattttgggtaaacgtcaggatagagataccacatgtggcaagccaaagatctatgcctctgttttttcagtgagagagaaatagcaaatgttctttctatgctttcctcaccatcatcacagtgtttacaaacttttgaaaatatttagtctgttacaaacttctgtcatgtagctgaccaaaatcctgcagggccacagtcggcactgttatttgcttcttttaatcagcaaaggcctcaagtcttaaaataaaaggggagaagaacaaactagctgtcaagtcaaggactggctttcaccttgccctggtgtctttttccagatttcagtatattctctgatggcctgacaggcctattaagtagatgtgatattttctcccaagatgacctccattctcggcagacctaagagttgcctctgagttagctctttggaatcgtgaacacaggtgtgctatattgtccttgtcctaactgtcacttgccatggcctgaatgttggcttaactgaatattgtatgaaaagacatgcctccatatgtgcctttctgttagctttctctgactcaagctgtggggctcctctatacatgctatacatgtaatatatattatatatatttttgcaagtgaacaataaaacattaaaagatgctgtttccctatttatgaaa

SEQ ID NO: 173202 - DNA, 1007 bp, Homo sapiens
  Payload ID: 14041
  Gene Symbol: RAB38
  Gene Name: RAB38, member RAS oncogene family
  ENST ID: ENST00000526372
  CDS Start-End: 1-631
ccaggctgcgcttccctggtcaggcacggcacgtctggccggccgccaggatgcaggccccgcacaaggagcacctgtacaagttgctggtgattggcgacctgggcgtggggaagaccagtatcatcaagcgctacgtgcaccagaacttctcttcgcactaccgggccacaatcggcgtggacttcgcgctcaaggtcaagaaagatttggaaacatgacgagggtctattaccgagaagctatgggtgcatttattgtcttcgatgtcaccaggccagccacatttgaagcagtggcaaagtggaaaaatgatttggactccaagttaagtctccctaatggcaaaccggtttcagtggttttgttggccaacaaatgtgaccaggggaaggatgtgctcatgaacaatggcctcaagatggaccagttctgcaaggagcacggtttcgtaggatggtttgaaacatcagcaaaggaaaatataaacattgatgaagcctccagatgcctggtgaaacacatacttgcaaatgagtgtgacctaatggagtctattgagccggacgtcgtgaagccccatctcacatcaaccaaggttgccagctgctctggctgtgccaaatcctagtaggcacctttgctggtgtctggtaggaatgacctcattgttccacaaattgtgcctctatttttaccattttgggtaaacgtcaggatagagataccacatgtggcaagccaaagatctatgcctctgttttttcagtgagagagaaatagcaaatgttctttctatgctttcctcaccatcatcacagtgtttacaaacttttgaaaatatttagtctgttacaaacttctgtcatgtagctgaccaaaatcctgcagggccacagtcggcactgttatttgcttcttttaatcagcaaaggcctcaagtcttaaaataaaaggggagaagaacaaactagctgtcaagtcaaggactggctttcaccttgccc

SEQ ID NO: 173203 - DNA, 928 bp, Homo sapiens
  Payload ID: 14041
  Gene Symbol: RAB38
  Gene Name: RAB38, member RAS oncogene family
  ENST ID: ENST00000531138
  CDS Start-End: 1-268
caggctgcgcttccctggtcaggcacggcacgtctggccggccgccaggatgcaggccccgcacaaggagcacctgtacaagttgctggtgattggcgacctgggcgtggggaagaccagtatcatcaagcgctacgtgcaccagaacttctcttcgcactaccgggccacaatcggcgtggacttcgcgctcaaggtgctccactgggacccggagactgtggtgcgcctgcagctctgggatatcgcaggaaaatataaacattgatgaagcctccagatgcctggtgaaacacatacttgcaaatgagtgtgacctaatggagtctattgagccggacgtcgtgaagccccatctcacatcaaccaaggttgccagctgctctggctgtgccaaatcctagtaggcacctttgctggtgtctggtaggaatgacctcattgttccacaaattgtgcctctatttttaccattttgggtaaacgtcaggatagagataccacatgtggcaagccaaagatctatgcctctgttttttcagtgagagagaaatagcaaatgttctttctatgctttcctcaccatcatcacagtgtttacaaacttttgaaaatatttagtctgttacaaacttctgtcatgtagctgaccaaaatcctgcagggccacagtcggcactgttatttgcttcttttaatcagcaaaggcctcaagtcttaaaataaaaggggagaagaacaaactagctgtcaagtcaaggactggctttcaccttgccctggtgtctttttccagatttcagtatattctctgatggcctgacaggcctattaagtagatgtgatattttctcccaagatgacctccattctcggcagacctaagagttgcctctgagttagctctttggaatcgtgaacacaggtg

SEQ ID NO: 173204 - DNA, 1830 bp, Homo sapiens
  Payload ID: 14042
  Gene Symbol: RAB39A
  Gene Name: RAB39A, member RAS oncogene family
  Uniprot ID: Q14964
  ENST ID: ENST00000320578
  CDS Start-End: 67-720
acagttcccgccgccgaacttagcccgcgggtggggcggcccgggagccagcggggcacgtgagcgatggagaccatctggatctaccagttccgcctcatcgtgatcggggactccaccgtgggcaagtcctgcctcctgcaccgcttcacccagggccgcttccccgggctgcgctcccccgcctgcgaccccaccgtcggcgtggacttcttctcccgcctgctggagatcgagccgggcaagaggatcaagctacagctctgggacacggcgggacaggagcggttcagatcaataacccgatcttattaccgcaactcagttggtggatttttagtatttgacattactaaccgacgatcttttgaacatgtgaaagattggctagaagaagcaaaaatgtatgtacagccatttcggattgtatttctgctagtgggacataaatgtgatttagcttcacaacgtcaagttacaagggaagaagctgaaaaactgtcagcagactgtggaatgaagtatatagaaacctcagcaaaggatgctacaaatgttgaagaatccttcacaatcttgacgagagacatatatgaacttattaaaaagggagaaatttgtattcaggatggctgggaaggggttaaaagtggttttgttccaaatactgtgcattcttctgaggaagcagtaaagcccaggaaagaatgcttctgctgacttcaaacatgctgaagaactaacaggaacagattgggtgtcagttcaggataaataccaacattaacagcagaatgatgcaatgaaagaatttaaaaaggttacaaacccacaccaatactattttataaggtatttgattcagagcatgatgcttacttgttacactactagattgggtattttgctaaattaccaagcaaagcagacaatctttttcttgaaattacctccattcttactttgttagcatacgctgaccttagtgtccagatatgtcactattactcatttttcttgacagttcaaatggatttttgtgcatatatagtcaattgaaaagattttatcaggaattacattctcttgagttaattaatattgaatagcaaaatgcatttaaatatgcactgttcacctgcagagtaaacaatctcagaagtatcgactaggacgtaaatagcagttccttatataaagtaccaggttttttccccattctctggaaatgtttgtcctcccttaattttgcctcaacacaagaaaataagttttatgtccatttttgttccctaatttattgcttctaaaaatgcattatgttttacaaagatatctaaggatccaagcaaactactttaagcaaatatttgtaaaattaaaaacggaggaccgctcaccaaatgtttgaaatgttgctttttttttttgagacagggtcttgttttgtcacccaggctggagtgcagtggggcaatcttggctccctgcaacctctgcttcctgggttcaggtgattgtcagtaccttacctcagcctcctgagtagctggaactgcagatgtgcgccaccatgcccggctaatttttgtattataagtagacacagggtttcataatgttccccaggctggtctccaactcctcgcctcaagcaattcgcccccctcggcctccaaagtgctggaattataggcatgagctgccgtgcctggactatcagcagcacatgttttgctgttacggtgtactgttcgtatttagacaagaagaacaaaatttatttatgtattgacattttcaaagaaagtaaatgcaatttactttgaa

SEQ ID NO: 173205 - DNA, 3505 bp, Homo sapiens
  Payload ID: 14043
  Gene Symbol: RAB39B
  Gene Name: RAB39B, member RAS oncogene family
  Uniprot ID: Q96DA2
  ENST ID: ENST00000369454
  CDS Start-End: 302-943
ctcttacagatagtgcggcggcccaggcgtcgcgtctacgcgggggattacagtaacccggttgtcagtgatgagtcagagtgcgtggtgctgatgctgctgccatttcatcacctttgcgagcgcagcatccatccctccgctctcccggcgcctgggcctacccagcttcgggctcccaggccagcgatgcgctcgcggctgagctagatcctgccgagccgcgctctctgaggcgtcggcggggcgccccctcccgccgtccccggtccgggccaaggagacctgcagagccgcggccatggaggccatctggctgtaccagttccggctcattgtcatcggggattccacagtgggcaagtcctgcctgatccgccgcttcaccgagggtcgctttgcccaggtttctgaccccaccgtgggggtggattttttctcccgcttggtggagatcgagccaggaaaacgcatcaagctccagatctgggataccgcgggtcaagagaggttcagatccatcactcgcgcctactacaggaactcagtaggtggtcttctcttatttgacattaccaaccgcaggtccttccagaatgtccatgagtggttagaagagaccaaagtacacgttcagccctaccaaattgtatttgttctggtgggtcacaagtgtgacctggatacacagaggcaagtgactcgccacgaggccgagaaactggctgctgcatacggcatgaagtacattgaaacgtcagcccgagatgccattaatgtggagaaagccttcacagacctgacaagagacatatatgagctggttaaaaggggggagattacaatccaggagggctgggaaggggtgaagagtggatttgtaccaaatgtggttcactcttcagaagaggttgtcaaatcagagaggagatgtttgtgctagtcagttcttttatttccaaaacatgctctcctacttgaactgaaaagtaagagaaataaatagaatctttgtgtaactgatgagaactcaacctccatttggataccaagtgagcctccctctcagggggactctgacagactcgtgtgcgggtggatgggggtgcctgagtgctgtgaccaagggactgaattgctgacatgggccaggccaggcactgttttgtggcccatgctaggcagtggctgctccatgagccctttgtggaccacatgttaaaggcctggggtttaggaagctaagtcccaggaaaacatacctacagacaggacaactgttccttggtatttgagctcacttataggccatgaacataaagaaatacataaaggggaaaaaagtttcacaatggggacaattagcataactaaacaaagattatgagctctacttattccgtgagaataccctgcaccaaaggtgtttgctgggtttggttaaaaggtaccaattagcttttaacagctttctgtaaaatgaggaacacagaccaaaaggtctggtgttcaagtaaaaatgatgtgactatggaaaggaaggcaatcgacacagttattagcacatttcagaaaatgaacacccttgtgatagaattaccagctgtatgaaacaaattgtcccatgcaaattaccctataactaggaaagagacactataacccaaatgccataccccctttttcctttgaccatgcctggggtttcaatgccttggcacctgcaatctggaagtaaacagtctgcttgcttcttcaggcacgtgacagtgacaacacagtgactgcctctgaaaagagccctgaggcaaacactctctcctgctgaacaggaggcactgtaacccttacaaacagcttacagttacttgggctacttatttgatcatcataacaggcctacgaggtttttgccccattttacagaatagtaaactaagagccatgaaaatcacttggccagggtcaaggactcgtgactcctagctcttttcactgcatcatactgctgtcagatgaataaatgattatgaatttgtttacttgggaagagatatgactataaataaatgttctctacatgttaggatatgttttccttattgattacaactcagctataatcctgagggaacatgggaaggaatcaaaggtaaagcccattcaggcattattgacaagagggctttaaacaagtgaataattgcacaactaaaaagacattagaactgtgtgggctataagtgttcttatcactgagacacagtggatttttattgaaaggaaccacgtacagcaatgcggagtgggatagggataaaatacccaccccaaaatgaccttggccacctgtctgccatatacgtacactgagttcctgtctacccaagagagtcagcccttaattctcaggtgaacaaacagctaactgcatcagcaaattggaatggctggcttgaagtttccattattttcttgaagagaggtgatgctttaaattactttttggattgtagccagttcagctaggcaaaagccatacttttcacaattaaaaaaaaaaactattctgactagagtcaggtttctcatatccattgtgataggaaggcctaagaatggcaaatcgctttgagatataatattgaacttcagtatgaatgtgaccgaatctgaaactttgggaatttgctttagccagaataaagaaaccaaatcatgaaaattatggaagactattctgccacctgtgccccaagttggatgagcaaaccactttggatcagttcacagcattaactacaagtgaactgatcatcttctctatattcatttcacaagagctggcttaggtggggtaattaaattgccaccttcgtggttgtaaaagacaaacaaaacatggcaaatttcattaacacaaaatttcatcaactgctatactgaattatgtttagaagattctgaaagcaagattatccagtgggtaaatgagagtcgactggattctgtcagttcaaaaaaggaaagaaacaaaacttccctacaattttcttcactaaaatttattatatgtacagtattcccactcctggcattttctggcaggtttaaaaatattcagcataaatccagcagaggtggctgagcttaattgcttaaataagttctagaaaatttaaaaatcattttagtagaattcagtaccattgtcactgcaataagtgggttttagaaaataagtgtgaaaagaatcaggtgttaatataatactaaggataaagctttagaagctattttactacataggtaaagaaaagataaactaacttgtaacaaagaccacaactgcatgttggattagattgtctcatatttcagaataaaatgtactgtatacttttcctcactttgttgtgcactgtaatgaaatgtgaaaaatgctttatttagctgtatgtgaatgaaaatatgcttgtatttagtaaaatgattgattatgtga

SEQ ID NO: 173206 - DNA, 3690 bp, Homo sapiens
  Payload ID: 14044
  Gene Symbol: RAB3IP
  Gene Name: RAB3A interacting protein
  Uniprot ID: Q96QF0
  ENST ID: ENST00000247833
  CDS Start-End: 377-1759
gggccagggccgtgacacctgcgacgagccccgcctggcgccagggggcgcggaagcgcgtccgcccccaggccccatgccgggctcgccccgcccctgccggccacacccccctaccccgccctccctccgtgaggaccggccgctcccggctcccggcccccggccccgcttccggcgcaggcgcagtcccgcgttccctcggcggctgccggcgtagtgagcccgccgccgtggagtgtagcggaaagggctcgccgtcctcctccgtttctcgctgcttcgggacgcgctctctgcggctctgtgagcgcccctgagcgccggcagcggccgcggtgggttcttcaggttatcttatgatgaggcttttgctatggctaatgatcccttggaaggcttccatgaagtaaaccttgcttcacctacttctccggaccttcttggtgtgtatgaatcaggaactcaagagcagactacctcaccaagtgtcatctaccggccacacccttcagctttatcctctgtacctatccaggcaaatgcattagatgtttctgaacttcctacacaacccgtgtattcatcccccagacgtttaaattgtgcggaaatatctagtatcagctttcatgttacagacccagccccttgctctacctctggagtcacagctggattaactaaattaactacaagaaaggacaactataatgcagagagagagtttttacagggtgctactataacagaggcttgcgatggcagtgatgatatttttgggttgagtactgatagtctgtctcgtttacgaagcccatctgttttggaagttagagaaaagggctatgaacgattaaaagaagaactcgcaaaagctcagagggaactgaagttaaaagatgaagaatgtgagaggctttcaaaagtgcgagatcaacttggacaggaattggaagaactcacagctagtctatttgaggaagctcataaaatggtgagagaagcaaatatcaagcaggcaacagcagaaaaacagctaaaagaagcacaaggaaaaattgatgtacttcaagctgaagtagctgcattgaagacacttgtattgtccagttctccaacatcacctacgcaggagcctttgccaggtggaaagacaccttttaaaaaggggcatacaagaaataaaagcacaagcagtgctatgagtggcagtcatcaggacctcagtgtgatacagccaattgtaaaagactgcaaagaggctgacttatccttgtataatgaattccgattgtggaaggatgagcccacaatggacaggacgtgtcctttcttagacaaaatctaccaggaagatatctttccatgtttaacattctcaaaaagtgagttggcttcagctgttctggaggctgtggaaaacaatactctaagcattgaaccagtgggattacaacctatccggtttgtgaaagcttctgcagttgaatgcggaggaccaaaaaaatgtgctctcactggccagagtaagtcctgtaaacacagaattaaattaggggactcaagcaactattattatatttctcctttttgcagatacaggatcacttctgtatgtaacttttttacatacattcgatacattcagcagggactcgtgaaacagcaggatgttgatcagatgttttgggaggttatgcagttgagaaaagagatgtcattggcaaagctgggttatttcaaagaggaactctgatgctctgcgtgggaccatgcctgaactccccgaataactgaaaaatggctgaatatttttatggttacttgatatttatttccaaggagtgagcctaagacttttttccccttttgcaaattgctctaagaagtaccatgatttcttttaaactgatctatgctgtgtttgcttattctttagttgaacacactatgaagaattccaggtgtactagtgaatgtaatttatagttgccaaaaaaaaaaaaaacctgaaataaataaatgttagattgaatgtgtgtacattttctcttctagctctgacatggcatttagggttagcagaatgtattaaatagtaattttcaaactacacagtagcttccttccttgtgagaggcaagaaagaagtctgagtggatagtactcactttccaaggcccccacctctagaatggctttatttttatctgttttctatattgggtttcaaaaaagattttatttgaagaaatacttctgctgctacaaagtttgaaagttactattttaattattctgctctctgtaactgaaagaatccctttattttggttattcattaaaatataatagaaggcagtcagattttatcccagagatgtattcctgagtgtcttgatatagtgtattcatgttttatatgtgttgaccactatattgtcattggagggacatagatgtaaatgagtttgacgtgtgtcaaaggggtttaaaggggtgtggattgaatgaatggtacgtgcgaagtatatgctgattatagaaccacttgatctctgcattccaaattgtaaaactgactcaactggagaaattataacaaagaggtttgtggtagacatgtaataagtatagaaaagcaaaaagaaaagagaaactgctttagtttctgtttagagaaagctgctgttaatatttttggatagtagcctttcagctttcagatattttctacttacatatgcatatttttgaaacaaaaagtaggctttttttttgctttttaaacctaaacattaaatatattttcccttgggtaaacctacacatcctaatccctgtttatagaattttaacataatttaattgtgtttggagatgaggtggttttcagtttatttttcatattataatgctgtgacgagtatccttatctgtacacttctgaacattgtggagttctttcatgtggatgcctggagataaaattgtgtcgagatatatatgtatttttaaatgtttgatctgcattgctagattgccatccagaaaagttaatcaatttgtattcacagcagcagtgtacaagagggctggttttctgaagataacatttttttcagtcctgttcagaggtttggtcaatcttacctgtagatgacttcagccaccaggctggatgggagcccacagacaaaaggacattggtgtatgttatggtgaaaaccatcagtaccatgcctagctcaagaatgtgaaattgaacctgaaaaaaactttgaacctacaattttatgttctgaaaatagttattctaatgtgagggcattaataagaatatgtaccatcaaagcttcagaagattttccgtacaaactaaaatcacttttggagaaagtacctaaataaaaagagaaacaaatccaggagatactgtacggtttgaaagaaaggtaatcaaatactcagaaaaagtttgttgatgacttaaaaaggataaataaaaagtaagactaaagaaaatcagtatacccattaataataaatctttagtaatctataaggggaagaatgcttttcaaccttatacactagaagcatgctctttaaaattaatgcaacaggatgacgacttgatgtagaaactatatgtggaattatagattaaaatgtgattgaaacata

SEQ ID NO: 173207 - DNA, 2055 bp, Homo sapiens
  Payload ID: 14044
  Gene Symbol: RAB3IP
  Gene Name: RAB3A interacting protein
  Uniprot ID: Q96QF0
  ENST ID: ENST00000362025
  CDS Start-End: 448-1683
ggttacctggcggcgggcgggcgcggccgggagcggagggccgcggtcgcgaagaggatgaagagagagttcccgaacaagtcggaagcagctcacaacaccggacgccgcgcggcagggctgtggacctggggtggtttcgtgtcccagtcttaggaaactacgcgcgaggcaccgtgctgaggcgtagaggtcaccctcgggaggtttcggtgaaacctggtgggaaattccgggcaggcgcccggagtcgcgcccaagtaggcagctccgtgccgccagacttgtgttcgggggagttgagacgaactgcacgggtgggattgcatggctctgccctcccagcgttgacaactcgccccgaccgcccaggaagcgcgagcttactggctccagaagtgatgatgctgggtggaagtcgcagcatgtgaagagttgccggttgttatgggattaaaaaagatgaaagggttatcttatgatgaggcttttgctatggctaatgatcccttggaaggcttccatgaagtaaaccttgcttcacctacttctccggaccttcttggtgtgtatgaatcaggaactcaagagcagactacctcaccaagtgtcatctaccggccacacccttcagctttatcctctgtacctatccaggcaaatgcattagatgtttctgaacttcctacacaacccgtgtattcatcccccagacgtttaaattgtgcggaaatatctagtatcagctttcatgttacagacccagccccttgctctacctctggagtcacagctggattaactaaattaactacaagaaaggacaactataatgcagagagagagtttttacagggtgctactataacagaggcttgcgatggcagtgatgatatttttgggttgagtactgatagtctgtctcgtttacgaagcccatctgttttggaagttagagaaaagggctatgaacgattaaaagaagaactcgcaaaagctcagagggaactgaagttaaaagatgaagaatgtgagaggctttcaaaagtgcgagatcaacttggacaggaattggaagaactcacagctagtctatttgaggaagctcataaaatggtgagagaagcaaatatcaagcaggcaacagcagaaaaacagctaaaagaagcacaaggaaaaattgatgtacttcaagctgaagtagctgcattgaagacacttgtattgtccagttctccaacatcacctacgcaggagcctttgccaggtggaaagacaccttttaaaaaggggcatacaagaaataaaagcacaagcagtgctatgagtggcagtcatcaggacctcagtgtgatacagccaattgtaaaagactgcaaagaggctgacttatccttgtataatgaattccgattgtggaaggatgagcccacaatggacaggacgtgtcctttcttagacaaaatctaccaggaagatatctttccatgtttaacattctcaaaaagtgagttggcttcagctgttctggaggctgtggaaaacaatactctaagcattgaaccagtgggattacaacctatccggtttgtgaaagcttctgcagttgaatgcggaggaccaaaatcacttctgtatgtaacttttttacatacattcgatacattcagcagggactcgtgaaacagcaggatgttgatcagatgttttgggaggttatgcagttgagaaaagagatgtcattggcaaagctgggttatttcaaagaggaactctgatgctctgcgtgggaccatgcctgaactccccgaataactgaaaaatggctgaatatttttatggttacttgatatttatttccaaggagtgagcctaagacttttttccccttttgcaaattgctctaagaagtaccatgatttcttttaaactgatctatgctgtgtttgcttattctttagttgaacacactatgaagaattccaggtgtactagtgaatgtaatttatagttgccaaaaaaaaaaaaaacctgaaataaataaatgttagattg

SEQ ID NO: 173208 - DNA, 2008 bp, Homo sapiens
  Payload ID: 14044
  Gene Symbol: RAB3IP
  Gene Name: RAB3A interacting protein
  ENST ID: ENST00000378809
  CDS Start-End: 448-1557
ggttacctggcggcgggcgggcgcggccgggagcggagggccgcggtcgcgaagaggatgaagagagagttcccgaacaagtcggaagcagctcacaacaccggacgccgcgcggcagggctgtggacctggggtggtttcgtgtcccagtcttaggaaactacgcgcgaggcaccgtgctgaggcgtagaggtcaccctcgggaggtttcggtgaaacctggtgggaaattccgggcaggcgcccggagtcgcgcccaagtaggcagctccgtgccgccagacttgtgttcgggggagttgagacgaactgcacgggtgggattgcatggctctgccctcccagcgttgacaactcgccccgaccgcccaggaagcgcgagcttactggctccagaagtgatgatgctgggtggaagtcgcagcatgtgaagagttgccggttgttatgggattaaaaaagatgaaagggttatcttatgatgaggcttttgctatggctaatgatcccttggaaggcttccatgaagtaaaccttgcttcacctacttctccggaccttcttggtgtgtatgaatcaggaactcaagagcagactacctcaccaagtgtcatctaccggccacacccttcagctttatcctctgtacctatccaggcaaatgcattagatgtttctgaacttcctacacaacccgtgtattcatcccccagacgtttaaattgtgcggaaatatctagtatcagctttcatgttacagacccagccccttgctctacctctggagtcacagctggattaactaaattaactacaagaaaggacaactataatgcagagagagagtttttacagggtgctactataacagaggcttgcgatggcagtgatgatatttttgggttgagtactgatagtctgtctcgtttacgaagcccatctgttttggaagttagagaaaagggctatgaacgattaaaagaagaactcgcaaaagctcagagggaactgaagttaaaagatgaagaatgtgagaggctttcaaaagtgcgagatcaacttggacaggaattggaagaactcacagctagtctatttgaggaagctcataaaatggtgagagaagcaaatatcaagcaggcaacagcagaaaaacagctaaaagaagcacaaggaaaaattgatgtacttcaagctgaagtagctgcattgaagacacttgtattgtccagttctccaacatcacctacgcaggagcctttgccaggtggaaagacaccttttaaaaaggggcatacaagaaataaaagcacaagcagtgctatgagtggcagtcatcaggacctcagtgtgatacagccaattgtaaaagactgcaaagaggctgacttatccttgtataatgaattccgattgtggaaggatgagcccacaatggacaggacgtgtcctttcttagacaaaatctaccaggaagatatctttccatgtttaacattctcaaaaattggcttcagctgttctggaggctgtggaaaacaatactctaagcattgaaccagtgggattacaacctatccggtttgtgaaagcttctgcagttgaatgcggaggaccaaaatcacttctgtatgtaacttttttacatacattcgatacattcagcagggactcgtgaaacagcaggatgttgatcagatgttttgggaggttatgcagttgagaaaagagatgtcattggcaaagctgggttatttcaaagaggaactctgatgctctgcgtgggaccatgcctgaactccccgaataactgaaaaatggctgaatatttttatggttacttgatatttatttccaaggagtgagcctaagacttttttccccttttgcaaattgctctaagaagtaccatgatttcttttaaactgatctatgctgtgtttgcttattctttagttgaacacactatgaagaattccaggtgtactagtgaatgtaatttatagtt

SEQ ID NO: 173209 - DNA, 2386 bp, Homo sapiens
  Payload ID: 14044
  Gene Symbol: RAB3IP
  Gene Name: RAB3A interacting protein
  Uniprot ID: Q96QF0
  ENST ID: ENST00000378815
  CDS Start-End: 196-1143
aggcgcagtcccgcgttccctcggcggctgccggcgtagtgagcccgccgccgtggagtgtagcggaaagggctcgccgtcctcctccgtttctcgctgcttcgggacgcgctctctgcggctctgtgagcgcccctgagcgccggcagcggccgcggtgggttcttcaggttatcttatgatgaggcttttgctatggctaatgatcccttggaaggcttccatgaagtaaaccttgcttcacctacttctccggaccttcttggtgtgtatgaatcaggaactcaagagcagactacctcaccaagtgtcatctaccggccacacccttcagctttatcctctgtacctatccaggcaaatgcattagatgtttctgaacttcctacacaacccgtgtattcatcccccagacgtttaaattgtgcggaaatatctagtatcagctttcatgttacagacccagccccttgctctacctctggagtcacagctggattaactaaattaactacaagaaaggacaactataatgcagagagagagtttttacagggtgctactataacagaggcttgcgatggcagtgatgatatttttgggttgagtactgatagtctgtctcgtttacgaagcccatctgttttggaagttagagaaaagggctatgaacgattaaaagaagaactcgcaaaagctcagagggaactgaagttaaaagatgaagaatgtgagaggctttcaaaagtgcgagatcaacttggacaggaattggaagaactcacagctagtctatttgaggaagctcataaaatggtgagagaagcaaatatcaagcaggcaacagcagaaaaacagctaaaagaagcacaaggaaaaattgatgtacttcaagctgaagtagctgcattgaagacacttgtattgtccagttctccaacatcacctacgcaggagcctttgccaggtggaaagacaccttttaaaaaggggcatacaagaaataaaagcacaagcagtgctatgagtggcagtcatcaggacctcagtgtgatacagccaattgtaaaagactgcaaagaggtaactcatcaaggactgtcccctctgactctgttgatacttgttagttctcatcactgaggtgtcagttatcatttttgccagcaaaatttttagtacaaaataatgcagtattaagatgggggaggctttatctagagctggctgctttcagggattcttcagttccattttctacctggctgaccttggagtacctgctggaaacttggtaagtttcttaatctcagtatttcattaagggaggaaactgtcatgtgttgtctagaggagagtgggtggctttaatgatctggctagtcaaaatttattgctagagtgcgcttacaaagtatggatataagaaatatgtgaaaataagatgattttcttaaagatcaatacattgcttttatttaaattcagagagaattttatgtcagcaagggagtcctagagttaatttagataattaagcaacaaaaaaatagaaataatggtagccttacaatgacataaggctggaagacattttgctaagtgaaatttcaagttatagtagaacaattagtgtcatttttgatcccaaattaggtttcacagttcagccagtctgttattcagacacttacaactatgtaaggccaccattatcatgtatccataacaattaaaaatttaaaaacgaaataatgggccgggcatggtggctcatgcctgtaatctcagcactttgggaggccaaggccggaggatcacctgaggttgggagttcgagaccagcctgaccaacatggagaaaccctatctgtactaaaaatataaaattagctgggcatggtatctcatgcttataatcccagctactcaggaggctgaggcaggagaatcccttgaacctgggaggcggaggttgcggtcagctgagattgcgccatcacactccagcctgggcaacaagagcgaaactctgtctcaaaatcataataataataatagtcttattttaaaagatatgttacaaagataactgaaataatatataaatattttgagctgtttagagtaaaaatttttaatcattgtatactgtgagaatgcatttctaagaggattgatcaataatttatgaagctttcccatttcttcttagaagccatcttttacattgttaaattcaagtccatcattaatcttgaagaaatgtgtgtgcttgttaaatttttgtatggaagccaggagtttattaaatggaataaccaatgttaacctgttttaattgaattgcattttgacgaattatcaataaaaatgatgctggtaa

SEQ ID NO: 173210 - DNA, 1755 bp, Homo sapiens
  Payload ID: 14044
  Gene Symbol: RAB3IP
  Gene Name: RAB3A interacting protein
  Uniprot ID: Q96QF0
  ENST ID: ENST00000483530
  CDS Start-End: 196-1383
aggcgcagtcccgcgttccctcggcggctgccggcgtagtgagcccgccgccgtggagtgtagcggaaagggctcgccgtcctcctccgtttctcgctgcttcgggacgcgctctctgcggctctgtgagcgcccctgagcgccggcagcggccgcggtgggttcttcaggttatcttatgatgaggcttttgctatggctaatgatcccttggaaggcttccatgaagtaaaccttgcttcacctacttctccggaccttcttggtgtgtatgaatcaggaactcaagagcagactacctcaccaagtgtcatctaccggccacacccttcagctttatcctctgtacctatccaggcaaatgcattagatgtttctgaacttcctacacaacccgtgtattcatcccccagacgtttaaattgtgcggaaatatctagtatcagctttcatgttacagacccagccccttgctctacctctggagtcacagctggattaactaaattaactacaagaaaggacaactataatgcagagagagagtttttacagggtgctactataacagaggcttgcgatggcagtgatgatatttttgggttgagtactgatagtctgtctcgtttacgaagcccatctgttttggaagttagagaaaagggctatgaacgattaaaagaagaactcgcaaaagctcagagggaactgaagttaaaagatgaagaatgtgagaggctttcaaaagtgcgagatcaacttggacaggaattggaagaactcacagctagtctatttgaggaagctcataaaatggtgagagaagcaaatatcaagcaggcaacagcagaaaaacagctaaaagaagcacaaggaaaaattgatgtacttcaagctgaagtagctgcattgaagacacttgtattgtccagttctccaacatcacctacgcaggagcctttgccaggtggaaagacaccttttaaaaaggggcatacaagaaataaaagcacaagcagtgctatgagtggcagtcatcaggacctcagtgtgatacagccaattgtaaaagactgcaaagaggctgacttatccttgtataatgaattccgattgtggaaggatgagcccacaatggacaggacgtgtcctttcttagacaaaatctaccaggaagatatctttccatgtttaacattctcaaaaagtgagttggcttcagctgttctggaggctgtggaaaacaatactctaagcattgaaccagtgggattacaacctatccggtttgtgaaagcttctgcagttgaatgcggaggaccaaaatcacttctgtatgtaacttttttacatacattcgatacattcagcagggactcgtgaaacagcaggatgttgatcagatgttttgggaggttatgcagttgagaaaagagatgtcattggcaaagctgggttatttcaaagaggaactctgatgctctgcgtgggaccatgcctgaactccccgaataactgaaaaatggctgaatatttttatggttacttgatatttatttccaaggagtgagcctaagacttttttccccttttgcaaattgctctaagaagtaccatgatttcttttaaactgatctatgctgtgtttgcttattctttagttgaacacactatgaagaattccaggtgtactagtgaatgtaatttatagttgccaaaaaaaaaaaaaacctgaaataaataaatgttagattg

SEQ ID NO: 173211 - DNA, 943 bp, Homo sapiens
  Payload ID: 14044
  Gene Symbol: RAB3IP
  Gene Name: RAB3A interacting protein
  ENST ID: ENST00000526994
  CDS Start-End: 1-569
gaaataaaagcacaagcagtgctatgagtggcagtcatcaggacctcagtgtgatacagccaattgtaaaagactgcaaagaggctgacttatccttgtataatgaattccgattgtggaaggatgagcccacaatggacaggacgtgtcctttcttagacaaaatctaccaggaagatatctttccatgtttaacattctcaaaaagtgagttggcttcagctgttctggaggctgtggaaaacaatactctaagcattgaaccagtgggattacaacctatccggtttgtgaaagcttctgcagttgaatgcggaggaccaaaaaaatgtgctctcactggccagagtaagtcctgtaaacacagaattaaattaggggactcaagcaactattattatatttctcctttttgcagatacagggtaagtgacttaaccatgaattttaataaagcttgctttgatatgggacatttgaccattcatgacattttctccatttggcctagatcacttctgtatgtaacttttttacatacattcgatacattcagcagggactcgtgaaacagcaggatgttgatcagatgttttgggaggttatgcagttgagaaaagagatgtcattggcaaagctgggttatttcaaagaggaactctgatgctctgcgtgggaccatgcctgaactccccgaataactgaaaaatggctgaatatttttatggttacttgatatttatttccaaggagtgagcctaagacttttttccccttttgcaaattgctctaagaagtaccatgatttcttttaaactgatctatgctgtgtttgcttattctttagttgaacacactatgaagaattccaggtgtactagtgaatgtaatttatagttgccaaaaaaaaaaaaaacctgaaataaataaatgttagattgaa

SEQ ID NO: 173212 - DNA, 1613 bp, Homo sapiens
  Payload ID: 14044
  Gene Symbol: RAB3IP
  Gene Name: RAB3A interacting protein
  Uniprot ID: Q96QF0
  ENST ID: ENST00000417413
  CDS Start-End: 196-1110
aggcgcagtcccgcgttccctcggcggctgccggcgtagtgagcccgccgccgtggagtgtagcggaaagggctcgccgtcctcctccgtttctcgctgcttcgggacgcgctctctgcggctctgtgagcgcccctgagcgccggcagcggccgcggtgggttcttcaggttatcttatgatgaggcttttgctatggctaatgatcccttggaaggcttccatgaagtaaaccttgcttcacctacttctccggaccttcttggtgtgtatgaatcaggaactcaagagcagactacctcaccaagtgtcatctaccggccacacccttcagctttatcctctgtacctatccaggcaaatgcattagatgtttctgaacttcctacacaacccgtgtattcatcccccagacgtttaaattgtgcggaaatatctagtatcagctttcatgttacagacccagccccttgctctacctctggagtcacagctggattaactaaattaactacaagaaaggacaactataatgcagagagagagtttttacagggtgctactataacagaggcttgcgatggcagtgatgatatttttgggttgagtactgatagtctgtctcgtttacgaagcccatctgttttggaagttagagaaaagggctatgaacgattaaaagaagaactcgcaaaagctcagagggaactgaagttaaaagatgaagaatgtgagaggctttcaaaagtgcgagatcaacttggacaggaattggaagaactcacagctagtctatttgaggaagctcataaaatggtgagagaagcaaatatcaagcaggcaacagcagaaaaacagctaaaagaagcacaaggaaaaattgatgtacttcaagctgaagtagctgcattgaagacacttgtattgtccagttctccaacatcacctacgcaggagcctttgccaggtggaaagacaccttttaaaaaggggcatacaagaaataaaagcacaagcagtgctatgagtggcagtcatcaggacctcagtgtgatacagccaattgtaaaagactgcaaagagaaaatgtgctctcactggccagagtaagtcctgtaaacacagaattaaattaggggactcaagcaactattattatatttctcctttttgcagatacaggatcacttctgtatgtaacttttttacatacattcgatacattcagcagggactcgtgaaacagcaggatgttgatcagatgttttgggaggttatgcagttgagaaaagagatgtcattggcaaagctgggttatttcaaagaggaactctgatgctctgcgtgggaccatgcctgaactccccgaataactgaaaaatggctgaatatttttatggttacttgatatttatttccaaggagtgagcctaagacttttttccccttttgcaaattgctctaagaagtaccatgatttcttttaaactgatctatgctgtgtttgcttattctttagttgaacacactatgaagaattccaggtgtactagtgaatgtaatttatagttgccaaaaaaaaaaaaaacctgaaataaataaatgttagattg

SEQ ID NO: 173213 - DNA, 9646 bp, Homo sapiens
  Payload ID: 14044
  Gene Symbol: RAB3IP
  Gene Name: RAB3A interacting protein
  Uniprot ID: Q96QF0
  ENST ID: ENST00000550536
  CDS Start-End: 458-1888
gagtccagcgggttacctggcggcgggcgggcgcggccgggagcggagggccgcggtcgcgaagaggatgaagagagagttcccgaacaagtcggaagcagctcacaacaccggacgccgcgcggcagggctgtggacctggggtggtttcgtgtcccagtcttaggaaactacgcgcgaggcaccgtgctgaggcgtagaggtcaccctcgggaggtttcggtgaaacctggtgggaaattccgggcaggcgcccggagtcgcgcccaagtaggcagctccgtgccgccagacttgtgttcgggggagttgagacgaactgcacgggtgggattgcatggctctgccctcccagcgttgacaactcgccccgaccgcccaggaagcgcgagcttactggctccagaagtgatgatgctgggtggaagtcgcagcatgtgaagagttgccggttgttatgggattaaaaaagatgaaagggttatcttatgatgaggcttttgctatggctaatgatcccttggaaggcttccatgaagtaaaccttgcttcacctacttctccggaccttcttggtgtgtatgaatcaggaactcaagagcagactacctcaccaagtgtcatctaccggccacacccttcagctttatcctctgtacctatccaggcaaatgcattagatgtttctgaacttcctacacaacccgtgtattcatcccccagacgtttaaattgtgcggaaatatctagtatcagctttcatgttacagacccagccccttgctctacctctggagtcacagctggattaactaaattaactacaagaaaggacaactataatgcagagagagagtttttacagggtgctactataacagaggcttgcgatggcagtgatgatatttttgggttgagtactgatagtctgtctcgtttacgaagcccatctgttttggaagttagagaaaagggctatgaacgattaaaagaagaactcgcaaaagctcagagggaactgaagttaaaagatgaagaatgtgagaggctttcaaaagtgcgagatcaacttggacaggaattggaagaactcacagctagtctatttgaggaagctcataaaatggtgagagaagcaaatatcaagcaggcaacagcagaaaaacagctaaaagaagcacaaggaaaaattgatgtacttcaagctgaagtagctgcattgaagacacttgtattgtccagttctccaacatcacctacgcaggagcctttgccaggtggaaagacaccttttaaaaaggggcatacaagaaataaaagcacaagcagtgctatgagtggcagtcatcaggacctcagtgtgatacagccaattgtaaaagactgcaaagaggctgacttatccttgtataatgaattccgattgtggaaggatgagcccacaatggacaggacgtgtcctttcttagacaaaatctaccaggaagatatctttccatgtttaacattctcaaaaagtgagttggcttcagctgttctggaggctgtggaaaacaatactctaagcattgaaccagtgggattacaacctatccggtttgtgaaagcttctgcagttgaatgcggaggaccaaaaaaatgtgctctcactggccagagtaagtcctgtaaacacagaattaaattaggggactcaagcaactattattatatttctcctttttgcagatacaggatcacttctgtatgtaacttttttacatacattcgatacattcagcagggactcgtgaaacagcaggatgttgatcagatgttttgggaggttatgcagttgagaaaagagatgtcattggcaaagctgggttatttcaaagaggaactctgatgctctgcgtgggaccatgcctgaactccccgaataactgaaaaatggctgaatatttttatggttacttgatatttatttccaaggagtgagcctaagacttttttccccttttgcaaattgctctaagaagtaccatgatttcttttaaactgatctatgctgtgtttgcttattctttagttgaacacactatgaagaattccaggtgtactagtgaatgtaatttatagttgccaaaaaaaaaaaaaacctgaaataaataaatgttagattgaatgtgtgtacattttctcttctagctctgacatggcatttagggttagcagaatgtattaaatagtaattttcaaactacacagtagcttccttccttgtgagaggcaagaaagaagtctgagtggatagtactcactttccaaggcccccacctctagaatggctttatttttatctgttttctatattgggtttcaaaaaagattttatttgaagaaatacttctgctgctacaaagtttgaaagttactattttaattattctgctctctgtaactgaaagaatccctttattttggttattcattaaaatataatagaaggcagtcagattttatcccagagatgtattcctgagtgtcttgatatagtgtattcatgttttatatgtgttgaccactatattgtcattggagggacatagatgtaaatgagtttgacgtgtgtcaaaggggtttaaaggggtgtggattgaatgaatggtacgtgcgaagtatatgctgattatagaaccacttgatctctgcattccaaattgtaaaactgactcaactggagaaattataacaaagaggtttgtggtagacatgtaataagtatagaaaagcaaaaagaaaagagaaactgctttagtttctgtttagagaaagctgctgttaatatttttggatagtagcctttcagctttcagatattttctacttacatatgcatatttttgaaacaaaaagtaggctttttttttgctttttaaacctaaacattaaatatattttcccttgggtaaacctacacatcctaatccctgtttatagaattttaacataatttaattgtgtttggagatgaggtggttttcagtttatttttcatattataatgctgtgacgagtatccttatctgtacacttctgaacattgtggagttctttcatgtggatgcctggagataaaattgtgtcgagatatatatgtatttttaaatgtttgatctgcattgctagattgccatccagaaaagttaatcaatttgtattcacagcagcagtgtacaagagggctggttttctgaagataacatttttttcagtcctgttcagaggtttggtcaatcttacctgtagatgacttcagccaccaggctggatgggagcccacagacaaaaggacattggtgtatgttatggtgaaaaccatcagtaccatgcctagctcaagaatgtgaaattgaacctgaaaaaaactttgaacctacaattttatgttctgaaaatagttattctaatgtgagggcattaataagaatatgtaccatcaaagcttcagaagattttccgtacaaactaaaatcacttttggagaaagtacctaaataaaaagagaaacaaatccaggagatactgtacggtttgaaagaaaggtaatcaaatactcagaaaaagtttgttgatgacttaaaaaggataaataaaaagtaagactaaagaaaatcagtatacccattaataataaatctttagtaatctataaggggaagaatgcttttcaaccttatacactagaagcatgctctttaaaattaatgcaacaggatgacgacttgatgtagaaactatatgtggaattatagattaaaatgtgattgaaacatatttagaaaatgtgattatcttcctgatcctactccctttaggaagaacttcttaaactggaagcaggaaaaaaaaaaaccataaaagataaccataaaagaatataagttatggtatattataaattcttaatttagaaatcgtgcatcagtagttaggcattgtggctcatgcctgtaatcccagcactttgggaggcagaggcagaaggattacttgagctgcttgagcccaggagtttgagacgggcctgggaaaaatagggaaactccatttacacacacacacacacacacacacacacacacactgtgtccatgaacttgggaggatgaggtgggaggattgcttgagcccaggggttcaagtccaacttgggcaacatagggagaccttgtctctaaaaaaaaaactaaagctaaactacaaactgtgaggcaatatctgcaacatttataactagtaatagcttagtatcaagaatgtatgcagaaattctacaaaccaacaaaaaaggacagtgtcacagaaaaacaggcaaaagactgaaccaggccttccacacaattagaagtgcatgtgggccaataaacattaagaggttttcatctctcaatcaggaaaacgtaaatcaagatgacaatgacatgttcaaattcattcgattggtgaaaatgaagaaacacaaagtcaagttttggagagggttttagtcattaggatcactcacatattgctgatgggggtatcaattggtatatccactgtgaaaaaccattcactagaaaagttgggccaggcccagtggctcatgcctcttggctttgggaggccaaggtaggaggatcacttgagcccaagagttcaagaccagcttgagcaacatagggagaccacatctgcacaaaaagatttttttgaattagctgggcatggtggtgcatgcctgtggtcccagctacttgggaagctgaggtggaaggattgcttaagcccaggaggttgaggctgcagtgaatcatgattgtgccactgcactcttaccttgggtgacagagtaagatcataccttaaaaaaaaaaaaaaagtatacccatgggtcagcaatttcacttttcagtatatacttgagaaatgcttgcacaggtcccccagatcacacatataagaatgttctggaataaattaaaatgtctatttttaggaaggtgtaatgtgttcacagaatgggtgattattacatggcagcaaaatgaatgaataccagctacttgcagcacaataactcagaatgaaaaagcaattctgagaaaactatatgtgacatgatacttttcttataaaagtcaagaacaactaaaactgaacagctgtttaggcattgacatatgtgacaaaacttttaaaaagtaataaagttcaagatagtggttacctctggagaggtagaggaggagcaaatctatgagtaagtcactggtaatgttttagtccctgggttaggtggtgggttttggggtggttcatttgtcattaaaagtaagtacatgagctgggtgtagtggtgcgtgcttatagtcccagctacttgggagtctgagataggaagatccttgaggccagttcaaggctatagtgtgctatgatttcacctgtgaatagctactatattccaacctgggcaacgtagaccttgcccccctttaaaaaaattcaaaaacaaaataaatgcatggacaaatgaataagagagttatgcatggaacatcggtggtgtattatgaatcaagcattattactagctcagttatatgtgccttcattccaaaacaaaaaataaaaggtaagaaaattgttgaattgcatttgagagagaggaaaggaaagaattcaggtctgaatcttaggcttttggcttgagctattgcagtttattgagatggggaaatacatggtggggaaagtttgggtatgtgcataacagagacagaaattcagtgtttgacagatcaagtgtgaggtgcccactgagcatcaaagtggatatgttaagcaggtattggatgtacaaatctaaattcagtaaggtcagtccaggagaaaatttggggagtagttagccatgggatcagatgggcgctttagggacactttggagatgaagtacagcactgagccctgagttcctgtgacagagaagcagcctgcaaagacgaaaggaggagctgttaggaagagcaaggcaacagaaaaggaagaaccagcatgctgattatgttcaggagagtgtttctacgctgaatttaattgccaagattaccaattctaaagaagaggaggactcttggacaagtttttagaagttggtttggagctggggtgagagcctggcctaatggagacagctctggattgggagtcacttagacctacattctggtctaggtttggctcccaaaaactgggaaggttagttaggtggccactcctctctcttcatggtctctctcagcttgaagacaatttacagtctttgactaagcatccacactggaagaacaagatttggtttctgaacattgggtcttagtccttaaaataacttgcaacctgttacgtcttcacttactcccatcgccaccacaagaatcctgtgtgtttttgttttgtgcatccagtctaaaacgggtctgcttttattcataggcttttgttttcagtggtttttgttgttgcatttttccctagataaaatgttttttctataagacactgcttaaaagagtccaatgcagtatgaatttgtatttgtgtttaacttttgtgcttaacagatctgccatggctgaactctcagttgcttaagcaaaattctggggcttattctaggttcctttatttgtcattgtcactcccattccagttatcagcaaattccatcagctgtctccgagacatcttaaatctgtctacctccctccatgtccactgctaccactctgcccaagctattatcatctttcacctgaactcctgcactaatgtctgctgtccttgcatccactcctgccctcctacaatcactgacggcagccgcagggatctttataaaacgaaaatcagataatgtcacttccctgcttaaagccctttgagtggcttcccattgcacttagaaaaaaaaaaaaaaaaaaaaactggccaggtgcgatggctcatgcctgtaatcccagcactttgggaggccgaggcgggcggatcccctgaggttggtagttcgagacctgcttggccaacatggagaaaccctgtctctactaaaaacacaaaattagtcaggtgtgatggcgcatgcctgtaatcccagctacttgggaggctgagtcaggagaaacgctcgaacccaggaggcagaggttgtggtgagttgacatcacgccattgcactccagcctgggcaacaagagtgaaactccgtctgaaaaaaaaaaaaaaaaacccaaactcaatagaaaatcaagttttcatagtggtagttgttaacagagaaataacaatgaaagctttaaaaaactccatgaaaatttgcaaaacttaaaaaaaaaatgtagaagaggactaaacttgataaaatattaaaagaattgaaacccttcctaaaggcagcttctcaagggagcacaagttcacacacagtttacttttggaggaacgtctgaggtcatgaggactagattctagagctacaggtctcagggacagtctcgagggatacagggcccccatcaccacatccccagatttaaccgcagcagctcagcttttatctgtatctgttggagctctctaggaaatgtcaataccaaagcaaacccaaatcacaactagattagattactattcaagagaatgattctctaccgaaactctgcaaaatggggatatcaagagagttggaaaatgtaagacgtaaagaccataatcaggaaaatacgcatcatatttgttattcactgagagggaggaatttccacttaaatcctatttccagcagctggattgtgctctcagtggagtgctctggattctgattaatagagattttctagtcctcccagcaacttccttctcaattctcttcactttccgcagatctcggcaccagggttgcatcttgtgggctccattgtgttttcacacaatgtgctatttgtccttcacagtgttttggtttatttttctgtttgtccatcttgtttttgaacaattgccagcatttaaaaatgaggaaatctaaaatctgcatttcaagctgctcttttttaaaatgtgccgtttcgacaacactgagcccacagtcttgaatgacaacacttgggtggagctgagtgactccacctgtcgggtggctacacccttgctcagggtatgcactccatggtttgctctatggcccaccatcctggattgtctccctgacaccaaggctaagggacccactttactcacttatctgctgggccttggaagtatttcagttcggaaccccaattctaaccttagcttctcaggccattaaatgaaatctcatttctatgatgcttcctgtcacatcactgtgctgctgagaacatgaagtctgtgggtgaattggtggacgggatccagaatcattacttggcagtggattatagtgtgatgactcatttccggtggtctccaggagacttggctgggagcttctcttggagtctagggttagccagaggctacatgttttaggcatcttaattcatattttatctaaaggcatataaatccttaaaaaaaatcatttgacttcatccttgctccctacatccagccagtaaccattgctttgttttacatcgcgtgcttcaggctttactacagcctacctggattttgcagtagcttcttaaactgcttaaactttggatattgccccagccaacacattctgccacagagatctctctgagttaaatgggattgtatcatgccccacacccaagcagatagaaactgtcaatagatacacttagaatgaatatgcatggaatcaaattacattcagaatctaccactataggtagtgaatacaacaggatagcagaggctgggaagggtaatgggggttggggggtgggaggataaaggggttgggtaatgggtgtaaaaatctatagaaggaatatgatctgttgtttggtagcacaatagggtaaatacagttaataatttattgtatatttcacaataaaggagtggatttggaatgttctcaacacaaatgataaatgtttgaggtgatggataccccaattaccctgatttgatcattatacgttgtatgtttgtatcaaaatatcatatgtaccccataaatatgtacaactattatgtatccataaaaattggaaataaactaccaccatctttcttcagcctattttcctatctcctctcgcaccatactaggcacacaatctctgtacctgtgctgtcttccaagccattgctcatgttttaagaaatatacttattgtttaatatatcctgtaccactgtaggatgactgtagttaacaataatgtgtagtttcaaatagctaatagctggaaggaagttgttgaatgtttccaacataaagaaatgataagtgtttgagatgatggatatgctaattaccctgatctgatcactacacattatatgtatggaaatatcattgtgtaccccatgaatatgggcaattattatttgttaattaaaaaaataaaaaaaagacccacccactgtttaa

SEQ ID NO: 173214 - DNA, 695 bp, Homo sapiens
  Payload ID: 14044
  Gene Symbol: RAB3IP
  Gene Name: RAB3A interacting protein
  ENST ID: ENST00000547591
  CDS Start-End: 1-64
aggttatcttatgatgaggcttttgctatggctaatgatcccttggaaggcttccatgaagtaaaccttgcttcacctacttctccggaccttcttggcaaatgcattagatgtttctgaacttcctacacaacccgtgtattcatcccccagacgtttaaattgtgcggaaatatctagtatcagctttcatgttacagacccagccccttgctctacctctggagtcacagctggattaactaaattaactacaagaaaggacaactataatgcagagagagagtttttacagggtgctactataacagaggcttgcgatggcagtgatgatatttttgggttgagtactgatagtctgtctcgtttacgaagcccatctgttttggaagttagagaaaagggctatgaacgattaaaagaagaactcgcaaaagctcagagggaactgaagttaaaagatgaagaatgtgagaggctttcaaaagtgcgagatcaacttggacaggaattggaagaactcacagctagtctatttgaggaagctcataaaatggtgagagaagcaaatatcaagcaggcaacagcagaaaaacagctaaaagaagcacaaggaaaaattgatgtacttcaagctgaagtagctgcattgaagacacttgtattgtccagttctccaacatcacctacgcagg

SEQ ID NO: 173215 - DNA, 2674 bp, Homo sapiens
  Payload ID: 14044
  Gene Symbol: RAB3IP
  Gene Name: RAB3A interacting protein
  Uniprot ID: Q96QF0
  ENST ID: ENST00000553099
  CDS Start-End: 239-1003
tgtttacctaagcaagcctgggcaatggcgggcgtccctcccccagcctcgttgccgccttgcagtttgatctcagactgctgtgctagcaatcagcgagattccgtgggcgtaggaccctctgagccaggaactgaagttaaaagatgaagaatgtgagaggctttcaaaagtgcgagatcaacttggacaggaattggaagaactcacagctagtctatttgaggaagctcataaaatggtgagagaagcaaatatcaagcaggcaacagcagaaaaacagctaaaagaagcacaaggaaaaattgatgtacttcaagctgaagtagctgcattgaagacacttgtattgtccagttctccaacatcacctacgcaggagcctttgccaggtggaaagacaccttttaaaaaggggcatacaagaaataaaagcacaagcagtgctatgagtggcagtcatcaggacctcagtgtgatacagccaattgtaaaagactgcaaagaggctgacttatccttgtataatgaattccgattgtggaaggatgagcccacaatggacaggacgtgtcctttcttagacaaaatctaccaggaagatatctttccatgtttaacattctcaaaaagtgagttggcttcagctgttctggaggctgtggaaaacaatactctaagcattgaaccagtgggattacaacctatccggtttgtgaaagcttctgcagttgaatgcggaggaccaaaaaaatgtgctctcactggccagagtaagtcctgtaaacacagaattaaattaggggactcaagcaactattattatatttctcctttttgcagatacaggatcacttctgtatgtaacttttttacatacattcgatacattcagcagggactcgtgaaacagcaggatgttgatcagatgttttgggaggttatgcagttgagaaaagagatgtcattggcaaagctgggttatttcaaagaggaactctgatgctctgcgtgggaccatgcctgaactccccgaataactgaaaaatggctgaatatttttatggttacttgatatttatttccaaggagtgagcctaagacttttttccccttttgcaaattgctctaagaagtaccatgatttcttttaaactgatctatgctgtgtttgcttattctttagttgaacacactatgaagaattccaggtgtactagtgaatgtaatttatagttgccaaaaaaaaaaaaaacctgaaataaataaatgttagattgaatgtgtgtacattttctcttctagctctgacatggcatttagggttagcagaatgtattaaatagtaattttcaaactacacagtagcttccttccttgtgagaggcaagaaagaagtctgagtggatagtactcactttccaaggcccccacctctagaatggctttatttttatctgttttctatattgggtttcaaaaaagattttatttgaagaaatacttctgctgctacaaagtttgaaagttactattttaattattctgctctctgtaactgaaagaatccctttattttggttattcattaaaatataatagaaggcagtcagattttatcccagagatgtattcctgagtgtcttgatatagtgtattcatgttttatatgtgttgaccactatattgtcattggagggacatagatgtaaatgagtttgacgtgtgtcaaaggggtttaaaggggtgtggattgaatgaatggtacgtgcgaagtatatgctgattatagaaccacttgatctctgcattccaaattgtaaaactgactcaactggagaaattataacaaagaggtttgtggtagacatgtaataagtatagaaaagcaaaaagaaaagagaaactgctttagtttctgtttagagaaagctgctgttaatatttttggatagtagcctttcagctttcagatattttctacttacatatgcatatttttgaaacaaaaagtaggctttttttttgctttttaaacctaaacattaaatatattttcccttgggtaaacctacacatcctaatccctgtttatagaattttaacataatttaattgtgtttggagatgaggtggttttcagtttatttttcatattataatgctgtgacgagtatccttatctgtacacttctgaacattgtggagttctttcatgtggatgcctggagataaaattgtgtcgagatatatatgtatttttaaatgtttgatctgcattgctagattgccatccagaaaagttaatcaatttgtattcacagcagcagtgtacaagagggctggttttctgaagataacatttttttcagtcctgttcagaggtttggtcaatcttacctgtagatgacttcagccaccaggctggatgggagcccacagacaaaaggacattggtgtatgttatggtgaaaaccatcagtaccatgcctagctcaagaatgtgaaattgaacctgaaaaaaactttgaacctacaattttatgttctgaaaatagttattctaatgtgagggcattaataagaatatgtaccatcaaagcttcagaagattttccgtacaaactaaaatcacttttggagaaagtacctaaataaaaagagaaacaaatcc

SEQ ID NO: 173216 - DNA, 670 bp, Homo sapiens
  Payload ID: 14044
  Gene Symbol: RAB3IP
  Gene Name: RAB3A interacting protein
  ENST ID: ENST00000550847
  CDS Start-End: 63-566
aatggaataaccaatgttaacctgttttaattgaattgcattttgacgaattatcaataaaaatgatgctggctgacttatccttgtataatgaattccgattgtggaaggatgagcccacaatggacaggacgtgtcctttcttagacaaaatctaccaggaagatatctttccatgtttaacattctcaaaaagtgagttggcttcagctgttctggaggctgtggaaaacaatactctaagcattgaaccagtgggattacaacctatccggtttgtgaaagcttctgcagttgaatgcggaggaccaaaaaaatgtgctctcactggccagagtaagtcctgtaaacacagaattaaattaggggactcaagcaactattattatatttctcctttttgcagatacaggatcacttctgtatgtaacttttttacatacattcgatacattcagcagggactcgtgaaacagcaggatgttgatcagatgttttgggaggttatgcagttgagaaaagagatgtcattggcaaagctgggttatttcaaagaggaactctgatgctctgcgtgggaccatgcctgaactccccgaataactgaaaaatggctgaatatttttatggttacttgatatttatttccaaggagtgagcctaagacttt

SEQ ID NO: 173217 - DNA, 742 bp, Homo sapiens
  Payload ID: 14044
  Gene Symbol: RAB3IP
  Gene Name: RAB3A interacting protein
  ENST ID: ENST00000550647
  CDS Start-End: 1-712
ctataatgcagagagagagtttttacagggtgctactataacagaggcttgcgatggcagtgatgatatttttgggttgagtactgatagtctgtctcgtttacgaagcccatctgttttggaagttagagaaaagggctatgaacgattaaaagaagaactcgcaaaagctcagagggaactgaagttaaaagatgaagaatgtgagaggctttcaaaagtgcgagatcaacttggacaggaattggaagaactcacagctagtctatttgaggaagctcataaaatggtgagagaagcaaatatcaagcaggcaacagcagaaaaacagctaaaagaagcacaaggaaaaattgatgtacttcaagctgaagtagctgcattgaagacacttgtattgtccagttctccaacatcacctacgcaggagcctttgccaggtggaaagacaccttttaaaaaggggcatacaagaaataaaagcacaagcagtgctatgagtggcagtcatcaggacctcagtgtgatacagccaattgtaaaagactgcaaagaggctgacttatccttgtataatgaattccgattgtggaaggatgagcccacaatggacaggacgtgtcctttcttagacaaaatctaccaggaagatatctttccatgtttaacattctcaaaaagtgagaaaatgtgctctcactggccagagtaagtcctgtaaacacagaattaaattagggga

SEQ ID NO: 173218 - DNA, 438 bp, Homo sapiens
  Payload ID: 14044
  Gene Symbol: RAB3IP
  Gene Name: RAB3A interacting protein
  ENST ID: ENST00000547055
  CDS Start-End: 1-276
ataacagaggcttgcgatggcagtgatgatatttttgggttgagtactgatagtctgtctcgtttacgaagcccatctgttttggaagttagagaaaagggctatgaacgattaaaagaagaactcgcaaaagctcagagggaactgaagttaaaagatgaagaatgtgagaggctttcaaaagtgcgagatcaacttggacaggaattggaagaactcacagctagtctatttgaggttggtctatttacatcttggccaacagcaacatcttgacttttatatattgacaaaattgtattttgagggaatcttgaaaaatatttgcttagcttcatgtatatttataagtcctctaagcaaaagagaaatctttaagcaatgtagagtttacaacttaagatgatgtgaaaagaaataaaaaacatctatgggcca

SEQ ID NO: 173219 - DNA, 2840 bp, Homo sapiens
  Payload ID: 14044
  Gene Symbol: RAB3IP
  Gene Name: RAB3A interacting protein
  Uniprot ID: Q96QF0
  ENST ID: ENST00000551641
  CDS Start-End: 341-1105
gagcttcccggctgctttgtttacctaagcaagcctgggcaatggcgggcgtccctcccccagcctcgttgccgccttgcagtttgatctcagactgctgtgctagcaatcagcgagattccgtgggcgtaggaccctctgagccaggtgtgggatatagtctcgtggtgcgccgtttcttaagccggtctgaaaagcgcaatattcggatgggagtgacccgattttccaggaactgaagttaaaagatgaagaatgtgagaggctttcaaaagtgcgagatcaacttggacaggaattggaagaactcacagctagtctatttgaggaagctcataaaatggtgagagaagcaaatatcaagcaggcaacagcagaaaaacagctaaaagaagcacaaggaaaaattgatgtacttcaagctgaagtagctgcattgaagacacttgtattgtccagttctccaacatcacctacgcaggagcctttgccaggtggaaagacaccttttaaaaaggggcatacaagaaataaaagcacaagcagtgctatgagtggcagtcatcaggacctcagtgtgatacagccaattgtaaaagactgcaaagaggctgacttatccttgtataatgaattccgattgtggaaggatgagcccacaatggacaggacgtgtcctttcttagacaaaatctaccaggaagatatctttccatgtttaacattctcaaaaagtgagttggcttcagctgttctggaggctgtggaaaacaatactctaagcattgaaccagtgggattacaacctatccggtttgtgaaagcttctgcagttgaatgcggaggaccaaaaaaatgtgctctcactggccagagtaagtcctgtaaacacagaattaaattaggggactcaagcaactattattatatttctcctttttgcagatacaggatcacttctgtatgtaacttttttacatacattcgatacattcagcagggactcgtgaaacagcaggatgttgatcagatgttttgggaggttatgcagttgagaaaagagatgtcattggcaaagctgggttatttcaaagaggaactctgatgctctgcgtgggaccatgcctgaactccccgaataactgaaaaatggctgaatatttttatggttacttgatatttatttccaaggagtgagcctaagacttttttccccttttgcaaattgctctaagaagtaccatgatttcttttaaactgatctatgctgtgtttgcttattctttagttgaacacactatgaagaattccaggtgtactagtgaatgtaatttatagttgccaaaaaaaaaaaaaacctgaaataaataaatgttagattgaatgtgtgtacattttctcttctagctctgacatggcatttagggttagcagaatgtattaaatagtaattttcaaactacacagtagcttccttccttgtgagaggcaagaaagaagtctgagtggatagtactcactttccaaggcccccacctctagaatggctttatttttatctgttttctatattgggtttcaaaaaagattttatttgaagaaatacttctgctgctacaaagtttgaaagttactattttaattattctgctctctgtaactgaaagaatccctttattttggttattcattaaaatataatagaaggcagtcagattttatcccagagatgtattcctgagtgtcttgatatagtgtattcatgttttatatgtgttgaccactatattgtcattggagggacatagatgtaaatgagtttgacgtgtgtcaaaggggtttaaaggggtgtggattgaatgaatggtacgtgcgaagtatatgctgattatagaaccacttgatctctgcattccaaattgtaaaactgactcaactggagaaattataacaaagaggtttgtggtagacatgtaataagtatagaaaagcaaaaagaaaagagaaactgctttagtttctgtttagagaaagctgctgttaatatttttggatagtagcctttcagctttcagatattttctacttacatatgcatatttttgaaacaaaaagtaggctttttttttgctttttaaacctaaacattaaatatattttcccttgggtaaacctacacatcctaatccctgtttatagaattttaacataatttaattgtgtttggagatgaggtggttttcagtttatttttcatattataatgctgtgacgagtatccttatctgtacacttctgaacattgtggagttctttcatgtggatgcctggagataaaattgtgtcgagatatatatgtatttttaaatgtttgatctgcattgctagattgccatccagaaaagttaatcaatttgtattcacagcagcagtgtacaagagggctggttttctgaagataacatttttttcagtcctgttcagaggtttggtcaatcttacctgtagatgacttcagccaccaggctggatgggagcccacagacaaaaggacattggtgtatgttatggtgaaaaccatcagtaccatgcctagctcaagaatgtgaaattgaacctgaaaaaaactttgaacctacaattttatgttctgaaaatagttattctaatgtgagggcattaataagaatatgtaccatcaaagcttcagaagattttccgtacaaactaaaatcacttttggagaaagtacctaaataaaaagagaaacaaatccaggagatactgtacggtttgaaagaaaggtaatcaaatactcagaaaaagtttgttgatgactt

SEQ ID NO: 173220 - DNA, 1905 bp, Homo sapiens
  Payload ID: 14044
  Gene Symbol: RAB3IP
  Gene Name: RAB3A interacting protein
  Uniprot ID: Q96QF0
  ENST ID: ENST00000552199
  CDS Start-End: 440-1402
ggcggcgggcgggcgcggccgggagcggagggccgcggtcgcgaagaggatgaagagagagttcccgaacaagtcggaagcagctcacaacaccggacgccgcgcggcagggctgtggacctggggtggtttcgtgtcccagtcttaggaaactacgcgcgaggcaccgtgctgaggcgtagaggtcaccctcgggaggtttcggtgaaacctggtgggaaattccgggcaggcgcccggagtcgcgcccaagtaggcagctccgtgccgccagacttgtgttcgggggagttgagacgaactgcacgggtgggattgcatggctctgccctcccagcgttgacaactcgccccgaccgcccaggaagcgcgagcttactggctccagaagtgatgatgctgggtggaagtcgcagcatgtgaagagttgccggttgttatgggattaaaaaagatgaaagggttatcttatgatgaggcttttgctatggctaatgatcccttggaaggcttccatgaagtaaaccttgcttcacctacttctccggaccttcttggtgtgtatgaatcaggaactcaagagcagactacctcaccaagtgtcatctaccggccacacccttcagctttatcctctgtacctatccaggcaaatgcattagatgtttctgaacttcctacacaacccgtgtattcatcccccagacgtttaaattgtgcggaaatatctagtatcagctttcatgttacagacccagccccttgctctacctctggagtcacagctggattaactaaattaactacaagaaaggacaactataatgcagagagagagtttttacagggtgctactataacagaggcttgcgatggcagtgatgatatttttgggttgagtactgatagtctgtctcgtttacgaagcccatctgttttggaagttagagaaaagggctatgaacgattaaaagaagaactcgcaaaagctcagagggaactgaagttaaaagatgaagaatgtgagaggctttcaaaagtgcgagatcaacttggacaggaattggaagaactcacagctagtctatttgaggaagctcataaaatggtgagagaagcaaatatcaagcaggcaacagcagaaaaacagctaaaagaagcacaaggaaaaattgatgtacttcaagctgaagtagctgcattgaagacacttgtattgtccagttctccaacatcacctacgcaggagcctttgccaggtggaaagacaccttttaaaaaggggcatacaagaaataaaagcacaagcagtgctatgagtggcagtcatcaggacctcagtgtgatacagccaattgtaaaagactgcaaagagaaaatgtgctctcactggccagagtaagtcctgtaaacacagaattaaattaggggactcaagcaactattattatatttctcctttttgcagatacaggatcacttctgtatgtaacttttttacatacattcgatacattcagcagggactcgtgaaacagcaggatgttgatcagatgttttgggaggttatgcagttgagaaaagagatgtcattggcaaagctgggttatttcaaagaggaactctgatgctctgcgtgggaccatgcctgaactccccgaataactgaaaaatggctgaatatttttatggttacttgatatttatttccaaggagtgagcctaagacttttttccccttttgcaaattgctctaagaagtaccatgatttcttttaaactgatctatgctgtgtttgcttattctttagttgaacacactatgaagaattccaggtgtactagtgaatgtaatttatagttgccaaaaaaaaaaaaaacctgaaataaataaatgttagattg

SEQ ID NO: 173221 - DNA, 580 bp, Homo sapiens
  Payload ID: 14044
  Gene Symbol: RAB3IP
  Gene Name: RAB3A interacting protein
  ENST ID: ENST00000549760
  CDS Start-End: 84-580
gagtcggccaggaggggcggccgcggcaggtgcaggtgctggcgccgtgcagggcgcggttatcttatgatgaggcttttgctatggctaatgatcccttggaaggcttccatgaagtaaaccttgcttcacctacttctccggaccttcttggtgtgtatgaatcaggaactcaagagcagactacctcaccaagtgtcatctaccggccacacccttcagctttatcctctgtacctatccaggcaaatgcattagatgtttctgaacttcctacacaacccgtgtattcatcccccagacgtttaaattgtgcggaaatatctagtatcagctttcatgttacagacccagccccttgctctacctctggagtcacagctggattaactaaattaactacaagaaaggacaactataatgcagagagagagtttttacagggtgctactataacagaggcttgcgatggcagtgatgatatttttgggttgagtactgatagtctgtctcgtttacgaagcccatctgttttggaagttagagaaaagggctatgaacgattaaaagaagaactcgc

SEQ ID NO: 173222 - DNA, 2125 bp, Homo sapiens
  Payload ID: 14045
  Gene Symbol: RAB3IL1
  Gene Name: RAB3A interacting protein (rabin3)-like 1
  Uniprot ID: Q8TBN0
  ENST ID: ENST00000301773
  CDS Start-End: 78-1148
ctggtggggggaagaaggctcctgctacctcccttcccggcaccctccagagggaccctcagtctggccttgcaagcatggactcttctgaggagcacgctgggtgccccgcccgagggacatgtcccgtgttcctggccatgagtgcagggactgtccgctacgccccatcaggcctgtgccctgtacttgaggggaacttgagagaagagccctggggcacagacagcccaccccagccagaccagggcctcccgccgccccttgcagctgtcccggtcccctggaagagcacggacccctgccaaggccacagggagtccccaggagccctggtggagacctctgcaggggaggaggcccaaggccaggagggccccgcagccgcccagctggacgtgttgcgcctgcgcagctcttccatggagatccgagagaagggctccgagttcctgaaggaggagctgcacagagcgcagaaggagctgaagctaaaggacgaggaatgtgagcggctgtccaaggtgcgggagcagctagaacaggagctggaagagctgacggccagcctgtttgaggaagctcacaagatggttcgagaagccaacatgaagcaggcggcatcagaaaagcagctgaaggaggctcggggcaaggtggacacaatcctgtttgcagagttccaggcctggagggaatcccccaccctggacaagacctgccccttcctggaaagggtgtaccgagaggacgtgggcccctgcctggacttcacaatgcaggagctctcggtgctggtacgggccgccgtggaggacaacacgctcaccattgagccggtggcttcgcagacgctgcccacagtgaaggtggccgaggttgactgtagcagcaccaacacatgtgccctgagcgggctgacccgcacctgccgccaccgaatccggctcggggactccaaaagccattactacatctcgccatcttcccgggccaggatcaccgcagtgtgcaacttcttcacctacatccgctacatccagcaaggcctggtgcggcaggacgcagagcccatgttctgggagatcatgaggttgcggaaggagatgtcactggccaagctcggcttcttcccccaggaggcttagggcgcggcccaggcctgaaggggagctctgagacagagcaaacacccaccccagaacaagccgacacacagggagacgggggcctggagccagccctgagccagaggcagaatggatggacagacaggccatggaggcagcactgagccagcaccacacgtccatcctgggacagacgggcctggacttcacggcaagacccccctctcttccccactgggttctgccaccaccaggaggatttcaagaaagcaccaaagaccagggagctcggatccatactcggggggcctcagcccttgggaggggacacctgaggcagccagcgccccctccccagtccccagaactgcctgcaggtgccttgttgctggcttgtcttcagaaagggactgttctgggtggctggatctccagggtaccctccaccccagctgccaagccctgggccagcagcacccccttgtggccatcctgtgccttgttcccggtggcctccctattggactactaggaggggctggcagggcctccatagcacagaattgccccaaagccttgttaagatgagtcaagacccctcccccgcttcctcccttcctttcccccttcctccctcccccttcataaaggcctcccttgtcaccttccctcccaccccgtctcagccctgtgctcctggaggccctgctcccaaaaccgctggaaggactggggcactttctgccacagtagaacacagacagggcttcagatcacccacgcctgttttcagctgtgggtggccatgcagacacgcgccctggcatgtggggcctgggtgggcaggcaggacctgggccctcccacccatcagagcccactcaggaccagcgttcggagctcccacctggacgcatccctcaccacgtccggatttccttctttggatggaatgtaacgcgatctctatttaataaaggcaggctttgttggta

SEQ ID NO: 173223 - DNA, 2284 bp, Homo sapiens
  Payload ID: 14045
  Gene Symbol: RAB3IL1
  Gene Name: RAB3A interacting protein (rabin3)-like 1
  Uniprot ID: Q8TBN0
  ENST ID: ENST00000394836
  CDS Start-End: 159-1307
cgagcccaggcgtctgagacctactgaccggccgcgggcagggctgacaggcggtggggcggctcggcccctggcggagtcggcggcgggcggggacgcggcgctgggaggacgcggcggcgctgggaacggacgcctgggcgccccgaggcgccgggatgtggagcggcccaccccagccagaccagggcctcccgccgccccttgcagctgtcccggtcccctggaagagcacggacccctgccaaggccacagggagtccccaggagccctggtggagacctctgcaggggaggaggcccaaggccaggagggccccgcagccgcccagctggacgtgttgcgcctgcgcagctcttccatggagatccgagagaagggctccgagttcctgaaggaggagctgcacagagcgcagaaggagctgaagctaaaggacgaggaatgtgagcggctgtccaaggtgcgggagcagctagaacaggagctggaagagctgacggccagcctgtttgaggaagctcacaagatggttcgagaagccaacatgaagcaggcggcatcagaaaagcagctgaaggaggctcggggcaagatcgacatgctgcaggcagaggtgacagccttgaagacgctggtcatcacgtccacaccagcctctcccaaccgcgagcttcacccccagctgctgagccccaccaaggccgggccccgaaagggccactctcgccacaagagcaccagcagcaccctctgccccgccgtgtgtcccgctgcgggacacaccctcaccccagacagagagggcaaggaggtggacacaatcctgtttgcagagttccaggcctggagggaatcccccaccctggacaagacctgccccttcctggaaagggtgtaccgagaggacgtgggcccctgcctggacttcacaatgcaggagctctcggtgctggtacgggccgccgtggaggacaacacgctcaccattgagccggtggcttcgcagacgctgcccacagtgaaggtggccgaggttgactgtagcagcaccaacacatgtgccctgagcgggctgacccgcacctgccgccaccgaatccggctcggggactccaaaagccattactacatctcgccatcttcccgggccaggatcaccgcagtgtgcaacttcttcacctacatccgctacatccagcaaggcctggtgcggcaggacgcagagcccatgttctgggagatcatgaggttgcggaaggagatgtcactggccaagctcggcttcttcccccaggaggcttagggcgcggcccaggcctgaaggggagctctgagacagagcaaacacccaccccagaacaagccgacacacagggagacgggggcctggagccagccctgagccagaggcagaatggatggacagacaggccatggaggcagcactgagccagcaccacacgtccatcctgggacagacgggcctggacttcacggcaagacccccctctcttccccactgggttctgccaccaccaggaggatttcaagaaagcaccaaagaccagggagctcggatccatactcggggggcctcagcccttgggaggggacacctgaggcagccagcgccccctccccagtccccagaactgcctgcaggtgccttgttgctggcttgtcttcagaaagggactgttctgggtggctggatctccagggtaccctccaccccagctgccaagccctgggccagcagcacccccttgtggccatcctgtgccttgttcccggtggcctccctattggactactaggaggggctggcagggcctccatagcacagaattgccccaaagccttgttaagatgagtcaagacccctcccccgcttcctcccttcctttcccccttcctccctcccccttcataaaggcctcccttgtcaccttccctcccaccccgtctcagccctgtgctcctggaggccctgctcccaaaaccgctggaaggactggggcactttctgccacagtagaacacagacagggcttcagatcacccacgcctgttttcagctgtgggtggccatgcagacacgcgccctggcatgtggggcctgggtgggcaggcaggacctgggccctcccacccatcagagcccactcaggaccagcgttcggagctcccacctggacgcatccctcaccacgtccggatttccttctttggatggaatgtaacgcgatctctatttaataaaggcaggctttgttggta

SEQ ID NO: 173224 - DNA, 636 bp, Homo sapiens
  Payload ID: 14045
  Gene Symbol: RAB3IL1
  Gene Name: RAB3A interacting protein (rabin3)-like 1
  ENST ID: ENST00000526200
  CDS Start-End: 1-198
cagcaaggcctggtgcggcaggacgcccattctgcaaggcctggctccccgctcctccaccaacctttgctcgctgctgagtcttctcctgaaccagtctggcccgaccctctgacagagcccatgttctgggagatcatgaggttgcggaaggagatgtcactggccaagctcggcttcttcccccaggaggcttagggcgcggcccaggcctgaaggggagctctgagacagagcaaacacccaccccagaacaagccgacacacagggagacgggggcctggagccagccctgagccagaggcagaatggatggacagacaggccatggaggcagcactgagccagcaccacacgtccatcctgggacagacgggcctggacttcacggcaagacccccctctcttccccactgggttctgccaccaccaggaggatttcaagaaagcaccaaagaccagggagctcggatccatactcggggggcctcagcccttgggaggggacacctgaggcagccagcgccccctccccagtccccagaactgcctgcaggtgccttgttgctggcttgtcttcagaaagggactgttctgggtggctggatctccagggtaccctccaccccagctgc

SEQ ID NO: 173225 - DNA, 866 bp, Homo sapiens
  Payload ID: 14045
  Gene Symbol: RAB3IL1
  Gene Name: RAB3A interacting protein (rabin3)-like 1
  ENST ID: ENST00000531922
  CDS Start-End: 76-866
ggtggggggaagaaggctcctgctacctcccttcccggcaccctccagagggaccctcagtctggccttgcaagcatggactcttctgaggagcacgctgggtgccccgcccgagggacatgtcccgtgttcctggccatgagtgcagggactgtccgctacgccccatcaggcctgtgccctgtacttgaggggaacttgagagaagagccctggggcacagacagcccaccccagccagaccagggcctcccgccgccccttgcagctgtcccggtcccctggaagagcacggacccctgccaaggccacagggagtccccaggagccctggtggagacctctgcaggggaggaggcccaaggccaggagggccccgcagccgcccagctggacgtgttgcgcctgcgcagctcttccatggagatccgagagaagggctccgagttcctgaaggaggagctgcacagagcgcagaaggagctgaagctaaaggacgaggaatgtgagcggctgtccaaggtgcgggagcagctagaacaggagctggaagagctgacggccagcctgtttgaggaagctcacaagatggttcgagaagccaacatgaagcaggcggcatcagaaaagcagctgaaggaggctcggggcaagatcgacatgctgcaggcagaggtgacagccttgaagacgctggtcatcacgtccacaccagcctctcccaaccgcgagcttcacccccagctgctgagccccaccaaggccgggccccgaaagggccactctcgccacaagagcaccagcagcaccctctgccccgccgtgtgtcccgctgcgggacacaccctcaccccagacagagaggg

SEQ ID NO: 173226 - DNA, 1528 bp, Homo sapiens
  Payload ID: 14046
  Gene Symbol: RAB3A
  Gene Name: RAB3A, member RAS oncogene family
  Uniprot ID: P20336
  ENST ID: ENST00000222256
  CDS Start-End: 180-842
ttatctacatgtgaggctccgcccctccctttgcaggacgtcacggaggactgcaggggcctgagccgctgctgccgccgccgccgcgcagccccacatcaacgcaccggggtcctgtcaccgccaccgccaaaaaagtcaccgccgctagggtcgccgttgcatcggtgcagggcaagatggcatccgccacagactcgcgctatgggcagaaggagtcctcggatcagaacttcgactacatgttcaagattctcatcatcggcaacagcagcgtgggcaagacgtccttcctcttccgctatgctgacgactcgttcacgcctgccttcgtcagcaccgtgggcatcgacttcaaggtcaagaccatctatcgcaacgacaagaggatcaagctgcagatctgggacacagcagggcaagagcggtaccggaccatcaccaccgcatactaccggggcgctatgggcttcatcctcatgtatgacatcaccaacgaggaatccttcaatgcagtgcaggactggtccacccagatcaagacctactcatgggacaatgcccaggtgctgctggtaggaaacaagtgtgacatggaggatgagcgggtggtgtcatcagaacgtggccggcagctagctgaccaccttgggttcgagttctttgaggcaagcgccaaggacaacattaacgtcaagcagacctttgagcgcctggtggatgtcatctgcgagaagatgtccgagtcgttggacacggcggaccctgcggtcacaggcgccaagcagggcccacagctcagtgaccagcaggtgccaccgcaccaggactgcgcctgctgagagccatcccactccctttcccctcttccctgtcttccccaccttcccccaactacccgggcctgacccggcccctaccagccacgggcacaagacccctgctcctgacttagcccgtcacccttatttattattgtagctatttatttatttattgaagatgtcccccaggggcccaggctcccctgcccgccccaagccctgcccctcctgtacatatagccctttccccactcagctgtggtgtctcgtggccccgtgaactcaccgctcaccctcctgaaccccccccccccgcctttttttaaaattcacccccatccacagttgtcagttgtgaagaggggccagatgacaccctaaagcaggctgatcgggcaatgggaggtggccaggcctgccagcccctcggctctgccgcggtgggccgaggccgctgttgggggtttccctgtgtggaccatggggatcagagtctggcctgccaggctcctctccccgttttctcttttggtgggggggtgtgctgtgggtattcaccaccctgggaccccccccccccccgcccaccagacctgttctgacctcatgagtgtcaaacgtgccccccagttccttaggagatgtcatgacaacactacacgcacccaataaagcgaatggaccatccatgtgtgtccctgtga

SEQ ID NO: 173227 - DNA, 579 bp, Homo sapiens
  Payload ID: 14046
  Gene Symbol: RAB3A
  Gene Name: RAB3A, member RAS oncogene family
  ENST ID: ENST00000481914
  CDS Start-End: 233-579
gagccgctgctgccgccgccgccgcgcagccccacatcaacgcaccggggtcctgtcaccgccaccgccaaaaaagtcaccgccgctagggtcgccgttgcatcggtgcagggcaagggtgtcctccatacaccggccgttttctggagcccttgccatcttctgcctgggcttgggcacatgaggatggagagagcccccctcacggctctgctacacccggtatccccagatggcatccgccacagactcgcgctatgggcagaaggagtcctcggatcagaacttcgactacatgttcaagattctcatcatcggcaacagcagcgtgggcaagacgtccttcctcttccgctatgctgacgactcgttcacgcctgccttcgtcagcaccgtgggcatcgacttcaaggtcaagaccatctatcgcaacgacaagaggatcaagctgcagatctgggacacagcagggcaagagcggtaccggaccatcaccaccgcatactaccggggcgctatgggcttcatcctcatgtatgacatcaccaacgaggaatccttcaatgcagtgcaggactg

SEQ ID NO: 173228 - DNA, 1253 bp, Homo sapiens
  Payload ID: 14046
  Gene Symbol: RAB3A
  Gene Name: RAB3A, member RAS oncogene family
  ENST ID: ENST00000464076
  CDS Start-End: 205-582
gcaggacgtcacggaggactgcaggggcctgagccgctgctgccgccgccgccgcgcagccccacatcaacgcaccggggtcctgtcaccgccaccgccaaaaaagtcaccgccgctagggtcgccgttgcatcggtgcagggcaaggacacagcagggcaagagcggtaccggaccatcaccaccgcatactaccggggcgctatgggcttcatcctcatgtatgacatcaccaacgaggaatccttcaatgcagtgcaggactggtccacccagatcaagacctactcatgggacaatgcccaggtgctgctggtaggaaacaagtgtgacatggaggatgagcgggtggtgtcatcagaacgtggccggcagctagctgaccaccttgggttcgagttctttgaggcaagcgccaaggacaacattaacgtcaagcagacctttgagcgcctggtggatgtcatctgcgagaagatgtccgagtcgttggacacggcggaccctgcggtcacaggcgccaagcagggcccacagctcagtgaccagcaggtgccaccgcaccaggactgcgcctgctgagagccatcccactccctttcccctcttccctgtcttccccaccttcccccaactacccgggcctgacccggcccctaccagccacgggcacaagacccctgctcctgacttagcccgtcacccttatttattattgtagctatttatttatttattgaagatgtcccccaggggcccaggctcccctgcccgccccaagccctgcccctcctgtacatatagccctttccccactcagctgtggtgtctcgtggccccgtgaactcaccgctcaccctcctgaaccccccccccccgcctttttttaaaattcacccccatccacagttgtcagttgtgaagaggggccagatgacaccctaaagcaggctgatcgggcaatgggaggtggccaggcctgccagcccctcggctctgccgcggtgggccgaggccgctgttgggggtttccctgtgtggaccatggggatcagagtctggcctgccaggctcctctccccgttttctcttttggtgggggggtgtgctgtgggtattcaccaccctgggaccccccccccccccgcccaccagacctgttctgacctcatgagtgtcaaacgtgccccccagttccttaggagatgtcatgacaacactacacgcacccaataaagcgaatggaccatcca

SEQ ID NO: 173229 - DNA, 12844 bp, Homo sapiens
  Payload ID: 14047
  Gene Symbol: RAB3B
  Gene Name: RAB3B, member RAS oncogene family
  Uniprot ID: P20337
  ENST ID: ENST00000371655
  CDS Start-End: 214-873
agactccgcccttgggcggggcctggatgcggccggagcggagcagtgctggagcgggagcctcagccctcaggcgccactgtgaggacctgaccggaccagaccatcccgcagcgccccgccccggccccctccgcgccctcccgacgccaggtcctgccgtcccgccgaccgtccgggagcgaacccgtcgtcccgcactcggagtccgcgatggcttcagtgacagatggtaaaactggagtcaaagatgcctctgaccagaattttgactacatgtttaaactgcttatcattggcaacagcagtgttggcaagacctccttcctcttccgctatgctgatgacacgttcaccccagccttcgttagcaccgtgggcatcgacttcaaggtgaagacagtctaccgtcacgagaagcgggtgaaactgcagatctgggacacagctgggcaggagcggtaccggaccatcacaacagcctattaccgtggggccatgggcttcattctgatgtatgacatcaccaatgaagagtccttcaatgctgtccaagactgggctactcagatcaagacctactcctgggacaatgcacaagttattctggtggggaacaagtgtgacatggaggaagagagggttgttcccactgagaagggccagctccttgcagagcagcttgggtttgatttctttgaagccagtgcaaaggagaacatcagtgtaaggcaggcctttgagcgcctggtggatgccatttgtgacaagatgtctgattcgctggacacagacccgtcgatgctgggctcctccaagaacacgcgtctctcggacaccccaccgctgctgcagcagaactgctcatgctaggcaaggcccaccttcctgacctcccctcattgtggccccacacccagtctgcttctccctgttacacactgtccgctctcagcccactctccctgttacacactgcccacactcagagcaagatgagttgctgctattctttgcctgcccctggggttctctgcagatggtcccagtaatagatactcagcactagactaacataacaggtcactacacgggtgcagaatcactttacaaaagaagactctgttttacgaaggggattcactacagggacttagagaacagtctcttttctgcctttaaaatgagagttcctccatttaccaaaatttgacacgcacacattcttcaggggcatgccaattgcgtaaagtgaggctcgcctgcatagctaatcctgttaaagacaacttctcaaagcacaacgtgcttgtttcctatcgggctccctgcggggctttctctcactacaagtcaagcttgggctctcaaagccctgcgcctgttaccacggatgcccacagggcctgggcagttgctgtggcgacaggaagagctaatcttcagagagctcagactctctaatgatgctgaaggagcaaaggctgagtcagaaacacacttaagagaaaaggattggccgggcgcggtggctcacgcctgtaatcccagcactttgggaggccgaggcgggtggatcatgaggtcaggagatcgagaccatcctggctaacaaggtgaaaccccgtctctactaaaaatacaaaaaattagccgggcgcggtggcgggcgcctgtagtcccagctactcgggaggctgaggcaggagaatggcgtgaacccgggaagcggagcttgcagtgagccgagattgcgccactgcagtccgcagtccggcctgggcgacagagcgagactccgtctcaaaaaaaaaaaaaaaaaaaaaaagagaaaaggattatcccctacaaaatgtcagaggttcctgctatatgaaagagcaagtaggtatgctcaagaaagacaaacagagaaaaagagaaacaggcaagatcaagaaacagatcatgagtttctgattttgctgctttccagttggttcttaactgtgggaacttagtgaaattggttattagttcttagactcctagaacctgaggattttagatttgacgggatgcccaaatttacctagtctgactagtcagttctaaccttcctttttctgacaagtgactgtcaagcctaacaatcaaatctctttcttttaaagcacaccttctaggcagggacaggagctcattttccacaccatctttgtcaactctcatagaaagttttccttgtatcgagctcaaatctgcctcctggaaattcttcttcttcttccctccctgttggtaccagctctgctgtcagagacttcacagtctgtgctccctctgccctgtgacgtcttcagactatttgagaacaggaatcatgactcctgggacttgccttttctctaggtcaaatacctctataattccatctgctgttcttcatagggtcttctccctatcctgcccttttcctccaatccatcttttaactgctcttgagcagtctaactgagaagtatgattcaaagcaaaataaatcttaaggtggcatgactctgaaaaaattgagaaaattgaactcagagatcccgatcccaacccctttctcctgggagtgaaaccttagtttctaccagagagtgtgggaaaccacttctggtggaagccccttaattaaatacctgaggaaaaaaataaaagaaactcagagaccagaataaattagctcattattctagcttgcttggccacagggacatattttgttttggctgaaataatgacatggaactggcagtgattccagaaaacctttcttctctatcatggcctgaatcctcagccacctcaaaagtcagcgggcaggaggagtctctcgccagttttcttttcatttcaaatgaggctcattgtcctagaaaagtaattaactagcaaccagtccaatgactaaataaaaggaccatccagctgtggctcacacctgtaatcccagcactttggaaagccaaggcaggaggaacacttgaggccaggagtttgagaccagcctgggcaatgtggtcaaattctatccctacaaaaaaaaaaattagccagatgtgatggtgcatgcctgtagtcccagctacttgggaggctgaggcaggaggattgcttgagcccaagaatttgaggttgcagtgagctgtaattatgccactgcattccagtctgggtgacagagtaagaataagaccctgtctctctgtctctctttctctctttttttttttaaaggagtcagctctacaaagatgttgctttctttgatgcaatgcagagagcagagctttggacttggaatcaggagacccggactctgtcattaaatcaactgtgactctgggccagttactttccacttttgagtcttgatttcctacttataaaatgagggagcttatttggatgatctttaaggtctcttttggcactaataactcggtgtctcttttttttcaccttcaccatttcagttgatccaccaaacaaacctgagagatcaggattggcatccaagagttgtctcggccaactctgatgtcatgcttactctgtactagacattgttccaagcattttacgtgcattaactcatttatcttcccaacatcttgtgagggaggcactatagtgagcctcatttgaagatgaggaaacaaaggtacaaagaggttctagctggacctctaaagtcacataataagtaagtggtagagctggagttcacatccaggcagtaggctccaaggtctgtgctcttaaccacattctgggctgcatcttttatagacaaactatgatccagagagattacgagacttggatcacataccaagagagtgttaaagccacattaggattcaattccagggccatcagattccaagtccactggagaaaagatgtatatctctaatctgttaacaaattgctcaactactcagactaatcccaggtgatggatgtctaatgctcaggaaaggcgagtcagtctctgaggcaacagatcccatgggcctgggtagaaaatgcccagtgcttcccagtcccaagtgctggctttccctgtatctgcctctgccaggcaacacttatcaggctcccaatcagcaggagcctccatgctccactttgaacagcctctatgctccagcaatggggcatttgtgaagagtgacttgattaacttttctgaccatgggtataatacagttgcttcagagggcagtggttctgggtgtgatttttacactgtaacattgtatacagtgtcatggataattactatttttttctggtcattaacactcacctactctagtactaggatttcagaccaaggtcctcatgacgcctggatattttagtatctatatccaataatcttttctctcctactgaatatccaggcaaagatgaaatcgttttctttaaaactgtcaaattctgtaaaactcaggagccagttcaagggaacaagcatcttcacaatagatggaatcaagagttaaatgttatagtggcaagcttgtctactgggcaacagacaaccagacctgcttgtgagatggcagctccccagccctgctctgtgacctcatttctgtcaaatgaaaggcagcagcttccagctgattgcagcatagtgttcatcaatcacagtaatagcgcaattagccaccaaggttcaagctgtgtaatatgtgttagtggcaacttgtcctggatttaatcttcctcaacaatccaaataaaatatttaaaaactcttgacttctggctgggcgcagcagctcatgcctgtaatcccagcactttgggaggccgaggtgggcagatcacctgaggtcaggagttcaagaccagcctgggcaacatggtgaaacccccatctctactaaaaatacaaaaattagccaggcgtggtggtgggcacctgaaatccctactcaggaggctgaggcagagaatcgcttgaacctgggaggcagaggttgcagtgagccgagatcgtgccactgcacttcagcctgggtgacagagcgagactccatctcaaaacaaaacaagcaaacaaacaacaacaacaaaaaacacctcttgacttctaaagacgcaaaagtggccaaaagtgcaatacagtattgtgtttatttacatctattttaaatgcatgtgtatctgtaaatacaaagtgattcgtgactcattgtctcctcagtctatagcattattaacttctaggagcagcagtggagtagagtgtactgaatggtcacagactcatcgattatcagatctggaaaggagcttagagaagatctgttccaggctcctattttatagaagggaaggttgacatccaaagaatggaaggaaatctcctaattattctgagagtatcacagtgatggagccaggactaggtcctggatcacctctaagaagacacttagctatttgactatcgactagggcctagcattattaagcactagataaatacagatgaaaaaaaaaatgatccctgcctgcaaggtcctatgatctaatggagatgctgtttctaaaatattattatcccaatttggcagtcaaggaaacagccctggaaaagttaacatgctcaagtcacccactagcatcatttgaaccctcctctgtctgactcatgctctttcaaatttttttcttcagattgtcttagcagaagggtagatgggatataccctctggtagtaccaggctcccaaggattcttagagttaaataacctcagttaattaaatagccacaattgcttggtgaccgaagccttataacatccacagaataagaccattctccagacctgactccccaactcatatcacctgctcctgccggccactaagctccttgcttggatatcgagttttctggagtatcctgaggaatgtttgtttgactttgtttgccaacagtttaggggaaggggaaagaactacaataaccagtgtcctgggatctcattgatttcagattccctgccccaagcctacacccaattacctgccatagttggggaatcaagtagcatcctgtggctggaagtaaatgcaaaacactagtccgtgagatataaatactgttaaatgatggttttttaaggtcctgatccattatatgaagtagacaaaattcaaatttatttattcatttattttctcaacaaatgaatatatattatgtgccaggatacaagtagtggcaaattagacacagttcttgctttcatgaaacgtatagcttcatgatttagtatagacattgtcaaatcatcacccaaatataattacaaagtactctaaaggaaaggcacgtgatgctgtgagaacactcaactgggaaaccggaatcacctttgagaaactgtttcaggggctcttggaagagtctactgctcccaaatatctctgctacccactggccattgctttacattcctcaactaagctttcaccttttagtactaacctttgatgactgatcaaatacaaatgccccaagaagactgaggataggagaaagaatatctctacctgtgaaacattgttagactgcctggctaggagttcattgttgttttctgaaggacgtaaccaaccactccaaaacttacaggcttaaaacaacaaacatgtatcatttcttatgattctgtgggttggctgggtggttcttctggctgaggcaggatggtctaggatagctacatccacatgtctggggtcccagctgagatgactggggctgttgaggcctttctccctgtggtgtcatcctccagaaggctgcccagatttgtccatatggtagcaggagtttcctcgaagcaagagagggcaagatccaacacagaagcacttttcaagctctgtttccatcacatttgccaatgtctcactgatgaacacaagttccatggccaagtccagttttaagaaatggagaaatagggcttggctcagtggctcatgtctgtaatcccagcactttgggaggccaaggcatgcggatcatttgaggtcaggagttccagaccagcctggccaacatggtgaaaacccatctctactaaaaatacaaaaattagctgggtgtggtggcgggcatctgtaatcccagctatttgggaggctgaagcacaagaattgcttgaacccaggaggaggaggttgcaatgagcctaaatcgcaccactgcacttcagcctgggcgatagagccagactcagtctcaaaaaaaaaaaaggggagggggaaatagatgccatctctttatgggaggagctacaaaatatggtgaccaatttttcaatctaccacaggaagcaccctcagtcctctgaaactaagtctggtagatgtcctggggtcttaaaacatggctccgatgatatcaccaaagacaagtggcaaaactgtatagggcagggcagtcttatcatttgtttaatagtgatccaaaggatttactttggaggaatcaagacactcgagatgaagaagttttgatgcttgttaaacagtccatttggatacctcttagctatccccgagggatgaatctgacttctcatttcacaggattcaccgtagataatggttgtaattcctaccggaagttcctggccagaagcccagcagaaagattcagtatatatagaaaagatggctccaagaacagttgggccttctgttctaactgtacttccttctttgatgtactcgtctagtcccgaggctttagatgccaagtctttgataataacgtgtatctaagtgcctactggacattttcatgtctcaaacttaacatgtccaaattgaaactcttgattctgcccccaaacttgtttgaaccccagtcttcacagaaaactcatccttaattctttgatttttctctttttctcagcctccttgtctaatctagcagcagatcctagggttttacttctaaatatatctcaaatctgatcatttttctccattttcattggcatgaccttggtccaggccaccattgttttctgccctagagagctaccacagagttcctaacatttccctacttacgtaattactccactctagtccattctgtctcacaggagtaacattttttatatatatatatatatatatatatatatatatatatatatatatatttttttttttttaatagagacggtcttgctatgttgcccaagctggtttcaaattctggcctcaagcgatcctcttgccttggcctcctgagtcactaggattgtacgtatgagccaccgcatccagcctcaatggcaatctcttaaaaatctaaataaatgaacggctcagtaacactgaggtttacttcacacaaaaacaatccaaaccttggcaagacggtgaaaccctgtctctacaaaaaatacaaaaaattaactgggcaaagtagcctgcacctatagtcccagctacttgggaggctgaggtgggaggatcgattgagccctggaggtcaagaatacagtgagccatagccatgattgtacactgtgccactccagcctgggtgacagagcaagaccctgtccccctctcaaaaaaaaaaaaaaaagaaagaaagaaagaaaaaaaagaagaaaaggaaagaaatgaagagaattcagagacttccattattattaatacctattttattgattctgtttctagccctgagtccgctcctaacttgctataggatctctggtaaatcatttcctgtaataagcagctgtcacctctctccttgtttcttccagaaatagtaatctcttctttagtagtactactactccctaacccaaaccaggtgattctagtgaagactgtcaataaacggagcatgtgatcaagcagggcccatcagaatccttccctaagatttttataaaaagctggacctattctttttccatttgagtggcaaatatttgaagatatgaggtctaaagctgtgatggcttattctccatccctgtgtaaattctggtctatagtaagcgaaaacaaggccattaggcagagggcagcagagacataaggtgagaaagagtgtggtctctggttttctagaccctgattctggtttggaggcttggctgatcacctcttcctttgattctgatagaaagctcaatgtatctttctaataaaacccccctttgctttgcttgttggagttaggttcttatcccttgcaaccaaaaatatattgtctcttcttttgttctcagttttctcatttatatatccttctagctccaaagcacagaaattctaaaacaaacaaacaaacaaacaaaaacaaacaaaaaaaacctgggtcattcagaaaatcccactgatatagactttctgatccagaatgtataatctgaaaagaagcctaccctcgtctccatcctctcttcttgtacctgaaggaacgaagaagagggatttctcaaggtgagaagcagttctccatggacactgatgacagcacaggcaaagtttcctatgactagggatcactgtccacacagagtctggcttcccaggtatccagcaggtagacaaaacagctaactccactgccactcctttctccacatccgttcctatttctcagccatctcagtgacatccgccatcttgagagtcaactactgactggactgagttgtgtggtatatgcttctgtttacttctcttctgtcttttttaagtggccaaatagcaaacgcttaaataggaaatctctgggagacttgaataaaagactttgcttggtagaaaatcatgtcacagaaaggctaatagacagcaaagtaaatcagcaagtccctgagcagtaggattaggattcctgtctcctttcagattcaaatgcatctgtttctggggttaacagtggactgttaagaggctgtgcagcttgggttaagtcattcttatctctgggcttcaggagcttagaccagatagtttctacaggctctcttggtgctgatgccttgggattctgtggctgttttctgtaagatctgcaagggggaaacaggattttggcagcaatcctttcattactaaagcttcctttcttttcgggtacagtgaaaagagccaaggctgtgtgaccccctcatcacttagccaggcgtatggtcctggtttctgaggctgccagaaagcatcttagcaatttgtgtttggatggtccatgcctgactattctaggctggaggttcctaaagagtaacaagaggaagagaaacaagaatctctgacacttgttgagaatagagcacagtcccatttgtttgaaaagagacaccaggcagccatgtttatgtgccagaaatgcattccacctcaaggaggacttaatttatggacccgtgtgtgccaggctgagctgggcaagatctttctcaggacaaactctgccatgcagctaaaagcctggaaactaaaggatttcatgtagtaaactatcttccaacccctgtagacatcagaccacaggatgaggtttcagaaggtcataaggcagaatagttaagcctacagggcttacagtctgacagacctgggttcagttcttgggtcttcatcactagttttgtgacttcgggaagatgactcccggagcctcagtgagcctcagttacttcatatgtaaatgaagtaatactatctacttcacaaggctgttgaaaggattaaatggagaatgggtgtaaaacccttagtgcagtgccgtgcacacacagtagatgccgaacgtgtgatgttggcactacacaatgtgtaatcccaatcaggcagagctaggcaggcaaatctaatccaggatctttgtaaggggactgagaaccagagactggagaaagccagtgtaaacaccatgagcaaaggagcaagagaaggggcattgtgtaagtaggagatggagcttgaacttactaagtggatcagggtagaagaatccagtcaggaccaagggaggagagtccaggaaaatgccatgagcagctctgtagcatgaccttgttgggctgggttaaagtagggtctgccaccagtcatgtgacagaaaggtacctcatgcacttcctccttcccccagaaatcagcctccaggagtgaggaatgagcccagaatgagagtttagagtgctccagagcctttgttagaggtgccctccgacattcagaaaaccaggattccagagacctgggtttgagtcctgactttgcagcatactaactgtgtgatcttgaaccaacatattttcacctaatgaggctgacaatcttccctacttcacaaaatagttatgagagtcaaataaaagtacattttagaaagtgaaatgctgtggacatttaaggtggagccactgtgagagtctagggggatagatggtattcgtctcagaatgaaacgaatacacccctctcagagccctttccaaggatcccctccttctttcagctccttccctccacctcaatacacactcctgtcccaggaacctaacctcatctagaaataccagggccagcatgccttacacctagaggtttggttggcttcagagaaacttctggaggctaaaagcagccaagaagaatcagccactacatgctgggcctggatgaacagagcagtgagctgtgatggggctggggctggggcccaggaggagcaggcaggagagtttgtatgcaccgtgattcaaatattataacaaaaatcatcgatcatgtgttaggcactttacagttcccaaagcactttcccatccatgccctgatgatctttgacacaacactgtgatgtgggttttattatttccagtacagatgaggaagactgaggcctgcatcagtgaagcaacctatccaagactacatagagaaggcagtaaatggcagggttagtctcagaacaggggagggtctgttccccccgcagtgggcagtcctaattctgaacttcacctatctgggggtgatagaggggaacaagaggaagcctgctgaagagaaaacctaaacatctgttttgtctacgtatgacttcctctgcttgtgggagagaaggaaggaaaggaacacattgttgtcagccccacaaccccaacagaattaaaccctggagcaggttgaacagcagaggcttccctcagatcaaggagccaggagcagatgatctatctctgtggccacacagagagatgtcaccttatgcaatttgcatatcatattcaattcccccaactgctctttctaatttattcaactggggaccaggctggtctcatgccaacctaggagatgtaccatagcagtatgagcagaattcctcaggaggaacaattagcaaaaactgcagttgcctctcgataggcctgagcagagagaggaacaatagctctcacgtctctcctcatcagattctaactaagcagatgttctcatgcttttttcttcttcctatgttctgtatactgacacctcttctcagtggcatatgaaatatgaaatgtcatgtgttgtgagtttgtataaatataaaggaatatatatacacagtagcaaaagagaagatctcatttacaaatatctatggtgtttccttgttctgtgttgatctgttttattgatacaaactgaattttcttaatgtatcttctatctctattatagtggcaatgatggtatatgcattaaagttcttctgaattgtg

SEQ ID NO: 173230 - DNA, 8896 bp, Homo sapiens
  Payload ID: 14048
  Gene Symbol: RAB3C
  Gene Name: RAB3C, member RAS oncogene family
  Uniprot ID: Q96E17
  ENST ID: ENST00000282878
  CDS Start-End: 170-853
agtacgcgtgtgcggcgccaggagaggacagctccagtgctgatgttggagccggttagcgaaccccaagagtgcagagtgtggagcgtggagcgccgggactgtgcacgcttgaccggaagcccagaccagtgcggtcctagccagagagaaaggacatttgccaacaatgagacacgaagcgcccatgcagatggcctctgcccaagatgccaggtacggccagaaagactcctctgatcagaactttgactacatgttcaaattactcatcatcggcaatagcagtgtggggaaaacatcttttctattccgttatgcagatgactcctttacatctgcattcgtcagcacagttgggatcgatttcaaagtaaaaactgtattcaaaaatgaaaagagaatcaagcttcagatttgggacacagcaggccaggaaagatacaggactatcaccacagcctattatcgtggagccatgggctttattttaatgtatgacattacaaatgaagaatccttcaatgcagtacaagattggtcaactcaaatcaaaacatactcttgggacaatgcccaagttattctggttgggaacaagtgtgacatggaagacgagcgggtcatctcaactgagcgaggtcaacatttaggagaacagcttgggtttgagttttttgaaacaagtgccaaggacaacattaatgtcaagcagacatttgagcgccttgtggatatcatctgcgacaaaatgtcagagagtttggagactgatcctgccatcactgctgcaaagcagaacacgagactcaaggaaactcctcctccaccgcagcccaactgtgcctgctagtgtccccgtgcacacaggcagctccagggggctctggttgccaacaaacagcatttgtaaatggtctattagccttcatttatactgcctaacaattatttgaaggaataaattgatgtcaatggctcgtacgcattcaattcttgggagctttcctgtttaatatgtggcaaatatgtgatcttaaatttataaggactatccatctataaacatctggtacctgcatgtgacttgttatttatttgtctgctaggctctttttgtttcaaatttgttctcagactacttctgggacatcagactataatctcactacaactggcttttgtcccattgattcaaattatgctattcacttgtaggaatgatgaccaaggaattgcttgtgtgtgtgtgtgtgtgtgtgtgtgtgcacgcatgcccgcatgcgtgcagaggaagaagtcacaagacttcatttgctttactcttagttgaaaatcaaatggaagtttttctcatgattagggacgctgtcacgagtctggtcagtttactgttgggaactgtgtctttatttcactgttattaataactgagatcattggcctataaagaaattgaaatgttgtttttaaggtccttgcaattttcctaagtcattaatattacctgactggggctatttaacaataatcttcgtttacacatttaaataagcaagtatctacccaggactgctttttccactgatccttcccaattctgtgaatattcaacatcattgaacagattgagacatatctactgaatgccagttatgcaacaagcattttaaccaagaagggtatgagtagctatggaattccaaggtccaagcccccttatttttcaatgacttgccttccccaacccccataatgcacaccaccaccaccatcactttctggaaccatcaccaactcttggactagagcttatgttgaagcttgttagggctcctctttccgtaggatgtagacttgcctccccaaacacggccatcttctcaaacctcagctaagttcttttacctgtttagatgctatttaaatcagatttcaaagggtccccagttgagaaaaaggaaaattttaatctttaatcatctttttaagtccagatgttcataaattctaaagcatattcctattacgtgaatgcttaagttacacaggaaacattctataactgtagtatttcaatttcagaaatatttaggatccatagcaatttaaaagagggaggaaaccactggagcattctaattttgtatcacaaacttcctaaaggacctatatgaataaagagaaaacaacaaatcctaccagctgtacagagagcaacagggaaatttggcctctgtatcactgtccagcattatttaaagctaggatttaggaaggaagcaggaattatttggcagatttggaaggatagtttcgttaagtgaactttctacttttttggtggttatgtcaaagaatttttttcctcttctcaaaaatagagaggcttcccatgaaagtattggatgcaaatgaaacaggcatacatctaaagatatctttggagaataaatccttacaagtcacagaactaggtcacacacattagtaagtcaaaagttggaaattaggggagagagcatttggaatgctttaagcatttccatgttatttctcaccttcctagttgaagatccactaatcagtagtacatttctactttggtgccctacaaagcaaaccttagcatagtaaagacaagaaaacattaatgttttattagtttttaatggggcaaccaacttcaaaatcacaggaattacagtgacgggagagaaagaagcaggaggcataaaaacagatttgtttgtagcagtagtctgtttgtacaatgttataatatttctgtaacttgggccagaatgtggccatgttaaatgatatagctattaagctcacttttacaatctaaaaggaactaataaagccaggaaacccttctcatcctccttcacagccctcatcccacacatagatgtaaaaagcttagaaagaatattctgatggctttttcagaaggaaggaccttgatgtgtgtattgtggtaaaatgaaaagcaaaatgagacagtatttaaaagtgaaagagcagagttttgctctgctgaaaaccccttccctgaagaactgattgctgttgaagttaattggcccttagatgggaagccctaagccaagctcccacttacacagtgtcaaacatcccgaagtggaaacattttatgccagtcaggggagagacaggcaacaatagcccaaatgtcattgccaagaaacatctgatactttctaatttctaaaccccaatggaagtgaggcctttttcattgattctcagttctgaaactcccaccctgttaggatttccattccaaataattcaatgagaggtttccagagaaacagtcacagagctcaagagaaagaacacttaaatgctcctgctgtaattgcatcaaaaaatccgggttttaacatcaaatttggcaaatggtgggaccaacccaaggttaactaagtgggctttcattggcattgagctatgttacttataaattataacactatagttccaaggtttttcagccttttggccaacacacacacacacacacacacacacacacacacacactataccatcatctatcaatagtctaaatacataaataaatgcaggtcatttttatcaatggcctaactaaatttatatttaaaagaacaagacttttaaaaagtacatactcctgttggtttgtaagttatacacatttatctcttgtctttgatttaattaaattagtgttttaagtatgaatttattttcctttgctactcattacctgaccactttcactcctctagatacccttaggaataaacctgaactgttccaaatcgattcttccaagagctttggtgttggtaccttcctttcttttcctaatgcaactgaaaaattagactgaaaattatttgacttaaatagccatcctcagagtgaatcagcatttcagtttttggagatggggatggaagtagaaggtgcacaaagcgtcctaagatggcagtttgaatgttagcatcgcatctacatgctcataagaggaattgcttcaggacaatgaatcagttcattgttgctgcccccagtgaacagctccaactgccttgatgaacttctaatgactgtgaaagctaggaggttcttctagttcctccttagggtcacttgaagttcagtatttttttgctgcctggtaactaagtgctaagatttttacttggaaagaaaactatgacaatgccttcagttgtagcagaaagttgtggcattgtgataataaacaaaatctacaaagttacaacccaaattatacaagacatcaaaacactcagtaaacaaatatatatatttcacctacttaaatcttattcatattaattataggccttttgtttagtacactggttattttttaaggaaccaatttaaactttcaattttaaatacatctatgctgacgatagactttcgggtatatacaaccttcttcttctcttttaaaagttaaatacattccactattaactgaacttccatgaagcaacattaattttagagcatggtagtccataatcagtggttcattgtgatgtgctttatccaacatgtatcttagtgcatggttgaggatgtactatgtgatattttagttaacagtgtggcatttgtgggactatattaaaagcatatccaaactaccaagctataccaagctgaggtaggtaacacctgcatgtgaaaaactgtgatatgaatcttatttataaaaaagtcataactaaaacccttctagaccaaaaagttactgtgtgtttgttaataatcttcatagtactactggaatgctcaatcagttatttttggtgtggcatacttcagagctggcctgtccgtctgaagaaccctttctctcacaattacagtttgcatgactagaacccggaactctgttcctttgcgtgtatagtcacttagtgtgctgtccgggtgccacatgagcaactacacccatgtggcctttctgtcactccctggaaaatgcaacctctacagctctgctcagctctgcctgtgtgcattgattaccttcgctttagtagtttgcctgtaaaatggtgaagtctttctgatatgctgaacctttgagccagcttttgggagttcttcatattttaggtgaatttttgaccaaagtcaattaaagacataaacctgttttatatcatggaatttactgggccaaattaagtaaaagatgaagtttatgaccagaataaaaaagcctttacccctgcacagcactgtatctaaagggctctaggttgtagaaatatagtaccccctaacagggaaaaaccaagttgggggatttatctaaaatgtatctacctattgttactggtatttcacaaataatttttttcttaaaaatatttacagaaatgcttgacactccggtcaaataatatttccctttgatagattgaaatatttgcttttagattacacatacagtgctgcccttctcaacagtcactcacacgctcactcgcctgtacaaaggtatcaggcaaacactgatacttttttttaagaaggcaaaattccatctatggtgctttctcagtgctagggaaaagggagcttttactatgttccagctataactcacatcttacttataaggtccataaaatcggttcttcacactgatttcgtttgattagtctgtgcatgtaattaatttcctccaaacagagagagtggaggggaaataaattttgcaagcattctagataacagaaatgagtcattttaaaacctcactcagagctcgagtgttaagatcagaccatctagctagtggacaaattgaactttctatttgcagttctcttttactttctgactttcttttaaattactgcagtttttcaaaacactatcctcatggaatgacaggaccaagaatagaaaatgagactcaaatttcaccatttacttcccatcagcaaccattactggtggagtttcaaacagtcattacttgctgaaatgaggtttgaggttacctgtgtatttcattcacctgtgttaatatttccttcatcgtggacaagtgagagttggctgtggctttatttcttgaggcaaattattttgcattcatgttatttggggctaggtattgcttaggttcgtgaatgctgttcttacagacacagatggtacctgagcccctcagacacctgccctttcagggacgtgagcatgacttacatctgtcaagtggttccatacttcttgtaaaagtaaagtttgggtattgtttgctgtatcaatatgatggctttccatgcattgtctcattatccctaggatacgtgctaaaggaaaactgtcctgtaattcctgttaatatattgttaatgtcagacgtgatgtgataccgttagactgtccaaatgtacaacaatttaatggtgtttgtagaactgatatgtcttaaatgttgcatgaaatatgttataaaaatagatttgttttctattttcaacacctcagaattgagggttcatgggccaataagtgcaatatttaatgactcactcagtgtatataaactagtatgaaagagtgaattataatgaatgtgtgagatgctttgatagctgtgtgacttattcaaatgattttcttgtagctgtatttgtctagtggtgcaatttatacagtaaatatcttattggtgtcatgtaaaacccctctgtgcctacttcaaaatacttttttcttataaaaccaaacatttagtatctggaaatatgtgtcaattttatctcttagaattgtggattttattgtcaagacagaatggctgttcatttattttataaaagcatctccttctataactcaaaattttctttaagtgtcatataaaagtgtacattttacttttaagcaactaatttagatacctaagaaaaactatgtgcattaggaaaagtcatgtttttcttctcagaaaggttgatcacatgacatgtctactaagaattttcacctctgtacttgtatgtatattttattgttactcaatcttgtattttatttacaaattcaacactgtcaaccctgggaattctaaaataccaatgtatttttaggttgtagctaatgttgtattcactttcaattctcagttgtccacactggtgatataagaggaacaaatcagaatcattaaatactttgtaatgccatcataaactcatatattcatcctcaaactcccttgtttaatgctaattggtggcctggaacttcactgagatgcaaaatcaagaactgaagcctagttgctagataacgaaaagctataaatgtttatgtatgtgaattttaaattagaataaccgtcttaaactcctacttgccatttctaaggcaaagcattcattttaatattgtactttgccttttcattcagttagtggagtaagtcatgaaacccttaggaagaaaaacaagttatgacttattcactaaaattgatgcaagacagttggttctagatgaccatggccatgtgttcatcatataaaaccttcagttctctctatggtgcttggctggagattgacatgtgaggatgtgccaatcatattaaatggatttggtctatgtgggtgatatgtggcctgaatgtaactgtgatagactgaaatttgttcttagctctcaaaatccactgaagaagtcaagtgaaggtgggtaaaatagggagattagtgacaactttgtgccaaattttttaaaaaatggaagcaggtagccaatattagaatgataatttaagggtgtggttgaattttagttagttgtcacatagttattgaacctcatatgctcagtgctgtgggaatcaaacatggaagaggtatggctcctgcccctaatgagaacaagggggaaaaatccagatataatctaaatgctaggttatgtcagggtataggaacacagagaatgggggacctgtaagaactggaagagtcagagagggctccattgaagaggtcaaacataattccggaaagaattaggtagtgaggagattgtgccaggaaaataagtgggaaaggccacagttatgtttcctttgaatggaagagagacaaagctatcagctatagatcattgttttcttaagacagccaaactggccctttgaaaccattcaaattaccccagtttagctccctaccttttagtctccgtgaggaagacaagctgttgcattatcatattcctctgtgctgagcagctcaagactcagccacaatatgcaaattgctttaatgccatattacggcagttgatttagacatttgccagtgcaccaaaccatgagagattgtccgacctaatgccacctggcagatgtgtacccagagatttttctgtagctccatgtttcccataaagggcattggaaatgcacagatgaagatcttcctttggaaccaggcacatttggccccttctcagtgactgcactgtggaactcttcttaagaaaatattgaaaacagcttaatgctttcatatagtgaccgacatttagttgaaaactactgctgcatagcaaatattgtgactcttcatgtgtccacaggagctcttgtgtgggtttaaagctatgaagtgtattcacattgtgaagttttaattatctttattgaaattaattgtgtaaaaatggtatgtgctctattaggtattcagtttgtatgtgaattctataaagaaagtggtttttgttctttgagtttgttttatttcttgaagattacaataaatatctaagagactatattcctgaa

SEQ ID NO: 173231 - DNA, 4273 bp, Homo sapiens
  Payload ID: 14049
  Gene Symbol: RAB3D
  Gene Name: RAB3D, member RAS oncogene family
  Uniprot ID: O95716
  ENST ID: ENST00000222120
  CDS Start-End: 262-921
ccttcctccgccttctgggcggagcccgcgcgggatccgggtggctgcaggctgctggcttctgcggctgcggggtcggggtcgcggccagggccaagccgcagcgagttcacaggcggaacccctgcaggcggcgccccctacgcgaggtcacccctgggaaggagcgcagcccacccggcccctccgcatccgagcaggacgcccgtctcctctccctgaggatttcaggtctccctgtcccaggaggcttgtgccaagatggcatcagctggagacacccaggcaggcccacgggatgcagcagatcagaacttcgactatatgttcaaactgctactgataggcaacagcagtgtgggcaagacttccttcctgttccgatacgcggacgactccttcactcccgccttcgtcagtactgtgggcatcgatttcaaggtcaagaccgtctaccgccatgacaagaggatcaagctgcagatctgggacacagcgggccaggagcgctaccgcaccatcaccacggcctactaccggggagccatgggcttcctgctcatgtatgacatcgccaatcaggaatcctttgccgctgtgcaggactgggccacgcaaatcaagacctactcctgggacaacgcccaggtcatcctggtggggaacaagtgtgacctggaggacgaacgtgttgtgcctgctgaggatggccggaggctcgccgacgaccttggtttcgagttctttgaagccagtgccaaggagaacatcaatgtgaagcaggtcttcgagcgcctggtggatgtcatctgcgagaagatgaacgagtccctggaacccagctccagctcaggcagcaacgggaaaggcccggccgtgggggatgctccagccccccagcccagcagctgcagctgctagagatggcccccaaccccccacccacccctctcctgcctcggcagggactgtgatcgaggcgtgagccacagtggttatctccaagctcagggcaatcccttccctcctgtcaactgctccccgactcctgcatggctcattccttcacaatgtcgccgtggctgccaggttcctcaggcagccccggtgggaggctgcggaccatggggactcagctctgcatggcaggcagaggcccagggacactgacgtgcatgagcttgctgctttccagggtgtgttgagggtggccatgggtgacacgtcccactctttctgatggaggggcatccgtggtgccttctagcttagaaccattttccaggtctcttctgggttgggcaggactgatattcccaagctggtggaagatggttcatcttcctcgcacagtgtgggttcttggagttcatccagggaaggcggcgcctctttctcaggtcctgcaggctggtctctgagcctgcccccacgaactttctggattccaaggtgggatggtgatccctttgacccctgcagaccctctacttgcgaaaagcagcattgaagcagccttttcccattgtagaagggacagggagtcagatcccctcaaccccccggcttcagggaccccagaagtgccttccaagcttcccccaagatccacatcacccacgaccctgccactgtttttgctgtgttcaccacatctctgatcctgaagtgaattctggaactatggaccacattagactgggcagagattcgcccaacccctagcactccggctctgggctttcggccagaagttaattaacctcagagccaggagcctggggctggggcctccctcccaggccctgtttagctgtttagctggttgtgttttaagcaagttcttgcccaatcatgcatcctgctagaaaaggaaatgaagcaacgttcccagccaccgcaggcagttgtcggcgactttctgatgtaagcacctgggctccgacttgaggggggcccttcaagacccaatgtccatttcccaatccttgtcatcggcagggcccagggatgtgacaatttttgctaatggaggagtcacttctttttttttttttttctttttgagatggtctggctctgtcacccaggctggagtgcagtggtgcaatcatagctcaccacagcctcaaactaggggtcacttctaagggatgctgggggttgggcggaaggggtgaggaggtaggattgagtaacttgctgtcactgcttgtactttgtagacagcctgagagtggcaggaccttatgtgaatgggggggatggactgtgatcagtgccggggagtctctgaagctggggtccccacctccaggggcttctgctcagaggttacgtgtgcagtttgaagatgtacatcttgacctccggtttagaggcactttctgcccatcagattccaaactctaggggcgcagcaccttttctttgctcccaaacaccaaccaacaccccttcacaggaccagcactgttaggatggctaagtggatgttttatgttcccacgtccctgactctgtttcagaggttgtgtctgctctcccagcccctgaagccaaaatgacttcctgcagctttcatgagctcagcctcttccctggggtatgtgtgagggggaaagcctggttcaagtttagatttatttctagggagccctggtttcttcataccagaggctacccttagaactttggagtggggtatctttttttcatttgtttttttgatacagagtctcgctctattgcccaggctggagtgcggtggcacaatctcagcttactgcaacctccacctccagggttcaagcgattctcctgcctcagcctcccgagtagctggcattacaggcacctgccaccacacccggctaaattttgtatttttagtagagaaggggtttcaccatgttggtgaggcttgtctcaaactgacttcaagtgatccacttgcttcggcctcccaaagtgctgggattacaggcgtgagccatcacgcccagccgagggtatcttttataccaacaaattagatgactgaggtgtaatggacaaatcctatgcacaaagtgagggtatctgaatatgtgggcgggagtcaaaaatttttagctactttaacactaaagtcaaactaaagtagcttcaaaaagacttctcaagatgcagtatggcctgctgaggtttttttgttttttttttttttaagacagagagtcgctcgtcgcccaggccgcagtgcagtagcatgatctcagctcactgcaacctccacctcccgggttcaagcgattctcctgtctcagcctcctaagtagctgggactacaggcacctgccaccacgcccatctaagttttgcatttttagtagcgacggtttcaccttgttggccaggctggttttgttggccaattgtctctaaactgctgtcaaaaaaaggaatggatcagattgtcttgaatagggcagagctaacctgtaatcacctgtgtgatgagaaacagctttgactgcattttactcctgacctggcctaagctttctgtttacataagatttttcaagaattcaacttcaagtagcagccgagagagctgcctcaggattctctcaaaaactgggaataatatgggaacatttgtttcttctaaaaataaggcaaatgttacattgaatgatttggggggtgaggtttaattggaaatggtctctggggactgaaaactgatgtttttgcagattacctcagggaaacggaggtttgttgagtttacagacacattaaaccaaaggccgtgggaaaacccctctccagctccaggggattggtcaggaccacccactaaccagtgccttccttcttaacattcacttttagcagcttgtgtttattttacatgggcagttttgatgggaaattgccatgaccacaggggtttggagttctgctttttttttttcttcttctttttcgggggactgggggactcctcccaagatcacattttagcatctttctctcctactccatttagaaaaataagtaacaggtgaaatgtggtctcagtgttaacgggataattctgctaccggctcctccctgatgattctgaaatacactactgaacgagctctggctggtcctttctatcctggatgtggttcttctgtgtagcaattccttgatgtccagtttggaaagatgtactcttctcaacaagaaaaacttaaatccgtcgtgcccaaatatagttgtgcttttatttcca

SEQ ID NO: 173232 - DNA, 924 bp, Homo sapiens
  Payload ID: 14049
  Gene Symbol: RAB3D
  Gene Name: RAB3D, member RAS oncogene family
  Uniprot ID: O95716
  ENST ID: ENST00000589655
  CDS Start-End: 206-865
gggaaacccacgaggggacgcggccgaggagggtcgctgtccacccgggggcgtgggagtgaggtaccagattcagcccatttggccccgacgcctctgttctcggaatccgggtgctgcggattgaggtcccggttcctaacggacgcccgtctcctctccctgaggatttcaggtctccctgtcccaggaggcttgtgccaagatggcatcagctggagacacccaggcaggcccacgggatgcagcagatcagaacttcgactatatgttcaaactgctactgataggcaacagcagtgtgggcaagacttccttcctgttccgatacgcggacgactccttcactcccgccttcgtcagtactgtgggcatcgatttcaaggtcaagaccgtctaccgccatgacaagaggatcaagctgcagatctgggacacagcgggccaggagcgctaccgcaccatcaccacggcctactaccggggagccatgggcttcctgctcatgtatgacatcgccaatcaggaatcctttgccgctgtgcaggactgggccacgcaaatcaagacctactcctgggacaacgcccaggtcatcctggtggggaacaagtgtgacctggaggacgaacgtgttgtgcctgctgaggatggccggaggctcgccgacgaccttggtttcgagttctttgaagccagtgccaaggagaacatcaatgtgaagcaggtcttcgagcgcctggtggatgtcatctgcgagaagatgaacgagtccctggaacccagctccagctcaggcagcaacgggaaaggcccggccgtgggggatgctccagccccccagcccagcagctgcagctgctagagatggcccccaaccccccacccacccctctcctgcctcggcagggactgtgatcgagg

SEQ ID NO: 173233 - DNA, 1345 bp, Homo sapiens
  Payload ID: 14050
  Gene Symbol: RAB40A
  Gene Name: RAB40A, member RAS oncogene family
  Uniprot ID: Q8WXH6
  ENST ID: ENST00000304236
  CDS Start-End: 343-1176
ccaaacatggatcctcatgattttattttctagattggctgataggctgaataatctcctgtagggtaagaagtgtcaactgtatcaagcacatggaggtggactggctacaggagaaagtgtgacgtgggtgaaggagttcttattgagccatgggaggaagaaatagtacagaagagcaaagaataataatgagtcagctagacagaagacaggagtcatcagatttgtaccctagttactcgacccatcaactgactgtggtttttgggaacaggcccggcaccacctctgcgcacaaccccgcgggcctggctcaggcgggagtgcggggccagcaccatgagcgccccgggcagccccgaccaggcctatgacttcctgctcaagttcctgctggtgggcgacagggacgtaggcaagagtgagatcctggagagcctgcaggatggtgcagctgagtccccgtacagccatctcggggggatcgactacaagacgaccaccatcctgctggacggccagcgggtgaagctgaagctctgggatacgtcggggcagggaagattttgtaccatattccgctcctactctcgtggtgcacaaggagtgatcctggtctacgacattgcaaaccgctggtctttcgagggtatggatcgatggattaagaagattgaggaacatgcccctggtgtccctaaaatcctggtggggaatcgcctacatctggcattcaagaggcaggtgcccagggagcaggcccaggcctacgccgagcgcctgggtgtgaccttctttgaggtcagccctctgtgcaatttcaacatcatagagtctttcacggagctggccaggatagtgctgctgcggcacaggatgaattggctcgggaggccgagcaaggtactgagcttgcaagacctctgctgccgcaccatcgtgtcctgcacacctgtgcatctggtggacaagctcccgctccccagtaccttaagaagccacctcaagtccttctccatggctaagggcctgaatgccaggatgatgcgaggcctctcctactccctcaccaccagctccactcacaagagcagcctctgcaaagtggagatcgtctgcccaccccagagcccacccaaaaactgcaccagaaacagctgcaaaatttcttaaggaaggcaccaaaaggaaacaagctggaatcgctccaggaaaaactctggttacacctggaagatggaagtcgcattgtagattcaagaaattagttttcagtttctcacgggaaccatgctgcttgggaatgtgtgtgatgccttctgtcaataaaaacacattacac

SEQ ID NO: 173234 - DNA, 3126 bp, Homo sapiens
  Payload ID: 14050
  Gene Symbol: RAB40A
  Gene Name: RAB40A, member RAS oncogene family
  Uniprot ID: Q8WXH6
  ENST ID: ENST00000372633
  CDS Start-End: 2120-2953
atactctcaacaggttttctcatttgctccttgggacagctcggtaaggatgatacagtcagttctatctcacagataatcaagctcaggctttcagagcctaagtcaccttcccaggtaagtggcaggattggaatgaggtttcatccctcaccctccctaaaggaccctgagcacccccttttagaagatgggcttccagggcttgagaaatgtcagattccactcccctgctattgtggccccatgggtcccccactccacaacccctctgggtgatgaggaagacagaagtgaaatcctgcactttatgccaagagactgggtgtgggaccgtatgagttggctgatcccttaagtggtgagtgggctcaggcagaagcttaggtgttggccttgggacaggtgagctgaagagaaggaaagtaacctgcactgaactactttaggcaaatgcactctatatttcatctcctttatcctaacggctgttcaaggtaccgatgattatgatcattattccaatcagggtgctgtctttaagggagtttgtgtaaatcagggagagaactttattatctccttattgtcagctaaatctggaattaatctaaaggttttttttttctctatttgccctgaagcccacagagaaatagaaatgtttttcttatcctttattcacgtttgttctgtattgatgagtatttagaatgtttctcattttttcctttttaaaaagatttcagcaatgctatttcaaataaccacttacctggctattttggacatgtgaaaattttttcctccattacatttgtaaacatctatcccttggggcttgatttcaataatttaaactcccttatatgtgtatgagcattctcatttctttaaccatctttgtacctgttgtagttacaatatttaagtgtatttataactgataagtgtgtttccatttccttgatgtatttggtccctcatcctgcccccatacacagacacacacagagcctttttcttttgcatctttttcttttgcaaattaaaaaaaaattctttttcggtttttttctacatttaaattttgtcagatgataggtgataaaaggatatttagatggtttcattagcattctttaatgtattagtgagctagaatgcattttcttgtgattactggccatttgcgtttcttcacctgtgaaccatatacatattttttcagttttgttattttgttataggagctgtacatgtgttaaacctaaaacccttcactgatggatgcatgcattatttcaacacatctttgttgggtgaatattatttatgagacactctagcaaaatccatgtcctagatatctcttctgagatcttggctcttatatttatgggagatgtccccctgcagcaagaaaagtattagtgcccatgtaaacatgcgtggcttgtcaaggatcacatgcacagacagttcacacttactcctaaacccggcatggccacagagtagaaagggtgtgtagtgcgttatatgaggagagcactggctcaggattgtgatttctgtgatctctatattaatggcaatgttttaaaaaattacataacatttctgagtttgccttttctcatttgtaaaatggaaacaattatagctaccaaagacaactgttctgaaagcaaaagaacaaaatattttaagcgtcatacacagcatagggtacgtacagtactcaacacatcttagtccctttcctatcccatacccgtccttcctttaaaggagattcctttgacataatccaaaaggcatggttccataacgatcacatgaaagttttaagggaaatgtataggtttccatgatgaattaactgctgtgtcactactctgtgctgggtaagaaaaaggaaaacaatcgctgaatcagtttcctagggtttgtaaaagaaatccatcaaagccaccacctcatttcgctttatttcacagacttccccatctcattttttatgttctatgctaatttctcaagaagaacaggcccggcaccacctctgcgcacaaccccgcgggcctggctcaggcgggagtgcggggccagcaccatgagcgccccgggcagccccgaccaggcctatgacttcctgctcaagttcctgctggtgggcgacagggacgtaggcaagagtgagatcctggagagcctgcaggatggtgcagctgagtccccgtacagccatctcggggggatcgactacaagacgaccaccatcctgctggacggccagcgggtgaagctgaagctctgggatacgtcggggcagggaagattttgtaccatattccgctcctactctcgtggtgcacaaggagtgatcctggtctacgacattgcaaaccgctggtctttcgagggtatggatcgatggattaagaagattgaggaacatgcccctggtgtccctaaaatcctggtggggaatcgcctacatctggcattcaagaggcaggtgcccagggagcaggcccaggcctacgccgagcgcctgggtgtgaccttctttgaggtcagccctctgtgcaatttcaacatcatagagtctttcacggagctggccaggatagtgctgctgcggcacaggatgaattggctcgggaggccgagcaaggtactgagcttgcaagacctctgctgccgcaccatcgtgtcctgcacacctgtgcatctggtggacaagctcccgctccccagtaccttaagaagccacctcaagtccttctccatggctaagggcctgaatgccaggatgatgcgaggcctctcctactccctcaccaccagctccactcacaagagcagcctctgcaaagtggagatcgtctgcccaccccagagcccacccaaaaactgcaccagaaacagctgcaaaatttcttaaggaaggcaccaaaaggaaacaagctggaatcgctccaggaaaaactctggttacacctggaagatggaagtcgcattgtagattcaagaaattagttttcagtttctcacgggaaccatgctgcttgggaatgtgtgtgatgccttctgtcaataaaaacacattacacagtt

SEQ ID NO: 173235 - DNA, 1713 bp, Homo sapiens
  Payload ID: 14051
  Gene Symbol: RAB40AL
  Gene Name: RAB40A, member RAS oncogene family-like
  Uniprot ID: P0C0E4
  ENST ID: ENST00000218249
  CDS Start-End: 70-906
aataggcccggcaccgcctctgcgcacaaccttgctggtctggcccaggcggggggcggggccagcacgatgagcgccccgggcagccccgaccaggcctacgacttcctgctcaagttcctgctggtgggcgacagggacgtaggcaagagtgagatcctggagagcctgcaggacggcacggccgagtccccgtacagtcacctggggggaatcgactacaagacgaccaccatcctgctggacggccagcgggtgaagctgaagctctgggatacgtcggggcagggaagattttgtaccatattccgctcctactctcgtggtgcacaaggagtgatcctggtctacgacattgcaaaccgctggtctttcgagggtatggatcgatggattaagaagattgaggaacatgcccctggtgtccctaaaatcctggtggggaatcgcctacatctggcattcaagaggcaggtgcccagggagcaggcccaggcctacgccgagcgcctgggcgtgaccttctttgaggtcagccctctgtgcaatttcaacatcatagagtctttcacggagctggccaggatagtgctgctgcggcacaggttgaactggctcgggaggccgagcaaggtactgagcttgcaagacctctgctgccgcaccatcgtgtcctgcacacctgtgcatctggtggacaagctcccgctccccattgccttaagaagccacctcaagtccttctccatggctaagggcctgaatgccaggatgatgcgaggcctctcctactccctcaccaccagctccactcacaaaaggagcagcctctgcaaagtgaagatcgtctgcccaccccagagcccacccaaaaactgcaccagaaacagctgcaaaatttcttaaggaaggcaccaaaaggaaacaagctggaatcgctccaggaaaaactctgaatggttacacctggaagagggaagatgcattctagattcaaagaaatacgttttcagtttctcatgggaacaatgctgcttgggaatgtgtgtgatgccttctgtcaataaaagcactttacgcagtttgactttgaatttctacgtggatgtgcatgtgtttataaaggggaaattagtactctgcttaactcttgataacatgaaattttgaatgttacttatatcataatcacactgcatctttttccttaaaataaccgcttttgtaagaatggtgatatgacagtgatgagtataaattcaagggaatttgagatgcaatgatagtgagatcattccgagtcattgatattactagaggggactttttgtaaacctcctttttgatgtcaaagcaccaatttataaaacactgcagatgcatatagagattatacgtaacagatctgtccagtttgtgcacgaaatggatttgataaagtttttgctatgttattttactacatttggagattaataagtgatttatatgtatgtttttctgtaaatctacttttttgtacaagatgttctacaagatatgaagctaagggaggaaaacgccaaagatatctctagttatgttgaacatagccaacatggtttcaatgggtcagtaagaaaaaagccatttcagtaaggaatgaaataagtacttatttatgaaaatgtttcttaacaataaaaaagtatatatttttatcttttggtaaaa

SEQ ID NO: 173236 - DNA, 2189 bp, Homo sapiens
  Payload ID: 14052
  Gene Symbol: RAB40B
  Gene Name: RAB40B, member RAS oncogene family
  ENST ID: ENST00000269347
  CDS Start-End: 1094-1393
cggggcccgcgcggcgcctctcggggccgggccgccgcctctgcgctcagccccgcaggccgggcatgggtgggggcgccgggccgtcacgatgagcgccctgggcagcccggtccgggcctacgactttctgctcaagttcctgctggtgggcgacagcgacgtgggcaagggcgagatcctggcgagcctgcaggatggcgcggccgagtccccgtacggccacccggcggatagttcggatgtcgctgtggcaaagtccgagggccagcgctgccctggagattgagcgcctggaggacagggctggagattgagcgcctggaggacagggctggagattgagcgcctggaggacagggctggagattgagcgcctggaggacagggctggagattgagcgcctggaggacagggctggagattgagcgcctggaggacagggctggagattgagcgcctggaggacagggctggagattgagcgcctggaggacagggctggagattgagcgcctggaggacagggctttgtctgcactgtgccctcggggtctgggctcagtgagggatgaaccctaccagagctacaggaataaagcacccaacaacgtgtacgcccagacgaatatggcgctttaagagctgtgcgtgttttgggggagcagacggttgacagtgttgagtttgattgaaggcatcgactacaagacgaccaccatcctgctggacgggcggcgggtgaagctgcagctctgggatacttcaggccagggaagattttgtaccatattccgctcctactcccggggcgcacagggtgtgatcctggtctatgacattgcgaaccgctggtcttttgacggcattgatcgatggattaaggagatcgatgagcatgcccccggagtccccaagatcctggtggggaaccgcctgcacctggcgttcaagcggcaggtgcccacggagcaggcccaggcctacgccgagcgcctgggcgtgaccttctttgaggtcagccctctgtgcaatttcaacatcacagagtcgttcacggagctggccaggatcgtgctgctgcggcatgggatggaccggctctggcggccgagcaaggtgctgagcttgcaagacctctgctgccgggcggtcgtgtcctgcacgccggtgcacctggtggacaagctcccgctccccattgccttaagaagccacctcaagtccttctcgatggccaacggcctgaatgccaggatgatgcacggcggttcctactccctcaccaccagctccacccacaaaaggagcagcctccgcaaagtgaagctcgtccgccccccccagagcccccccaaaaactgcaccagaaacagctgcaaaatttcttaaggaaggcactgaaagaaacacggcggaatctctccaggagaagctcggcgttacccccggcagctggtggatgcatctcagatcccggttcctctcggcgaatgctgcttgcgaatgtgtgcgacgccttccgtgtgatggaaacacactaccccgtcggacttcgaatttctacgtggatgtgcatgaagctcttgttttcgatgtgtgtttgtaaagggaaaattagtactctgctcgactcttggtaacatgaaattctgaatgttactttatcatgattgcactgcaactttttccttaaaataactgcttttgtaagaacggtgatattggagtgattagtataaattcaatggaatttgagaagcaatggcagcgggataatttagagtcactgatattacgagaggggtctttttgtaaacctccttttcaatgtcaaagcgccaatttataaaacgctgcagatgtagaggttatgtgcaactgatctgtccagtttgtgtatgaaatggatttgataaagtttttgctagttatttactacattttgggattaataagtgatttatatgcatatttttctgtaaatctacagttttttgtacaagatattctacaagttatgaagctaagggaagaaaatgccaaagatacctctagttatgttgaacacagccagcacagtttcgacatgtcaaggaagagctgtttcagtaaagaatgaagtgaaaacacttatttaggaaaatgtttctcaacaataaaatgtatagttgtttctctcttggta

SEQ ID NO: 173237 - DNA, 704 bp, Homo sapiens
  Payload ID: 14052
  Gene Symbol: RAB40B
  Gene Name: RAB40B, member RAS oncogene family
  ENST ID: ENST00000538809
  CDS Start-End: 67-486
gccgggccgccgcctctgcgctcagccccgcaggccgggcatgggtgggggcgccgggccgtcacgatgagcgccctgggcagcccggtccgggcctacgactttctgctcaagttcctgctggtgggcgacagcgacgtgggcaagggcgagatcctggcgagcctgcaggatggcgcggccgagtccccgtacggccacccggcgggcatcgactacaagacgaccaccatcctgctggacgggcggcgggtgaagctgcagctctgggatacttcaggccagggaagattttgtaccatattccgctcctactcccggggcgcacagggtgtgatcctggtctatgacattgcgaaccgctggtcttttgacggcattgatcgatggattaaggagatcgatgagagtcgttcacggagctggccaggatcgtgctgctgcggcatgggatggaccggctctggcggccgagcaaggtgctgagcttgcaagacctctgctgccgggcggtcgtgtcctgcacgccggtgcacctggtggacaagctcccgctccccattgccttaagaagccacctcaagtccttctcgatggccaacggcctgaatgccaggatgatgcacggcggttcctactccctcaccaccagctccacccacaaaaggagcagcctccgcaaagtgaagctcgtccgccccccc

SEQ ID NO: 173238 - DNA, 343 bp, Homo sapiens
  Payload ID: 14052
  Gene Symbol: RAB40B
  Gene Name: RAB40B, member RAS oncogene family
  ENST ID: ENST00000576148
  CDS Start-End: 1-129
ggaagattttgtaccatattccgctcctactcccggggcgcacagggtgtgatcctggtctatgacattgcgaaccgctggtcttttgacggcattgatcgatggattaaggagatcgatgagtgctgagcttgcaagacctctgctgccgggcggtcgtgtcctgcacgccggtgcacctggtggacaagctcccgctccccattgccttaagaagccacctcaagtccttctcgatggccaacggcctgaatgccaggatgatgcacggcggttcctactccctcaccaccagctccacccacaaaaggagcagcctccgcaaagtgaagctcgtccgccc

SEQ ID NO: 173239 - DNA, 3859 bp, Homo sapiens
  Payload ID: 14052
  Gene Symbol: RAB40B
  Gene Name: RAB40B, member RAS oncogene family
  Uniprot ID: Q12829
  ENST ID: ENST00000571995
  CDS Start-End: 133-969
agcgctgggcggcggggcggggccggaggcgagcaaggactcggggcccgcgcggcgcctctcggggccgggccgccgcctctgcgctcagccccgcaggccgggcatgggtgggggcgccgggccgtcacgatgagcgccctgggcagcccggtccgggcctacgactttctgctcaagttcctgctggtgggcgacagcgacgtgggcaagggcgagatcctggcgagcctgcaggatggcgcggccgagtccccgtacggccacccggcgggcatcgactacaagacgaccaccatcctgctggacgggcggcgggtgaagctgcagctctgggatacttcaggccagggaagattttgtaccatattccgctcctactcccggggcgcacagggtgtgatcctggtctatgacattgcgaaccgctggtcttttgacggcattgatcgatggattaaggagatcgatgagcatgcccccggagtccccaagatcctggtggggaaccgcctgcacctggcgttcaagcggcaggtgcccacggagcaggcccaggcctacgccgagcgcctgggcgtgaccttctttgaggtcagccctctgtgcaatttcaacatcacagagtcgttcacggagctggccaggatcgtgctgctgcggcatgggatggaccggctctggcggccgagcaaggtgctgagcttgcaagacctctgctgccgggcggtcgtgtcctgcacgccggtgcacctggtggacaagctcccgctccccattgccttaagaagccacctcaagtccttctcgatggccaacggcctgaatgccaggatgatgcacggcggttcctactccctcaccaccagctccacccacaaaaggagcagcctccgcaaagtgaagctcgtccgccccccccagagcccccccaaaaactgcaccagaaacagctgcaaaatttcttaaggaaggcactgaaagaaacacggcggaatctctccaggagaagctcggcgttacccccggcagctggtggatgcatctcagatcccggttcctctcggcgaatgctgcttgcgaatgtgtgcgacgccttccgtgtgatggaaacacactaccccgtcggacttcgaatttctacgtggatgtgcatgaagctcttgttttcgatgtgtgtttgtaaagggaaaattagtactctgctcgactcttggtaacatgaaattctgaatgttactttatcatgattgcactgcaactttttccttaaaataactgcttttgtaagaacggtgatattggagtgattagtataaattcaatggaatttgagaagcaatggcagcgggataatttagagtcactgatattacgagaggggtctttttgtaaacctccttttcaatgtcaaagcgccaatttataaaacgctgcagatgtagaggttatgtgcaactgatctgtccagtttgtgtatgaaatggatttgataaagtttttgctagttatttactacattttgggattaataagtgatttatatgcatatttttctgtaaatctacagttttttgtacaagatattctacaagttatgaagctaagggaagaaaatgccaaagatacctctagttatgttgaacacagccagcacagtttcgacatgtcaaggaagagctgtttcagtaaagaatgaagtgaaaacacttatttaggaaaatgtttctcaacaataaaatgtatagttgtttctctcttggtagagttggcgaccggttctttcgaattttgtatttatttatttatttatttttgagacagagtttcgctcttgttgcccagggtggagtacaatggcacgatctgggctcaccacaacctccgcctcccgggttcaagcgattctcctgcctcagcctcccgagtagctgggattacagaggtgcaccaccacgcccggctaatttttgtatttttagtagagatggggtttcaccatgttggtcaggctggtgttgaactcctaacctcaggtgatccacccaccttggcctcccaaagtgctgggattacaggcgtgagccactgcgcccggccagattttgtgtatttcttatagccctttacttcactgcgccactgcctggtgtagacatcacatatcggagctaatacacgacactggcaacaaggctgaatccttgaactgttgtcgcctgttgagaaaggattccttttccggaacagaagtgcagaggaggagagagcggagagttaaaagctggcacccaggcatgtgcctgtctgagaaatcagagccgtgctcctgagcctcggtgaggagctccgaggggctgtcaggaattccgcatgaagatgtagcccctgaccccgactgcctcagagcagggctgaccgcaaagacctccagggccgctctcttccctggtcacactgttgaacgtttctctgtggctgggggtcgcaaatgagggactaaaccaaaaaaacgaagcgagaaaatacccagatgttcctagttcctgctgatgatctgtagattcttagaaacttaagggacccagctgggtgtgatggctcacacctgtaatcccagcacttcaggaggccgaggcagccggatcagaggtcaggagttcaagaccagtctggccaacgtgatgaaaccccgtctctaataaaattacaaaaattggcttggcatggcagcgcacacctgtaatcccagctactcaggaggctgaagcaggagaatcacttgaacctgggaggcaggggttgcagtgagccgagatcgtaccactgcaccccagcctgggcgacaagtgaaactccatctaaaaaaaaaaaaaaaaaagaaatttaagggaccctagaatcaggggcaaagcctgtattcagagatggtggaaccgaggcccagacaggagagaggagcactggtccctgcgggtggacccaggcttgggggtgtctggccacctgggcacggcagccacggggacaaagtccacggggaggcaggggtgtggtctgtgggcagaaggtgaaccctgaggggacagtgtctggagagggtggccagcctcgtgcaggcacgctgcaaagacctgtgcacccttctctctgctgtgccacaggtggggtgagaacgacagggccgacctcccagctgcaaacacaaggacactgagatgcacagaaaggagagtccacgttgaagaaacccacgttgaggggcctcttctccctccgttcccagctcgctgatggtgaagggtaaggaaatggatcctcccattgcaacattaaaccaggccaaacctgtatttttctcttccttcctttttcttgttttgtaattgatgtctcctcgggactactgataatgtcctagaaagaataaaataaagtttcccaaggctttgtgactcagagctctttggaggtgttcaccgaatgcacgggccgcccggaggccttggccctccagggaaacaccaccagaagtccccagaagcggaacatgtagcaaggaggctccccgagatctcccagagggagcacagccctgccaagttattggttttggacttccggcttccagagctacgagaaaataaatatttgttatttaagtcaccaggtttgtggcgattgttacggcagcctcaggaaactcctacaaggaagtgagttacgctcacggcagaaagtgctacagcaaaccaaggcagaacaaaaacagacgaaacctaatacagaccggactaagtagaagactgtgtgtttgggtggtgaatatacaaaaaacataaatataaattaaacctta

SEQ ID NO: 173240 - DNA, 2699 bp, Homo sapiens
  Payload ID: 14053
  Gene Symbol: RAB40C
  Gene Name: RAB40C, member RAS oncogene family
  Uniprot ID: Q96S21
  ENST ID: ENST00000248139
  CDS Start-End: 204-1049
cgggaagcggcggggcggcggcgaggctgaggtgcgcccgggcgcgggcggggcggggccggcgctgggcttcgggcgcgcccactcggccgccgtggggcggacgcaacgggcgcaggtgcggggcgcgggctctctcacgccgcggcctcacccggcggtgcttcggcaggcggccggcgcggggcgcaggcggcgcggccatgggctcgcagggcagtccggtgaagagctacgactacctgctcaagttcctgctggtgggcgacagcgacgtgggcaagggcgagatcctggagagcctgcaggacggcgcggcagagtccccgtacgcctacagtaacgggatcgactacaagaccaccaccatcctgctggacggccggcgcgtgaagctggagctctgggacacgtcgggccagggccggttctgcaccatcttcaggtcctactccaggggcgctcaggggatcctcttggtgtatgacatcaccaaccgctggtcctttgacggcatcgaccgctggatcaaggagatcgatgagcatgcacccggagtcccccggatcttggttggaaaccggctgcacctggccttcaagcggcaggtcccgacggagcaggcccgcgcgtacgcagagaagaactgcatgaccttctttgaggtcagccccctgtgcaacttcaacgtcatcgagtccttcacggagctatcccgcatcgtgctcatgcggcacggcatggagaagatctggaggcccaaccgagtgttcagcctgcaggacctctgctgccgggccatcgtctcctgcacccccgtgcacctcatcgacaagcttccactgcccgtcaccatcaagagccacctcaagtccttctcgatggccaacggcatgaacgcggtcatgatgcacggccgttcctactccctggccagcggggccgggggcggcggcagcaagggcaacagcctcaagaggtccaagtccatccgtccaccccagagccccccccagaactgctcgcggagtaactgcaagatctcctagcggggatgggcggggccgcctgtgcagatgccaggagggctcgagctggacactcctggctggacgccaggccagtgccgcctacgtggagactgtccacacagctgcctcagaagcgccgggctttcctcacacctgagccgggtgcgaggaggagcatgcacggaccaagcgcggcaggcgggaggagggggcgcggctgggctgctggtgcttccgggaatcttggtcggaaacaagccgggcctccccagctgcctgggcttgaccggcggggagcctggttggcctttcttatttatatagagaacacttcacttttttgtacatttttaaggggccttcagggaagcctgggtgtggcccggtggtggtgcactggtgacttcatggccacgccagctgcggggacgcacttgggactcctcgagaggggactcgcggccgcgatggcaaggcatcctgtgaattcatgcgctgcgagtggcggggctgcccagaggccgggggagcagacagggccggtgctccctctggaagcttgggtgaccggggccctggctcccacgggatggagggtgtggtcctgtggtcagagcccaagcagcactcaggagaggggagaaaggaggtgcacctggcagcccacatttttgttgctccccaaatccctccccacgtggggatgagaaccttcctgctgtgatgtgacaccttcggggacattgaccactcaaaactcagatcatctcgcccaccctggagagtgcagagctatctgtagacttaggaatacttgatgggcagcggtgcagaccccgggcacctgcgtgcagcctcctgttctcggcagcttctgtcgctggccctggggtccccacagctgcagctctcctgtgaggttgcacggcatcagaaccatcctgaccttcttagggacgtgcctggaaccacctcgtccacgtccacgtccacctgggggcctcgggaggctaggcccctcctcaaaggcccaccagcccggcgctcatgctgagccccaggcacgcagggccggccacctctctcctgaagccattggccgctcctccacccagtgcttctgcccatgcctgccccagcagcccctctgcacggtcaccatcgcctgggcctgcccacagcactggtgctcacctctacctcctgtcctcaggccgtgcggcacgacatggccagcacgcagaaggagccctcccgggacccaggaccccccgtggtggactccgcggcacatgcttcccaaggtggtcccacggagggtgttactgggcaccagtggactcgccccatggcccgttcctgggagatgagggccgtggcctgcatgaactaccagatgagtaagggaaccccaggcaggcggccctgccacagcccccaaagacactggcctcctgctccagcttccctgtcctggccccacctgtcctgttgctgccagcagggcccttgtttgggattatgaacaaacctcacagactttgaggacctggatggtcctgcattcacggcatcaacactacccgcgctgctgttagacactccgccattcctggttctctccgaaccgttctttgtacagtaaatgtaattcagctgtggtcccca

SEQ ID NO: 173241 - DNA, 2569 bp, Homo sapiens
  Payload ID: 14053
  Gene Symbol: RAB40C
  Gene Name: RAB40C, member RAS oncogene family
  Uniprot ID: Q96S21
  ENST ID: ENST00000538492
  CDS Start-End: 75-920
gccctggtggtgcgggaagcggcggggcggcggcgaggctgaggcggccggcgcggggcgcaggcggcgcggccatgggctcgcagggcagtccggtgaagagctacgactacctgctcaagttcctgctggtgggcgacagcgacgtgggcaagggcgagatcctggagagcctgcaggacggcgcggcagagtccccgtacgcctacagtaacgggatcgactacaagaccaccaccatcctgctggacggccggcgcgtgaagctggagctctgggacacgtcgggccagggccggttctgcaccatcttcaggtcctactccaggggcgctcaggggatcctcttggtgtatgacatcaccaaccgctggtcctttgacggcatcgaccgctggatcaaggagatcgatgagcatgcacccggagtcccccggatcttggttggaaaccggctgcacctggccttcaagcggcaggtcccgacggagcaggcccgcgcgtacgcagagaagaactgcatgaccttctttgaggtcagccccctgtgcaacttcaacgtcatcgagtccttcacggagctatcccgcatcgtgctcatgcggcacggcatggagaagatctggaggcccaaccgagtgttcagcctgcaggacctctgctgccgggccatcgtctcctgcacccccgtgcacctcatcgacaagcttccactgcccgtcaccatcaagagccacctcaagtccttctcgatggccaacggcatgaacgcggtcatgatgcacggccgttcctactccctggccagcggggccgggggcggcggcagcaagggcaacagcctcaagaggtccaagtccatccgtccaccccagagccccccccagaactgctcgcggagtaactgcaagatctcctagcggggatgggcggggccgcctgtgcagatgccaggagggctcgagctggacactcctggctggacgccaggccagtgccgcctacgtggagactgtccacacagctgcctcagaagcgccgggctttcctcacacctgagccgggtgcgaggaggagcatgcacggaccaagcgcggcaggcgggaggagggggcgcggctgggctgctggtgcttccgggaatcttggtcggaaacaagccgggcctccccagctgcctgggcttgaccggcggggagcctggttggcctttcttatttatatagagaacacttcacttttttgtacatttttaaggggccttcagggaagcctgggtgtggcccggtggtggtgcactggtgacttcatggccacgccagctgcggggacgcacttgggactcctcgagaggggactcgcggccgcgatggcaaggcatcctgtgaattcatgcgctgcgagtggcggggctgcccagaggccgggggagcagacagggccggtgctccctctggaagcttgggtgaccggggccctggctcccacgggatggagggtgtggtcctgtggtcagagcccaagcagcactcaggagaggggagaaaggaggtgcacctggcagcccacatttttgttgctccccaaatccctccccacgtggggatgagaaccttcctgctgtgatgtgacaccttcggggacattgaccactcaaaactcagatcatctcgcccaccctggagagtgcagagctatctgtagacttaggaatacttgatgggcagcggtgcagaccccgggcacctgcgtgcagcctcctgttctcggcagcttctgtcgctggccctggggtccccacagctgcagctctcctgtgaggttgcacggcatcagaaccatcctgaccttcttagggacgtgcctggaaccacctcgtccacgtccacgtccacctgggggcctcgggaggctaggcccctcctcaaaggcccaccagcccggcgctcatgctgagccccaggcacgcagggccggccacctctctcctgaagccattggccgctcctccacccagtgcttctgcccatgcctgccccagcagcccctctgcacggtcaccatcgcctgggcctgcccacagcactggtgctcacctctacctcctgtcctcaggccgtgcggcacgacatggccagcacgcagaaggagccctcccgggacccaggaccccccgtggtggactccgcggcacatgcttcccaaggtggtcccacggagggtgttactgggcaccagtggactcgccccatggcccgttcctgggagatgagggccgtggcctgcatgaactaccagatgagtaagggaaccccaggcaggcggccctgccacagcccccaaagacactggcctcctgctccagcttccctgtcctggccccacctgtcctgttgctgccagcagggcccttgtttgggattatgaacaaacctcacagactttgaggacctggatggtcctgcattcacggcatcaacactacccgcgctgctgttagacactccgccattcctggttctctccgaaccgttctttgtacagtaaatgtaattcagctgtggtcccc

SEQ ID NO: 173242 - DNA, 2717 bp, Homo sapiens
  Payload ID: 14053
  Gene Symbol: RAB40C
  Gene Name: RAB40C, member RAS oncogene family
  Uniprot ID: Q96S21
  ENST ID: ENST00000535977
  CDS Start-End: 223-1068
cgcccggggccaccccgccgctccctccgagggttctgcggaagcaggcggcacagcctgcgaggggctttcgtttcccggactcagccgcatcgcctcggctcgggcgcgcctgcatcctgccgcccgtccgcgcgttgaaggggcggatacaaacaacgtggacttccgagcccctgattggcgagcgtgcggccggcgcggggcgcaggcggcgcggccatgggctcgcagggcagtccggtgaagagctacgactacctgctcaagttcctgctggtgggcgacagcgacgtgggcaagggcgagatcctggagagcctgcaggacggcgcggcagagtccccgtacgcctacagtaacgggatcgactacaagaccaccaccatcctgctggacggccggcgcgtgaagctggagctctgggacacgtcgggccagggccggttctgcaccatcttcaggtcctactccaggggcgctcaggggatcctcttggtgtatgacatcaccaaccgctggtcctttgacggcatcgaccgctggatcaaggagatcgatgagcatgcacccggagtcccccggatcttggttggaaaccggctgcacctggccttcaagcggcaggtcccgacggagcaggcccgcgcgtacgcagagaagaactgcatgaccttctttgaggtcagccccctgtgcaacttcaacgtcatcgagtccttcacggagctatcccgcatcgtgctcatgcggcacggcatggagaagatctggaggcccaaccgagtgttcagcctgcaggacctctgctgccgggccatcgtctcctgcacccccgtgcacctcatcgacaagcttccactgcccgtcaccatcaagagccacctcaagtccttctcgatggccaacggcatgaacgcggtcatgatgcacggccgttcctactccctggccagcggggccgggggcggcggcagcaagggcaacagcctcaagaggtccaagtccatccgtccaccccagagccccccccagaactgctcgcggagtaactgcaagatctcctagcggggatgggcggggccgcctgtgcagatgccaggagggctcgagctggacactcctggctggacgccaggccagtgccgcctacgtggagactgtccacacagctgcctcagaagcgccgggctttcctcacacctgagccgggtgcgaggaggagcatgcacggaccaagcgcggcaggcgggaggagggggcgcggctgggctgctggtgcttccgggaatcttggtcggaaacaagccgggcctccccagctgcctgggcttgaccggcggggagcctggttggcctttcttatttatatagagaacacttcacttttttgtacatttttaaggggccttcagggaagcctgggtgtggcccggtggtggtgcactggtgacttcatggccacgccagctgcggggacgcacttgggactcctcgagaggggactcgcggccgcgatggcaaggcatcctgtgaattcatgcgctgcgagtggcggggctgcccagaggccgggggagcagacagggccggtgctccctctggaagcttgggtgaccggggccctggctcccacgggatggagggtgtggtcctgtggtcagagcccaagcagcactcaggagaggggagaaaggaggtgcacctggcagcccacatttttgttgctccccaaatccctccccacgtggggatgagaaccttcctgctgtgatgtgacaccttcggggacattgaccactcaaaactcagatcatctcgcccaccctggagagtgcagagctatctgtagacttaggaatacttgatgggcagcggtgcagaccccgggcacctgcgtgcagcctcctgttctcggcagcttctgtcgctggccctggggtccccacagctgcagctctcctgtgaggttgcacggcatcagaaccatcctgaccttcttagggacgtgcctggaaccacctcgtccacgtccacgtccacctgggggcctcgggaggctaggcccctcctcaaaggcccaccagcccggcgctcatgctgagccccaggcacgcagggccggccacctctctcctgaagccattggccgctcctccacccagtgcttctgcccatgcctgccccagcagcccctctgcacggtcaccatcgcctgggcctgcccacagcactggtgctcacctctacctcctgtcctcaggccgtgcggcacgacatggccagcacgcagaaggagccctcccgggacccaggaccccccgtggtggactccgcggcacatgcttcccaaggtggtcccacggagggtgttactgggcaccagtggactcgccccatggcccgttcctgggagatgagggccgtggcctgcatgaactaccagatgagtaagggaaccccaggcaggcggccctgccacagcccccaaagacactggcctcctgctccagcttccctgtcctggccccacctgtcctgttgctgccagcagggcccttgtttgggattatgaacaaacctcacagactttgaggacctggatggtcctgcattcacggcatcaacactacccgcgctgctgttagacactccgccattcctggttctctccgaaccgttctttgtacagtaaatgtaattcagctgtggtcccc

SEQ ID NO: 173243 - DNA, 2609 bp, Homo sapiens
  Payload ID: 14053
  Gene Symbol: RAB40C
  Gene Name: RAB40C, member RAS oncogene family
  Uniprot ID: Q96S21
  ENST ID: ENST00000539661
  CDS Start-End: 115-960
ggatttctctgggaggcagccgcagggaagggaatgatcttggtgaacttataatcgaaccaatggttccgggaaagcaggaggcggccggcgcggggcgcaggcggcgcggccatgggctcgcagggcagtccggtgaagagctacgactacctgctcaagttcctgctggtgggcgacagcgacgtgggcaagggcgagatcctggagagcctgcaggacggcgcggcagagtccccgtacgcctacagtaacgggatcgactacaagaccaccaccatcctgctggacggccggcgcgtgaagctggagctctgggacacgtcgggccagggccggttctgcaccatcttcaggtcctactccaggggcgctcaggggatcctcttggtgtatgacatcaccaaccgctggtcctttgacggcatcgaccgctggatcaaggagatcgatgagcatgcacccggagtcccccggatcttggttggaaaccggctgcacctggccttcaagcggcaggtcccgacggagcaggcccgcgcgtacgcagagaagaactgcatgaccttctttgaggtcagccccctgtgcaacttcaacgtcatcgagtccttcacggagctatcccgcatcgtgctcatgcggcacggcatggagaagatctggaggcccaaccgagtgttcagcctgcaggacctctgctgccgggccatcgtctcctgcacccccgtgcacctcatcgacaagcttccactgcccgtcaccatcaagagccacctcaagtccttctcgatggccaacggcatgaacgcggtcatgatgcacggccgttcctactccctggccagcggggccgggggcggcggcagcaagggcaacagcctcaagaggtccaagtccatccgtccaccccagagccccccccagaactgctcgcggagtaactgcaagatctcctagcggggatgggcggggccgcctgtgcagatgccaggagggctcgagctggacactcctggctggacgccaggccagtgccgcctacgtggagactgtccacacagctgcctcagaagcgccgggctttcctcacacctgagccgggtgcgaggaggagcatgcacggaccaagcgcggcaggcgggaggagggggcgcggctgggctgctggtgcttccgggaatcttggtcggaaacaagccgggcctccccagctgcctgggcttgaccggcggggagcctggttggcctttcttatttatatagagaacacttcacttttttgtacatttttaaggggccttcagggaagcctgggtgtggcccggtggtggtgcactggtgacttcatggccacgccagctgcggggacgcacttgggactcctcgagaggggactcgcggccgcgatggcaaggcatcctgtgaattcatgcgctgcgagtggcggggctgcccagaggccgggggagcagacagggccggtgctccctctggaagcttgggtgaccggggccctggctcccacgggatggagggtgtggtcctgtggtcagagcccaagcagcactcaggagaggggagaaaggaggtgcacctggcagcccacatttttgttgctccccaaatccctccccacgtggggatgagaaccttcctgctgtgatgtgacaccttcggggacattgaccactcaaaactcagatcatctcgcccaccctggagagtgcagagctatctgtagacttaggaatacttgatgggcagcggtgcagaccccgggcacctgcgtgcagcctcctgttctcggcagcttctgtcgctggccctggggtccccacagctgcagctctcctgtgaggttgcacggcatcagaaccatcctgaccttcttagggacgtgcctggaaccacctcgtccacgtccacgtccacctgggggcctcgggaggctaggcccctcctcaaaggcccaccagcccggcgctcatgctgagccccaggcacgcagggccggccacctctctcctgaagccattggccgctcctccacccagtgcttctgcccatgcctgccccagcagcccctctgcacggtcaccatcgcctgggcctgcccacagcactggtgctcacctctacctcctgtcctcaggccgtgcggcacgacatggccagcacgcagaaggagccctcccgggacccaggaccccccgtggtggactccgcggcacatgcttcccaaggtggtcccacggagggtgttactgggcaccagtggactcgccccatggcccgttcctgggagatgagggccgtggcctgcatgaactaccagatgagtaagggaaccccaggcaggcggccctgccacagcccccaaagacactggcctcctgctccagcttccctgtcctggccccacctgtcctgttgctgccagcagggcccttgtttgggattatgaacaaacctcacagactttgaggacctggatggtcctgcattcacggcatcaacactacccgcgctgctgttagacactccgccattcctggttctctccgaaccgttctttgtacagtaaatgtaattcagctgtggtcccc

SEQ ID NO: 173244 - DNA, 692 bp, Homo sapiens
  Payload ID: 14053
  Gene Symbol: RAB40C
  Gene Name: RAB40C, member RAS oncogene family
  ENST ID: ENST00000569575
  CDS Start-End: 223-692
cgcccggggccaccccgccgctccctccgagggttctgcggaagcaggcggcacagcctgcgaggggctttcgtttcccggactcagccgcatcgcctcggctcgggcgcgcctgcatcctgccgcccgtccgcgcgttgaaggggcggatacaaacaacgtggacttccgagcccctgattggcgagcgtgcggccggcgcggggcgcaggcggcgcggccatgggctcgcagggcagtccggtgaagagctacgactacctgctcaagttcctgctggtgggcgacagcgacgtgggcaagggcgagatcctggagagcctgcaggacggcgcggcagagtccccgtacgcctacagtaacgggatcgactacaagaccaccaccatcctgctggacggccggcgcgtgaagctggagctctgggacacgtcgggccagggccggttctgcaccatcttcaggtcctactccaggggcgctcaggggatcctcttggtgtatgacatcaccaaccgctggtcctttgacggcatcgaccgctggatcaaggagatcgatgagcatgcacccggagtcccccggatcttggttggaaaccggctgcacctggccttcaagcggcaggtcccgacggagcaggcccgcgcgtacgcagagaagaactgcatgaccttctttgaggtcagccc

SEQ ID NO: 173245 - DNA, 921 bp, Homo sapiens
  Payload ID: 14053
  Gene Symbol: RAB40C
  Gene Name: RAB40C, member RAS oncogene family
  ENST ID: ENST00000564703
  CDS Start-End: 808-921
gcatttttaaacttgtttggccctccctaacaccaaccttggcagttcctgggctgcagtaagccgagacttggaaatacattcgccttggagaattcaacttcaaaatgcatacgaagtaggtcagggtggaaataaaggcactgccctttctccaggcacgctggagtccacgccctgcctttgcccaatgccctctgagggagaggccctgtgccttgcacccagcgcgggccacaggcggaggccccattccaggcaagccgtgcccatggagaggctggcctgctaggctgtggggcccgatggcctgacactgtatggaccacgctcctgccctgccctgccccgccctgcccgtggcccgtgtgcagaagtgggcaggcctgggttgctgggccagagccccgagatttccccctgccccactggctgagtgtgggggagctgcttctccacttccgcgtgggtcttggccctgggaggccagtggccgaggctggtctcgcgggcgctcgctccaggagtggcgcgtcccctcagcgccctgtgcttcctcgcagggatcgactacaagaccaccaccatcctgctggacggccggcgcgtgaagctggagctctggggatcctcttggtgtatgacatcaccaaccgctggtcctttgacggcatcgaccgctggatcaaggagatcgatgagcatgcacccggagtcccccggatcttggttggaaaccggctgcacctggccttcaagcggcaggtcccgacggagcaggcccgcgcgtacgcagagaagaactgcatgaccttctttgaggtcagccccctgtgcaacttcaacgtcatcgagtccttcacggagctatcccgcatcgtgctcatgcggcacggcatggagaagatctggaggcccaac

SEQ ID NO: 173246 - DNA, 753 bp, Homo sapiens
  Payload ID: 14053
  Gene Symbol: RAB40C
  Gene Name: RAB40C, member RAS oncogene family
  ENST ID: ENST00000566290
  CDS Start-End: 115-753
ggatttctctgggaggcagccgcagggaagggaatgatcttggtgaacttataatcgaaccaatggttccgggaaagcaggaggcggccggcgcggggcgcaggcggcgcggccatgggctcgcagggcagtccggtgaagagctacgactacctgctcaagttcctgctggtgggcgacagcgacgtgggcaagggcgagatcctggagagcctgcaggacggcgcggcagagtccccgtacgcctacagtaacgggatcgactacaagaccaccaccatcctgctggacggccggcgcgtgaagctggagctctgggacacgtcgggccagggccggttctgcaccatcttcaggtcctactccaggggcgctcaggggatcctcttggtgtatgacatcaccaaccgctggtcctttgacggcatcgaccgctggatcaaggagatcgatgagcatgcacccggagtcccccggatcttggttggaaaccggctgcacctggccttcaagcggcaggtcccgacggagcaggcccgcgcgtacgcagagaagaactgcatgaccttctttgaggtcagccccctgtgcaacttcaacgtcatcgagtccttcacggagctatcccgcatcgtgctcatgcggcacggcatggagaagatctggaggcccaaccgagtgttcagcctgcaggacctctgctgccgggccatcgtctcctgcacccccgtgcacctcatcgacaagcttcca

SEQ ID NO: 173247 - DNA, 710 bp, Homo sapiens
  Payload ID: 14053
  Gene Symbol: RAB40C
  Gene Name: RAB40C, member RAS oncogene family
  ENST ID: ENST00000563109
  CDS Start-End: 1-710
tgctcaagttcctgctggtgggcgacagcgacgtgggcaagggcgagatcctggagagcctgcaggacggcgcggcagagtccccgtacgcctacagtaacgggatcgactacaagaccaccaccatcctgctggacggccggcgcgtgaagctggagctctgggacacgtcgggccagggccggttctgcaccatcttcaggtcctactccaggggcgctcaggggatcctcttggtgtatgacatcaccaaccgctggtcctttgacggcatcgaccgctggatcaaggagatcgatgagcggcaggtcccgacggagcaggcccgcgcgtacgcagagaagaactgcatgaccttctttgaggtcagccccctgtgcaacttcaacgtcatcgagtccttcacggagctatcccgcatcgtgctcatgcggcacggcatggagaagatctggaggcccaaccgagtgttcagcctgcaggacctctgctgccgggccatcgtctcctgcacccccgtgcacctcatcgacaagcttccactgcccgtcaccatcaagagccacctcaagtccttctcgatggccaacggcatgaacgcggtcatgatgcacggccgttcctactccctggccagcggggccgggggcggcggcagcaagggcaacagcctcaagaggtccaagtccatccgtccaccccagagcccc

SEQ ID NO: 173248 - DNA, 565 bp, Homo sapiens
  Payload ID: 14053
  Gene Symbol: RAB40C
  Gene Name: RAB40C, member RAS oncogene family
  ENST ID: ENST00000509637
  CDS Start-End: 1-149
gctcgcagggcagtccggtgaagagctacgactacctgctcaagttcctgctggtgggcgacagcgacgtgggcaagggcgagatcctggagagcctgcaggacggcgcggcagagtccccgtacgcctacagtaacgattgcagctgagaaggcgcgaagctgctggtccctgaaaagctgccgcctaccctggtctggagcccctgcgagctggcgtagagcaggaaggggttgcatcacagctgagtcctcccctgcgcagcacatgggatcgactacaagaccaccaccatcctgctggacggccggcgcgtgaagctggagctctgggacacgtcgggccagggccggttctgcaccatcttcaggtcctactccaggggcgctcaggggatcctcttggtgtatgacatcaccaaccgctggtcctttgacggcatcgaccgctggatcaaggagatcgatgagcatgcacccggagtcccccggatcttggttggaaaccggctgcacctggccttcaagcggcaggtcccgacggagcaggcccgcgcgtacgcaga

SEQ ID NO: 173249 - DNA, 648 bp, Homo sapiens
  Payload ID: 14053
  Gene Symbol: RAB40C
  Gene Name: RAB40C, member RAS oncogene family
  ENST ID: ENST00000568586
  CDS Start-End: 84-648
ggcgcggcggccctggtggtgcgggaagcggcggggcggcggcgaggctgaggcggccggcgcggggcgcaggcggcgcggccatgggctcgcagggcagtccggtgaagagctacgactacctgctcaagttcctgctggtgggcgacagcgacgtgggcaagggcgagatcctggagagcctgcaggacggcgcggcagagtccccgtacgcctacagtaacgggatcgactacaagaccaccaccatcctgctggacggccggcgcgtgaagctggagctctgggacacgtcgggccagggccggttctgcaccatcttcaggtcctactccaggggcgctcaggggatcctcttggtgtatgacatcaccaaccgctggtcctttgacggcatcgaccgctggatcaaggagatcgatgagcatgcacccggagtcccccggatcttggttggaaaccggctgcacctggccttcaagcggcaggtcccgacggagcaggcccgcgcgtacgcagagaagaactgcatgaccttctttgaggtcagccccctgtgcaacttcaacgtcatcgagtccttcacggagctatcccgcatcgtgctcatgcggcacggcatggagaagatctggaggcccaaccgag

SEQ ID NO: 173250 - DNA, 783 bp, Homo sapiens
  Payload ID: 14053
  Gene Symbol: RAB40C
  Gene Name: RAB40C, member RAS oncogene family
  ENST ID: ENST00000565511
  CDS Start-End: 51-443
cccggcggtgcttcggcaggcggccggcgcggggcgcaggcggcgcggccatgggctcgcagggcagtccggtgaagagctacgactacctgctcaagttcctgctggtgggcgacagcgacgtgggcaagggcgagatcctggagagcctgcaggacggcgcggcagagtccccgtacgcctacagtaacgggatcgactacaagaccaccaccatcctgctggacggccggcgcgtgaagctggagctctgggacacgtcgggccagggccggttctgcaccatcttcaggtcctactccaggggcgctcagctctgtcccaggtactcccggggggattcactgatggactggccgagaggacacttagcttccacagctgcacgtcccccggctgccagaaccccgcatctgcctgcccaggaaacttccacaggctgatggctccaggggagggaggggaagcggcatttctgacaccatggaaggcgcccacccccctgctgcagtcctgccaggggatcctcttggtgtatgacatcaccaaccgctggtcctttgacggcatcgaccgctggatcaaggagatcgatgagcatgcacccggagtcccccggatcttggttggaaaccggctgcacctggccttcaagcggcaggtcccgacggagcaggcccgcgcgtacgcagagaagaactgcatgaccttctttgaggtcagccccctgtgcaacttcaacgtcatcgagtccttcacggagctatcccgcatcgtgctcat

SEQ ID NO: 173251 - DNA, 1071 bp, Homo sapiens
  Payload ID: 14054
  Gene Symbol: RAB41
  Gene Name: RAB41, member RAS oncogene family
  Uniprot ID: Q5JT25
  ENST ID: ENST00000276066
  CDS Start-End: 47-712
caggctgagcgttggaagccattttggctgcaacctacctgaagcgatgtctgcctttggtcacgacgaggcctggatggaggccggaggctttggtctggaggctgccgaaagaacggaataccagtctctgtgcaaatctaaactcttattcctgggagagcagagcgggaagacatccatcatcagccgcttcatgtacaacagcttcggctgcgcctgccaggcaactgttggaattgacttcttgtctaagaccatgtacttggaggaccaaatagttcagctgcagctatgggacacagctggccaggagcgctttcacagcctaattcctagctacattcgtgattcaactattgcagtggttgtctatgacattacaaacatcaattcttttaaggagacagataagtgggtagaacacgtgcgagcagaaagaggtgacgatgttgtcatcatgttgttgggtaacaagattgatttggataacaaaagacaagtcactgcagaacagggtgaagaaaaatccagaaacctcaatgtgatgtttattgagaccagtgccaaaaccggttacaacgtgaaaaagctgttccggcgtgtggcttctgcccttctttccacaaggacttcacctccaccaaaagaggggacggttgaaatcgaactggaatccttcgaggagtcaggcaacagaagctattgttgacagcttaggctttctctgcctcatttgatggatttcttacatttgggcttgccataccagttctcctccccacctcgttttatgatacatggccacttactctcttccaattcctaggcttggggtaaaaacagaacccctgaaagtgctatcattttttcctgaccgcatctcacagctactgggtggaagcttcttgcagcacctgggaattctaccttaccttctccgacagctaaaagacatctgtagagaatacagttctacagcagctgacatacttcaaaggccaatacaattcattctccactgtttgttgttgtttacctacaccctcaataaatggttctttaacctaa

SEQ ID NO: 173252 - DNA, 1074 bp, Homo sapiens
  Payload ID: 14054
  Gene Symbol: RAB41
  Gene Name: RAB41, member RAS oncogene family
  Uniprot ID: Q5JT25
  ENST ID: ENST00000374473
  CDS Start-End: 47-715
caggctgagcgttggaagccattttggctgcaacctacctgaagcgatgtctgcctttggtcacgacgaggcctggatggaggccggaggctttggtctggaggctgccgaaagaacggaataccagtctctgtgcaaatctaaactcttattcctgggagagcagagcgtagggaagacatccatcatcagccgcttcatgtacaacagcttcggctgcgcctgccaggcaactgttggaattgacttcttgtctaagaccatgtacttggaggaccaaatagttcagctgcagctatgggacacagctggccaggagcgctttcacagcctaattcctagctacattcgtgattcaactattgcagtggttgtctatgacattacaaacatcaattcttttaaggagacagataagtgggtagaacacgtgcgagcagaaagaggtgacgatgttgtcatcatgttgttgggtaacaagattgatttggataacaaaagacaagtcactgcagaacagggtgaagaaaaatccagaaacctcaatgtgatgtttattgagaccagtgccaaaaccggttacaacgtgaaaaagctgttccggcgtgtggcttctgcccttctttccacaaggacttcacctccaccaaaagaggggacggttgaaatcgaactggaatccttcgaggagtcaggcaacagaagctattgttgacagcttaggctttctctgcctcatttgatggatttcttacatttgggcttgccataccagttctcctccccacctcgttttatgatacatggccacttactctcttccaattcctaggcttggggtaaaaacagaacccctgaaagtgctatcattttttcctgaccgcatctcacagctactgggtggaagcttcttgcagcacctgggaattctaccttaccttctccgacagctaaaagacatctgtagagaatacagttctacagcagctgacatacttcaaaggccaatacaattcattctccactgtttgttgttgtttacctacaccctcaataaatggttctttaacctaa

SEQ ID NO: 173253 - DNA, 573 bp, Homo sapiens
  Payload ID: 14054
  Gene Symbol: RAB41
  Gene Name: RAB41, member RAS oncogene family
  ENST ID: ENST00000509895
  CDS Start-End: 470-573
gtggccatgcccaggcctgggtgtgaagccaatggccgtcagccgacgtcagtagagcatggcgtgaagtccggcggctcaggctgagcgttggaagccattttggctgcaacctacctgaagcgatgtctgcctttggtcacgacgaggcctggatggaggccggaggctttggtctggaggctgccgaaagaacggaataccagtctctgtgcaaatctaaactcttattcctgggagagcagagcggtgtgggtctgggttgggctttggggacatggaggtgtaattggtatgaaatggggtggggcattctctggggaaccgagttcctcctcgttgggaaagattggagttggaggaggagggagggctcatagaaactttgaggggagaaagggcactgagggcgacgattggcctgcttatctccctcacagtagggaagacatccatcatcagccgcttcatgtacaacagcttcggctgcgcctgccaggcaactgttggaattgacttcttgtctaagaccatgtacttggaggaccaaatagttcagctgcagctatggga

SEQ ID NO: 173254 - DNA, 1950 bp, Homo sapiens
  Payload ID: 14055
  Gene Symbol: RAB42
  Gene Name: RAB42, member RAS oncogene family
  Uniprot ID: Q8N4Z0
  ENST ID: ENST00000373826
  CDS Start-End: 307-624
aagaaatgagtgaggtggatgcttcagcgctgttagtctcctccccatgcccctcctcacttcatctagtttagtccctttatcctgtgaagtaggggtcatcattagcccccttttacagaggagagaattgaggcttcgagagagagaaacttggccaggagtttccactcggtccgacgccctcggtgccccgccgggtgcatcaccaggtccttttaccggaatgtggtgggtgtcctgctggtctttgatgtgacaaacaggaagtcctttgaacacatccaagactggcaccaggaggtcatggccactcagggcccggacaaggtcatcttcctgctggttggccacaagagtgacctgcagagcacccgctgtgtctcagcccaggaggccgaggagctagctgcctccctgggcatggccttcgtggagacctcggttaaaaacaactgcaatgtggacctggcctttgacaccctcgctgatgctatccagcaggccctgcagcagggggacatcaagctagaagagggctgggggggtgtccggctcatccacaagacccaaatccccaggtcccccagcaggaagcagcactcaggcccatgccagtgttgactctaggagagaaagggttaaagcagtcccagccttagcccacctggtgggatggggagtgttaatatctctctggaggacaaatgacagaagggttcatataaacagtatcctgacacagtcatgcttcctggattttggagtcgaggctttctacagaaaagaaagttctgatggccaggcatggtggctcacgcctgtaatcctagcatttttggaggccaaggacagtggatcacctgaggtcaggggttcgagaccagcctggccaacatggtgaaaccctgtctctactaaaaatacaaaaattagccaggcgtggtggtgcatgcctgtaatcccagttactccagaggctaaggcaggagaattgcttgaacctgggaggcagagattgcagtgagccaagactgcgccactgcactccagcctgggcaacagagtgagactctgtttcaaaaaaaaaaaagaaaagaaaagaaaggcctgagagaccagatgtgcaacttcctgtccttgagcctcagtgtccctatctatcgatggggctcataaaagatcccaccttgaagggaggtggtgaccacaaatgagacagtggacaggatgtgctcacccagagcctgccgcgctgtgaattgaatgacaaaagctctcattcccactccctttttcttggctgcgatgtggccactctggcagcattcctgggctcagacactgagaagccagcgtcaggaagctgatgcatgggcaaaggcaggtgcggggaattccagggggagcttggcttggaggcttcttatgtcctcaggctaaaatgattctgggcatgggattaatatgtgacgtcaaacccagggttgctggccaatgcccccccgaccaggcccaggggctgaaaaatggatgttggaggctgggatgaacatgaatgtgtagcaactatgttgggcacacagtggccactgtgatgagccaccaagatccccctttctggctggggaacccatcaaccctctccccagctgctggagtgccactggatgatggacttcagcttgccccactctctgggaaaggccctcccttcagggcagcttgtatccaaagttcatctcctggggggccttaaaggactccctcttgccccagctctggacaactctgaaagtcaaaaccaactttatcagtctctgtgggcttcattgaggacactgttgtgacatcatagccaagttatccccttgcccaatcctgcttccttttcttccccaaacaggtatccatttcaagaatatcccctaataaacatctgcacactca

SEQ ID NO: 173255 - DNA, 4467 bp, Homo sapiens
  Payload ID: 14056
  Gene Symbol: RAB43
  Gene Name: RAB43, member RAS oncogene family
  Uniprot ID: Q86YS6
  ENST ID: ENST00000315150
  CDS Start-End: 302-940
cggagctgaggaccggccggagctttgcggagggcccggcttggcgggtccgggggggagccgaacccgcggggcaccgggtccgggcggggccgagccgggccggggcgggagccagccggggtggggcggggccgaggccgaggcaggcggtcggcagtgctgggggttcaggtgttgcggcggctccacgtagccaggcggcccgtgggctggagcgggcggagctcggcccgcggcttgcgtgagctcaggccggtcccagcgtccagagcgccggcccttcggcttcttctaggccatggcagggccgggcccaggcccgggggacccggacgagcagtacgatttcctgttcaagctggtgctggtgggcgacgcaagcgtgggcaagacgtgcgtggtgcagcgcttcaagaccggcgccttctcggagcgccagggaagcaccatcggcgtcgacttcaccatgaagacgctggagatccagggcaagcgggtcaagctgcagatctgggacacggccggccaggagcggttccgcaccatcacccagagctactaccgcagtgccaatggggccatccttgcctacgacatcaccaagaggagctccttcctgtcggtgcctcactggattgaggatgtgaggaagtatgcgggctccaacattgtgcagctgctgatcgggaacaagtcagacctcagcgagcttcgggaggtctccttggctgaggcacagagcctggctgagcactatgacatcctgtgtgccattgagacgtctgccaaggactcgagcaacgtggaggaggccttcctgagggtggccacggagctcatcatgcggcacgggggccccttgttcagcgagaagagccccgaccacatccagctgaacagcaaggacatcggagaaggctggggctgcgggtgctgaccaggggccgggccggcagactgggggttccccacctccttgctctccccagcctgccaagcccagccctccagagccagccctcctgggtaccggcaactacagcagccgggtgaagctctggagctctgcatcctgtggcctggctgcgggatggaggctctccttgaggaaggggaagcaggataccctggcgggccaccctgccagccagcagctggccctccaccatcttcacattccaagactggcctgaacccgccggtgtgggccacagtaggaggggccagcagtcctccctgtcccatgcctgctggctctgaccgtttcctctcatgggtttgctttacctgtggcagcaggttgctgctttccagggatgtgtccagtgccctgggttcttcccggtcatcctggggctctgcacagagcagcagagctagagccatgagacccacagacttggtgcctgagcgcagctccagggaagccccagccccttccaggcggggaacctgcttcctgccttcactgcccccgcagcactcacagacatctccctggggtctggctcactgccttatcaggacctctgagttttctgactttctgtgtagcttctcattttcatcagcacagcatggggtcacggcccacagctaggtggggtcacggcccacagctaggtggggactgtctgctggctcagggcccagtgttttgccactcaggttgcaaaattagctaatccttcagtgccagcactcagaagtctggcaggtgggggaatgagatgagaaagtggacatttaaggtccaagtagaagcttgcatccttgaggctcagggatgagagggcaccgcaaggcacccagccttaccccacaagcaggaatcctgccagccgagcgtgggtcccagtctatggaatcgagtctcccagacaaaaaaggagaggccctggcggtccttggcctggcccattttattccctggacccttaactgcctcaccctgagctgggcaccaaggttagaaggcaaaagtggggtagggggatgtgggaagcagcattgtcctctgggcatgtggctcagaggtatcacagtgacaaaagagccagggctagggctggaggggccaggtgatcttccttagccaatcccagtccgtctgtgtcagcccagctctgcctcgcagccccctcagcatgggtgcccccagaagtaagcagctcttggacccacgagcagggctgcgtcggtttgtggtctagctcccaggggcaggccaggcatggctcagtgcagtccctgggccagtgagaggcctcccccatgcctccctgccctctgcactaagcactttccaggcaggcctggccatagggcaagagcaggccttacagcagtgccacggtgacccaagaggcagggttggggcctggacagggtttcctctgctgagactgagacaagcagggcttgatgctggtggtggagccagcatctcacctgccaggcttccttttgggcagggaggctacctgtggaatggctgagcctggttctgcaggggaggaaggctgccaggagctgaggggctagcacctgcattgaggggagtctgggtgcatcagattggggggcgccagaggcgaggctgcctggctccctttctcagcagctttgcttgtggcaggggtgagagtggagctgagtggggtctgggctctgcccctgcgcctccactgcagtgcctgggctccccttgcagggcagacagtgcctggcactgaggggtgcccccagaccccgctgggactggatgtgccgtgggcagtgccttcctccagcctcacaacctttctgctggggctgaagtttctggggtcacatggtcagaaggggctgagctggtctttcactgcaggcccactctgaaagagaaatcccatgaagcctgtccttgcagagcccctctgtttttgggggaacagggagcattcacagggtcttgggaacaaaggcctgggcctccccgtttgaatttcagccccagttccagggcaagtcccagccacccaagcatacttaccagtactgcccaccaccacccactgcccacctctaagaagcccggctctcctactctgcttccaggctggggcctcacaggtggggctgttaccttcctcagggcttagggagggagggaggacatggacagggccttccaccctggctccttcacagggatggtagctgaccggtgatgggttcatttgtcaccttggactgtgagccacttccacttctcgccccccaggcaggagcaccctcactccaagggcttggcctggaaaggcaggctcacctgggactcaacgttccttcccccgccgccactgtgccccccgtccctccaccccagaagccctgacctcatttgggcaccttgctgtcctctgggcttctcctctgcccaggtcaccctgtggcaggcctgggccctcaggatgtttcaaaggctccacagctccaccgctccacctggcttcactccagcaccctgtccctggagcacctctgtcctgtctgggccaacctggtctccctgccccatgccctcccctggctcttagcaacctgcccttttattcatgccatttggggtcacagatgcctagctggacacagctcccagaactggctccaccctggggccttgcccctagtaccccctggcaggagcaacccaccccatggtcgaggttcccctacccctggatcctggactgaagccatttcctacagagaagcgttcccaccccctctcaggcacaaaagccggtgtccagggactcaagacctgtacctggggttgcaggggctcctgccctgctgtatcccaccaggagggggccccactgcccttccggcccttaaaactgggctgggagagaagacggggaagtgtgtgagacaaaacaaagccggcttgtttcctccccttggcaggctaagctctcccggcagcccgggctctggggcggaaggagaacagtgtcatctcttcctttgttgataaattgccaaagagtgggaacaggtggggtcaggggccagagtgcaggggagggggcaatggtggaggtggcggggggaagcagagggaggtgggctgaggcctcggtggggccagtgcgacgctggcttaaggagctggaggggttcctaatacacatttaattcagtttctcttccctaagaggctgccggagttggggcctcctccagcagagaccctcggacccctgcagggcctggacttggggtgaacagggcttcagtcagcgcaagtattccatttgcatttggtaatttttcatgccacctatttatgaatatataaatctttataccaaatctattttttaaaacatggaaaagttgcctttatggaaacttggcagagccagagtgtacacattcctaaaccattaaacagatttctataacaagcca

SEQ ID NO: 173256 - DNA, 4230 bp, Homo sapiens
  Payload ID: 14056
  Gene Symbol: RAB43
  Gene Name: RAB43, member RAS oncogene family
  Uniprot ID: Q86YS6
  ENST ID: ENST00000393304
  CDS Start-End: 65-703
agactggtgtggcacggagctgaggaccggccggagctttgcggagggcccggcttggcgggccatggcagggccgggcccaggcccgggggacccggacgagcagtacgatttcctgttcaagctggtgctggtgggcgacgcaagcgtgggcaagacgtgcgtggtgcagcgcttcaagaccggcgccttctcggagcgccagggaagcaccatcggcgtcgacttcaccatgaagacgctggagatccagggcaagcgggtcaagctgcagatctgggacacggccggccaggagcggttccgcaccatcacccagagctactaccgcagtgccaatggggccatccttgcctacgacatcaccaagaggagctccttcctgtcggtgcctcactggattgaggatgtgaggaagtatgcgggctccaacattgtgcagctgctgatcgggaacaagtcagacctcagcgagcttcgggaggtctccttggctgaggcacagagcctggctgagcactatgacatcctgtgtgccattgagacgtctgccaaggactcgagcaacgtggaggaggccttcctgagggtggccacggagctcatcatgcggcacgggggccccttgttcagcgagaagagccccgaccacatccagctgaacagcaaggacatcggagaaggctggggctgcgggtgctgaccaggggccgggccggcagactgggggttccccacctccttgctctccccagcctgccaagcccagccctccagagccagccctcctgggtaccggcaactacagcagccgggtgaagctctggagctctgcatcctgtggcctggctgcgggatggaggctctccttgaggaaggggaagcaggataccctggcgggccaccctgccagccagcagctggccctccaccatcttcacattccaagactggcctgaacccgccggtgtgggccacagtaggaggggccagcagtcctccctgtcccatgcctgctggctctgaccgtttcctctcatgggtttgctttacctgtggcagcaggttgctgctttccagggatgtgtccagtgccctgggttcttcccggtcatcctggggctctgcacagagcagcagagctagagccatgagacccacagacttggtgcctgagcgcagctccagggaagccccagccccttccaggcggggaacctgcttcctgccttcactgcccccgcagcactcacagacatctccctggggtctggctcactgccttatcaggacctctgagttttctgactttctgtgtagcttctcattttcatcagcacagcatggggtcacggcccacagctaggtggggtcacggcccacagctaggtggggactgtctgctggctcagggcccagtgttttgccactcaggttgcaaaattagctaatccttcagtgccagcactcagaagtctggcaggtgggggaatgagatgagaaagtggacatttaaggtccaagtagaagcttgcatccttgaggctcagggatgagagggcaccgcaaggcacccagccttaccccacaagcaggaatcctgccagccgagcgtgggtcccagtctatggaatcgagtctcccagacaaaaaaggagaggccctggcggtccttggcctggcccattttattccctggacccttaactgcctcaccctgagctgggcaccaaggttagaaggcaaaagtggggtagggggatgtgggaagcagcattgtcctctgggcatgtggctcagaggtatcacagtgacaaaagagccagggctagggctggaggggccaggtgatcttccttagccaatcccagtccgtctgtgtcagcccagctctgcctcgcagccccctcagcatgggtgcccccagaagtaagcagctcttggacccacgagcagggctgcgtcggtttgtggtctagctcccaggggcaggccaggcatggctcagtgcagtccctgggccagtgagaggcctcccccatgcctccctgccctctgcactaagcactttccaggcaggcctggccatagggcaagagcaggccttacagcagtgccacggtgacccaagaggcagggttggggcctggacagggtttcctctgctgagactgagacaagcagggcttgatgctggtggtggagccagcatctcacctgccaggcttccttttgggcagggaggctacctgtggaatggctgagcctggttctgcaggggaggaaggctgccaggagctgaggggctagcacctgcattgaggggagtctgggtgcatcagattggggggcgccagaggcgaggctgcctggctccctttctcagcagctttgcttgtggcaggggtgagagtggagctgagtggggtctgggctctgcccctgcgcctccactgcagtgcctgggctccccttgcagggcagacagtgcctggcactgaggggtgcccccagaccccgctgggactggatgtgccgtgggcagtgccttcctccagcctcacaacctttctgctggggctgaagtttctggggtcacatggtcagaaggggctgagctggtctttcactgcaggcccactctgaaagagaaatcccatgaagcctgtccttgcagagcccctctgtttttgggggaacagggagcattcacagggtcttgggaacaaaggcctgggcctccccgtttgaatttcagccccagttccagggcaagtcccagccacccaagcatacttaccagtactgcccaccaccacccactgcccacctctaagaagcccggctctcctactctgcttccaggctggggcctcacaggtggggctgttaccttcctcagggcttagggagggagggaggacatggacagggccttccaccctggctccttcacagggatggtagctgaccggtgatgggttcatttgtcaccttggactgtgagccacttccacttctcgccccccaggcaggagcaccctcactccaagggcttggcctggaaaggcaggctcacctgggactcaacgttccttcccccgccgccactgtgccccccgtccctccaccccagaagccctgacctcatttgggcaccttgctgtcctctgggcttctcctctgcccaggtcaccctgtggcaggcctgggccctcaggatgtttcaaaggctccacagctccaccgctccacctggcttcactccagcaccctgtccctggagcacctctgtcctgtctgggccaacctggtctccctgccccatgccctcccctggctcttagcaacctgcccttttattcatgccatttggggtcacagatgcctagctggacacagctcccagaactggctccaccctggggccttgcccctagtaccccctggcaggagcaacccaccccatggtcgaggttcccctacccctggatcctggactgaagccatttcctacagagaagcgttcccaccccctctcaggcacaaaagccggtgtccagggactcaagacctgtacctggggttgcaggggctcctgccctgctgtatcccaccaggagggggccccactgcccttccggcccttaaaactgggctgggagagaagacggggaagtgtgtgagacaaaacaaagccggcttgtttcctccccttggcaggctaagctctcccggcagcccgggctctggggcggaaggagaacagtgtcatctcttcctttgttgataaattgccaaagagtgggaacaggtggggtcaggggccagagtgcaggggagggggcaatggtggaggtggcggggggaagcagagggaggtgggctgaggcctcggtggggccagtgcgacgctggcttaaggagctggaggggttcctaatacacatttaattcagtttctcttccctaagaggctgccggagttggggcctcctccagcagagaccctcggacccctgcagggcctggacttggggtgaacagggcttcagtcagcgcaagtattccatttgcatttggtaatttttcatgccacctatttatgaatatataaatctttataccaaatctattttttaaaacatggaaaagttgcctttatggaaacttggcagagccagagtgtacacattcctaaaccattaaacagatttctataacaagcca

SEQ ID NO: 173257 - DNA, 4215 bp, Homo sapiens
  Payload ID: 14056
  Gene Symbol: RAB43
  Gene Name: RAB43, member RAS oncogene family
  Uniprot ID: Q86YS6
  ENST ID: ENST00000393305
  CDS Start-End: 50-688
aggcggagtcggggagggctgaggtgggcctgaaggcagagtcgaggccatggcagggccgggcccaggcccgggggacccggacgagcagtacgatttcctgttcaagctggtgctggtgggcgacgcaagcgtgggcaagacgtgcgtggtgcagcgcttcaagaccggcgccttctcggagcgccagggaagcaccatcggcgtcgacttcaccatgaagacgctggagatccagggcaagcgggtcaagctgcagatctgggacacggccggccaggagcggttccgcaccatcacccagagctactaccgcagtgccaatggggccatccttgcctacgacatcaccaagaggagctccttcctgtcggtgcctcactggattgaggatgtgaggaagtatgcgggctccaacattgtgcagctgctgatcgggaacaagtcagacctcagcgagcttcgggaggtctccttggctgaggcacagagcctggctgagcactatgacatcctgtgtgccattgagacgtctgccaaggactcgagcaacgtggaggaggccttcctgagggtggccacggagctcatcatgcggcacgggggccccttgttcagcgagaagagccccgaccacatccagctgaacagcaaggacatcggagaaggctggggctgcgggtgctgaccaggggccgggccggcagactgggggttccccacctccttgctctccccagcctgccaagcccagccctccagagccagccctcctgggtaccggcaactacagcagccgggtgaagctctggagctctgcatcctgtggcctggctgcgggatggaggctctccttgaggaaggggaagcaggataccctggcgggccaccctgccagccagcagctggccctccaccatcttcacattccaagactggcctgaacccgccggtgtgggccacagtaggaggggccagcagtcctccctgtcccatgcctgctggctctgaccgtttcctctcatgggtttgctttacctgtggcagcaggttgctgctttccagggatgtgtccagtgccctgggttcttcccggtcatcctggggctctgcacagagcagcagagctagagccatgagacccacagacttggtgcctgagcgcagctccagggaagccccagccccttccaggcggggaacctgcttcctgccttcactgcccccgcagcactcacagacatctccctggggtctggctcactgccttatcaggacctctgagttttctgactttctgtgtagcttctcattttcatcagcacagcatggggtcacggcccacagctaggtggggtcacggcccacagctaggtggggactgtctgctggctcagggcccagtgttttgccactcaggttgcaaaattagctaatccttcagtgccagcactcagaagtctggcaggtgggggaatgagatgagaaagtggacatttaaggtccaagtagaagcttgcatccttgaggctcagggatgagagggcaccgcaaggcacccagccttaccccacaagcaggaatcctgccagccgagcgtgggtcccagtctatggaatcgagtctcccagacaaaaaaggagaggccctggcggtccttggcctggcccattttattccctggacccttaactgcctcaccctgagctgggcaccaaggttagaaggcaaaagtggggtagggggatgtgggaagcagcattgtcctctgggcatgtggctcagaggtatcacagtgacaaaagagccagggctagggctggaggggccaggtgatcttccttagccaatcccagtccgtctgtgtcagcccagctctgcctcgcagccccctcagcatgggtgcccccagaagtaagcagctcttggacccacgagcagggctgcgtcggtttgtggtctagctcccaggggcaggccaggcatggctcagtgcagtccctgggccagtgagaggcctcccccatgcctccctgccctctgcactaagcactttccaggcaggcctggccatagggcaagagcaggccttacagcagtgccacggtgacccaagaggcagggttggggcctggacagggtttcctctgctgagactgagacaagcagggcttgatgctggtggtggagccagcatctcacctgccaggcttccttttgggcagggaggctacctgtggaatggctgagcctggttctgcaggggaggaaggctgccaggagctgaggggctagcacctgcattgaggggagtctgggtgcatcagattggggggcgccagaggcgaggctgcctggctccctttctcagcagctttgcttgtggcaggggtgagagtggagctgagtggggtctgggctctgcccctgcgcctccactgcagtgcctgggctccccttgcagggcagacagtgcctggcactgaggggtgcccccagaccccgctgggactggatgtgccgtgggcagtgccttcctccagcctcacaacctttctgctggggctgaagtttctggggtcacatggtcagaaggggctgagctggtctttcactgcaggcccactctgaaagagaaatcccatgaagcctgtccttgcagagcccctctgtttttgggggaacagggagcattcacagggtcttgggaacaaaggcctgggcctccccgtttgaatttcagccccagttccagggcaagtcccagccacccaagcatacttaccagtactgcccaccaccacccactgcccacctctaagaagcccggctctcctactctgcttccaggctggggcctcacaggtggggctgttaccttcctcagggcttagggagggagggaggacatggacagggccttccaccctggctccttcacagggatggtagctgaccggtgatgggttcatttgtcaccttggactgtgagccacttccacttctcgccccccaggcaggagcaccctcactccaagggcttggcctggaaaggcaggctcacctgggactcaacgttccttcccccgccgccactgtgccccccgtccctccaccccagaagccctgacctcatttgggcaccttgctgtcctctgggcttctcctctgcccaggtcaccctgtggcaggcctgggccctcaggatgtttcaaaggctccacagctccaccgctccacctggcttcactccagcaccctgtccctggagcacctctgtcctgtctgggccaacctggtctccctgccccatgccctcccctggctcttagcaacctgcccttttattcatgccatttggggtcacagatgcctagctggacacagctcccagaactggctccaccctggggccttgcccctagtaccccctggcaggagcaacccaccccatggtcgaggttcccctacccctggatcctggactgaagccatttcctacagagaagcgttcccaccccctctcaggcacaaaagccggtgtccagggactcaagacctgtacctggggttgcaggggctcctgccctgctgtatcccaccaggagggggccccactgcccttccggcccttaaaactgggctgggagagaagacggggaagtgtgtgagacaaaacaaagccggcttgtttcctccccttggcaggctaagctctcccggcagcccgggctctggggcggaaggagaacagtgtcatctcttcctttgttgataaattgccaaagagtgggaacaggtggggtcaggggccagagtgcaggggagggggcaatggtggaggtggcggggggaagcagagggaggtgggctgaggcctcggtggggccagtgcgacgctggcttaaggagctggaggggttcctaatacacatttaattcagtttctcttccctaagaggctgccggagttggggcctcctccagcagagaccctcggacccctgcagggcctggacttggggtgaacagggcttcagtcagcgcaagtattccatttgcatttggtaatttttcatgccacctatttatgaatatataaatctttataccaaatctattttttaaaacatggaaaagttgcctttatggaaacttggcagagccagagtgtacacattcctaaaccattaaacagatttctataacaagcca

SEQ ID NO: 173258 - DNA, 4203 bp, Homo sapiens
  Payload ID: 14056
  Gene Symbol: RAB43
  Gene Name: RAB43, member RAS oncogene family
  Uniprot ID: Q86YS6
  ENST ID: ENST00000393307
  CDS Start-End: 38-676
gggcagagtcgggtcggagtcggggcgcgctgaggccatggcagggccgggcccaggcccgggggacccggacgagcagtacgatttcctgttcaagctggtgctggtgggcgacgcaagcgtgggcaagacgtgcgtggtgcagcgcttcaagaccggcgccttctcggagcgccagggaagcaccatcggcgtcgacttcaccatgaagacgctggagatccagggcaagcgggtcaagctgcagatctgggacacggccggccaggagcggttccgcaccatcacccagagctactaccgcagtgccaatggggccatccttgcctacgacatcaccaagaggagctccttcctgtcggtgcctcactggattgaggatgtgaggaagtatgcgggctccaacattgtgcagctgctgatcgggaacaagtcagacctcagcgagcttcgggaggtctccttggctgaggcacagagcctggctgagcactatgacatcctgtgtgccattgagacgtctgccaaggactcgagcaacgtggaggaggccttcctgagggtggccacggagctcatcatgcggcacgggggccccttgttcagcgagaagagccccgaccacatccagctgaacagcaaggacatcggagaaggctggggctgcgggtgctgaccaggggccgggccggcagactgggggttccccacctccttgctctccccagcctgccaagcccagccctccagagccagccctcctgggtaccggcaactacagcagccgggtgaagctctggagctctgcatcctgtggcctggctgcgggatggaggctctccttgaggaaggggaagcaggataccctggcgggccaccctgccagccagcagctggccctccaccatcttcacattccaagactggcctgaacccgccggtgtgggccacagtaggaggggccagcagtcctccctgtcccatgcctgctggctctgaccgtttcctctcatgggtttgctttacctgtggcagcaggttgctgctttccagggatgtgtccagtgccctgggttcttcccggtcatcctggggctctgcacagagcagcagagctagagccatgagacccacagacttggtgcctgagcgcagctccagggaagccccagccccttccaggcggggaacctgcttcctgccttcactgcccccgcagcactcacagacatctccctggggtctggctcactgccttatcaggacctctgagttttctgactttctgtgtagcttctcattttcatcagcacagcatggggtcacggcccacagctaggtggggtcacggcccacagctaggtggggactgtctgctggctcagggcccagtgttttgccactcaggttgcaaaattagctaatccttcagtgccagcactcagaagtctggcaggtgggggaatgagatgagaaagtggacatttaaggtccaagtagaagcttgcatccttgaggctcagggatgagagggcaccgcaaggcacccagccttaccccacaagcaggaatcctgccagccgagcgtgggtcccagtctatggaatcgagtctcccagacaaaaaaggagaggccctggcggtccttggcctggcccattttattccctggacccttaactgcctcaccctgagctgggcaccaaggttagaaggcaaaagtggggtagggggatgtgggaagcagcattgtcctctgggcatgtggctcagaggtatcacagtgacaaaagagccagggctagggctggaggggccaggtgatcttccttagccaatcccagtccgtctgtgtcagcccagctctgcctcgcagccccctcagcatgggtgcccccagaagtaagcagctcttggacccacgagcagggctgcgtcggtttgtggtctagctcccaggggcaggccaggcatggctcagtgcagtccctgggccagtgagaggcctcccccatgcctccctgccctctgcactaagcactttccaggcaggcctggccatagggcaagagcaggccttacagcagtgccacggtgacccaagaggcagggttggggcctggacagggtttcctctgctgagactgagacaagcagggcttgatgctggtggtggagccagcatctcacctgccaggcttccttttgggcagggaggctacctgtggaatggctgagcctggttctgcaggggaggaaggctgccaggagctgaggggctagcacctgcattgaggggagtctgggtgcatcagattggggggcgccagaggcgaggctgcctggctccctttctcagcagctttgcttgtggcaggggtgagagtggagctgagtggggtctgggctctgcccctgcgcctccactgcagtgcctgggctccccttgcagggcagacagtgcctggcactgaggggtgcccccagaccccgctgggactggatgtgccgtgggcagtgccttcctccagcctcacaacctttctgctggggctgaagtttctggggtcacatggtcagaaggggctgagctggtctttcactgcaggcccactctgaaagagaaatcccatgaagcctgtccttgcagagcccctctgtttttgggggaacagggagcattcacagggtcttgggaacaaaggcctgggcctccccgtttgaatttcagccccagttccagggcaagtcccagccacccaagcatacttaccagtactgcccaccaccacccactgcccacctctaagaagcccggctctcctactctgcttccaggctggggcctcacaggtggggctgttaccttcctcagggcttagggagggagggaggacatggacagggccttccaccctggctccttcacagggatggtagctgaccggtgatgggttcatttgtcaccttggactgtgagccacttccacttctcgccccccaggcaggagcaccctcactccaagggcttggcctggaaaggcaggctcacctgggactcaacgttccttcccccgccgccactgtgccccccgtccctccaccccagaagccctgacctcatttgggcaccttgctgtcctctgggcttctcctctgcccaggtcaccctgtggcaggcctgggccctcaggatgtttcaaaggctccacagctccaccgctccacctggcttcactccagcaccctgtccctggagcacctctgtcctgtctgggccaacctggtctccctgccccatgccctcccctggctcttagcaacctgcccttttattcatgccatttggggtcacagatgcctagctggacacagctcccagaactggctccaccctggggccttgcccctagtaccccctggcaggagcaacccaccccatggtcgaggttcccctacccctggatcctggactgaagccatttcctacagagaagcgttcccaccccctctcaggcacaaaagccggtgtccagggactcaagacctgtacctggggttgcaggggctcctgccctgctgtatcccaccaggagggggccccactgcccttccggcccttaaaactgggctgggagagaagacggggaagtgtgtgagacaaaacaaagccggcttgtttcctccccttggcaggctaagctctcccggcagcccgggctctggggcggaaggagaacagtgtcatctcttcctttgttgataaattgccaaagagtgggaacaggtggggtcaggggccagagtgcaggggagggggcaatggtggaggtggcggggggaagcagagggaggtgggctgaggcctcggtggggccagtgcgacgctggcttaaggagctggaggggttcctaatacacatttaattcagtttctcttccctaagaggctgccggagttggggcctcctccagcagagaccctcggacccctgcagggcctggacttggggtgaacagggcttcagtcagcgcaagtattccatttgcatttggtaatttttcatgccacctatttatgaatatataaatctttataccaaatctattttttaaaacatggaaaagttgcctttatggaaacttggcagagccagagtgtacacattcctaaaccattaaacagatttctataacaagcca

SEQ ID NO: 173259 - DNA, 4193 bp, Homo sapiens
  Payload ID: 14056
  Gene Symbol: RAB43
  Gene Name: RAB43, member RAS oncogene family
  Uniprot ID: Q86YS6
  ENST ID: ENST00000393308
  CDS Start-End: 28-666
aggcggaacccgggtcgggctgaggccatggcagggccgggcccaggcccgggggacccggacgagcagtacgatttcctgttcaagctggtgctggtgggcgacgcaagcgtgggcaagacgtgcgtggtgcagcgcttcaagaccggcgccttctcggagcgccagggaagcaccatcggcgtcgacttcaccatgaagacgctggagatccagggcaagcgggtcaagctgcagatctgggacacggccggccaggagcggttccgcaccatcacccagagctactaccgcagtgccaatggggccatccttgcctacgacatcaccaagaggagctccttcctgtcggtgcctcactggattgaggatgtgaggaagtatgcgggctccaacattgtgcagctgctgatcgggaacaagtcagacctcagcgagcttcgggaggtctccttggctgaggcacagagcctggctgagcactatgacatcctgtgtgccattgagacgtctgccaaggactcgagcaacgtggaggaggccttcctgagggtggccacggagctcatcatgcggcacgggggccccttgttcagcgagaagagccccgaccacatccagctgaacagcaaggacatcggagaaggctggggctgcgggtgctgaccaggggccgggccggcagactgggggttccccacctccttgctctccccagcctgccaagcccagccctccagagccagccctcctgggtaccggcaactacagcagccgggtgaagctctggagctctgcatcctgtggcctggctgcgggatggaggctctccttgaggaaggggaagcaggataccctggcgggccaccctgccagccagcagctggccctccaccatcttcacattccaagactggcctgaacccgccggtgtgggccacagtaggaggggccagcagtcctccctgtcccatgcctgctggctctgaccgtttcctctcatgggtttgctttacctgtggcagcaggttgctgctttccagggatgtgtccagtgccctgggttcttcccggtcatcctggggctctgcacagagcagcagagctagagccatgagacccacagacttggtgcctgagcgcagctccagggaagccccagccccttccaggcggggaacctgcttcctgccttcactgcccccgcagcactcacagacatctccctggggtctggctcactgccttatcaggacctctgagttttctgactttctgtgtagcttctcattttcatcagcacagcatggggtcacggcccacagctaggtggggtcacggcccacagctaggtggggactgtctgctggctcagggcccagtgttttgccactcaggttgcaaaattagctaatccttcagtgccagcactcagaagtctggcaggtgggggaatgagatgagaaagtggacatttaaggtccaagtagaagcttgcatccttgaggctcagggatgagagggcaccgcaaggcacccagccttaccccacaagcaggaatcctgccagccgagcgtgggtcccagtctatggaatcgagtctcccagacaaaaaaggagaggccctggcggtccttggcctggcccattttattccctggacccttaactgcctcaccctgagctgggcaccaaggttagaaggcaaaagtggggtagggggatgtgggaagcagcattgtcctctgggcatgtggctcagaggtatcacagtgacaaaagagccagggctagggctggaggggccaggtgatcttccttagccaatcccagtccgtctgtgtcagcccagctctgcctcgcagccccctcagcatgggtgcccccagaagtaagcagctcttggacccacgagcagggctgcgtcggtttgtggtctagctcccaggggcaggccaggcatggctcagtgcagtccctgggccagtgagaggcctcccccatgcctccctgccctctgcactaagcactttccaggcaggcctggccatagggcaagagcaggccttacagcagtgccacggtgacccaagaggcagggttggggcctggacagggtttcctctgctgagactgagacaagcagggcttgatgctggtggtggagccagcatctcacctgccaggcttccttttgggcagggaggctacctgtggaatggctgagcctggttctgcaggggaggaaggctgccaggagctgaggggctagcacctgcattgaggggagtctgggtgcatcagattggggggcgccagaggcgaggctgcctggctccctttctcagcagctttgcttgtggcaggggtgagagtggagctgagtggggtctgggctctgcccctgcgcctccactgcagtgcctgggctccccttgcagggcagacagtgcctggcactgaggggtgcccccagaccccgctgggactggatgtgccgtgggcagtgccttcctccagcctcacaacctttctgctggggctgaagtttctggggtcacatggtcagaaggggctgagctggtctttcactgcaggcccactctgaaagagaaatcccatgaagcctgtccttgcagagcccctctgtttttgggggaacagggagcattcacagggtcttgggaacaaaggcctgggcctccccgtttgaatttcagccccagttccagggcaagtcccagccacccaagcatacttaccagtactgcccaccaccacccactgcccacctctaagaagcccggctctcctactctgcttccaggctggggcctcacaggtggggctgttaccttcctcagggcttagggagggagggaggacatggacagggccttccaccctggctccttcacagggatggtagctgaccggtgatgggttcatttgtcaccttggactgtgagccacttccacttctcgccccccaggcaggagcaccctcactccaagggcttggcctggaaaggcaggctcacctgggactcaacgttccttcccccgccgccactgtgccccccgtccctccaccccagaagccctgacctcatttgggcaccttgctgtcctctgggcttctcctctgcccaggtcaccctgtggcaggcctgggccctcaggatgtttcaaaggctccacagctccaccgctccacctggcttcactccagcaccctgtccctggagcacctctgtcctgtctgggccaacctggtctccctgccccatgccctcccctggctcttagcaacctgcccttttattcatgccatttggggtcacagatgcctagctggacacagctcccagaactggctccaccctggggccttgcccctagtaccccctggcaggagcaacccaccccatggtcgaggttcccctacccctggatcctggactgaagccatttcctacagagaagcgttcccaccccctctcaggcacaaaagccggtgtccagggactcaagacctgtacctggggttgcaggggctcctgccctgctgtatcccaccaggagggggccccactgcccttccggcccttaaaactgggctgggagagaagacggggaagtgtgtgagacaaaacaaagccggcttgtttcctccccttggcaggctaagctctcccggcagcccgggctctggggcggaaggagaacagtgtcatctcttcctttgttgataaattgccaaagagtgggaacaggtggggtcaggggccagagtgcaggggagggggcaatggtggaggtggcggggggaagcagagggaggtgggctgaggcctcggtggggccagtgcgacgctggcttaaggagctggaggggttcctaatacacatttaattcagtttctcttccctaagaggctgccggagttggggcctcctccagcagagaccctcggacccctgcagggcctggacttggggtgaacagggcttcagtcagcgcaagtattccatttgcatttggtaatttttcatgccacctatttatgaatatataaatctttataccaaatctattttttaaaacatggaaaagttgcctttatggaaacttggcagagccagagtgtacacattcctaaaccattaaacagatttctataacaagcca

SEQ ID NO: 173260 - DNA, 574 bp, Homo sapiens
  Payload ID: 14056
  Gene Symbol: RAB43
  Gene Name: RAB43, member RAS oncogene family
  ENST ID: ENST00000457077
  CDS Start-End: 316-574
ccatcaaatggggccctgggtcctctcctcacaaggattttgggctcctccgcagttttgtagccagcctggattctggccttctgcagcctgctccctcccttcccttccgcccctgggaagagcgacccccaccactctcggagactgcactgcccgcctgtcagagtgggcactcaggtgacactgctgtggtcgtccccttcctccgtgatccattccggagggggtcattcttagtctaggcctgcaggcccggagctccagccatggtctccgcctgtccctgaccggcggtctgggaggcagcaggccatggcagggccgggcccaggcccgggggacccggacgagcagtacgatttcctgttcaagctggtgctggtgggcgacgcaagcgtgggcaagacgtgcgtggtgcagcgcttcaagaccggcgccttctcggagcgccagggaagcaccatcggcgtcgacttcaccatgaagacgctggagatccagggcaagcgggtcaagctgcagatctgggacacggccggccaggagcggttccgcaccatcacccagagct

SEQ ID NO: 173261 - DNA, 1627 bp, Homo sapiens
  Payload ID: 14056
  Gene Symbol: RAB43
  Gene Name: RAB43, member RAS oncogene family
  Uniprot ID: Q86YS6
  ENST ID: ENST00000476465
  CDS Start-End: 293-760
ggaccggccggagctttgcggagggcccggcttggcgggtccgggggggagccgaacccgcggggcaccgggtccgggcggggccgagccgggccggggcgggagccagccggggtggggcggggccgaggccgaggcaggcggtcggcagtgctgggggttcaggtgttgcggcggctccacgtagccaggcggcccgtgggctggagcgggcggagctcggcccgcggcttgcgtgagctcaggccggtcccagcgtccagagcgccggcccttcggcttcttctaggccatggcagggccgggcccaggcccgggggacccggacgagcagtacgatttcctgttcaagctggtgctggtgggcgacgcaagcgtgggcaagacgtgcgtggtgcagcgcttcaagaccggcgccttctcggagcgccagggaagcaccatcggcgtcgacttcaccatgaagacgctggagatccagggcaagcgggtcaagctgcagatctgggacacggccggccaggagcggttccgcaccatcacccagagctactaccgcagtgccaatggggccatccttgcctacgacatcaccaagaggagctccttcctgtcggtgcctcactggattgaggatgtgaggaagtatgcgggctccaacattgtgcagctgctgatcgagatgcagtcctgctatgttgcccaggctgatcttgaactcctggcctcaagcaatcctcctgcctcaacctccaagtagttggaattacaggtggaacaagtcagacctcagcgagcttcgggaggtctccttggctgaggcacagagcctggctgagcactatgacatcctgtgtgccattgagacgtctgccaaggactcgagcaacgtggaggaggccttcctgagggtggccacggagctcatcatgcggcacgggggccccttgttcagcgagaagagccccgaccacatccagctgaacagcaaggacatcggagaaggctggggctgcgggtgctgaccaggggccgggccggcagactgggggttccccacctccttgctctccccagcctgccaagcccagccctccagagccagccctcctgggtaccggcaactacagcagccgggtgaagctctggagctctgcatcctgtggcctggctgcgggatggaggctctccttgaggaaggggaagcaggataccctggcgggccaccctgccagccagcagctggccctccaccatcttcacattccaagactggcctgaacccgccggtgtgggccacagtaggaggggccagcagtcctccctgtcccatgcctgctggctctgaccgtttcctctcatgggtttgctttacctgtggcagcaggttgctgctttccagggatgtgtccagtgccctgggttcttcccggtcatcctggggctctgcacagagcagcagagctagagccatgagacccacagacttggtgcctgagcgcagctccagggaagccccagccccttccaggcggggaacctgcttcctgccttcactgcccccgcagcactcacagacatctccctggggtctggctcactgccttatcaggacctctgagttttc

SEQ ID NO: 173262 - DNA, 783 bp, Homo sapiens
  Payload ID: 14056
  Gene Symbol: RAB43
  Gene Name: RAB43, member RAS oncogene family
  Uniprot ID: Q86YS6
  ENST ID: ENST00000615093
  CDS Start-End: 316-783
agactggtgtggcacggagctgaggaccggccggagctttgcggagggcccggcttggcgggtccgggggggagccgaacccgcggggcaccgggtccgggcggggccgagccgggccggggcgggagccagccggggtggggcggggccgaggccgaggcaggcggtcggcagtgctgggggttcaggtgttgcggcggctccacgtagccaggcggcccgtgggctggagcgggcggagctcggcccgcggcttgcgtgagctcaggccggtcccagcgtccagagcgccggcccttcggcttcttctaggccatggcagggccgggcccaggcccgggggacccggacgagcagtacgatttcctgttcaagctggtgctggtgggcgacgcaagcgtgggcaagacgtgcgtggtgcagcgcttcaagaccggcgccttctcggagcgccagggaagcaccatcggcgtcgacttcaccatgaagacgctggagatccagggcaagcgggtcaagctgcagatctgggacacggccggccaggagcggttccgcaccatcacccagagctactaccgcagtgccaatggggccatccttgcctacgacatcaccaagaggagctccttcctgtcggtgcctcactggattgaggatgtgaggaagtatgcgggctccaacattgtgcagctgctgatcgagatgcagtcctgctatgttgcccaggctgatcttgaactcctggcctcaagcaatcctcctgcctcaacctccaagtag

SEQ ID NO: 173263 - DNA, 3851 bp, Homo sapiens
  Payload ID: 14057
  Gene Symbol: RAB44
  Gene Name: RAB44, member RAS oncogene family
  Uniprot ID: Q7Z6P3
  ENST ID: ENST00000229824
  CDS Start-End: 1-2761
cttctgtcccacagaaaacatctttggctccagccagagcccccacaggctccgcagaaggaagccactgccctctaagcgggtatctgctaccaccagcttcccagctctggaggaggcggatgctgaggagaaggaggcgttccttgccttcatggagcagctggggactggacacttacttcccaagcagatggaaatctggcaactgtgggggcagctgcggcaggaggagccccagctggcaggcaacctggcaggctttctggccaagatgaccagccgcctgcaggaggcccaggcggacaaggaggccctggagctgaccctgaggaagcgtgactctgaccaccaccgcgaggtccagcagctctatgaggagatggagcagcagatccgccaggagaagcagcagctgcaggctgagagcgactctcggggcctggccctcacctcccagatgcaggacgtcctagaggccaaggagcgcgaggtgcagcgactagctgagggccagagggagctggaggcccagctctcccacctcaggagcacacatcaggaggctgcctcagagaaccagcagctgcaggaggccaagcgtgacctggctgggcggctggaggaggtgcgggggcagctgcaggtgaccagggggcgcctggacgccgccaggggccgggtgtcctggcaggtggaggagaaactgagttttcctggagcgggtgagaagaccccagaccctcaggctgcctcccctgaggaggcccccctgcctgggctatttggggacaacgatgactgggaccagctactgagcaactttggcagccctccgcacggagccctgcagctctgctggagcccgcccccgaccccaagagccacctcaggcccccagacaccccgtgtggtcaggcagatctccatctcggagccacaggcttttctatttggtcaggagccatcttcagatccagatggggctccaaggaccccacctggggtgactttcagcgccaaggacaataaaggagtggacccacatgagcaggacattagagcagagcagcctgttgaaccgcacgacccggaccccaaccaggagccagggtccacacccgagggccgcctcctctggggtctctcaggaagcctggtggcacctgcattcaaagtgctcattcctttggaggatgggccccctccccctgcgaactctccccctccccaggccccagctgggtccagcaaacagatccaggcctcagacccagatgacaagggccctgggtcttgggctcctcccagcggggctcagcctggggctggagcaggaccccaggaacccacacaaacccctcccaccatgactgagcgggaaacccagcccggaccctcacccacaactgccctcacaggagtgggcccagccaagccgcccaggcagagagatgccctccagcaggacctgcatgccactggctctgagccaagactggggacccagagggctagagccctcaccctggggccagctgagcccttccagggcctggaatttgtgggtccggtgcccacagagaggctggagcagggccaggcgggcccagcggtgcaggagggccttcctgaggggctaagagaagctcatggccaggtccttgggctgggtgagctgtctgccttcccccaccaggagctggaagaggaacccaggtctgaggaaggaaaacaagagggcagaggtgggcaggacctcagttcagagcagtcagagcagtcggttgaggctcacggcctagaaactgcgcattcggaactcccccagcaagactctctgcttgtttctctcccatctgccacaccacaggctcaggtggaagcagaaggccccactcctggaaaatcggcacctccaaggggctctcctcccaggggggctcagcctggggctggagcaggaccccaggaacccacgcaaacccctcccaccatggctgagcaggaagcccaacccaggccatccctcacgactgctcacgcagaagaacaaggcccgcctcactccagggaaccaagggcagagagcaggcttgaagatccaggaatggactccagggaagctgggctgaccccatccccgggagaccccatggctggagggggaccccaggccaaccctgattacctcttccatgtcatctttctgggagactccaacgtgggcaaaacatccttcctgcacctgctgcaccagaattctttcgccaccggattgacagctaccgtgggagtagattttcgggtcaaaaccttgctggtggacaacaagtgctttgtgctgcagctctgggacacagctggccaagagaggtaccacagtatgacgcgacagctgctccgcaaggctgacggggtggtgctcatgtacgacatcacctcccaggagagctttgcccacgtgcgctactggctagactgtctccaggatgcagggtcggatggggtggtcatccttctcctgggaaacaagatggactgtgaggaggaacggcaagtgtccgtggaagctgggcagcaactggcccaggaactgggggtctattttggggagtgcagtgccgccttgggtcacaacatcctggagcctgtagtaaacctggccaggtcactcaggatgcaagaagaaggcctgaaggactcgctggtgaaggtggcccccaagaggccgcccaagagattcggctgttgctcctgatcacctgtcctgtcctgggtaggatggacacccatggggtttcctgtccctcagctcctgtcctttgttcctggacagcaacgacacagaggaccagcttggaggttcaggaaaacccttctcaactcaggactcggatcccagagcagggccgcatcacctctgcctttcacactccaaaggagggctttgctgagtgaacaaggcttgaggggcaggggtatggcaaaactctccaaacaaagaaagtctagaaaaacgacttaaggaaaatacaccaaaatattggccgcacatctgtgggtgtaaaattttagggagaatgtggggggggggtgttactttccattttacacatatttgtattttcagattttcaacaataacagtattcaatacataatcagaaaaaagagatgtggaggaggaggagagaaacttcccaaggagctcccttgggtgctgctggctcctaattagtgtaacctgttaatcacatgttgctcggtgttagagcggtccctctgtgctctgcttggcagggcgctgttggcctggtctccctcgctatttctatttgcaagcatgggctttcttcccagcagaatctggttcctgggaagagtaatgttccaaaggcctctgatatgcctcgatgccctcctgtcttccagagccccaacctcactccctttccccaccatacaaaacacacctcccaggggtcacatttgggggtcccgccccctgctccaatgccatggtgtccccaagcacagggctttggcctgagttgtcagtctctggatgcatttgaggggcagctagggtgtggctggggggtccaagcagctggggagccgagactcagaatcattcacacacttctatttggagcttttgtggaagtttccagaattccataatattcacctcctgaatggtggctgccccttatcagctagggctggggtttccagtgccctcggagagcttgctttagagtcttggagagacggccatggtcttcgtttgtatgtctgtcacatcttaccatcatcacaaattgaatatacaacatgtgccaggc

SEQ ID NO: 173264 - DNA, 4233 bp, Homo sapiens
  Payload ID: 14057
  Gene Symbol: RAB44
  Gene Name: RAB44, member RAS oncogene family
  ENST ID: ENST00000612677
  CDS Start-End: 78-3143
agcagtcaccctaccaccaggtcccagagcccagggctgtgtgttccactgggagcctttgagagggccaacgcaccatggagactggacagagaacatctcgaaaagtccggaagctgggctccaaccggcggcggcagacaagagagccagctgatggtgaaggcgctgcagtggccccagagccagagtcttggtcctctcaggcagcggcagaactgcaggccttcttccaggactgtggtgccaaggagaggggctttgtcacccgcgaggacctggcggtggccaagttcagcttcctgggcagcaaggaagagtcagagatgatcttcgactgggtggatgtggagcggaagggacacctgtcccttgaagaattcagctctggactcaaaaacatctttggctccagccagagcccccacaggctccgcagaaggaagccactgccctctaagcgggtatctgctaccaccagcttcccagctctggaggaggcggatgctgaggagaaggaggcgttccttgccttcatggagcagctggggactggacacttacttcccaagcagatggaaatctggcaactgtgggggcagctgcggcaggaggagccccagctggcaggcaacctggcaggctttctggccaagatgaccagccgcctgcaggaggcccaggcggacaaggaggccctggagctgaccctgaggaagcgtgactctgaccaccaccgcgaggtccagcagctctatgaggagatggagcagcagatccgccaggagaagcagcagctgcaggctgagagcgactctcggggcctggccctcacctcccagatgcaggacgtcctagaggccaaggagcgcgaggtgcagcgactagctgagggccagagggagctggaggcccagctctcccacctcaggagcacacatcaggaggctgcctcagagaaccagcagctgcaggaggccaagcgtgacctggctgggcggctggaggaggtgcgggggcagctgcaggtgaccagggggcgcctggacgccgccaggggccgggtgtcctggcaggtggaggagaaactgagttttcctggagcgggtgagaagaccccagaccctcaggctgcctcccctgaggaggcccccctgcctgggctatttggggacaacgatgactgggaccagctactgagcaactttggcagccctccgcacggagccctgcagctctgctggagcccgcccccgaccccaagagccacctcaggcccccagacaccccgtgtggtcaggcagatctccatctcggagccacaggcttttctatttggtcaggagccatcttcagatccagatggggctccaaggaccccacctggggtgactttcagcgccaaggacaataaaggagtggacccacatgagcaggacattagagcagagcagcctgttgaaccgcacgacccggaccccaaccaggagccagggtccacacccgagggccgcctcctctggggtctctcaggaagcctggtggcacctgcattcaaagtgctcattcctttggaggatgggccccctccccctgcgaactctccccctccccaggccccagctgggtccagcaaacagatccaggcctcagacccagatgacaagggccctgggtcttgggctcctcccagcggggctcagcctggggctggagcaggaccccaggaacccacacaaacccctcccaccatgactgagcgggaaacccagcccggaccctcacccacaactgccctcacaggagtgggcccagccaagccgcccaggcagagagatgccctccagcaggacctgcatgccactggctctgagccaagactggggacccagagggctagagccctcaccctggggccagctgagcccttccagggcctggaatttgtgggtccggtgcccacagagaggctggagcagggccaggcgggcccagcggtgcaggagggccttcctgaggggctaagagaagctcatggccaggtccttgggctgggtgagctgtctgccttcccccaccaggagctggaagaggaacccaggtctgaggaaggaaaacaagagggcagaggtgggcaggacctcagttcagagcagtcagagcagtcggttgaggctcacggcctagaaactgcgcattcggaactcccccagcaagactctctgcttgtttctctcccatctgccacaccacaggctcaggtggaagcagaaggccccactcctggaaaatcggcacctccaaggggctctcctcccaggggggctcagcctggggctggagcaggaccccaggaacccacgcaaacccctcccaccatggctgagcaggaagcccaacccaggccatccctcacgactgctcacgcagaagaacaaggcccgcctcactccagggaaccaagggcagagagcaggcttgaagatccaggaatggactccagggaagctgggctgaccccatccccgggagaccccatggctggagggggaccccaggccaaccctgattacctcttccatgtcatctttctgggagactccaacgtgggcaaaacatccttcctgcacctgctgcaccagaattctttcgccaccggattgacagctaccgtgggagtagattttcgggtcaaaaccttgctggtggacaacaagtgctttgtgctgcagctctgggacacagctggccaagagaggtaccacagtatgacgcgacagctgctccgcaaggctgacggggtggtgctcatgtacgacatcacctcccaggagagctttgcccacgtgcgctactggctagactgtctccaggatgcagggtcggatggggtggtcatccttctcctgggaaacaagatggactgtgaggaggaacggcaagtgtccgtggaagctgggcagcaactggcccaggaactgggggtctattttggggagtgcagtgccgccttgggtcacaacatcctggagcctgtagtaaacctggccaggtcactcaggatgcaagaagaaggcctgaaggactcgctggtgaaggtggcccccaagaggccgcccaagagattcggctgttgctcctgatcacctgtcctgtcctgggtaggatggacacccatggggtttcctgtccctcagctcctgtcctttgttcctggacagcaacgacacagaggaccagcttggaggttcaggaaaacccttctcaactcaggactcggatcccagagcagggccgcatcacctctgcctttcacactccaaaggagggctttgctgagtgaacaaggcttgaggggcaggggtatggcaaaactctccaaacaaagaaagtctagaaaaacgacttaaggaaaatacaccaaaatattggccgcacatctgtgggtgtaaaattttagggagaatgtggggggggggtgttactttccattttacacatatttgtattttcagattttcaacaataacagtattcaatacataatcagaaaaaagagatgtggaggaggaggagagaaacttcccaaggagctcccttgggtgctgctggctcctaattagtgtaacctgttaatcacatgttgctcggtgttagagcggtccctctgtgctctgcttggcagggcgctgttggcctggtctccctcgctatttctatttgcaagcatgggctttcttcccagcagaatctggttcctgggaagagtaatgttccaaaggcctctgatatgcctcgatgccctcctgtcttccagagccccaacctcactccctttccccaccatacaaaacacacctcccaggggtcacatttgggggtcccgccccctgctccaatgccatggtgtccccaagcacagggctttggcctgagttgtcagtctctggatgcatttgaggggcagctagggtgtggctggggggtccaagcagctggggagccgagactcagaatcattcacacacttctatttggagcttttgtggaagtttccagaattccataatattcacctcctgaatggtggctgccccttatcagctagggctggggtttccagtgccctcggagagcttgctttagagtcttggagagacggccatggtcttcgtttgtatgtctgtcacatcttaccatcatcacaaattgaatatacaacatgtgccaggc

SEQ ID NO: 173265 - DNA, 2966 bp, Homo sapiens
  Payload ID: 14058
  Gene Symbol: RAB4A
  Gene Name: RAB4A, member RAS oncogene family
  Uniprot ID: P20338
  ENST ID: ENST00000366690
  CDS Start-End: 209-865
gccggacggagggtggagggccctgcgcctgcgcggagctggagtccggctgggccgcagccgctgggagaccggcggttgccgtggggaccggtcgggcccctccctcctccggtcccccgccccaggtccttccccaccgagacgcgccggcggaccgcgggcgagtgcagccggtgacccggcgagaggcggcgccgctcccaagatgtcgcagacggccatgtccgaaacctacgattttttgtttaagttcttggttattggaaatgcaggaactggcaaatcttgcttacttcatcagtttattgaaaaaaaattcaaagatgactcaaatcatacaataggagtggaatttggttcaaagataataaatgttggtggtaaatatgtaaagttacaaatatgggatacagcaggacaagaacgattcaggtccgtgacgagaagttattaccgaggcgcggccggggctctcctcgtctatgatatcaccagccgagaaacctacaatgcgcttactaattggttaacagatgcccgaatgctagcgagccagaacattgtgatcatcctttgtggaaacaagaaggacctggatgcagatcgtgaagttaccttcttagaagcctccagatttgctcaagaaaatgagctgatgtttttggaaacaagtgcgctcacaggggagaatgtagaagaggcttttgtacagtgtgcaagaaaaatacttaacaaaatcgaatcaggtgagctggacccagaaagaatgggctcaggtattcagtacggagatgctgccttgagacagctgaggtcaccgcggcgcgcacaggccccgaacgctcaggagtgtggttgttaggagagcacacaggtgttcatacagtggcatttgggacacaatcgttggaacctgaagaatctgaagttttttttaccaccatctttttctactctgtatggaagtagatctttatggggaaaagagaatttggggtgttctgcaagccagtcaaagtggcacagcaaatcatataaatcgaattaaatggacaacaccgttagatgtgtatgtaaaaattttctgtttcatatttttcctttcactttcggtttaaaacatgctatatgtactgtatgtcctgtagcccagtgcggctccacagcatggaatctgatgtatgatatgatagaatgtggcactaaatgcagtttcagattttattttttttaatcatatgaactaaaattgtcaattgtgaggtgtgcttttctcatcatgttggttatattgcacaattggttatatttatgacctgatattcaaagactctggcattgatagccagtgtgttttcttatttaactccgtttactacattctacatggtgtttacgtgatccacacttgaaatactagatcagtagacattcactaatataccaaaataaaatgaaaaattgagtttttccgtgaactttatactgtccagctctgttgattttaaagcctcttcatccaggtcagttcaggaagtatatctggagtacctgctctgtttttggctgtgagactagcactaaggattctggtacctttacccaaacctactgggctactaatacttctctcagcagttgatcaaatacaatagaccatgtaagctggggccgctcatccacttccagtttgctggtctccctgctagaaaacacattgtactgtgctttttctggaattcagtataatggcatcactgcctgtttttcacatcttttgtttcctgttcattttaaggaaacctactaaatccagttaatattaaatggacaccactcattaagaaatttctttatggcttctgctgaatacttaaatgccttactacagttatccagttgacatgtttttaattcatataaggtatattgggtatattgaagtatatattgtattacaaagacttgttcttgtattttaaaatgtcagtgcaaaaaatatatggtggaacctttctttaaagttgaaatgcagtattatttaaatctgaaaggttaaaaagctttcttcaccttatatatgttcttccactgtgactttttagttgaagactagtaaattaacttttagttagaagatgcctactgcttttgttgtttattttaatcagcagagcacagagacacataaaaactctgggaaatgactaggataaaaatatcagtatgtatctgttttagatattttgagttttgctttttttatgccttgaatattttatttcaaaaagtatctgaagcaaattctcagactgaactacttcttagacctcactgtaagaatattttattcaatgtctcatttatgatagatttgcaagctgctcatttttgaacagctttttgcatgggataggagcatgtctattctaacacatcagcttattcaaaagcaagaattttaaaaataagataaatgtaaagttgttttataaacgatcctgttaattaaaccacagacaccatatatccttctgcatcctttggccaataaaagttgctggagaaccaaaccatggtggttcttaatcaggctttgcctttagggagaatgaggaggagagataattgggtattgttcaggctagtaataaatgtcatgtttctatttcccgcaactcattaagttttcaggaagctcttaatttagatttctaggaaagtaattattcagtcttcctagaaaaagattataaagaccatttaaactggagattgtaatttattcttttacagtccagcatttaagtgaaaatgagaacatcacaatttgggaatctgtaatggttttgttgaaaacattacttgtggcttgtataagagtggctgaattcaagaacattgattcttagcagatcaataatagtatttaaagaatctgatgctaaaattagaaacctaaa

SEQ ID NO: 173266 - DNA, 2799 bp, Homo sapiens
  Payload ID: 14058
  Gene Symbol: RAB4A
  Gene Name: RAB4A, member RAS oncogene family
  ENST ID: ENST00000618010
  CDS Start-End: 360-701
gtgcgcacgcgcgaacgcggggtgggccgggcctcgcgtagcccatctcctcttcctcctcgcggtcgcggccggacggagggtggagggccctgcgcctgcgcggagctggagtccggctgggccgcagccgctgggagaccggcggttgccgtggggaccggtcgggcccctccctcctccggtcccccgccccaggtccttccccaccgagacgcgccggcggaccgcgggcgagtgcagccggtgacccggcgagaggcggcgccgctcccaagatgtcgcagacggccatgtccgaaacctacggtccgtgacgagaagttattaccgaggcgcggccggggctctcctcgtctatgatatcaccagatgcccgaatgctagcgagccagaacattgtgatcatcctttgtggaaacaagaaggacctggatgcagatcgtgaagttaccttcttagaagcctccagatttgctcaagaaaatgagctgatgtttttggaaacaagtgcgctcacaggggagaatgtagaagaggcttttgtacagtgtgcaagaaaaatacttaacaaaatcgaatcaggtgagctggacccagaaagaatgggctcaggtattcagtacggagatgctgccttgagacagctgaggtcaccgcggcgcgcacaggccccgaacgctcaggagtgtggttgttaggagagcacacaggtgttcatacagtggcatttgggacacaatcgttggaacctgaagaatctgaagttttttttaccaccatctttttctactctgtatggaagtagatctttatggggaaaagagaatttggggtgttctgcaagccagtcaaagtggcacagcaaatcatataaatcgaattaaatggacaacaccgttagatgtgtatgtaaaaattttctgtttcatatttttcctttcactttcggtttaaaacatgctatatgtactgtatgtcctgtagcccagtgcggctccacagcatggaatctgatgtatgatatgatagaatgtggcactaaatgcagtttcagattttattttttttaatcatatgaactaaaattgtcaattgtgaggtgtgcttttctcatcatgttggttatattgcacaattggttatatttatgacctgatattcaaagactctggcattgatagccagtgtgttttcttatttaactccgtttactacattctacatggtgtttacgtgatccacacttgaaatactagatcagtagacattcactaatataccaaaataaaatgaaaaattgagtttttccgtgaactttatactgtccagctctgttgattttaaagcctcttcatccaggtcagttcaggaagtatatctggagtacctgctctgtttttggctgtgagactagcactaaggattctggtacctttacccaaacctactgggctactaatacttctctcagcagttgatcaaatacaatagaccatgtaagctggggccgctcatccacttccagtttgctggtctccctgctagaaaacacattgtactgtgctttttctggaattcagtataatggcatcactgcctgtttttcacatcttttgtttcctgttcattttaaggaaacctactaaatccagttaatattaaatggacaccactcattaagaaatttctttatggcttctgctgaatacttaaatgccttactacagttatccagttgacatgtttttaattcatataaggtatattgggtatattgaagtatatattgtattacaaagacttgttcttgtattttaaaatgtcagtgcaaaaaatatatggtggaacctttctttaaagttgaaatgcagtattatttaaatctgaaaggttaaaaagctttcttcaccttatatatgttcttccactgtgactttttagttgaagactagtaaattaacttttagttagaagatgcctactgcttttgttgtttattttaatcagcagagcacagagacacataaaaactctgggaaatgactaggataaaaatatcagtatgtatctgttttagatattttgagttttgctttttttatgccttgaatattttatttcaaaaagtatctgaagcaaattctcagactgaactacttcttagacctcactgtaagaatattttattcaatgtctcatttatgatagatttgcaagctgctcatttttgaacagctttttgcatgggataggagcatgtctattctaacacatcagcttattcaaaagcaagaattttaaaaataagataaatgtaaagttgttttataaacgatcctgttaattaaaccacagacaccatatatccttctgcatcctttggccaataaaagttgctggagaaccaaaccatggtggttcttaatcaggctttgcctttagggagaatgaggaggagagataattgggtattgttcaggctagtaataaatgtcatgtttctatttcccgcaactcattaagttttcaggaagctcttaatttagatttctaggaaagtaattattcagtcttcctagaaaaagattataaagaccatttaaactggagattgtaatttattcttttacagtccagcatttaagtgaaaatgagaacatcacaatttgggaatctgtaatggttttgttgaaaacattacttgtggcttgtataagagtggctgaattcaagaacattgattcttagcagatcaataatagtatttaaagaatctgatgctaaaattagaaacct

SEQ ID NO: 173267 - DNA, 1133 bp, Homo sapiens
  Payload ID: 14059
  Gene Symbol: RAB4B
  Gene Name: RAB4B, member RAS oncogene family
  Uniprot ID: P61018
  ENST ID: ENST00000357052
  CDS Start-End: 111-752
ccggggagtaggaaggagccggggctgtagccggagtggagcggctgccagccgaggagcaggcgcggccgcggcgccatattgcggccctcagcggccgcgaccgagtcatggctgagacctacgacttcctcttcaaattcctggtgattggcagtgcaggaactggcaaatcatgtctccttcatcagttcattgagaataagttcaaacaggactccaaccacacaatcggcgtggagtttggatcccgggtggtcaacgtgggtgggaagactgtgaagctacagatttgggacacggctggccaggagcggtttcggtcagtgacgcggagttattaccgaggggcggctggagccctgctggtgtacgacatcaccagccgggagacatacaactcactggctgcctggctgacggatgcccgcaccctggccagccccaacatcgtggtcatcctctgtggcaacaagaaggacctggaccctgagcgggaggtcactttcctggaggcctcccgctttgcccaggagaatgagctgatgttcctggagaccagcgctctcacaggcgagaacgtggaggaggcgttcctcaagtgtgcccgcactatcctcaacaagattgactcaggcgagctagacccggagaggatgggctctggcattcagtacggggatgcgtccctccgccagcttcggcagcctcggagtgcccaggccgtggcccctcagccgtgtggctgctgagctctgtggagccagctcacctgttctccaggaccagccctgctggggcccaggcccaggctctgagaggccgtgtcctaacctgccctggccccggagaagctacgttgccacctgtcccccttccctggcctggtggggcctggctttggggcaagactgagccacgggggaagggggaatcccgtacctgctgctgcttcctctgtcttggctaacgtctgtccccctgaacccctaaccataccccaagagctcccaaagcctgagaccagggtcatttgtccccaactccccatctggccctgctgttgctagtacctgttatttattacctggaggcctgtccagcacccaccctacccccataaagcattgttt

SEQ ID NO: 173268 - DNA, 890 bp, Homo sapiens
  Payload ID: 14059
  Gene Symbol: RAB4B
  Gene Name: RAB4B, member RAS oncogene family
  ENST ID: ENST00000378307
  CDS Start-End: 68-433
gctgccagccgaggagcaggcgcggccgcggcgccatattgcggccctcagcggccgcgaccgagtcatggctgagacctacgacttcctcttcaaattcctggtgattggcagtgcaggaactggcaaatcatgtctccttcatcagttcattgagaataagttcaaacaggactccaaccacacaatcggcgtggagtttggatcccgggtggtcaacgtgggtgggaagactgtgaagctacagatttgggacacggctggccaggagcggtttcggtcagtgacgcggagttattaccgaggggcggctggagccctgctggtgtacgacatcaccagagctgatgttcctggagaccagcgctctcacaggcgagaacgtggaggaggcgttcctcaagtgtgcccgcactatcctcaacaagattgactcaggcgagctagacccggagaggatgggctctggcattcagtacggggatgcgtccctccgccagcttcggcagcctcggagtgcccaggccgtggcccctcagccgtgtggctgctgagctctgtggagccagctcacctgttctccaggaccagccctgctggggcccaggcccaggctctgagaggccgtgtcctaacctgccctggccccggagaagctacgttgccacctgtcccccttccctggcctggtggggcctggctttggggcaagactgagccacgggggaagggggaatcccgtacctgctgctgcttcctctgtcttggctaacgtctgtccccctgaacccctaaccataccccaagagctcccaaagcctgagaccagggtcatttgtccccaactccccatctggccctgctgttgctagtacctgttatttattacc

SEQ ID NO: 173269 - DNA, 1173 bp, Homo sapiens
  Payload ID: 14059
  Gene Symbol: RAB4B
  Gene Name: RAB4B, member RAS oncogene family
  Uniprot ID: P61018
  ENST ID: ENST00000594800
  CDS Start-End: 161-802
ggagcgggtcgcgccggaggggggcggaggcggaagtggcggtgccgggcccggggagtaggaaggagccggggctgtagccggagtggagcggctgccagccgaggagcaggcgcggccgcggcgccatattgcggccctcagcggccgcgaccgagtcatggctgagacctacgacttcctcttcaaattcctggtgattggcagtgcaggaactggcaaatcatgtctccttcatcagttcattgagaataagttcaaacaggactccaaccacacaatcggcgtggagtttggatcccgggtggtcaacgtgggtgggaagactgtgaagctacagatttgggacacggctggccaggagcggtttcggtcagtgacgcggagttattaccgaggggcggctggagccctgctggtgtacgacatcaccagccgggagacatacaactcactggctgcctggctgacggatgcccgcaccctggccagccccaacatcgtggtcatcctctgtggcaacaagaaggacctggaccctgagcgggaggtcactttcctggaggcctcccgctttgcccaggagaatgagctgatgttcctggagaccagcgctctcacaggcgagaacgtggaggaggcgttcctcaagtgtgcccgcactatcctcaacaagattgactcaggcgagctagacccggagaggatgggctctggcattcagtacggggatgcgtccctccgccagcttcggcagcctcggagtgcccaggccgtggcccctcagccgtgtggctgctgagctctgtggagccaggactttgcacctgctgtgcctgagcctaagtttgctcatctgtaaaatgaggctaataatagcacctgcttctatagatgttgagaagaagaaatacattaattcacgaaagtgctcagaatggggcctgatggtcaagacttgatcgatgagggctgtttttaaagttttcttcttatccatctttgggctgagctcaaatgaatgggtgtgtcttcttcacctcagggcttagcagagactctgtcctagagagtttgccctcagtaggtgaaatgtaacaaggcaaggcaaggctttttcacactttgctgactgcaatctacaggaggaaatatattttatgtgttaatcaa

SEQ ID NO: 173270 - DNA, 592 bp, Homo sapiens
  Payload ID: 14059
  Gene Symbol: RAB4B
  Gene Name: RAB4B, member RAS oncogene family
  ENST ID: ENST00000602173
  CDS Start-End: 1-577
ggctgagacctacgacttcctcttcaaattcctggtgattggcagtgcaggaactggcaaatcatgtctccttcatcagttcattgagaataagttcaaacaggactccaaccacacaatcggcgtggagtttggatcccgggtggtcaacgtgggtgggaagactgtgaagctacagatttgggacacggctggccaggagcggtttcgccgggagacatacaactcactggctgcctggctgacggatgcccgcaccctggccagccccaacatcgtggtcatcctctgtggcaacaagaaggacctggaccctgagcgggaggtcactttcctggaggcctcccgctttgcccaggagaatgagctgatgttcctggagaccagcgctctcacaggcgagaacgtggaggaggcgttcctcaagtgtgcccgcactatcctcaacaagattgactcaggcgagctagacccggagaggatgggctctggcattcagtacggggatgcgtccctccgccagcttcggcagcctcggagtgcccaggccgtggcccctcagccgtgtggctgctgagctctgtggagccag

SEQ ID NO: 173271 - DNA, 2554 bp, Homo sapiens
  Payload ID: 14060
  Gene Symbol: RAB4B-EGLN2
  Gene Name: RAB4B-EGLN2 readthrough (NMD candidate)
  ENST ID: ENST00000594136
  CDS Start-End: 106-747
gagtaggaaggagccggggctgtagccggagtggagcggctgccagccgaggagcaggcgcggccgcggcgccatattgcggccctcagcggccgcgaccgagtcatggctgagacctacgacttcctcttcaaattcctggtgattggcagtgcaggaactggcaaatcatgtctccttcatcagttcattgagaataagttcaaacaggactccaaccacacaatcggcgtggagtttggatcccgggtggtcaacgtgggtgggaagactgtgaagctacagatttgggacacggctggccaggagcggtttcggtcagtgacgcggagttattaccgaggggcggctggagccctgctggtgtacgacatcaccagccgggagacatacaactcactggctgcctggctgacggatgcccgcaccctggccagccccaacatcgtggtcatcctctgtggcaacaagaaggacctggaccctgagcgggaggtcactttcctggaggcctcccgctttgcccaggagaatgagctgatgttcctggagaccagcgctctcacaggcgagaacgtggaggaggcgttcctcaagtgtgcccgcactatcctcaacaagattgactcaggcgagctagacccggagaggatgggctctggcattcagtacggggatgcgtccctccgccagcttcggcagcctcggagtgcccaggccgtggcccctcagccgtgtggctgctgagctctgtggagccagccaccctgaagggtcccttcccaagcccttagggaccgcagaggacttggggaccagcaagcaacccccagggcacgagaagagctcttgctgtctgccctgcctcaccctgccccacgccaggcccggtggcccccagctgcatcaagtggaggcggaggaggaggcggaggagggtggcaccatgggcccgggcggtgccctccatgcccgggggatgaagacactgctgccatggacagcccgtgccagccgcagcccctaagtcaggctctccctcagttaccagggtcttcgtcagagcccttggagcctgagcctggccgggccaggatgggagtggagagttacctgccctgtcccctgctcccctcctaccactgtccaggagtgcctagtgaggcctcggcagggagtgggacccccagagccacagccacctctaccactgccagccctcttcgggacggttttggcgggcaggatggtggtgagctgcggccgctgcagagtgaaggcgctgcagcgctggtcaccaaggggtgccagcgattggcagcccagggcgcacggcctgaggcccccaaacggaaatgggccgaggatggtggggatgccccttcacccagcaaacggccctgggccaggcaagagaaccaggaggcagagcgggagggtggcatgagctgcagctgcagcagtggcagtggtgaggccagtgctgggctgatggaggaggcgctgccctctgcgcccgagcgcctggccctggactatatcgtgccctgcatgcggtactacggcatctgcgtcaaggacagcttcctgggggcagcactgggcggtcgcgtgctggccgaggtggaggccctcaaacggggtgggcgcctgcgagacgggcagctagtgagccagagggcgatcccgccgcgcagcatccgtggggaccagattgcctgggtggaaggccatgaaccaggctgtcgaagcattggtgccctcatggcccatgtggacgccgtcatccgccactgcgcagggcggctgggcagctatgtcatcaacgggcgcaccaaggccatggtggcgtgttacccaggcaacgggctcgggtacgtaaggcacgttgacaatccccacggcgatgggcgctgcatcacctgtatctattacctgaatcagaactgggacgttaaggtgcatggcggcctgctgcagatcttccctgagggccggcccgtggtagccaacatcgagccactctttgaccggttgctcattttctggtctgaccggcggaacccccacgaggtgaagccagcctatgccaccaggtacgccatcactgtctggtattttgatgccaaggagcgggcagcagccaaagacaagtatcagctagcatcaggacagaaaggtgtccaagtacctgtatcacagccgcctacgcccacctagtggccagtcccagagccgcatggcagacagcttaaatgacttcaggagagccctgggcctgtgctggctgctccttccctgccaccgctgctgcttctgactttgcctctgtcctgcctggtgtggagggctctgtctgttgctgaggaccaaggaggagaagagacctttgctgccccatcatgggggctggggttgtcacctggacagggggcagccgtggaggccaccgttaccaactgaagctgggggcctgggtcctaccctgtctggtcatgaccccattaggtatggagagctgggaggaggcattgtcacttcccaccaggatgca

SEQ ID NO: 173272 - DNA, 2536 bp, Homo sapiens
  Payload ID: 14061
  Gene Symbol: RAB5A
  Gene Name: RAB5A, member RAS oncogene family
  Uniprot ID: P20339
  ENST ID: ENST00000273047
  CDS Start-End: 537-1184
gaagtgacgaagtggcgcagttcgctgcgtgcagcgacgtggcggcggggccggcaccgggcagcggaagtggctccggcggtgggacttgagtgtttgtgttttggttcgtgaaggagccggcggctggccttaggggaggaggcagagggaggaggaggaggaagaattagtcggaactccagcgccggcggcggcggcggcggcggaggaggagaaaggaaagaggaagggggagcggcgagaggcggagacggagcccgacaggggcggcaccacggcacgagccccgcacagtccagtgtgaggggagcggcgctaagagcaggcgacgccgccgccgccaccaccaccgccatagatacactctcatcctacgggccacgcctgggccttgctgccaggaagcttcggccccgcagctcggcttgctgcggtctcaggtttctttacctccagaaagaagaatattggccccttgaattctggaagttcattgaagagtctgaaattagggacttatttcaaatttggacatggctagtcgaggcgcaacaagacccaacgggccaaatacgggaaataaaatatgccagttcaaactagtacttctgggagagtccgctgttggcaaatcaagcctagtgcttcgttttgtgaaaggccaatttcatgaatttcaagagagtaccattggggctgcttttctaacccaaactgtatgtcttgatgacactacagtaaagtttgaaatatgggatacagctggtcaagaacgataccatagcctagcaccaatgtactacagaggagcacaagcagccatagttgtatatgatatcacaaatgaggagtcctttgcaagagcaaaaaattgggttaaagaacttcagaggcaagcaagtcctaacattgtaatagctttatcgggaaacaaggccgacctagcaaataaaagagcagtagatttccaggaagcacagtcctatgcagatgacaatagtttattattcatggagacatccgctaaaacatcaatgaatgtaaatgaaatattcatggcaatagctaaaaaattgccaaagaatgaaccacaaaatccaggagcaaattctgccagaggaagaggagtagaccttaccgaacccacacaaccaaccaggaatcagtgttgtagtaactaaacctctagtttgaactagctggaatagtcttctgcttcctaaatgttaataacaatggaattggagcatttaaccagcccagtatgacttccaaaagaagagacttatgatagagtcaagtttctaatacagaattattttaagtgttttgaacttaatttttaataacatgcatgggtccctctcactaatgtttcaacaatagggaaaaatgagaactatgtggacacttgtttcattggaaggttagggggaataatttctcatcactaggaatatagacaaatgactgtctgggcccacacagttaaccagcccatttctccacactggtacagtagtcacctgtgaaaaaaaaattggaacttactaatttgggcttttcaaaaacattctttgtttagaaggagattctaaagttatttatgatgcttagccatagtattcaggcaaatgttcatttctcctggtacctgtatttaaaatgtacattccacattttaataaattaaccacaagaaaataatcccacatatacaaggtcaggggtggggaagagtattaatggtatcttaattatacccagtctggttttttttttttaaatggggtaaaaatcaaatgcaaccccatcttgttttaggaattttgagaactaataaatgcaccttaatggtcagtgttcctttcaaacatgtgagttctttaacaaaaatgaaataaaccaggtgtctgtgatttctaattaatcaccgctggccattacacaggttttgttgtttggggtggggagggggcttttgttcccttttgacataatatagtcaatgcactaacaattatgtatattcaaacttgattattttaaattcgatcttcagctgtactgtaaatagggtactgcattgtagtctccatatctgtattacttttctgtaatatttaagagttgcttaaaagcatacaaaatgtactgttactaaaacagctaattatttctctctccccctttgacaggaaggggcttcagttgttcctccatggctagaaccataataaacaatgtacccgtaatttgtaacataaagtattgcaatatgttagtaacaatcttgcagccttcctttccaaagttcattttattttgatcagttcagtatattgcactaattattttaggtattttcattatatgaaagctaccatgtgtcagagatgatttaatctatttaagtgttggactgctaggagaacttgtacatttatgataatgcagaattaggaaaacggttcaccagtgtttagttttatattgaggtgctcaggttggaataaagtggtataaaaagcaa

SEQ ID NO: 173273 - DNA, 1358 bp, Homo sapiens
  Payload ID: 14061
  Gene Symbol: RAB5A
  Gene Name: RAB5A, member RAS oncogene family
  ENST ID: ENST00000446547
  CDS Start-End: 217-414
aagagcaggcgacgccgccgccgccaccaccaccgccatagatacactctcatcctacgggccacgcctgggccttgctgccaggaagcttcggccccgcagctcggcttgctgcggtctcaggtttctttacctccagaaagaagaatattggccccttgaattctggaagttcattgaagagtctgaaattagggacttatttcaaatttggacatggctagtcgaggcgcaacaagacccaacgggccaaatacgggaaataaaatatgccagttcaaactagtacttctgggagagtccgctgttggcaaatcaagcctagtgcttcgttttgtgaaaggccaatttcatgaatttcaagagagtaccattggggtaactctcgaagtgataaaagctgtttctttgtgaaatatgggcccgaaaagaaaaccaactgctagtgctggtgatggaagtgaagagaaaatgaagcggtctaagagtgatggttcttagccagaaaatagacgttttggataaattaaagtggttttacagattcagctgcttttctaacccaaactgtatgtcttgatgacactacagtaaagtttgaaatatgggatacagctggtcaagaacgataccatagcctagcaccaatgtactacagaggagcacaagcagccatagttgtatatgatatcacaaatgaggagtcctttgcaagagcaaaaaattgggttaaagaacttcagaggcaagcaagtcctaacattgtaatagctttatcgggaaacaaggccgacctagcaaataaaagagcagtagatttccaggaagcacagtcctatgcagatgacaatagtttattattcatggagacatccgctaaaacatcaatgaatgtaaatgaaatattcatggcaatagctaaaaaattgccaaagaatgaaccacaaaatccaggagcaaattctgccagaggaagaggagtagaccttaccgaacccacacaaccaaccaggaatcagtgttgtagtaactaaacctctagtttgaactagctggaatagtcttctgcttcctaaatgttaataacaatggaattggagcatttaaccagcccagtatgacttccaaaagaagagacttatgatagagtcaagtttctaatacagaattattttaagtgttttgaacttaatttttaataacatgcatgggtccctctcactaatgtttcaacaatagggaaaaatgagaactatgtggacacttgtttcattggaaggttagggggaataatttctcatcactaggaatatagacaaatgactgtctgggcccacacagttaaccagcccatttct

SEQ ID NO: 173274 - DNA, 753 bp, Homo sapiens
  Payload ID: 14061
  Gene Symbol: RAB5A
  Gene Name: RAB5A, member RAS oncogene family
  ENST ID: ENST00000443878
  CDS Start-End: 708-753
agtcggaactccagcgccggcggcggcggcggcggcggaggaggagaaaggaaagaggaagggggagcggcgagaggcggagacggagcccgacaggggcggcaccacggcacgagccccgcacagtccagtgtgaggggagcggcgctaagagcaggcgacgccgccgccgccaccaccaccgccatagatacactctcatcctacgggccacgcctgggccttgctgccaggaagcttcggccccgcagctcggcttgctgcggtctcaggtaaccgaaccgcccctcctcctgcgcagcgggggcctggaccccaggttatccgcggtccccagcctgtccgcggccctgccggtactgagaccccccaccccttctccctcacgcgcagcagtgccctggaccagagaactatcgaacccggcgtcttgttctgccagccctggtgactcatcctccaggggctctggagaccgggatttggggactgactgagggagcgacgggtgtcaccctttcccttctcaagatggcgccgtggaaagtgtactggaggccgcggttccgcctggtctccgtcctggcagtcctgggggtctcggtcaaagcaaggtttctttacctccagaaagaagaatattggccccttgaattctggaagttcattgaagagtctgaaattagggacttatttcaaatttggacatggctagtcgaggcgcaacaagacccaacgggccaaatacgggaa

SEQ ID NO: 173275 - DNA, 622 bp, Homo sapiens
  Payload ID: 14061
  Gene Symbol: RAB5A
  Gene Name: RAB5A, member RAS oncogene family
  ENST ID: ENST00000412966
  CDS Start-End: 237-425
agtgtgaggggagcggcgctaagagcaggcgacgccgccgccgccaccaccaccgccatagatacactctcatcctacgggccacgcctgggccttgctgccaggaagcttcggccccgcagctcggcttgctgcggtctcaggtttctttacctccagaaagaagaatattggccccttgaattctggaagttcattgaagagtctgaaattagggacttatttcaaatttggacatggctagtcgaggcgcaacaagacccaacgggccaaatacgggaaataaaatatgccagttcaaactagtacttctgggagagtccgctgttggcaaatcaagcctagtgcttcgttttgtgaaaggccaatttcatgaatttcaagagagtaccattggggtccttttctttcagctgcttttctaacccaaactgtatgtcttgatgacactacagtaaagtttgaaatatgggatacagctggtcaagaacgataccatagcctagcaccaatgtactacagaggagcacaagcagccatagttgtatatgatatcacaaatgaggagtcctttgcaagagcaaaaaattgggttaaagaacttcagaggcaagcaagtcct

SEQ ID NO: 173276 - DNA, 1443 bp, Homo sapiens
  Payload ID: 14061
  Gene Symbol: RAB5A
  Gene Name: RAB5A, member RAS oncogene family
  Uniprot ID: P20339
  ENST ID: ENST00000422242
  CDS Start-End: 211-816
aggcgacgccgccgccgccaccaccaccgccatagatacactctcatcctacgggccacgcctgggccttgctgccaggaagcttcggccccgcagctcggcttgctgcggtctcaggtttctttacctccagaaagaagaatattggccccttgaattctggaagttcattgaagagtctgaaattagggacttatttcaaatttggacatggctagtcgaggcgcaacaagacccaacgggccaaatacgggaaataaaatatgccagttcaaactagtacttctgggagagtccgctgttggcaaatcaagcctagtgcttcgttttgtgaaaggccaatttcatgaatttcaagagagtaccattggggtaaagtttgaaatatgggatacagctggtcaagaacgataccatagcctagcaccaatgtactacagaggagcacaagcagccatagttgtatatgatatcacaaatgaggagtcctttgcaagagcaaaaaattgggttaaagaacttcagaggcaagcaagtcctaacattgtaatagctttatcgggaaacaaggccgacctagcaaataaaagagcagtagatttccaggaagcacagtcctatgcagatgacaatagtttattattcatggagacatccgctaaaacatcaatgaatgtaaatgaaatattcatggcaatagctaaaaaattgccaaagaatgaaccacaaaatccaggagcaaattctgccagaggaagaggagtagaccttaccgaacccacacaaccaaccaggaatcagtgttgtagtaactaaacctctagtttgaactagctggaatagtcttctgcttcctaaatgttaataacaatggaattggagcatttaaccagcccagtatgacttccaaaagaagagacttatgatagagtcaagtttctaatacagaattattttaagtgttttgaacttaatttttaataacatgcatgggtccctctcactaatgtttcaacaatagggaaaaatgagaactatgtggacacttgtttcattggaaggttagggggaataatttctcatcactaggaatatagacaaatgactgtctgggcccacacagttaaccagcccatttctccacactggtacagtagtcacctgtgaaaaaaaaattggaacttactaatttgggcttttcaaaaacattctttgtttagaaggagattctaaagttatttatgatgcttagccatagtattcaggcaaatgttcatttctcctggtacctgtatttaaaatgtacattccacattttaataaattaaccacaagaaaataatcccacatatacaaggtcaggggtggggaagagtattaatggtatcttaattatacccagtctggttttttttttttaaatggggtaaaaatcaaatgcaa

SEQ ID NO: 173277 - DNA, 5340 bp, Homo sapiens
  Payload ID: 14062
  Gene Symbol: RAB5B
  Gene Name: RAB5B, member RAS oncogene family
  Uniprot ID: P61020
  ENST ID: ENST00000360299
  CDS Start-End: 222-869
aatcgagctattggctggagccccgccccagggcgaggaggagaaggaggggcaggagggtttggttgagctgcagctgtttgtctgttcgacacaggcttggggccgacgggggagacggagccccaggagtgttgaagcctggaaatcccctccccttccccctcccccctttacagtatccccctccctccaccctttcccattctgataatctggccatgactagcagaagcacagctaggcccaatgggcaaccccaggccagcaaaatttgccagttcaaattggtcctgctgggagaatctgcagtgggaaagtcaagcctggtattacgttttgtcaaagggcagttccatgagtaccaggagagcaccattggagcggccttcctcacccagtccgtttgtctagatgacacaacagtgaagtttgagatctgggacacagctgggcaggagcgatatcacagcttagcccccatgtactacaggggtgcccaagctgcaatcgtggtttacgacattactaatcaggaaacctttgcccgagcaaagacatgggtgaaggaactacagcgacaggccagtcctagcatcgttattgccctggcagggaacaaagctgacctggccaacaaacgtatggtggagtatgaagaggcccaggcatatgcagatgacaacagcttattgttcatggagacttcagccaagacagctatgaacgtgaatgatctcttcctggcaatagctaagaagttgccaaagagtgaaccccagaatctgggaggtgcagcaggccgaagccggggtgtggatctccatgaacagtcccagcagaacaagagccagtgttgtagcaactgagggggtggctagcagcaaacaagtatggagctagcacaagagctaagaaataacctccatccctacccctcagcacacaacccctacggtaacagcacactgagccctggctcccaagggctgcctcctgacagctccgtcatggcactttttaacgcttcagcaacaaacaccaggcagctgttgccactggcctcctaccccctactctggggcttgggggtcaactccccccaggacttaccttccaaaacaaactttcttcactttgtattataggtacaagacagcgacttacgtatcttttctcctcctccctagtgttcctccccattttttcagaaaacacttctgactcctgtcccttccccttctgcttttggtcagtccctgttcttgagcctcttttctcctctccccaggatgcagaaagtggtgaacccaggaactgaggaaggaggtttccagttcatttacattaagggccctgggggagaataaagctcagagcaggagggagtaaggaaacatttcctttttgtttttatttggttggagtttctcatatttgaaaacattgcggtatccatgatttggccttgtggagggtgttcctaggtagaggtgagaatggggaggcaagatctcaggcaccaggcaggaggtgccttgtaagctaactgggcggaggtggaggtgcagtgtcaactgtggctctgtaactcttcaaaggcccagtttcccctcacgcagcctcttaggtagcgtttcccctaatcgtgggggttggaccccagagtcttccaaagaattttcactggttgcctgcatctttggctctgctgtgatctgattggaggagggacagtttctggtacccatcctctgatttatacatatgcattttttcccctctggcctttagatggcctcagccccagccaccatatacccctgcagtttgcactttaattgatggtagttcagttggggtacttgttttatggaagttttgattgatttacttgccctcccaccttctttttaattcaatgaaatctgaggttaatgcgaggttcgaggagaggttatagataaaactaccagtggcagctactcaagtcctatctccactgttagcttcctccaactctaattattaacctatattcttgccaagctaactattgactataggtttgcctttcctggagaattaattgagcaattgaggagtgtctcaggatagcacaggccaaggtaggggagtaaaaaggaggtcaggcaaaagggaggagttttctgtcctttcccaggtttcacactcaatttgatatccattaccatgtcttttctacttccttgtaaataggtatgatctttattcccactgtacagtctgttctatcctctgcctcccatcaggccctgtttctttgttcctttgttaatatcttgaatttagtccctccatccttaatccccccatccctccccatcatgcaaccagtggtttaatccatgtaccaataggggctagtaccacagaggcctcctgtggtgccctcgtatcataccacctgttcctgtggagagggaatgaccggcactgaaggtaccttacaactggctcatattatcagaggaccttggtcctttctaaatctctagtctctcttcatatccttcatcaggtgttttaagatgtctctgagaagccatcaaggcaaaagagaactttaagttccttgttccagcccggagttttgggaaagaaagaaaggaaaggtcacagtgacctaggattggaaccttcctgcccttttggcttgcagactgccttctatcccagaacagctgagaaatctatgaagctgagattctgaaggacccagcttaggttcttccacttaggcctcaattcccttccttttccaggggcagccttagttcccatggccctgaaacacacacatttcccccttcctttcccagaagccactggccccccatagcacccagtgcatcctttttacaagtggaagaactaggatggctttccaaagtcttctagaaatgaagttctttctctgtgcagctttcccccttggagcaggagtgaagatgtttcattatcttgggcctgggaaaccacttccccaggcttctccctccccccacccccataggaacaggatttggccttagcttctgggcctatcggctgccttccctctacttcctaccacctcttctgccttcctttgagctctgttgggcttggggatcttagttttcttttgtttatttcccagctcatttttttcttctggtcagtttttttaagggggggtgttgtggttttttgtttttgttttgcttctgagaaagcatttgcctttcttcctctcccaacataacaatcgtggtaacagaatgcgactgctgatttaccgatgtatttaatgtaagtaaaaaaaggaaaaaaagaaaagggcattggagtgttgcttttttttattttattgttattattattattatttttgctatttgtcaggtactaggaatttggaagaaaggatacccagtaatgttctactgaatcagaaacacacctttccctgcatcttgatacatctttattccctttaatcttttcttaaacatctagtttagaaaatagcccttctattgctatttaatcacccctcttctaaggccactagattgttcatcaaatcaaaccctattatatctttttaggccctcttaacagaatgtatatgtgtagggtatggtctgtggatctttgggcccactgatcagattagagagaggggtgctatttgaagtagtatacaaaaatgtatgtgcatatttctttttttttttttaattgagacggagtctctgtcgctagcctggagtacagtggcacgatcttggctcacagcaatctccgcctcctgagttcaagtgattctcctgcctcagcctcctgagtagctaggattacaggcacgcaccaacacacccagctaatttttgtatttttagtagagacggggtttcaccatgttggtcaggctggtcttgaactcctgacctcgtgatccacccaccttggcctcccaaagtgctgggattacgggcgtgagccactgcgcccggccgtatgtgcatatttctaggatccatttctatatgtttctcaaaggggtccatgacccaaaggttgaaaaacatcactgagttagttttcttgtagcttccacctcaacgggaaaatttcctctggatctgctcttgactcctagtgtacttcaaacccttcagtccaccacagtctaaaggtcgagggaagggaaatgaaataggattatgtgtggttgcagtaggctttaaattccaaagaatctgaaggtggataggaaagaggactggtgccagacaaatctgacattctaggcctgtctctgtcaacttaaccagctgtggccttgatcaagttagttagtgccttccgcctcgtttcttcatctgtaaagtaaaagctgaagattaaggtcaattatgtaaagtatgtgtgtcacacaaaagtagatgacactattaggaaggaggcttttagatagtccctaactgacttctctgtatcttcctttggctgagacttttttttttttaggttgaagctcgctttctctctctctccctctttctccctctctctctctctctcactctctctctctccatatatatatacatatatatatatatatatattttttttttaacaactggtaggataggttgggcattagccttcttcagtgatttgattgtatacagattgaaatcctttccatttccaaacacttaagagccaaagccaacttgccaacttttcactgtcggttcccttaccttatatctcttggtaataccccccacccccgttccctgattcctggtaaaagctctagttggagagccgaaaggaaaggaaatgatctttcaaaattaaaggtgaacaccttcacttaaactgattaaaattgcagctccaccgtccggcctctagagggcagtgtatggatacatttgtccagattgggggactaggtttgataaattttgtcctgcatcaaatgacaaaagggtaataggaaatgtattatatttatgccccttactttgagataagagactacaaccttcatacttcggggtgttaagctgccattgctcttgttaaggggcagtttgttttttaagagatggggtcttgctctgttgtccaggctggagtgcagtgccgcgatcttggctcagtgcaacctcgaactcctgggcttaagcgatcctcccgcctcagcctcccgagtactgggactacaggcgtgtgccaccaaggggcgattattattttttttttctacgcaaaataaaagacggctattca

SEQ ID NO: 173278 - DNA, 1530 bp, Homo sapiens
  Payload ID: 14062
  Gene Symbol: RAB5B
  Gene Name: RAB5B, member RAS oncogene family
  Uniprot ID: P61020
  ENST ID: ENST00000448789
  CDS Start-End: 132-656
gacacaggcttggggccgacgggggagacggagccccaggagtgttgaagcctggaaatcccctccccttccccctcccccctttacagtatccccctccctccaccctttcccattctgataatctggccatgactagcagaagcacagctaggcccaatgggcaaccccaggccagcaaaatttgccagttcaaattggtcctgctgggagaatctgcagtgggaaagtcaagcctggtattacgttttgtcaaagggcagttccatgagtaccaggagagcaccattggagcggccttcctcacccagtccgtttgtctagatgacacaacagtgaagtttgagatctgggacacagctgggcaggagcgatatcacagcttagcccccatgtactacaggggtgcccaagctgcaatcgtggtttacgacattactaatcaggaggcccaggcatatgcagatgacaacagcttattgttcatggagacttcagccaagacagctatgaacgtgaatgatctcttcctggcaatagctaagaagttgccaaagagtgaaccccagaatctgggaggtgcagcaggccgaagccggggtgtggatctccatgaacagtcccagcagaacaagagccagtgttgtagcaactgagggggtggctagcagcaaacaagtatggagctagcacaagagctaagaaataacctccatccctacccctcagcacacaacccctacggtaacagcacactgagccctggctcccaagggctgcctcctgacagctccgtcatggcactttttaacgcttcagcaacaaacaccaggcagctgttgccactggcctcctaccccctactctggggcttgggggtcaactccccccaggacttaccttccaaaacaaactttcttcactttgtattataggtacaagacagcgacttacgtatcttttctcctcctccctagtgttcctccccattttttcagaaaacacttctgactcctgtcccttccccttctgcttttggtcagtccctgttcttgagcctcttttctcctctccccaggatgcagaaagtggtgaacccaggaactgaggaaggaggtttccagttcatttacattaagggccctgggggagaataaagctcagagcaggagggagtaaggaaacatttcctttttgtttttatttggttggagtttctcatatttgaaaacattgcggtatccatgatttggccttgtggagggtgttcctaggtagaggtgagaatggggaggcaagatctcaggcaccaggcaggaggtgccttgtaagctaactgggcggaggtggaggtgcagtgtcaactgtggctctgtaactcttcaaaggcccagtttcccctcacgcagcctcttaggtagcgtttcccctaatcgtgggggttggaccccagagtcttccaaagaattttcactggttgcctgcatctttggctctgctgtgatctgattggaggagggacagtttctg

SEQ ID NO: 173279 - DNA, 596 bp, Homo sapiens
  Payload ID: 14062
  Gene Symbol: RAB5B
  Gene Name: RAB5B, member RAS oncogene family
  ENST ID: ENST00000548068
  CDS Start-End: 252-596
cagctgtttgtctgttcgacacaggcttggggccgacgggggagacggagccccaggtaacactggatcaacaaaatgaagagctgagccaagtggtagaactctcatttcaagattttggtgacttgggtttaaacagagttggagagggagatgaaggagtgttgaagcctggaaatcccctccccttccccctcccccctttacagtatccccctccctccaccctttcccattctgataatctggccatgactagcagaagcacagctaggcccaatgggcaaccccaggccagcaaaatttgccagttcaaattggtcctgctgggagaatctgcagtgggaaagtcaagcctggtattacgttttgtcaaagggcagttccatgagtaccaggagagcaccattggagcggccttcctcacccagtccgtttgtctagatgacacaacagtgaagtttgagatctgggacacagctgggcaggagcgatatcacagcttagcccccatgtactacaggggtgcccaagctgcaatcgtggtttacgacattactaatcaggaaacctttgcccgagcaaagacatgggtg

SEQ ID NO: 173280 - DNA, 569 bp, Homo sapiens
  Payload ID: 14062
  Gene Symbol: RAB5B
  Gene Name: RAB5B, member RAS oncogene family
  ENST ID: ENST00000551459
  CDS Start-End: 269-569
gacacaggcttggggccgacgggggagacggagccccaggtaacactggatcaacaaaatgaagagctgagccaagtggtagaactctcatttcaagattttggtgacttgggtttaaacagagttggagagggagatgaagtgcggatcttgaaatcaattccgatggtggagatgagtgttgaagcctggaaatcccctccccttccccctcccccctttacagtatccccctccctccaccctttcccattctgataatctggccatgactagcagaagcacagctaggcccaatgggcaaccccaggccagcaaaatttgccagttcaaattggtcctgctgggagaatctgcagtgggaaagtcaagcctggtattacgttttgtcaaagggcagttccatgagtaccaggagagcaccattggagcggccttcctcacccagtccgtttgtctagatgacacaacagtgaagtttgagatctgggacacagctgggcaggagcgatatcacagcttagcccccatgtactacaggggtgcccaagctgcaatcgtggtttacg

SEQ ID NO: 173281 - DNA, 494 bp, Homo sapiens
  Payload ID: 14062
  Gene Symbol: RAB5B
  Gene Name: RAB5B, member RAS oncogene family
  ENST ID: ENST00000549915
  CDS Start-End: 258-494
gttcgacacaggcttggggccgacgggggagacggagccccaggtaacactggatcaacaaaatgaagagctgagccaagtggtagaactctcatttcaagattttggtgacttgggtttaaacagagttggagagggagatgaagcagctttcttagccctcttagaagatagaggagctgattcagtgtattctttcatcaaatactgattgcttgcagacttaacgccctataccatcctctggagacttctgcatgtctttagaaggagtgttgaagcctggaaatcccctccccttccccctcccccctttacagtatccccctccctccaccctttcccattctgataatctggccatgactagcagaagcacagctaggcccaatgggcaaccccaggccagcaaaatttgccagttcaaattggtcctgctgggagaatctgcagtgggaaagtcaagcctggtattacgttttgtcaaagggcag

SEQ ID NO: 173282 - DNA, 3322 bp, Homo sapiens
  Payload ID: 14062
  Gene Symbol: RAB5B
  Gene Name: RAB5B, member RAS oncogene family
  Uniprot ID: P61020
  ENST ID: ENST00000553116
  CDS Start-End: 181-828
gctcgtacttgttggtgacagcgcccaaagagactcgcctttctccagaggattggtggatgagtgcacatatagcccaccctcgaaggagtgttgaagcctggaaatcccctccccttccccctcccccctttacagtatccccctccctccaccctttcccattctgataatctggccatgactagcagaagcacagctaggcccaatgggcaaccccaggccagcaaaatttgccagttcaaattggtcctgctgggagaatctgcagtgggaaagtcaagcctggtattacgttttgtcaaagggcagttccatgagtaccaggagagcaccattggagcggccttcctcacccagtccgtttgtctagatgacacaacagtgaagtttgagatctgggacacagctgggcaggagcgatatcacagcttagcccccatgtactacaggggtgcccaagctgcaatcgtggtttacgacattactaatcaggaaacctttgcccgagcaaagacatgggtgaaggaactacagcgacaggccagtcctagcatcgttattgccctggcagggaacaaagctgacctggccaacaaacgtatggtggagtatgaagaggcccaggcatatgcagatgacaacagcttattgttcatggagacttcagccaagacagctatgaacgtgaatgatctcttcctggcaatagctaagaagttgccaaagagtgaaccccagaatctgggaggtgcagcaggccgaagccggggtgtggatctccatgaacagtcccagcagaacaagagccagtgttgtagcaactgagggggtggctagcagcaaacaagtatggagctagcacaagagctaagaaataacctccatccctacccctcagcacacaacccctacggtaacagcacactgagccctggctcccaagggctgcctcctgacagctccgtcatggcactttttaacgcttcagcaacaaacaccaggcagctgttgccactggcctcctaccccctactctggggcttgggggtcaactccccccaggacttaccttccaaaacaaactttcttcactttgtattataggtacaagacagcgacttacgtatcttttctcctcctccctagtgttcctccccattttttcagaaaacacttctgactcctgtcccttccccttctgcttttggtcagtccctgttcttgagcctcttttctcctctccccaggatgcagaaagtggtgaacccaggaactgaggaaggaggtttccagttcatttacattaagggccctgggggagaataaagctcagagcaggagggagtaaggaaacatttcctttttgtttttatttggttggagtttctcatatttgaaaacattgcggtatccatgatttggccttgtggagggtgttcctaggtagaggtgagaatggggaggcaagatctcaggcaccaggcaggaggtgccttgtaagctaactgggcggaggtggaggtgcagtgtcaactgtggctctgtaactcttcaaaggcccagtttcccctcacgcagcctcttaggtagcgtttcccctaatcgtgggggttggaccccagagtcttccaaagaattttcactggttgcctgcatctttggctctgctgtgatctgattggaggagggacagtttctggtacccatcctctgatttatacatatgcattttttcccctctggcctttagatggcctcagccccagccaccatatacccctgcagtttgcactttaattgatggtagttcagttggggtacttgttttatggaagttttgattgatttacttgccctcccaccttctttttaattcaatgaaatctgaggttaatgcgaggttcgaggagaggttatagataaaactaccagtggcagctactcaagtcctatctccactgttagcttcctccaactctaattattaacctatattcttgccaagctaactattgactataggtttgcctttcctggagaattaattgagcaattgaggagtgtctcaggatagcacaggccaaggtaggggagtaaaaaggaggtcaggcaaaagggaggagttttctgtcctttcccaggtttcacactcaatttgatatccattaccatgtcttttctacttccttgtaaataggtatgatctttattcccactgtacagtctgttctatcctctgcctcccatcaggccctgtttctttgttcctttgttaatatcttgaatttagtccctccatccttaatccccccatccctccccatcatgcaaccagtggtttaatccatgtaccaataggggctagtaccacagaggcctcctgtggtgccctcgtatcataccacctgttcctgtggagagggaatgaccggcactgaaggtaccttacaactggctcatattatcagaggaccttggtcctttctaaatctctagtctctcttcatatccttcatcaggtgttttaagatgtctctgagaagccatcaaggcaaaagagaactttaagttccttgttccagcccggagttttgggaaagaaagaaaggaaaggtcacagtgacctaggattggaaccttcctgcccttttggcttgcagactgccttctatcccagaacagctgagaaatctatgaagctgagattctgaaggacccagcttaggttcttccacttaggcctcaattcccttccttttccaggggcagccttagttcccatggccctgaaacacacacatttcccccttcctttcccagaagccactggccccccatagcacccagtgcatcctttttacaagtggaagaactaggatggctttccaaagtcttctagaaatgaagttctttctctgtgcagctttcccccttggagcaggagtgaagatgtttcattatcttgggcctgggaaaccacttccccaggcttctccctccccccacccccataggaacaggatttggccttagcttctgggcctatcggctgccttccctctacttcctaccacctcttctgccttcctttgagctctgttgggcttggggatcttagttttcttttgtttatttcccagctcatttttttcttctggtcagtttttttaagggggggtgttgtggttttttgtttttgttttgcttctgagaaagcatttgcctttcttcctctcccaacataacaatcgtggtaacagaatgcgactgctgatttaccgatgtatttaatgtaagtaaaaaaaggaaaaaaagaaaa

SEQ ID NO: 173283 - DNA, 3148 bp, Homo sapiens
  Payload ID: 14062
  Gene Symbol: RAB5B
  Gene Name: RAB5B, member RAS oncogene family
  ENST ID: ENST00000549505
  CDS Start-End: 159-380
ggttgagctgcagctgtttgtctgttcgacacaggcttggggccgacgggggagacggagccccaggagtgttgaagcctggaaatcccctccccttccccctcccccctttacagtatccccctccctccaccctttcccattctgataatctggccatgactagcagaagcacagctaggcccaatgggcaaccccaggccagcaaaatttgccagttcaaattggtcctgctgggagaatctgcagtgggaaagtcaagcctggtattacgttttgtcaaagggcagttccatgagtaccaggagagcaccattggaggaaacctttgcccgagcaaagacatgggtgaaggaactacagcgacaggccagtcctagcatcgttattgccctggcagggaacaaagctgacctggccaacaaacgtatggtggagtatgaagaggcccaggcatatgcagatgacaacagcttattgttcatggagacttcagccaagacagctatgaacgtgaatgatctcttcctggcaatagctaagaagttgccaaagagtgaaccccagaatctgggaggtgcagcaggccgaagccggggtgtggatctccatgaacagtcccagcagaacaagagccagtgttgtagcaactgagggggtggctagcagcaaacaagtatggagctagcacaagagctaagaaataacctccatccctacccctcagcacacaacccctacggtaacagcacactgagccctggctcccaagggctgcctcctgacagctccgtcatggcactttttaacgcttcagcaacaaacaccaggcagctgttgccactggcctcctaccccctactctggggcttgggggtcaactccccccaggacttaccttccaaaacaaactttcttcactttgtattataggtacaagacagcgacttacgtatcttttctcctcctccctagtgttcctccccattttttcagaaaacacttctgactcctgtcccttccccttctgcttttggtcagtccctgttcttgagcctcttttctcctctccccaggatgcagaaagtggtgaacccaggaactgaggaaggaggtttccagttcatttacattaagggccctgggggagaataaagctcagagcaggagggagtaaggaaacatttcctttttgtttttatttggttggagtttctcatatttgaaaacattgcggtatccatgatttggccttgtggagggtgttcctaggtagaggtgagaatggggaggcaagatctcaggcaccaggcaggaggtgccttgtaagctaactgggcggaggtggaggtgcagtgtcaactgtggctctgtaactcttcaaaggcccagtttcccctcacgcagcctcttaggtagcgtttcccctaatcgtgggggttggaccccagagtcttccaaagaattttcactggttgcctgcatctttggctctgctgtgatctgattggaggagggacagtttctggtacccatcctctgatttatacatatgcattttttcccctctggcctttagatggcctcagccccagccaccatatacccctgcagtttgcactttaattgatggtagttcagttggggtacttgttttatggaagttttgattgatttacttgccctcccaccttctttttaattcaatgaaatctgaggttaatgcgaggttcgaggagaggttatagataaaactaccagtggcagctactcaagtcctatctccactgttagcttcctccaactctaattattaacctatattcttgccaagctaactattgactataggtttgcctttcctggagaattaattgagcaattgaggagtgtctcaggatagcacaggccaaggtaggggagtaaaaaggaggtcaggcaaaagggaggagttttctgtcctttcccaggtttcacactcaatttgatatccattaccatgtcttttctacttccttgtaaataggtatgatctttattcccactgtacagtctgttctatcctctgcctcccatcaggccctgtttctttgttcctttgttaatatcttgaatttagtccctccatccttaatccccccatccctccccatcatgcaaccagtggtttaatccatgtaccaataggggctagtaccacagaggcctcctgtggtgccctcgtatcataccacctgttcctgtggagagggaatgaccggcactgaaggtaccttacaactggctcatattatcagaggaccttggtcctttctaaatctctagtctctcttcatatccttcatcaggtgttttaagatgtctctgagaagccatcaaggcaaaagagaactttaagttccttgttccagcccggagttttgggaaagaaagaaaggaaaggtcacagtgacctaggattggaaccttcctgcccttttggcttgcagactgccttctatcccagaacagctgagaaatctatgaagctgagattctgaaggacccagcttaggttcttccacttaggcctcaattcccttccttttccaggggcagccttagttcccatggccctgaaacacacacatttcccccttcctttcccagaagccactggccccccatagcacccagtgcatcctttttacaagtggaagaactaggatggctttccaaagtcttctagaaatgaagttctttctctgtgcagctttcccccttggagcaggagtgaagatgtttcattatcttgggcctgggaaaccacttccccaggcttctccctccccccacccccataggaacaggatttggccttagcttctgggcctatcggctgccttccctctacttcctaccacctcttctgccttcctttgagctctgttgggcttggggatcttagttttcttttgtttatttcccagctcatttttttcttctggtcagtttttttaagggggggtgttgtggttttttgtttttgttttgcttctgagaaagcatttgcctttcttcctctcccaacataacaatcgtggtaacagaatgcgactgctgatttaccgatgtatttaatgtaagtaaaaaaaggaaaaaaagaaaa

SEQ ID NO: 173284 - DNA, 496 bp, Homo sapiens
  Payload ID: 14062
  Gene Symbol: RAB5B
  Gene Name: RAB5B, member RAS oncogene family
  ENST ID: ENST00000628569
  CDS Start-End: 1-222
atgactagcagaagcacagctaggcccaatgggcaaccccaggccagcaaaatttgccagttcaaattggtcctgctgggagaatctgcagtgggaaagtcaagcctggtattacgttttgtcaaagggcagttccatgagtaccaggagagcaccattggaggaaacctttgcccgagcaaagacatgggtgaaggaactacagcgacaggccagtcctagcatcgttattgccctggcagggaacaaagctgacctggccaacaaacgtatggtggagtatgaagaggcccaggcatatgcagatgacaacagcttattgttcatggagacttcagccaagacagctatgaacgtgaatgatctcttcctggcaatagctaagaagttgccaaagagtgaaccccagaatctgggaggtgcagcaggccgaagccggggtgtggatctccatgaacagtcccagcagaacaagagccagtgttgtagcaactga

SEQ ID NO: 173285 - DNA, 1671 bp, Homo sapiens
  Payload ID: 14063
  Gene Symbol: RAB5C
  Gene Name: RAB5C, member RAS oncogene family
  Uniprot ID: P51148
  ENST ID: ENST00000346213
  CDS Start-End: 214-864
agatccggatccggagcggctgaaaggcggaagtggaggccggagcctgggacaccgccggcggggagagaagcggatcccgtccgagccccggccccaagtaacgccgccgccccggagccgccttggaggtccccctccccactaagtgcctctttgcatagcaccagtccccacccgcacgctctctggaccactacagctggacgggcaatggcgggtcggggaggcgcagcacgacccaatggaccagctgctgggaacaagatctgtcaatttaagctggttctgctgggggagtctgcggtaggcaaatccagcctcgtcctccgctttgtcaagggacagtttcacgagtaccaggagagcacaattggagcggccttcctcacacagactgtctgcctggatgacacaacagtcaagtttgagatctgggacacagctggacaggagcggtatcacagcctggcccccatgtactatcggggggcccaggctgccatcgtggtctatgacatcaccaacacagatacatttgcacgggccaagaactgggtgaaggagctacagaggcaggccagccccaacatcgtcattgcactcgcgggtaacaaggcagacctggccagcaagagagccgtggaattccaggaagcacaagcctatgcagacgacaacagtttgctgttcatggagacatcagcaaagactgcaatgaacgtgaacgaaatcttcatggcaatagctaagaagcttcccaagaacgagccccagaatgcaactggtgctccaggccgaaaccgaggtgtggacctccaggagaacaacccagccagccggagccagtgctgcagcaactgagccccccttgcctgcccgctgcccccgcctcctccgcctgaatgacccgactggaatccactctaaccaatcgcacttaacgactcgggccaccactgggggggcagggggaggggtccaccatgatttctccatataattttgatcataggccggagtgagtcattccacctgcacctttctgtacaaatactaattcaattttaagtcttaagtcacttttttaatatatatgatcttctgctcttcccacttcctcccctttctactgctctcccattttcccttgctgggagtagccacatgctcttgccccccaacccttgtatatggggacagtggggtcagtgcagctaccctttctttccctcctgcggaacagcggacccagcaagagcatccacatcctcactttgttcggagtggtctttggtttgggcggtggggcagaccttgggaaggggcttaggaagggagaggcagctcttccttcagctggctctcatcaggctgcagccccctccccgctcccacctccctgctgggaaaccacagcattatcacagcattattgtgacagccacgaacccattgcccacaacccctccaccctcggtcaccccaacctctggctctgagccctgttctgaccaaatcatgatgatgagtatttgggggtgggtgggtaagggggggagtgggaggggacggaaccaactttttctgtattttgtattgtatgttttcttcaacatgtaaccaatcagtatcttgtcaatatagtcagccgatcgatcgacctcacaa

SEQ ID NO: 173286 - DNA, 1912 bp, Homo sapiens
  Payload ID: 14063
  Gene Symbol: RAB5C
  Gene Name: RAB5C, member RAS oncogene family
  Uniprot ID: P51148
  ENST ID: ENST00000393860
  CDS Start-End: 457-1107
gagtattgaggggcggggcggaggtggagatccggatccggagcggctgaaaggcggaagtggaggccggagcctgggacaccgccggcggggagagaagcggatcccgtccgagccccggccccaagtaacgccgccgccccggagccgccaggcttctagagataggctcctcatgtgtctgcaattccaaaacttaacaaaaacaaaaagttgagcctctgaagctgtcactaaccaagtgattcagatgtcgggactggaacaccagctgttggggatgcaggacttggtctctgccctcccacacctcctgcctcttctttctctccatcgccccatctctgccagtagagaatggaactgagttggaggtccccctccccactaagtgcctctttgcatagcaccagtccccacccgcacgctctctggaccactacagctggacgggcaatggcgggtcggggaggcgcagcacgacccaatggaccagctgctgggaacaagatctgtcaatttaagctggttctgctgggggagtctgcggtaggcaaatccagcctcgtcctccgctttgtcaagggacagtttcacgagtaccaggagagcacaattggagcggccttcctcacacagactgtctgcctggatgacacaacagtcaagtttgagatctgggacacagctggacaggagcggtatcacagcctggcccccatgtactatcggggggcccaggctgccatcgtggtctatgacatcaccaacacagatacatttgcacgggccaagaactgggtgaaggagctacagaggcaggccagccccaacatcgtcattgcactcgcgggtaacaaggcagacctggccagcaagagagccgtggaattccaggaagcacaagcctatgcagacgacaacagtttgctgttcatggagacatcagcaaagactgcaatgaacgtgaacgaaatcttcatggcaatagctaagaagcttcccaagaacgagccccagaatgcaactggtgctccaggccgaaaccgaggtgtggacctccaggagaacaacccagccagccggagccagtgctgcagcaactgagccccccttgcctgcccgctgcccccgcctcctccgcctgaatgacccgactggaatccactctaaccaatcgcacttaacgactcgggccaccactgggggggcagggggaggggtccaccatgatttctccatataattttgatcataggccggagtgagtcattccacctgcacctttctgtacaaatactaattcaattttaagtcttaagtcacttttttaatatatatgatcttctgctcttcccacttcctcccctttctactgctctcccattttcccttgctgggagtagccacatgctcttgccccccaacccttgtatatggggacagtggggtcagtgcagctaccctttctttccctcctgcggaacagcggacccagcaagagcatccacatcctcactttgttcggagtggtctttggtttgggcggtggggcagaccttgggaaggggcttaggaagggagaggcagctcttccttcagctggctctcatcaggctgcagccccctccccgctcccacctccctgctgggaaaccacagcattatcacagcattattgtgacagccacgaacccattgcccacaacccctccaccctcggtcaccccaacctctggctctgagccctgttctgaccaaatcatgatgatgagtatttgggggtgggtgggtaagggggggagtgggaggggacggaaccaactttttctgtattttgtattgtatgttttcttcaacatgtaaccaatcagtatcttgtcaatatagtcagccgatcgatcgacctcac

SEQ ID NO: 173287 - DNA, 1167 bp, Homo sapiens
  Payload ID: 14063
  Gene Symbol: RAB5C
  Gene Name: RAB5C, member RAS oncogene family
  Uniprot ID: P51148
  ENST ID: ENST00000547517
  CDS Start-End: 302-1051
gaagtggaggccggagcctgggacaccgccggcggggagagaagcggatcccgtccgagccccggccccaagtaacgccgccgccccggagccgccaggcttctagagataggctcctcatgtgtctgcaattccaaaacttaacaaaaacaaaaagttgagcctctgaagctgtcactaaccaagtgattcagatgtcgggactggaacaccagctgttggggatgcaggacttggtctctgccctcccacacctcctgcctcttctttctctccatcgccccatctctgccagtagagaatggaactgagttggaggtccccctccccactaagtgcctctttgcatagcaccagtccccacccgcacgctctctggaccactacagctggacgggcaatggcgggtcggggaggcgcagcacgacccaatggaccagctgctgggaacaagatctgtcaatttaagctggttctgctgggggagtctgcggtaggcaaatccagcctcgtcctccgctttgtcaagggacagtttcacgagtaccaggagagcacaattggagcggccttcctcacacagactgtctgcctggatgacacaacagtcaagtttgagatctgggacacagctggacaggagcggtatcacagcctggcccccatgtactatcggggggcccaggctgccatcgtggtctatgacatcaccaacacagatacatttgcacgggccaagaactgggtgaaggagctacagaggcaggccagccccaacatcgtcattgcactcgcgggtaacaaggcagacctggccagcaagagagccgtggaattccaggaagcacaagcctatgcagacgacaacagtttgctgttcatggagacatcagcaaagactgcaatgaacgtgaacgaaatcttcatggcaatagctaagaagcttcccaagaacgagccccagaatgcaactggtgctccaggccgaaaccgaggtgtggacctccaggagaacaacccagccagccggagccagtgctgcagcaactgagccccccttgcctgcccgctgcccccgcctcctccgcctgaatgacccgactggaatccactctaaccaatcgcacttaacgactcgggccaccactgggggggcagggggagggg

SEQ ID NO: 173288 - DNA, 500 bp, Homo sapiens
  Payload ID: 14063
  Gene Symbol: RAB5C
  Gene Name: RAB5C, member RAS oncogene family
  ENST ID: ENST00000550406
  CDS Start-End: 278-500
accgccggcggggagagaagcggatcccgtccgagccccggccccaagtaacgccgccgccccggagccgccagtctcgctctctcgccaggccggagtgcagtggcactatctcagctcagtgcaacctctgcctcccgggttcaagcgattctcctgcctcagcctcccgagtagctgggactacagttggaggtccccctccccactaagtgcctctttgcatagcaccagtccccacccgcacgctctctggaccactacagctggacgggcaatggcgggtcggggaggcgcagcacgacccaatggaccagctgctgggaacaagatctgtcaatttaagctggttctgctgggggagtctgcggtaggcaaatccagcctcgtcctccgctttgtcaagggacagtttcacgagtaccaggagagcacaattggagcggccttcctcacacagactgtctgcctggatgacacaacagtcaagtttgagatct

SEQ ID NO: 173289 - DNA, 551 bp, Homo sapiens
  Payload ID: 14063
  Gene Symbol: RAB5C
  Gene Name: RAB5C, member RAS oncogene family
  ENST ID: ENST00000552162
  CDS Start-End: 180-551
gtgggtacctcgtgtggatcgtggctggcgttgcttcagattcttctttcctctgggtctgcaaccagctagaagcctggatagtcctgctttggaggtccccctccccactaagtgcctctttgcatagcaccagtccccacccgcacgctctctggaccactacagctggacgggcaatggcgggtcggggaggcgcagcacgacccaatggaccagctgctgggaacaagatctgtcaatttaagctggttctgctgggggagtctgcggtaggcaaatccagcctcgtcctccgctttgtcaagggacagtttcacgagtaccaggagagcacaattggagcggccttcctcacacagactgtctgcctggatgacacaacagtcaagtttgagatctgggacacagctggacaggagcggtatcacagcctggcccccatgtactatcggggggcccaggctgccatcgtggtctatgacatcaccaacacagatacatttgcacgggccaagaactgggtgaaggagctacagaggcaggccagc

SEQ ID NO: 173290 - DNA, 583 bp, Homo sapiens
  Payload ID: 14063
  Gene Symbol: RAB5C
  Gene Name: RAB5C, member RAS oncogene family
  ENST ID: ENST00000550504
  CDS Start-End: 309-583
aaacccggctcagcctcccaagtcctaacctgctagccacgctggggaaggttgtgggtacctcgtgtggatcgtggctggcgttgcttcagattcttctttcctctgggtctgcaaccagctagaagcctggatagtcctgctgtgagtctgtcctctgtttctgtgtgctggcagtggttttcccttttgaggaagagctgtgttcttgagcctatggttggaggtccccctccccactaagtgcctctttgcatagcaccagtccccacccgcacgctctctggaccactacagctggacgggcaatggcgggtcggggaggcgcagcacgacccaatggaccagctgctgggaacaagatctgtcaatttaagctggttctgctgggggagtctgcggtaggcaaatccagcctcgtcctccgctttgtcaagggacagtttcacgagtaccaggagagcacaattggagcggccttcctcacacagactgtctgcctggatgacacaacagtcaagtttgagatctgggacacagctggacaggagcggtatcacagcctggcccccatgtactatcg

SEQ ID NO: 173291 - DNA, 560 bp, Homo sapiens
  Payload ID: 14063
  Gene Symbol: RAB5C
  Gene Name: RAB5C, member RAS oncogene family
  ENST ID: ENST00000551338
  CDS Start-End: 1-453
gtcaagtttgagatctgggacacagctggacaggagcggtatcacagcctggcccccatgtactatcggggggcccaggctgccatcgtggtctatgacatcaccaacacagatacatttgcacgggccaagaactgggtgaaggagctacagaggcaggccagccccaacatcgtcattgcactcgcgggtaacaaggcagacctggccagcaagagagccgtggaattccaggaagcacaagcctatgcagacgacaacagtttgctgttcatggagacatcagcaaagactgcaatgaacgtgaacgaaatcttcatggcaataggtcagttgcttctcctcccctcctctctccaccacagcaagggcatatcacctgtctgctggtctagagtgggcctgcggggtcccttcaccactctttttttttttttttttttttttttttgagatggagtctcgctctatcacccaggctggagttcagtggcacgatctcgactcactgcaagctccgccccccaggttcacgccattctcctgcctcagcctctcga

SEQ ID NO: 173292 - DNA, 3389 bp, Homo sapiens
  Payload ID: 14064
  Gene Symbol: RAB6A
  Gene Name: RAB6A, member RAS oncogene family
  Uniprot ID: P20340
  ENST ID: ENST00000310653
  CDS Start-End: 503-1129
agcggccggcggggccgcaggctcgcgcccgggctcgccccgcgccgctccagaggctcgcgcactcagcaggttgggctgcggcggcggcggcagctgtggaagctcaggcgctgcgcgtgagaggtcccagatacgtctgcggttccggctccgccaccctcagcttctcttccccaggtctgggagccgagtgcggaaggagggaacggccctagctttgggaagccagaggacacccctggctcctgccgacaccgccctccttcccttcccagccgcgggcctcgctcggtgctaggctactctgccgggaggcggcggcggctgccagtctgtggagagtcctgctgccctccagccgggctcctccaccgggccttgcaggggccgagagagctcggtgcccgcccttccgctcgcctttttcgtcagctggctggagcagcatcggtccgggaggtctctaggctgaggcggcggccgctcctctagttccacaatgtccacgggcggagacttcgggaatccgctgaggaaattcaagctggtgttcctgggggagcaaagcgttggaaagacatctttgatcaccagattcatgtatgacagttttgacaacacctatcaggcaacaattggcattgactttttatcaaaaactatgtacttggaggatcgaacaatcaggcttcagctgtgggatactgcgggtcaggaacgtttccgtagcctcattcccagttacatccgtgattctgctgcagctgtagtagtttacgatatcacaaatgttaactcattccagcaaactacaaagtggattgatgatgtcagaacagaaagaggaagtgatgttatcatcatgctagtaggaaataaaacagatcttgctgacaagaggcaagtgtcaattgaggagggagagaggaaagccaaagagctgaatgttatgtttattgaaactagtgcaaaagctggatacaatgtaaagcagctctttcgacgtgtagcagcagctttgccgggaatggaaagcacacaggacagaagcagagaagatatgattgacataaaactggaaaagcctcaggagcaaccagtcagtgaaggaggctgttcctgctaatctcccatgtcatcttcaaccttcttcagaagctcactgctttggcccccttactctttcattgactgcagtgtgaatattggcttgaaccttttcccttcagtaataacgtattgcaattcatcattgctgcctgtctcgtggagatgatctattagcttcacaagcacaacaaaagtcagtgtcttcattatttatattttacaaaaagccaaaatatttcagcatattccagtgataactttaaaaattagatacattttcttaacatttttttcttttttaatgttatgataatgtacttcaaaatgatggaaatctcaacagtatgagtatggcttggttaacgagcggtatgttcacagcctactttatctctccttgcttttctcacctctcacttacccccattccctattaccctattcttacctagcctcccccgacttcctcaaaacaaacaagagatggcaaagcagcagttctaccaagcccattggaattatcctttaattttacagataccacttgctgtaggctacggaccaagatgtccaaaattattcttgagcactgatataaattacggtcttctttgaggtcaaaattcagccatcatggtaggcagtgcttgaatgagaaaaggctcctggtgcatcttcaaaatgagtcctaaagaacatactgagtacttagaagtagaagaacataagatgtatttctgactaaaacaaatggctctttcacatgtgctttattagactctgggagagaaaattaaccaagtgcttcagaacaggtttttagtatttaattcttcacggtaagaaaatgaagttctaatgaactgtttctcccaaggttttaaaattgtcaagagttattctgtttgtttaaaaaataagaaacctctttaagcaatagattttgcttgggttttcttttttaaaaacataatactgtgcaggcaaggcactgtaaaagttttaattccttccagaagaaccagtggaagaatttaaatttggcgctacgatcaaaactactgaattagtagaaataatgatgtctaaagcttaccaacaaaagaaccctcagcagaataacaaaaactttgctcaggacatttgaggtcaaattgaagacggaaaccggaaaccgttttcttgtaagcccctagaggcagatcaggtaaagcatacatagtagagggaaaggagagaatggaaataaaactcaatattatgcagatttatgccttattttttagcattttttaaggttgggtctttcaggctggttttggtttgtattagatctgtatagtttaattaactggtgatttagttttatatttaagctacaattaatcttttttctttggtgatatttatttctttgccttttttttttttaacaactttcaatcttcagatgtttcgttgaatctatttagagcttcaccatggcaatatgtatttcccttaaaacactgcaaacaaatatactaggagtgtgcccttttaatctttactagttattgtgagattgctgtgtaagctaataaacacatttgtaaatacattgtttgcaggacgaaaacttctgagttacagctcaggaaaagcctgctgaatttatgttgtaagcattacttaacacagtataaagatgaaaagacaacaaaaatatcttcatacttcctcatcccctcattggaacaaaaccttaaactgggagaaccttagtcccctctctttcctcttcctcctccacttcccacttattgtcaccttgtaatattcagagagcacttggattatggatctgaatagagaaatgcttacagataatcattagcccacataccagtaacttatacttaaagatgggatggagttgtaaagtgcttttataatacaatataattgttaaaggcaagggttgactctttgttttattttgacatggcatgtcctgaaataaatattgattcaatatggcagatgggtcatattctttatttggaagaagttgtgacttctgacatgggtgtgattgtcttcctacactgttgcatttgattctttttatgtatttttaagaaagtaaccagttatactgcttttaatattgattggtctttttatttggcttggagttcttcaaagcattgaagtgtgttcatagtccaggttttttttttaataaacacaattttgctgccaaaaatatataaataaaacacgaaagaaaacaa

SEQ ID NO: 173293 - DNA, 3085 bp, Homo sapiens
  Payload ID: 14064
  Gene Symbol: RAB6A
  Gene Name: RAB6A, member RAS oncogene family
  Uniprot ID: P20340
  ENST ID: ENST00000336083
  CDS Start-End: 457-1083
gctccagaggctcgcgcactcagcaggttgggctgcggcggcggcggcagctgtggaagctcaggcgctgcgcgtgagaggtcccagatacgtctgcggttccggctccgccaccctcagcttctcttccccaggtctgggagccgagtgcggaaggagggaacggccctagctttgggaagccagaggacacccctggctcctgccgacaccgccctccttcccttcccagccgcgggcctcgctcggtgctaggctactctgccgggaggcggcggcggctgccagtctgtggagagtcctgctgccctccagccgggctcctccaccgggccttgcaggggccgagagagctcggtgcccgcccttccgctcgcctttttcgtcagctggctggagcagcatcggtccgggaggtctctaggctgaggcggcggccgctcctctagttccacaatgtccacgggcggagacttcgggaatccgctgaggaaattcaagctggtgttcctgggggagcaaagcgttggaaagacatctttgatcaccagattcatgtatgacagttttgacaacacctatcaggcaacaattggcattgactttttatcaaaaactatgtacttggaggatcgaacagtacgattgcaattatgggacacagcaggtcaagagcggttcaggagcttgattcctagctacattcgtgactccactgtggcagttgttgtttatgatatcacaaatgttaactcattccagcaaactacaaagtggattgatgatgtcagaacagaaagaggaagtgatgttatcatcatgctagtaggaaataaaacagatcttgctgacaagaggcaagtgtcaattgaggagggagagaggaaagccaaagagctgaatgttatgtttattgaaactagtgcaaaagctggatacaatgtaaagcagctctttcgacgtgtagcagcagctttgccgggaatggaaagcacacaggacagaagcagagaagatatgattgacataaaactggaaaagcctcaggagcaaccagtcagtgaaggaggctgttcctgctaatctcccatgtcatcttcaaccttcttcagaagctcactgctttggcccccttactctttcattgactgcagtgtgaatattggcttgaaccttttcccttcagtaataacgtattgcaattcatcattgctgcctgtctcgtggagatgatctattagcttcacaagcacaacaaaagtcagtgtcttcattatttatattttacaaaaagccaaaatatttcagcatattccagtgataactttaaaaattagatacattttcttaacatttttttcttttttaatgttatgataatgtacttcaaaatgatggaaatctcaacagtatgagtatggcttggttaacgagcggtatgttcacagcctactttatctctccttgcttttctcacctctcacttacccccattccctattaccctattcttacctagcctcccccgacttcctcaaaacaaacaagagatggcaaagcagcagttctaccaagcccattggaattatcctttaattttacagataccacttgctgtaggctacggaccaagatgtccaaaattattcttgagcactgatataaattacggtcttctttgaggtcaaaattcagccatcatggtaggcagtgcttgaatgagaaaaggctcctggtgcatcttcaaaatgagtcctaaagaacatactgagtacttagaagtagaagaacataagatgtatttctgactaaaacaaatggctctttcacatgtgctttattagactctgggagagaaaattaaccaagtgcttcagaacaggtttttagtatttaattcttcacggtaagaaaatgaagttctaatgaactgtttctcccaaggttttaaaattgtcaagagttattctgtttgtttaaaaaataagaaacctctttaagcaatagattttgcttgggttttcttttttaaaaacataatactgtgcaggcaaggcactgtaaaagttttaattccttccagaagaaccagtggaagaatttaaatttggcgctacgatcaaaactactgaattagtagaaataatgatgtctaaagcttaccaacaaaagaaccctcagcagaataacaaaaactttgctcaggacatttgaggtcaaattgaagacggaaaccggaaaccgttttcttgtaagcccctagaggcagatcaggtaaagcatacatagtagagggaaaggagagaatggaaataaaactcaatattatgcagatttatgccttattttttagcattttttaaggttgggtctttcaggctggttttggtttgtattagatctgtatagtttaattaactggtgatttagttttatatttaagctacaattaatcttttttctttggtgatatttatttctttgccttttttttttttaacaactttcaatcttcagatgtttcgttgaatctatttagagcttcaccatggcaatatgtatttcccttaaaacactgcaaacaaatatactaggagtgtgcccttttaatctttactagttattgtgagattgctgtgtaagctaataaacacatttgtaaatacattgtttgcaggacgaaaacttctgagttacagctcaggaaaagcctgctgaatttatgttgtaagcattacttaacacagtataaagatgaaaagacaacaaaaatatcttcatacttcctcatcccctcattggaacaaaaccttaaactgggagaaccttagtcccctctctttcctcttcctcctccacttcccacttattgtcaccttgtaatattcagagagcacttggattatggatctgaatagagaaatgcttacagataatcattagcccacataccagtaacttatacttaaagatgggatggagttgtaaagtgcttttataatacaatataattgttaaaggcaagggttgactctttgttttattttgacatggcatgtcctgaaataaatattgattcaatatg

SEQ ID NO: 173294 - DNA, 1267 bp, Homo sapiens
  Payload ID: 14064
  Gene Symbol: RAB6A
  Gene Name: RAB6A, member RAS oncogene family
  ENST ID: ENST00000536566
  CDS Start-End: 440-703
actcagcaggttgggctgcggcggcggcggcagctgtggaagctcaggcgctgcgcgtgagaggtcccagatacgtctgcggttccggctccgccaccctcagcttctcttccccaggtctgggagccgagtgcggaaggagggaacggccctagctttgggaagccagaggacacccctggctcctgccgacaccgccctccttcccttcccagccgcgggcctcgctcggtgctaggctactctgccgggaggcggcggcggctgccagtctgtggagagtcctgctgccctccagccgggctcctccaccgggccttgcaggggccgagagagctcggtgcccgcccttccgctcgcctttttcgtcagctggctggagcagcatcggtccgggaggtctctaggctgaggcggcggccgctcctctagttccacaatgtccacgggcggagacttcgggaatccgctgaggaaattcaagctggtgttcctgggggagcaaagcgttggaaagacatctttgatcaccagattcatgtatgacagttttgacaacacctatcaggcaacaattggcattgactttttatcaaaaactatgtacttggaggatcgaacaatgttaactcattccagcaaactacaaagtggattgatgatgtcagaacagaaagaggaagtgatgttatcatcatgctagtaggaaataaaacagatcttgctgacaagaggcaagtgtcaattgaggagggagagaggaaagccaaagagctgaatgttatgtttattgaaactagtgcaaaagctggatacaatgtaaagcagctctttcgacgtgtagcagcagctttgccgggaatggaaagcacacaggacagaagcagagaagatatgattgacataaaactggaaaagcctcaggagcaaccagtcagtgaaggaggctgttcctgctaatctcccatgtcatcttcaaccttcttcagaagctcactgctttggcccccttactctttcattgactgcagtgtgaatattggcttgaaccttttcccttcagtaataacgtattgcaattcatcattgctgcctgtctcgtggagatgatctattagcttcacaagcacaacaaaagtcagtgtcttcattatttatattttacaaaaagccaaaatatttcagcatattccagtgataactttaaaaattagatacattttcttaacatttttttcttttttaatgttatgataatgtacttcaa

SEQ ID NO: 173295 - DNA, 699 bp, Homo sapiens
  Payload ID: 14064
  Gene Symbol: RAB6A
  Gene Name: RAB6A, member RAS oncogene family
  ENST ID: ENST00000540771
  CDS Start-End: 485-699
aggctcgcgcccgggctcgccccgcgccgctccagaggctcgcgcactcagcaggttgggctgcggcggcggcggcagctgtggaagctcaggcgctgcgcgtgagaggtcccagatacgtctgcggttccggctccgccaccctcagcttctcttccccaggtctgggagccgagtgcggaaggagggaacggccctagctttgggaagccagaggacacccctggctcctgccgacaccgccctccttcccttcccagccgcgggcctcgctcggtgctaggctactctgccgggaggcggcggcggctgccagtctgtggagagtcctgctgccctccagccgggctcctccaccgggccttgcaggggccgagagagctcggtgcccgcccttccgctcgcctttttcgtcagctggctggagcagcatcggtccgggaggtctctaggctgaggcggcggccgctcctctagttccacaatgtccacgggcggagacttcgggaatccgctgaggaaattcaagctggtgttcctgggggagcaaagcgttggaaagacatctttgatcaccagattcatgtatgacagttttgacaacacctatcagctctttcgacgtgtagcagcagctttgccgggaatggaaagcacacaggacagaagcagagaagatatgattgacataaaactgga

SEQ ID NO: 173296 - DNA, 447 bp, Homo sapiens
  Payload ID: 14064
  Gene Symbol: RAB6A
  Gene Name: RAB6A, member RAS oncogene family
  ENST ID: ENST00000545625
  CDS Start-End: 4-267
acaatgtccacgggcggagacttcgggaatccgctgaggaaattcaagctggtgttcctgggggagcaaagcgttggaaagacatctttgatcaccagattcatgtatgacagttttgacaacacctatcaggcaacaattggcattgactttttatcaaaaactatgtacttggaggatcgaacaatgttaactcattccagcaaactacaaagtggattgatgatgtcagaacagaaagaggaagtgatgttatcatcatgctagtaggaaataaaacagatcttgctgacaagaggcaagtgtcaattgaggagggagagaggaaagccaaagagctgaatgttatgtttattgaaactagtgcaaaagctggatacaatgtaaagcagtgattgacataaaactggaaaagcctcaggagcaaccagtcagtgaaggaggctg

SEQ ID NO: 173297 - DNA, 447 bp, Homo sapiens
  Payload ID: 14064
  Gene Symbol: RAB6A
  Gene Name: RAB6A, member RAS oncogene family
  ENST ID: ENST00000537446
  CDS Start-End: 24-287
gcggccgctcctctagttccacaatgtccacgggcggagacttcgggaatccgctgaggaaattcaagctggtgttcctgggggagcaaagcgttggaaagacatctttgatcaccagattcatgtatgacagttttgacaacacctatcaggcaacaattggcattgactttttatcaaaaactatgtacttggaggatcgaacaatgttaactcattccagcaaactacaaagtggattgatgatgtcagaacagaaagaggaagtgatgttatcatcatgctagtaggaaataaaacagatcttgctgacaagaggcaagtgtcaattgaggagggagagaggaaagccaaagagctgaatgttatgtttattgaaactagtgcaaaagctggatacaatgtaaagcagctctttcgacgtgtagcagcagctttgccgggaat

SEQ ID NO: 173298 - DNA, 1104 bp, Homo sapiens
  Payload ID: 14064
  Gene Symbol: RAB6A
  Gene Name: RAB6A, member RAS oncogene family
  Uniprot ID: P20340
  ENST ID: ENST00000541973
  CDS Start-End: 78-605
ttgttttccccagaggcttggccctgcgaagtgctgatgtcgtggaagttggaaagacatctttgatcaccagattcatgtatgacagttttgacaacacctatcaggcaacaattggcattgactttttatcaaaaactatgtacttggaggatcgaacaatcaggcttcagctgtgggatactgcgggtcaggaacgtttccgtagcctcattcccagttacatccgtgattctgctgcagctgtagtagtttacgatatcacaaatgttaactcattccagcaaactacaaagtggattgatgatgtcagaacagaaagaggaagtgatgttatcatcatgctagtaggaaataaaacagatcttgctgacaagaggcaagtgtcaattgaggagggagagaggaaagccaaagagctgaatgttatgtttattgaaactagtgcaaaagctggatacaatgtaaagcagctctttcgacgtgtagcagcagctttgccgggaatggaaagcacacaggacagaagcagagaagatatgattgacataaaactggaaaagcctcaggagcaaccagtcagtgaaggaggctgttcctgctaatctcccatgtcatcttcaaccttcttcagaagctcactgctttggcccccttactctttcattgactgcagtgtgaatattggcttgaaccttttcccttcagtaataacgtattgcaattcatcattgctgcctgtctcgtggagatgatctattagcttcacaagcacaacaaaagtcagtgtcttcattatttatattttacaaaaagccaaaatatttcagcatattccagtgataactttaaaaattagatacattttcttaacatttttttcttttttaatgttatgataatgtacttcaaaatgatggaaatctcaacagtatgagtatggcttggttaacgagcggtatgttcacagcctactttatctctccttgcttttctcacctctcacttacccccattccctattaccctattcttacctagcctcccccgacttcctcaaaacaaacaagagatggcaaagcagcagttctaccaagcccattg

SEQ ID NO: 173299 - DNA, 758 bp, Homo sapiens
  Payload ID: 14064
  Gene Symbol: RAB6A
  Gene Name: RAB6A, member RAS oncogene family
  Uniprot ID: P20340
  ENST ID: ENST00000541588
  CDS Start-End: 440-754
actcagcaggttgggctgcggcggcggcggcagctgtggaagctcaggcgctgcgcgtgagaggtcccagatacgtctgcggttccggctccgccaccctcagcttctcttccccaggtctgggagccgagtgcggaaggagggaacggccctagctttgggaagccagaggacacccctggctcctgccgacaccgccctccttcccttcccagccgcgggcctcgctcggtgctaggctactctgccgggaggcggcggcggctgccagtctgtggagagtcctgctgccctccagccgggctcctccaccgggccttgcaggggccgagagagctcggtgcccgcccttccgctcgcctttttcgtcagctggctggagcagcatcggtccgggaggtctctaggctgaggcggcggccgctcctctagttccacaatgtccacgggcggagacttcgggaatccgctgaggaaattcaagctggtgttcctgggggagcaaagcgttggaaagacatctttgatcaccagattcatgtatgacagttttgacaacacctatcaggcaacaattggcattgactttttatcaaaaactatgtacttggaggatcgaacactctttcgacgtgtagcagcagctttgccgggaatggaaagcacacaggacagaagcagagaagatatgattgacataaaactggaaaagcctcaggagcaaccagtcagtgaaggaggctgttcctgctaatctc

SEQ ID NO: 173300 - DNA, 5526 bp, Homo sapiens
  Payload ID: 14065
  Gene Symbol: RAB6B
  Gene Name: RAB6B, member RAS oncogene family
  Uniprot ID: Q9NRW1
  ENST ID: ENST00000285208
  CDS Start-End: 351-977
ctcctccgccccgcgcgccgtccctgcgccccgctccgcccgcgcctctctcccagcgccgcgcctcgggcgtaaagagcgcgcccctcgcaccgcagccagtgccgaccgcagcagcccagccccagccttcctccgcctccgcctctctctcctcctcctcctccgccgccggacacgcagccgcaggccgggaccgggacgcagctggggagtcagggacgcgcgcagccagcccttccccctccggctcccgcaccgccggccgcctcccctcgccctcctactctcccctccctgctccttcgctttttcctcctcctcctctcccggccccggctgccagcaccatgtccgcagggggagattttgggaatccactgagaaaattcaagttggtgttcttgggggagcagagcgtcgggaagacgtctctgattacgaggttcatgtacgacagcttcgacaacacataccaggcaaccattgggattgacttcttgtcaaaaaccatgtacttggaggaccgcacggtgcgactgcagctctgggacacagctggtcaggagaggttccgcagcctgatccccagctacatccgggactccacggtggctgtggtggtgtacgacatcacaaatctcaactccttccaacagacctctaagtggatcgacgacgtcaggacagagaggggcagtgatgttatcatcatgctggtgggcaacaagacggacctggctgataagaggcagataaccatcgaggagggggagcagcgcgccaaagaactgagcgtcatgttcattgagaccagtgcgaagactggctacaacgtgaagcagctttttcgacgtgtggcgtcggctctacccggaatggagaatgtccaggagaaaagcaaagaagggatgatcgacatcaagctggacaaaccccaggagcccccggccagcgagggcggctgctcctgctaatgcagagccgacctgtggcttcccatgacactccttgcttgttgtgttgcttcctattggctagcttcctaaggggggagggaaccgagttatcaagatgggaggatttttcttttctctctgtctttaggagtagggtgggatggggagggaggctgggcatcagggatcacatcactcttaacggctgttacttaaacaactattttttggtttggttgtaatatattgtactttattaagattgccaaaaactgttaaaatttaaaaaaaatttaaatcatgtgtatacaattttttgccagataaaaatgtagtcatttttatttgaaagatgtgctttttgtttttgtatatttgtaaacttatagagaaccttttccacacacctcctccttcctgttctctttgaaccattcatcacctctgccttcctcctatccccagcccaataaattaaaacaattaactgagcaaattaattaggcttcagtctggggccatctggccccactctctaggccctactccagttaaatcaaacattggttgaacacatcagcctctgaaaaggtagctctgactcttgtctttccatggccagagtgggtcgtcaacctcgtgtggagctgagaccaaggtctgtgggctctaggcagcccggcagcagcccccagaggaactgctcccacctctccttctctttccctgaaaagccttgaagggggttgagggtacaggcaaccttgtgttctctgtgccctcagggactggcagagcaagaggccatcagaaggacgaggtgctgttggcaattgcagctgcgtggtgcgtggtttatagactggggtgccatgtgtacttctgaaaatattttaaccagcccacccagcagtcagtacacatgcctgggccaagtctaagaaactcagtgtgtgatgttgggcagtgtgccatcctgaagccttcctcctggatgtcagggaagctggaccacctggagttgatcctctgtgatggggaggcgggggggggggggggtgttgtctgcagaaccaccaccttgaaagatccatgttcttagagcctcagctgctaatattgttgagtgctttctggaaaagctgatttgttgctatgttttcaccccagtggcatggcgcagttgaagtctttgtggacatatctttgtggctactgtggctgcgctgtggtcacctgaggatgtggttcaggtggggtctccagaaggctgcttgcccccagagagccatctcttccatttttgattcattcctgagaatggcttagtcctgagaatctgcaaagtctctgaagagaactctctcttcccactaagtgatataacctacttggccagcattccaaatagactcagactcactgccctgagcctgcacagagccaggtgcaatgggcagtgagtctggccaaaatgtaaaccccaccctccctgctgtcattggctctccctccaggctgctgctgggcatgtcatagatgggatgaatgaccatctggggtatggtgggctgaactccacaaggtcgttggaatgaattttgaaacttctcagaaattaatctgaaatggcaggcagtaagtgcagcagaatctggcaggactgatatttgtgcagtgggcctgccacacaccctctgcctaggaggctgtatgccagagctcatctctagcaaggaatttatcttcaggtgaagaagagaggaagcaggatcccactgagcacctcttgcagaaggcaaggaccaatgtttgaacgtgtttcagatgtcatgtgtttagtttttatatgtgtgtacataattatatatagagatagacttgtgtatacaccttccacaaacacatcctcacggagatacatgtgctcaatgtatattcttgtttctcctgctctcaagttggaacttgcattgtgataagttttggaaattcaaaagtactgcaacgtgttgaaataagaaatacttaatattgtcaaataacttgtgattgtcttgccatcaataaaataatgcatagttgtgttaaactacaggcaaacatagcccacgggaatatctccaccatttctctatgtactttatatgcacgggtgtgcatgcctgtgtgggccagtgtccccccaccatgggcacacccccaagtggtgcttgttggaagagtgcttacttacctcgagagaatttacaggagtccacatgacagtgtcctgcctggttggcagcgggggccatcacctgtggcctctgagaccgccccatttacaggaatctgcactgggtctcagtgaatgaacgtatggtagatttttattttcttggcactaaagattagcttttttaaaaaaacatcccataaaacagtagaaactcagttcccttctcaggggcacacacatccaaggcaccgtggactgtgtttccatcctggcctagaggagcagtaaaagatagcatttggtttgacatggccttagtgagtcctgcctttcctagcatgcacacaacatcctctctttgagtttgggttctccccagccccttggcctctgaggctgagggtggcttcctcccatcctcccatctcagtggttccatggcgctcccttcggcacgtgcggtttccgcccctcccttcctggggtgtggaaaggcagccagacctctttttcagaagttgttggttccctgatttttgtcttgagcaggcaccatccctgtccccttgcttgcaggtagaattggcacagagttaaggttccataataaactgttaggtgctcttgaagaagatgtcatggcattgcctcagcaccccagcaagagcattgcatctttgctgaatccagatgggttagcagagggcaaattggaggattcctttgaggaaatgttctcaattgagcaattcagtccctctccccaaagactagacgtgacctggcagattagcaggatcctcttggccttcttttttggggatggtgggagtgaagggggtgaatcttaaaagcttatcaacaaagctcctgttctgcaggcatcaggaaagttgagtgtaagatggaaaaagcaaacagcctatttacaagtggaaacacattggttctgatcactcctaacttgctgggtgatcatacatacatcaacatgaaggtgtgacatcagaatcatgagcaccatggctgcagttgtgtgatccaaggctagttggcttggtagctgttggcagcagtttcccttggtcagaggcctccttgctatctatcgctgctctcttcttgtcatccttaaacattcagtcatgttcccaggtctgaggggagcaatggccagaccagtttcagtatctctggcaacagaaacaaggattgaaatggtggtagttaagagtgcagacacatctggggtgcaacgtctgcatcatcctggtggctagccagtgcggggaggccctgccctgggataccagttgtgacaataaagggatggccctcctggcttcagcatcctgcaggtagagcagcctcattccttcacaagatggaaggcaggtgaggatgtcaggatgagatgggaccaggtagccgaggacagtgaggcatgtctgagccacttgaggggcagctgaacagaaggatgtctgtgtgcatcaaccgagcagattgtgcgcacactcgtttccgaactgcctctccccaaagaatgtgaggcattgtcaccttgttacagctatgtgaagcagagctgtcacaacttttcctgtctacaggcaggaaaaccaggatggagaagggcaacttgcttattaagatcacccagcaagttaggagtgatcagaaccagtgaagtttccatttttcatccattgctgccctgtgtgtgaacaaatgtgactccatatttattacacagcaaggactgctgtgtgtgggtgtgttcctcagaccatctctactctttttggttaggacactaggttcttcccagcatatgagtgagaatattggtggtattttgggctcctctactgcacaagggccagtccccaagtctactctgattgattgtcatgggcacccacacagatcaggacaccctttgaatttttgtttgacatgaactatttaggtgttccaaaaccttgggatctcaatgtgcaaactccttggactccagacccctgtctggttggcactcccagcagtgtgtggtttcatcaggaaatccttgcagcaggggtttagatggttccttcaggaggtgggaagcctccatagcattgaaggccagcctgcatctcgcggtgtgtgtccacttctcccctcactttcccctcacccatccctttaaagtgattggctgtgaggagcacagagggtggcaattccatctgttatgggctcagaagacatagccgccatgttgatttcacattaaactgtgtaaaatgtggaaaagactcagcatgttggtcaaacaataaactgtcctaattctcaaaa

SEQ ID NO: 173301 - DNA, 506 bp, Homo sapiens
  Payload ID: 14065
  Gene Symbol: RAB6B
  Gene Name: RAB6B, member RAS oncogene family
  ENST ID: ENST00000488969
  CDS Start-End: 358-506
gttagtctccttgctgcccagggatctgggcaattgcagtgagggctaccccaactcgaggcgatttggggaatgatacaggggcacctcacaccgagaggctgtgaagtctggctctgggcagagaaaggcccaggcgacacgccctgcctagcttcccagcactcctccagagagcatcggtggattcttcccacccccacctcccagctcaccgcccttcttgggggaggggaggtcaccctggcagtcggccagagctgggggagggggagactgcttctccgctgcccggctccctccccaggaaaacatctctgaaaaccagtcgggaagacgtctctgattacgaggttcatgtacgacagcttcgacaacacataccaggcaaccattgggattgacttcttgtcaaaaaccatgtacttggaggaccgcacggtgcgactgcagctctgggacacagctggtcaggagaggttccgcagcctgatccccagctacat

SEQ ID NO: 173302 - DNA, 500 bp, Homo sapiens
  Payload ID: 14065
  Gene Symbol: RAB6B
  Gene Name: RAB6B, member RAS oncogene family
  ENST ID: ENST00000469959
  CDS Start-End: 168-383
ccgcaggccgggaccgggacgcagctggggagtcagggacgcgcgcagccagcccttccccctccggctcccgcaccgccggccgcctcccctcgccctcctactctcccctccctgctccttcgctttttcctcctcctcctctcccggccccggctgccagcaccatgtccgcagggggagattttgggaatccactgagaaaattcaagttggtgttcttgggggagcagagcgtcgggaagacgtctctgattacgaggtgctgttggcaattgcagctgcgtggtgcgtggtttatagactggggtgccatgtgtacttctgaaaatattttaaccagcccacccagcagtcagtacacatgcctgggccaagtctaagaaactcagtgtgtgatgttgggcagtgtgccatcctgaagccttcctcctggatgtcagggaagctggaccacctggagttgatcctctgtgatggggaggcgggggggggggggg

SEQ ID NO: 173303 - DNA, 880 bp, Homo sapiens
  Payload ID: 14065
  Gene Symbol: RAB6B
  Gene Name: RAB6B, member RAS oncogene family
  Uniprot ID: Q9NRW1
  ENST ID: ENST00000486858
  CDS Start-End: 158-745
gagattttgggaatccactgagaaaattcaagttggtgttcttgggggagcagagcgtgccctgggttccctgactgctctggccttccatgggtgttctgcgggactgctggcagcccttccggactcctccctctctgctacctgctcaggttggatgtggcatatgaccagaaactggccattggtcgggaagacgtctctgattacgaggttcatgtacgacagcttcgacaacacataccaggcaaccattgggattgacttcttgtcaaaaaccatgtacttggaggaccgcacggtgcgactgcagctctgggacacagctggtcaggagaggttccgcagcctgatccccagctacatccgggactccacggtggctgtggtggtgtacgacatcacaaatctcaactccttccaacagacctctaagtggatcgacgacgtcaggacagagaggggcagtgatgttatcatcatgctggtgggcaacaagacggacctggctgataagaggcagataaccatcgaggagggggagcagcgcgccaaagaactgagcgtcatgttcattgagaccagtgcgaagactggctacaacgtgaagcagctttttcgacgtgtggcgtcggctctacccggaatggagaatgtccaggagaaaagcaaagaagggatgatcgacatcaagctggacaaaccccaggagcccccggccagcgagggcggctgctcctgctaatgcagagccgacctgtggcttcccatgacactccttgcttgttgtgttgcttcctattggctagcttcctaaggggggagggaaccgagttatcaagatgggaggatttttcttttctctctgtctttaggagta

SEQ ID NO: 173304 - DNA, 723 bp, Homo sapiens
  Payload ID: 14065
  Gene Symbol: RAB6B
  Gene Name: RAB6B, member RAS oncogene family
  ENST ID: ENST00000460865
  CDS Start-End: 474-723
tggcgcggctctggagagcgctcctccgccccgcgcgccgtccctgcgccccgctccgcccgcgcctctctcccagcgccgcgcctcgggcgtaaagagcgcgcccctcgcaccgcagccagtgccgaccgcagcagcccagccccagccttcctccgcctccgcctctctctcctcctcctcctccgccgccggacacgcagccgcaggccgggaccgggacgcagctggggagtcagggacgcgcgcagccagcccttccccctccggctcccgcaccgccggccgcctcccctcgccctcctactctcccctccctgctccttcgctttttcctcctcctcctctcccggccccggctgccagcaccatgtccgcagggggagattttgggaatccactgagaaaattcaagttggtgttcttgggggagcagagcggcaaccattgggattgacttcttgtcaaaaaccatgtacttggaggaccgcacggtgcgactgcagctctgggacacagctggtcaggagaggttccgcagcctgatccccagctacatccgggactccacggtggctgtggtggtgtacgacatcacaaatctcaactccttccaacagacctctaagtggatcgacgacgtcaggacagagaggggcagtgatgttatcatcatgctggtgggcaacaagacggacctggctgataagaggcagataacca

SEQ ID NO: 173305 - DNA, 586 bp, Homo sapiens
  Payload ID: 14065
  Gene Symbol: RAB6B
  Gene Name: RAB6B, member RAS oncogene family
  ENST ID: ENST00000477759
  CDS Start-End: 215-586
cggccccggctgccagcaccatgtccgcagggggagattttgggaatccactgagaaaattcaagttggtgttcttgggggagcagagcgtgccctgggttccctgactgctctggccttccatgggtgttctgcgggactgctggcagcccttccggactcctccctctctgctacctgctcagtcgggaagacgtctctgattacgaggttcatgtacgacagcttcgacaacacataccaggcaaccattgggattgacttcttgtcaaaaaccatgtacttggaggaccgcacggtgcgactgcagctctgggacacagctggtcaggagaggttccgcagcctgatccccagctacatccgggactccacggtggctgtggtggtgtacgacatcacaaatctcaactccttccaacagacctctaagtggatcgacgacgtcaggacagagaggggcagtgatgttatcatcatgctggtgggcaacaagacggacctggctgataagaggcagataaccatcgaggagggggagcagcgcgccaaagaactgagcgtcatgttcattgagaccagtgcg

SEQ ID NO: 173306 - DNA, 5219 bp, Homo sapiens
  Payload ID: 14065
  Gene Symbol: RAB6B
  Gene Name: RAB6B, member RAS oncogene family
  Uniprot ID: Q9NRW1
  ENST ID: ENST00000543906
  CDS Start-End: 130-756
acgcgcgcagccagcccttccccctccggctcccgcaccgccggccgcctcccctcgccctcctactctcccctccctgctccttcgctttttcctcctcctcctctcccggccccggctgccagcaccatgtccgcagggggagattttgggaatccactgagaaaattcaagttggtgttcttgggggagcagagcgtcgggaagacgtctctgattacgaggttcatgtacgacagcttcgacaacacataccaggcaaccattgggattgacttcttgtcaaaaaccatgtacttggaggaccgcacggtgcgactgcagctctgggacacagctggtcaggagaggttccgcagcctgatccccagctacatccgggactccacggtggctgtggtggtgtacgacatcacaaatctcaactccttccaacagacctctaagtggatcgacgacgtcaggacagagaggggcagtgatgttatcatcatgctggtgggcaacaagacggacctggctgataagaggcagataaccatcgaggagggggagcagcgcgccaaagaactgagcgtcatgttcattgagaccagtgcgaagactggctacaacgtgaagcagctttttcgacgtgtggcgtcggctctacccggaatggagaatgtccaggagaaaagcaaagaagggatgatcgacatcaagctggacaaaccccaggagcccccggccagcgagggcggctgctcctgctaatgcagagccgacctgtggcttcccatgacactccttgcttgttgtgttgcttcctattggctagcttcctaaggggggagggaaccgagttatcaagatgggaggatttttcttttctctctgtctttaggagtagggtgggatggggagggaggctgggcatcagggatcacatcactcttaacggctgttacttaaacaactattttttggtttggttgtaatatattgtactttattaagattgccaaaaactgttaaaatttaaaaaaaatttaaatcatgtgtatacaattttttgccagataaaaatgtagtcatttttatttgaaagatgtgctttttgtttttgtatatttgtaaacttatagagaaccttttccacacacctcctccttcctgttctctttgaaccattcatcacctctgccttcctcctatccccagcccaataaattaaaacaattaactgagcaaattaattaggcttcagtctggggccatctggccccactctctaggccctactccagttaaatcaaacattggttgaacacatcagcctctgaaaaggtagctctgactcttgtctttccatggccagagtgggtcgtcaacctcgtgtggagctgagaccaaggtctgtgggctctaggcagcccggcagcagcccccagaggaactgctcccacctctccttctctttccctgaaaagccttgaagggggttgagggtacaggcaaccttgtgttctctgtgccctcagggactggcagagcaagaggccatcagaaggacgaggtgctgttggcaattgcagctgcgtggtgcgtggtttatagactggggtgccatgtgtacttctgaaaatattttaaccagcccacccagcagtcagtacacatgcctgggccaagtctaagaaactcagtgtgtgatgttgggcagtgtgccatcctgaagccttcctcctggatgtcagggaagctggaccacctggagttgatcctctgtgatggggaggcgggggggggggggggtgttgtctgcagaaccaccaccttgaaagatccatgttcttagagcctcagctgctaatattgttgagtgctttctggaaaagctgatttgttgctatgttttcaccccagtggcatggcgcagttgaagtctttgtggacatatctttgtggctactgtggctgcgctgtggtcacctgaggatgtggttcaggtggggtctccagaaggctgcttgcccccagagagccatctcttccatttttgattcattcctgagaatggcttagtcctgagaatctgcaaagtctctgaagagaactctctcttcccactaagtgagtctggccaaaatgtaaaccccaccctccctgctgtcattggctctccctccaggctgctgctgggcatgtcatagatgggatgaatgaccatctggggtatggtgggctgaactccacaaggtcgttggaatgaattttgaaacttctcagaaattaatctgaaatggcaggcagtaagtgcagcagaatctggcaggactgatatttgtgcagtgggcctgccacacaccctctgcctaggaggctgtatgccagagctcatctctagcaaggaatttatcttcaggtgaagaagagaggaagcaggatcccactgagcacctcttgcagaaggcaaggaccaatgtttgaacgtgtttcagatgtcatgtgtttagtttttatatgtgtgtacataattatatatagagatagacttgtgtatacaccttccacaaacacatcctcacggagatacatgtgctcaatgtatattcttgtttctcctgctctcaagttggaacttgcattgtgataagttttggaaattcaaaagtactgcaacgtgttgaaataagaaatacttaatattgtcaaataacttgtgattgtcttgccatcaataaaataatgcatagttgtgttaaactacaggcaaacatagcccacgggaatatctccaccatttctctatgtactttatatgcacgggtgtgcatgcctgtgtgggccagtgtccccccaccatgggcacacccccaagtggtgcttgttggaagagtgcttacttacctcgagagaatttacaggagtccacatgacagtgtcctgcctggttggcagcgggggccatcacctgtggcctctgagaccgccccatttacaggaatctgcactgggtctcagtgaatgaacgtatggtagatttttattttcttggcactaaagattagcttttttaaaaaaacatcccataaaacagtagaaactcagttcccttctcaggggcacacacatccaaggcaccgtggactgtgtttccatcctggcctagaggagcagtaaaagatagcatttggtttgacatggccttagtgagtcctgcctttcctagcatgcacacaacatcctctctttgagtttgggttctccccagccccttggcctctgaggctgagggtggcttcctcccatcctcccatctcagtggttccatggcgctcccttcggcacgtgcggtttccgcccctcccttcctggggtgtggaaaggcagccagacctctttttcagaagttgttggttccctgatttttgtcttgagcaggcaccatccctgtccccttgcttgcaggtagaattggcacagagttaaggttccataataaactgttaggtgctcttgaagaagatgtcatggcattgcctcagcaccccagcaagagcattgcatctttgctgaatccagatgggttagcagagggcaaattggaggattcctttgaggaaatgttctcaattgagcaattcagtccctctccccaaagactagacgtgacctggcagattagcaggatcctcttggccttcttttttggggatggtgggagtgaagggggtgaatcttaaaagcttatcaacaaagctcctgttctgcaggcatcaggaaagttgagtgtaagatggaaaaagcaaacagcctatttacaagtggaaacacattggttctgatcactcctaacttgctgggtgatcatacatacatcaacatgaaggtgtgacatcagaatcatgagcaccatggctgcagttgtgtgatccaaggctagttggcttggtagctgttggcagcagtttcccttggtcagaggcctccttgctatctatcgctgctctcttcttgtcatccttaaacattcagtcatgttcccaggtctgaggggagcaatggccagaccagtttcagtatctctggcaacagaaacaaggattgaaatggtggtagttaagagtgcagacacatctggggtgcaacgtctgcatcatcctggtggctagccagtgcggggaggccctgccctgggataccagttgtgacaataaagggatggccctcctggcttcagcatcctgcaggtagagcagcctcattccttcacaagatggaaggcaggtgaggatgtcaggatgagatgggaccaggtagccgaggacagtgaggcatgtctgagccacttgaggggcagctgaacagaaggatgtctgtgtgcatcaaccgagcagattgtgcgcacactcgtttccgaactgcctctccccaaagaatgtgaggcattgtcaccttgttacagctatgtgaagcagagctgtcacaacttttcctgtctacaggcaggaaaaccaggatggagaagggcaacttgcttattaagatcacccagcaagttaggagtgatcagaaccagtgaagtttccatttttcatccattgctgccctgtgtgtgaacaaatgtgactccatatttattacacagcaaggactgctgtgtgtgggtgtgttcctcagaccatctctactctttttggttaggacactaggttcttcccagcatatgagtgagaatattggtggtattttgggctcctctactgcacaagggccagtccccaagtctactctgattgattgtcatgggcacccacacagatcaggacaccctttgaatttttgtttgacatgaactatttaggtgttccaaaaccttgggatctcaatgtgcaaactccttggactccagacccctgtctggttggcactcccagcagtgtgtggtttcatcaggaaatccttgcagcaggggtttagatggttccttcaggaggtgggaagcctccatagcattgaaggccagcctgcatctcgcggtgtgtgtccacttctcccctcactttcccctcacccatccctttaaagtgattggctgtgaggagcacagagggtggcaattccatctgttatgggctcagaagacatagccgccatgttgatttcacattaaactgtgtaaaatgtggaaaagactcagcatgttggtcaaacaataaactgtcctaattctc

SEQ ID NO: 173307 - DNA, 3075 bp, Homo sapiens
  Payload ID: 14066
  Gene Symbol: RAB6C
  Gene Name: RAB6C, member RAS oncogene family
  Uniprot ID: Q9H0N0
  ENST ID: ENST00000410061
  CDS Start-End: 453-1217
gcactcagcaggttgggctgcggcggcggcggctggggaagccgaagcgccgcgcgtgagagatcccggatacatctgcggtttgggctccgccaccctccgtctctctcccgcaggtctctgagccgggtgcggaaggagggaacggccctagccttgggaagccaaagcacacccctggctcctgccgacaccgccctccttcccttcccagccgcgggcctcgctccgtgctcggctactctgccgggaggcggcggcggctgccagtctgtggcgagccctgctgccctccagccgggctcctccagccgggctcctccaccggcccttgcaggggcgcagagagctcggcgcccgcccttccgctcgcctttttcgtcagccggctggaggagcatcggtccgggaggtctctgggctgaggcggcgacagctcctctagttccaccatgtccgcgggcggagacttcgggaatccgctgaggaaattcaagctggtgttcctgggggagcaaagcgttgcaaagacatctttgatcaccagattcaggtatgacagttttgacaacacctatcaggcaataattggcattgactttttatcaaaaactatgtacttggaggatggaacaatcgggcttcggctgtgggatacggcgggtcaggaacgtctccgtagcctcattcccaggtacatccgtgattctgctgcagctgtagtagtttacgatatcacaaatgttaactcattccagcaaactacaaagtggattgatgatgtcagaacagaaagaggaagtgatgttatcatcacgctagtaggaaatagaacagatcttgctgacaagaggcaagtgtcagttgaggagggagagaggaaagccaaagggctgaatgttacgtttattgaaactagggcaaaagctggatacaatgtaaagcagctctttcgacgtgtagcagcagctttgccgggaatggaaagcacacaggacggaagcagagaagacatgagtgacataaaactggaaaagcctcaggagcaaacagtcagcgaagggggttgttcctgctactctcccatgtcatcttcaacccttcctcagaagcccccttactctttcattgactgcagtgtgaatattggcttgaaccttttcccttcattaataacgttttgcaattcatcattgctgcctgtctcgtggaggtgatctattagcttcacaagcacaaaaaaagtcagcgtcttcattatttatattttacaaaaagccaaattatttcagcatattccggtgataactttaaaaattagatacattttcttaacatttttttcttttttaatgttatgataatgtacttcaaaatgatggaaatctcaacagtatgagtatggcttggttaacgagcagtatgttcacagcctgctttatctctccttgctcttctcacctctcccttaccccgttccctatttccgtgttcttacctagcctccccccacttcctcaaaacaaacaagagatggcaaagcagcagtccgaccaagcccactggaattatcctttaattttacagataccacttgctgtaggctgtggaccaagatgtccagaattattcttgagcactgatgtaaattacttagatcttctttgaggtcagaattcagcgatcacggtaggcagtgcttgaatgagaaaagcctcctggtgcatcttcaaaatgagtcctaaagaacatactgagtacttataagtagcagaacataaaatgtatttctgactaacacaaatggtcctttcacatgtgctttattagactctgggagagaaaagtaaccaagtgcttcagaacaggtttttagtatttacttcttcatggtaagataatgaagttctaatgaactatttctcccaaggttttaaaattgtcaagagttattctgtttgtttaaaaagtaagaaacctctgtaagcaatagattttgcttgggttttctttcttaaaaaaataatactatgcaggcaagacaccataaaagtttaattccttacagaagaaccagtggaagaatttaaatttggcactacgatcaaaactactgaattagcagaaataacgatatctaaagcttaccagcaaaagaaccctcagcagaatagcaaaaactttgctcaggacatttgaggtcaaattgaagacggaagacggaagacggaaaccggaaaccgttttcttgtaagcccctagaggcagatcaggtaaagcatacatagtagagggaaaggagagaatggaaataaaactgaatattatgcagatttatgccttattttttagcattttttaaggttgggtctttcaggctggttttggtttgtattagatctgtatagtttaactagtgatttagttttatatttaagctacgattaatattttttctttggcgatatttctttgctttttttttttttaacaactttccatttttagatgtttcgttgaatctatttagagcttcaccatggcaatatgtatttcccttaaaacactgcaaacaaatatactaggagtgtgcccttttaatctttactagttattgtgagattgctgtgtaagctaataaacacatttgtaaatacattgtttgcaggaagaaaacttcgagttacaggtcaggaaaagcctgctgaatttatgttgtaaacgttacttaacacagtataaagatgaaaagacaacaaaagtatcttcatacttcctcatcccctcattgcaacaaaaccttaaactgggagaaccttagtcccctctctttcctcttcctcctccacttcccacttattgtcactttgtaatattcagagagcacttggattatggatctgaatagagaaatgcttacagataatcattagcccacataccagtaacttatacttaaagatgggatggagttataaagtgcttttataatacaatataattgctaaaggcaagggttgactctttgttttattttgacatggcatgtcctgaaataaatattgattcactatg

SEQ ID NO: 173308 - DNA, 2244 bp, Homo sapiens
  Payload ID: 14067
  Gene Symbol: RAB7A
  Gene Name: RAB7A, member RAS oncogene family
  Uniprot ID: P51149
  ENST ID: ENST00000265062
  CDS Start-End: 247-870
gtctcgtgacaggtacttccgctcggggcggcggcggtggcggaagtgggagcgggcctggagtcttggccataaagcctgaggcggcggcagcggcggagttggcggcttggagagctcgggagagttccctggaaccagaacttggaccttctcgcttctgtcctccgtttagtctcctcctcggcgggagccctcgcgacgcgcccggcccggagcccccagcgcagcggccgcgtttgaaggatgacctctaggaagaaagtgttgctgaaggttatcatcctgggagattctggagtcgggaagacatcactcatgaaccagtatgtgaataagaaattcagcaatcagtacaaagccacaataggagctgactttctgaccaaggaggtgatggtggatgacaggctagtcacaatgcagatatgggacacagcaggacaggaacggttccagtctctcggtgtggccttctacagaggtgcagactgctgcgttctggtatttgatgtgactgcccccaacacattcaaaaccctagatagctggagagatgagtttctcatccaggccagtccccgagatcctgaaaacttcccatttgttgtgttgggaaacaagattgacctcgaaaacagacaagtggccacaaagcgggcacaggcctggtgctacagcaaaaacaacattccctactttgagaccagtgccaaggaggccatcaacgtggagcaggcgttccagacgattgcacggaatgcacttaagcaggaaacggaggtggagctgtacaacgaatttcctgaacctatcaaactggacaagaatgaccgggccaaggcctcggcagaaagctgcagttgctgagggggcagtgagagttgagcacagagtccttcacaaaccaagaacacacgtaggccttcaacacaattcccctctcctcttccaaacaaaacatacattgatctctcacatccagctgccaaaagaaaaccccatcaaacacagttacaccccacatatctctcacacacacacacacacgcacacacacacacacagatctgacgtaatcaaactccagcccttgcccgtgatggctccttggggtctgcctgcccacccacatgagcccgcgagtatggcagcaggacaagccagcggtggaagtcattctgatatggagttggcattggaagcttattctttttgttcactggagagagagagaactgtttacagttaatctgtgtctaattatctgattttttttattggtcttgtggtctttttaccccccctttcccctccctccttgaaggctaccccttgggaaggctggtgccccatgccccattacaggctcacacccagtctgatcaggctgagttttgtatgtatctatctgttaatgcttgttacttttaactaatcagatctttttacagtatccatttattatgtaatgcttcttagaaaagaatcttatagtacatgttaatatatgcaaccaattaaaatgtataaattagtgtaagaaattcttggattatgtgtttaagtcctgtaatgcaggcctgtaaggtggagggttgaaccctgtttggattgcagagtgttactcagaattgggaaatccagctagcggcagtattctgtacagtagacacaagaattatgtacgccttttatcaaagacttaagagccaaaaagcttttcatctctccagggggaaaactgtctagttcccttctgtgtctaaattttccaaaacgttgatttgcataatacagtggtatgtgcaatggataaattgccgttatttcaaaaattaaaattctcattttctttcttttttttcccccctgctccacacttcaaaactcccgttagatcagcattctactacaagagtgaaaggaaaaccctaacagatctgtcctagtgattttacctttgttctagaaggcgctcctttcagggttgtggtattcttaggttagcggagctttttcctcttttccccacccatctccccaatattgcccattattaattaacctctttctttggttggaaccctggcagttctgctcccttcctaggatctgcccctgcattgtagcttgcttaacggagcacttctcctttttccaaaggtctacattctagggtgtgggctgagttcttctgtaaagagatgaacgcaatgccaataaaattgaacaagaacaatg

SEQ ID NO: 173309 - DNA, 533 bp, Homo sapiens
  Payload ID: 14067
  Gene Symbol: RAB7A
  Gene Name: RAB7A, member RAS oncogene family
  ENST ID: ENST00000483906
  CDS Start-End: 10-414
gtttgaaggatgacctctaggaagaaagtgttgctgaaggttatcatcctgggagattctggagtcgggaagacatcactcatgaaccagtatgtgaataagaaattcagcaatcagtacaaagccacaataggagctgactttctgaccaaggaggtgatggtggatgacaggctagtcacaatgcaggtggccacaaagcgggcacaggcctggtgctacagcaaaaacaacattccctactttgagaccagtgccaaggaggccatcaacgtggagcaggcgttccagacgattgcacggaatgcacttaagcaggaaacggaggtggagctgtacaacgaatttcctgaacctatcaaactggacaagaatgaccgggccaaggcctcggcagaaagctgcagttgctgagggggcagtgagagttgagcacagagtccttcacaaaccaagaacacacgtaggccttcaacacaattcccctctcctcttccaaacaaaacatacattgatctctcacatccagctgc

SEQ ID NO: 173310 - DNA, 329 bp, Homo sapiens
  Payload ID: 14067
  Gene Symbol: RAB7A
  Gene Name: RAB7A, member RAS oncogene family
  ENST ID: ENST00000493186
  CDS Start-End: 10-306
gtttgaaggatgacctctaggaagaaagtgttgctgaaggttatcatcctgggagattctggagtcgggaagacatcactcatgaaccagtatgtgaataagaaattcagcaatcagtacaaagccacaataggagctgactttctgaccaaggaggccatcaacgtggagcaggcgttccagacgattgcacggaatgcacttaagcaggaaacggaggtggagctgtacaacgaatttcctgaacctatcaaactggacaagaatgaccgggccaaggcctcggcagaaagctgcagttgctgagggggcagtgagagttgagcaca

SEQ ID NO: 173311 - DNA, 1589 bp, Homo sapiens
  Payload ID: 14067
  Gene Symbol: RAB7A
  Gene Name: RAB7A, member RAS oncogene family
  ENST ID: ENST00000482525
  CDS Start-End: 176-658
ataaagcctgaggcggcggcagcggcggagttggcggcttggagagctcgggagagttccctggaaccagaacttggaccttctcgcttctgtcctccgtttagtctcctcctcggcgggagccctcgcgacgcgcccggcccggagcccccagcgcagcggccgcgtttgaaggatgacctctaggaagaaagtgttgctgaaggttatcatcctgggagattctggagtcgggaagacatcactcatgaaccagtatgtgaataagaaattcagcaatcagtacaaagccacaataggagctgactttctgaccaaggaggtgatggtggatgacaggctagtcacaatgcagatatgggacacagcaggacaggaacggttccagtctctcggtgtggccttctacagaggtgcagactgctgcgttctggtggccacaaagcgggcacaggcctggtgctacagcaaaaacaacattccctactttgagaccagtgccaaggaggccatcaacgtggagcaggcgttccagacgattgcacggaatgcacttaagcaggaaacggaggtggagctgtacaacgaatttcctgaacctatcaaactggacaagaatgaccgggccaaggcctcggcagaaagctgcagttgctgagggggcagtgagagttgagcacagagtccttcacaaaccaagaacacacgtaggccttcaacacaattcccctctcctcttccaaacaaaacatacattgatctctcacatccagctgccaaaagaaaaccccatcaaacacagttacaccccacatatctctcacacacacacacacacgcacacacacacacacagatctgacgtaatcaaactccagcccttgcccgtgatggctccttggggtctgcctgcccacccacatgagcccgcgagtatggcagcaggacaagccagcggtggaagtcattctgatatggagttggcattggaagcttattctttttgttcactggagagagagagaactgtttacagttaatctgtgtctaattatctgattttttttattggtcttgtggtctttttaccccccctttcccctccctccttgaaggctaccccttgggaaggctggtgccccatgccccattacaggctcacacccagtctgatcaggctgagttttgtatgtatctatctgttaatgcttgttacttttaactaatcagatctttttacagtatccatttattatgtaatgcttcttagaaaagaatcttatagtacatgttaatatatgcaaccaattaaaatgtataaattagtgtaagaaattcttggattatgtgtttaagtcctgtaatgcaggcctgtaaggtggagggttgaaccctgtttggattgcagagtgttactcagaattgggaaatccagctagcggcagtattctgtacagtagacacaagaattatgtacgccttttatcaaagacttaagagccaaaaagcttttcatctctccagggggaaaactgtctagttcccttctgtgtctaaattttccaaaacgttgatttgcataatacagt

SEQ ID NO: 173312 - DNA, 576 bp, Homo sapiens
  Payload ID: 14067
  Gene Symbol: RAB7A
  Gene Name: RAB7A, member RAS oncogene family
  ENST ID: ENST00000464496
  CDS Start-End: 126-576
tagcaggaaggttcagggccctgcactgttggggctgctcagacatttgtgcaagggaggtgttttgttttggtgtttccatcacactcacagtgatttctccttttccccctttagtttgaaggatgacctctaggaagaaagtgttgctgaaggttatcatcctgggagattctggagtcgggaagacatcactcatgaaccagtatgtgaataagaaattcagcaatcagtacaaagccacaataggagctgactttctgaccaaggaggtgatggtggatgacaggctagtcacaatgcagatatgggacacagcaggacaggaacggttccagtctctcggtgtggccttctacagaggtgcagactgctgcgttctggtatttgatgtgactgcccccaacacattcaaaaccctagatagctggagagatgagtttctcatccaggccagtccccgagatcctgaaaacttcccatttgttgtgttgggaaacaagattgacctcgaaaacagacaagtggccacaaagcgggcacaggcctggtgctacagcaaaaacaacattccct

SEQ ID NO: 173313 - DNA, 507 bp, Homo sapiens
  Payload ID: 14067
  Gene Symbol: RAB7A
  Gene Name: RAB7A, member RAS oncogene family
  ENST ID: ENST00000485280
  CDS Start-End: 10-285
gtttgaaggatgacctctaggaagaaagtgttgctgaaggttatcatcctgggagattctggagtcgggaagacatcactcatgaaccagtatgtgaataagaaattcagcaatcagtacaaagccacaataggagctgactttctgaccaaggaggtgatggtggatgacaggctagtcacaatgcaggaaacggaggtggagctgtacaacgaatttcctgaacctatcaaactggacaagaatgaccgggccaaggcctcggcagaaagctgcagttgctgagggggcagtgagagttgagcacagagtccttcacaaaccaagaacacacgtaggccttcaacacaattcccctctcctcttccaaacaaaacatacattgatctctcacatccagctgccaaaagaaaaccccatcaaacacagttacaccccacatatctctcacacacacacacacacgcacacacacacacacagatctgacgtaatcaaactccagcc

SEQ ID NO: 173314 - DNA, 359 bp, Homo sapiens
  Payload ID: 14067
  Gene Symbol: RAB7A
  Gene Name: RAB7A, member RAS oncogene family
  ENST ID: ENST00000490093
  CDS Start-End: 10-359
gtttgaaggatgacctctaggaagaaagtgttgctgaaggttatcatcctgggagattctggagtcgggaagacatcactcatgaaccagtatgtgaataagaaattcagcaatcagtacaaagccacaataggagctgactttctgaccaaggaggtgatggtggatgacaggctagtcacaatgcagatatgggacacagcaggacaggaacggttccagtctctcggtgtggccttctacagaggtgcagactgctgcgttctggtatttgatgtgactgcccccaacacaaagcgggcacaggcctggtgctacagcaaaaacaacattccctactttgagaccagtgccaagga

SEQ ID NO: 173315 - DNA, 3014 bp, Homo sapiens
  Payload ID: 14068
  Gene Symbol: RAB7B
  Gene Name: RAB7B, member RAS oncogene family
  Uniprot ID: Q96AH8
  ENST ID: ENST00000617991
  CDS Start-End: 305-904
tggcactccaggctgcctccaagagcagggttggtagagctgagggatgagagatttgcctgtcctggagagtcaccacccttccagctttggggaggcccccagggaaagtgagggagaagatatatgaagattgctgaattacgtgcctccttcggagaaccccacccagtcccgggcccagggcagtaacttgcccattggaaaggggaaagcagaggccacactcagtgacaatggccacaaggaacattggctagcatgtggatgacctctgtttccttacaggctctgaagcccttccatgaatccccggaagaaggtggacctgaaactcattatcgtcggagccattggtgtgggaaagacctccctccttcaccaatatgtgcacaagacgttttatgaggaataccagaccacactgggggccagcatcctctccaagattatcatattgggtgacacaactttgaagttacagatctgggacacgggcggtcaggagcggttccgctccatggtgtccacgttctacaagggctccgatggctgcatcctagcttttgatgtcaccgacctggagtcttttgaagccctggatatctggcggggtgatgtcctggccaagattgtccccatggagcagtcctaccccatggtgttgttggggaacaagatcgatctggcagaccggaaggtaccccaggaagtagctcaaggctggtgtagagagaaagatattccttactttgaagtcagtgccaagaatgacatcaatgtggtgcaagcgtttgagatgctggccagtagggctctgtcgaggtaccagagcatcttagaaaatcacctcacagaatccatcaagctctcgccagaccagtcaaggagcagatgctgctgacctccagacgcctgctctggaagcccagaaacagagcctgccccgagcctggtcaccccaggcttgagaacaggtgaccatccccctccagccccactgcctgcccaagcacagtgcagggggcctaagctctgcggcagagcccttgaccctggtgctgggcccagagtcagagggcagcccctggctcaggctgagtatagtgagagcgtctggatgaagcccggaatgtcagagccaaaccctggtcctgcagaagtcaccgtttccgcagtggctccagctttccccacccatccacccctcaaacactcccgctccagaacacacatctccgcagaccggccactgattggagtctggttacatcctcctgtggacagaccttcctcacccgctcccacctcacacccctcagccacaagcaaagctttggacaatggcacagctcagcctccttcaacgagcagactaaggagtaaaggtctggaccccacatgctgggcccgcctcagctcctggcagaagctgtcgtgcctgagaccccctctgctccctccagggtagaagactgagggagcacaggagaagccacaagggaccatggctcattcctccttgctgggtgctcaggcaactcacataaatctctgagtctcaatttgtttatctgtcctgtgggggtgagatgtgccttgccccctgtatcacagtgtggttttgaggaccagaagctgtgcttaaatccagtagctgttgtcaatatgcatttatttacttctttgacaagtttatttttgcgtatctactatgtacgatgcattgaagtccagtgacaaacaaaacacagggactctgccctcctggagccgacatctggtgagggagagacgcagactctagacagatatttccaaatagcaggtaagtgctataaacaaagggaaacagggtaatgggatagagtgacagggggtgggatgagttgctattttagatgaagtggtccaggagggcttccctgaggaggtggcatttggtctgagggctagagaatgagaaagcagctgtcacctgagagctggagaaagaacattccagggagagggagcatcaagacccaaagccctgaggcaaaaacaagcttgccatgttccaggaacagtgaaaggacatccattgacctaatactcaaagctgctgtcccaaagacaaagcaaaggggacccagctcccttgggtggctcctagatgctctgctgcctgaccaccagagggcagcagtgctccttctcttccaggctgagcagaaagtggatgctcatgaaggttttaggagctggggttttgtccttcagatgctcaaagcttgttcatgggcttggaggcatgtttagccctttgggatttgtaaggcagagaattccaatttcttaagcctagtaagaaatgagcaaaaacttcaatatatatgactcaggcaagaaatcagcatctgtggcaaatactagaatgaaatgcaagaaagctcactgcaaggagtctccctccctgcagattccaaggctggaatctttttcttctggctccaggcagcacagacagggcctagcctggagagggtggacaagatgtcctctcagggtcttcaatggccaagtccatgcccactgcagaatctttctgtctacccgtaagtatcctttcctgagttccaggcaaagctggggatgttagcctatgactgtcatctgacttggaaggtacacctaggggccggggggaggtcagcaggggagtttgggagccacttctccccccacgtggcactggagtgtgaactggctcattctggacaccagcatggagccagcacgggaacaggggggcagcctagagcacaagctctatctgtgtccttcagagctcctgggaaacatgatgcgccctcatgggaatggcattttgcatatcacacaggctgtcctgggagtcaggcagactggattgtcacgtgcggtgtgcatgcagcagcttgtgcactgcagtggacctgtggaccatttctaaaggtgcacaacaaataataaatgtgtccttctttgttttt

SEQ ID NO: 173316 - DNA, 2888 bp, Homo sapiens
  Payload ID: 14068
  Gene Symbol: RAB7B
  Gene Name: RAB7B, member RAS oncogene family
  Uniprot ID: Q96AH8
  ENST ID: ENST00000617070
  CDS Start-End: 178-777
gggaagtggcgtggcttcaacagactttcttttgcctgtctttgtcccagagcctcttccctggccctgctgagaccactgctctaagaagagaccaccagactgagagaggactcccagctgccctcagagcggaggccgagtgctgcacagccacagctgctctgaagcccttccatgaatccccggaagaaggtggacctgaaactcattatcgtcggagccattggtgtgggaaagacctccctccttcaccaatatgtgcacaagacgttttatgaggaataccagaccacactgggggccagcatcctctccaagattatcatattgggtgacacaactttgaagttacagatctgggacacgggcggtcaggagcggttccgctccatggtgtccacgttctacaagggctccgatggctgcatcctagcttttgatgtcaccgacctggagtcttttgaagccctggatatctggcggggtgatgtcctggccaagattgtccccatggagcagtcctaccccatggtgttgttggggaacaagatcgatctggcagaccggaaggtaccccaggaagtagctcaaggctggtgtagagagaaagatattccttactttgaagtcagtgccaagaatgacatcaatgtggtgcaagcgtttgagatgctggccagtagggctctgtcgaggtaccagagcatcttagaaaatcacctcacagaatccatcaagctctcgccagaccagtcaaggagcagatgctgctgacctccagacgcctgctctggaagcccagaaacagagcctgccccgagcctggtcaccccaggcttgagaacaggtgaccatccccctccagccccactgcctgcccaagcacagtgcagggggcctaagctctgcggcagagcccttgaccctggtgctgggcccagagtcagagggcagcccctggctcaggctgagtatagtgagagcgtctggatgaagcccggaatgtcagagccaaaccctggtcctgcagaagtcaccgtttccgcagtggctccagctttccccacccatccacccctcaaacactcccgctccagaacacacatctccgcagaccggccactgattggagtctggttacatcctcctgtggacagaccttcctcacccgctcccacctcacacccctcagccacaagcaaagctttggacaatggcacagctcagcctccttcaacgagcagactaaggagtaaaggtctggaccccacatgctgggcccgcctcagctcctggcagaagctgtcgtgcctgagaccccctctgctccctccagggtagaagactgagggagcacaggagaagccacaagggaccatggctcattcctccttgctgggtgctcaggcaactcacataaatctctgagtctcaatttgtttatctgtcctgtgggggtgagatgtgccttgccccctgtatcacagtgtggttttgaggaccagaagctgtgcttaaatccagtagctgttgtcaatatgcatttatttacttctttgacaagtttatttttgcgtatctactatgtacgatgcattgaagtccagtgacaaacaaaacacagggactctgccctcctggagccgacatctggtgagggagagacgcagactctagacagatatttccaaatagcaggtaagtgctataaacaaagggaaacagggtaatgggatagagtgacagggggtgggatgagttgctattttagatgaagtggtccaggagggcttccctgaggaggtggcatttggtctgagggctagagaatgagaaagcagctgtcacctgagagctggagaaagaacattccagggagagggagcatcaagacccaaagccctgaggcaaaaacaagcttgccatgttccaggaacagtgaaaggacatccattgacctaatactcaaagctgctgtcccaaagacaaagcaaaggggacccagctcccttgggtggctcctagatgctctgctgcctgaccaccagagggcagcagtgctccttctcttccaggctgagcagaaagtggatgctcatgaaggttttaggagctggggttttgtccttcagatgctcaaagcttgttcatgggcttggaggcatgtttagccctttgggatttgtaaggcagagaattccaatttcttaagcctagtaagaaatgagcaaaaacttcaatatatatgactcaggcaagaaatcagcatctgtggcaaatactagaatgaaatgcaagaaagctcactgcaaggagtctccctccctgcagattccaaggctggaatctttttcttctggctccaggcagcacagacagggcctagcctggagagggtggacaagatgtcctctcagggtcttcaatggccaagtccatgcccactgcagaatctttctgtctacccgtaagtatcctttcctgagttccaggcaaagctggggatgttagcctatgactgtcatctgacttggaaggtacacctaggggccggggggaggtcagcaggggagtttgggagccacttctccccccacgtggcactggagtgtgaactggctcattctggacaccagcatggagccagcacgggaacaggggggcagcctagagcacaagctctatctgtgtccttcagagctcctgggaaacatgatgcgccctcatgggaatggcattttgcatatcacacaggctgtcctgggagtcaggcagactggattgtcacgtgcggtgtgcatgcagcagcttgtgcactgcagtggacctgtggaccatttctaaaggtgcacaacaaataataaatgtgtccttctttgttttta

SEQ ID NO: 173317 - DNA, 1851 bp, Homo sapiens
  Payload ID: 14068
  Gene Symbol: RAB7B
  Gene Name: RAB7B, member RAS oncogene family
  ENST ID: ENST00000623893
  CDS Start-End: 226-699
gcaactttcccaagtctgtgcacgagagggagaggaggaaaactcagagggaagtggcgtggcttcaacagactttcttttgcctgtctttgtcccagagcctcttccctggccctgctgagaccactgctctaagaagagaccaccagactgagagaggactcccagctgccctcagagcggaggccgagtgctgcacagccacagctgctctgaagcccttccatgaatccccggaagaaggtggacctgaaactcattatcgtcggagccattggtgtgggaaagacctccctccttcaccaatatgtgcacaagacgttttatgaggaataccagaccacactgggggccagcatcctctccaagattatcatattgggtgacacaactttgaagttacagatctgggacacgggcggtcaggagcggttccgctccatggtgtccacgttctacaagggctccgatggctgcatcctagcttttgatgtcaccgacctggagtcttttgaagccctggatatctggcggggtgatgtcctggccaagattgtccccatggagcagtcctaccccatggtgttgttggggaacaagatcgatctggcagaccggaagtaccagagcatcttagaaaatcacctcacagaatccatcaagctctcgccagaccagtcaaggagcagatgctgctgacctccagacgcctgctctggaagcccagaaacagagcctgccccgagcctggtcaccccaggcttgagaacaggtgaccatccccctccagccccactgcctgcccaagcacagtgcagggggcctaagctctgcggcagagcccttgaccctggtgctgggcccagagtcagagggcagcccctggctcaggctgagtatagtgagagcgtctggatgaagcccggaatgtcagagccaaaccctggtcctgcagaagtcaccgtttccgcagtggctccagctttccccacccatccacccctcaaacactcccgctccagaacacacatctccgcagaccggccactgattggagtctggttacatcctcctgtggacagaccttcctcacccgctcccacctcacacccctcagccacaagcaaagctttggacaatggcacagctcagcctccttcaacgagcagactaaggagtaaaggtctggaccccacatgctgggcccgcctcagctcctggcagaagctgtcgtgcctgagaccccctctgctccctccagggtagaagactgagggagcacaggagaagccacaagggaccatggctcattcctccttgctgggtgctcaggcaactcacataaatctctgagtctcaatttgtttatctgtcctgtgggggtgagatgtgccttgccccctgtatcacagtgtggttttgaggaccagaagctgtgcttaaatccagtagctgttgtcaatatgcatttatttacttctttgacaagtttatttttgcgtatctactatgtacgatgcattgaagtccagtgacaaacaaaacacagggactctgccctcctggagccgacatctggtgagggagagacgcagactctagacagatatttccaaatagcaggtaagtgctataaacaaagggaaacagggtaatgggatagagtgacagggggtgggatgagttgctattttagatgaagtggtccaggagggcttccctgaggaggtggcatttggtctgagggctagagaatgagaaagcagctgtcacctgagagctggagaaagaacattccagggagagggagcatcaagacccaaagccctgaggcaaaaacaagcttgccat

SEQ ID NO: 173318 - DNA, 2330 bp, Homo sapiens
  Payload ID: 14068
  Gene Symbol: RAB7B
  Gene Name: RAB7B, member RAS oncogene family
  Uniprot ID: Q96AH8
  ENST ID: ENST00000623597
  CDS Start-End: 289-888
ctccaagagcagggttggtagagctgagggatgagagatttgcctgtcctggagagtcaccacccttccagctttggggaggcccccagggaaagtgagggagaagatatatgaagattgctgaattacgtgcctccttcggagaaccccacccagtcccgggcccagggcagtaacttgcccattggaaaggggaaagcagaggccacactcagtgacaatggccacaaggaacattggctagcatgtggatgacctctgtttccttacaggctctgaagcccttccatgaatccccggaagaaggtggacctgaaactcattatcgtcggagccattggtgtgggaaagacctccctccttcaccaatatgtgcacaagacgttttatgaggaataccagaccacactgggggccagcatcctctccaagattatcatattgggtgacacaactttgaagttacagatctgggacacgggcggtcaggagcggttccgctccatggtgtccacgttctacaagggctccgatggctgcatcctagcttttgatgtcaccgacctggagtcttttgaagccctggatatctggcggggtgatgtcctggccaagattgtccccatggagcagtcctaccccatggtgttgttggggaacaagatcgatctggcagaccggaaggtaccccaggaagtagctcaaggctggtgtagagagaaagatattccttactttgaagtcagtgccaagaatgacatcaatgtggtgcaagcgtttgagatgctggccagtagggctctgtcgaggtaccagagcatcttagaaaatcacctcacagaatccatcaagctctcgccagaccagtcaaggagcagatgctgctgacctccagacgcctgctctggaagcccagaaacagagcctgccccgagcctggtcaccccaggcttgagaacaggtgaccatccccctccagccccactgcctgcccaagcacagtgcagggggcctaagctctgcggcagagcccttgaccctggtgctgggcccagagtcagagggcagcccctggctcaggctgagtatagtgagagcgtctggatgaagcccggaatgtcagagccaaaccctggtcctgcagaagtcaccgtttccgcagtggctccagctttccccacccatccacccctcaaacactcccgctccagaacacacatctccgcagaccggccactgattggagtctggttacatcctcctgtggacagaccttcctcacccgctcccacctcacacccctcagccacaagcaaagctttggacaatggcacagctcagcctccttcaacgagcagactaaggagtaaaggtctggaccccacatgctgggcccgcctcagctcctggcagaagctgtcgtgcctgagaccccctctgctccctccagggtagaagactgagggagcacaggagaagccacaagggaccatggctcattcctccttgctgggtgctcaggcaactcacataaatctctgagtctcaatttgtttatctgtcctgtgggggtgagatgtgccttgccccctgtatcacagtgtggttttgaggaccagaagctgtgcttaaatccagtagctgttgtcaatatgcatttatttacttctttgacaagtttatttttgcgtatctactatgtacgatgcattgaagtccagtgacaaacaaaacacagggactctgccctcctggagccgacatctggtgagggagagacgcagactctagacagatatttccaaatagcaggcagcacagacagggcctagcctggagagggtggacaagatgtcctctcagggtcttcaatggccaagtccatgcccactgcagaatctttctgtctacccgtaagtatcctttcctgagttccaggcaaagctggggatgttagcctatgactgtcatctgacttggaaggtacacctaggggccggggggaggtcagcaggggagtttgggagccacttctccccccacgtggcactggagtgtgaactggctcattctggacaccagcatggagccagcacgggaacaggggggcagcctagagcacaagctctatctgtgtccttcagagctcctgggaaacatgatgcgccctcatgggaatggcattttgcatatcacacaggctgtcctgggagtcaggcagactggattgtcacgtgcggtgtgcatgcagcagcttgtgcactgcagtggacctgtggaccatttctaaaggtgcacaacaaataataaatgtgtccttctttgttttt

SEQ ID NO: 173319 - DNA, 689 bp, Homo sapiens
  Payload ID: 14068
  Gene Symbol: RAB7B
  Gene Name: RAB7B, member RAS oncogene family
  ENST ID: ENST00000622969
  CDS Start-End: 1-275
tggatatctggcggggtgatgtcctggccaagattgtccccatggagcagtcctaccccatggtgttgttggggaacaagatcgatctggcagaccggaaggtaccccaggaagtagctcaaggctggtgtagagagaaagatattccttactttgaagtcagtgccaagaatgacatcaatgtggtgcaagcgtttgagatgctggccagtagggctctgtcgaggccctcactgtctcgggaaaggaaaagcagagaggtgtccctctcttagtgcttggtcaagaagtgtggctttattacatgggcggtgtagttggctcctgaagcacaggcgtgcctgctcttgctgtcctcctggagtgctgaggaatgctgtttgaccttggtggtgatattgatcaataatcctccacaagcacagtgcagcgactgccaaatgcttagtcaccaggaagtgtccatcagcccacagcccgtgtctgtgcatgcttagcacctgtcctatctggggaaggagtatcctttattcttcaaatggtgtccttcctactatattgtggttaaatcaggtccttctgactgtgtcgctgttatgacatggtgctgttagtagacagtggcttgtctgcttgcattttttttataacaccctttcttggcaaaagaataaatgggtagcaatcca

SEQ ID NO: 173320 - DNA, 2827 bp, Homo sapiens
  Payload ID: 14069
  Gene Symbol: RAB8A
  Gene Name: RAB8A, member RAS oncogene family
  Uniprot ID: P61006
  ENST ID: ENST00000300935
  CDS Start-End: 274-897
gaagccccgcgactcttcactgctggtcaatcagagcccgtgctctccctagtgccggccaatgggaggtgcgctcgggctgcttccggctccgcgctccgctcgccccctcccaaggtctccccgcgactggcgggacgcaggggcgggcgtcggccgcggtgacgcgcagcgggcctggagccaataaggggcgggctcggtgctgatggacggtgctggtggccagtggagaggcgctggccgcacttcccgtcggggagagagtgtaatatggcgaagacctacgattacctgttcaagctgctgctgatcggggactcgggggtggggaagacctgtgtcctgttccgcttctccgaggacgccttcaactccacttttatctccaccataggaattgactttaaaattaggaccatagagctcgatggcaagagaattaaactgcagatatgggacacagccggtcaggaacggtttcggacgatcacaacggcctactacaggggtgcaatgggcatcatgctggtctacgacatcaccaacgagaagtccttcgacaacatccggaactggattcgcaacattgaggagcacgcctctgcagacgtcgaaaagatgatactcgggaacaagtgtgatgtgaatgacaagagacaagtttccaaggaacggggagaaaagctggccctcgactatggaatcaagttcatggagaccagcgcgaaggccaacatcaatgtggaaaatgcatttttcactctcgccagagatatcaaagcaaaaatggacaaaaaattggaaggcaacagcccccaggggagcaaccagggagtcaaaatcacaccggaccagcagaagaggagcagctttttccgatgtgttcttctgtgaggaacaccgccttactctgagcctcgctcagcccagctgactgtgcctgttctgagtgagcccctcactcagccggggccctcccacctccaacgccccgcccacgccgcggccaccgggcccacggccaccagaatgcaattgagaaatcgtttattttagtaactgtctgatctttttcaactttggagatggaataagttaaaaatttgctatttttcctgtaacatctgctgaacgggcccacccacacgttgtatattcagagagagagagggagtcaaggtgtgaccgtcgaccacagccagtgtcaggcctctgcctctgggcctttgctttgtggcctcactgcaacacaaagctccaccaggaggctggttcacgtcccctaccacggaagcgaggtcccagaaggccagcggtggttccaggagcaacagctcccaaaccctgagcaaggcaaccgatcgccaggaccaggaagcatcacccaggagatttggcgcccacttccacctcttctctcagttttggacaagtgacaaaccattttgccccctcactcttcttttttaactgttaaaccaaaggaaagcacaaatgaaggaaatcctgtgtaaagcattgagaaggaaagaagcctggagcagcctctcctgtccacagccaggggttaggtctgcaggcccgtctgcggtccccatcgagcatcaaggggacgctgtgtgtgctgcaagtgaccccgaaaacaaccacagccgtcacatggtcctcctgaagttggggcaccctcctctcagcaccaaaatggcccccactccttcgtgtcctcccgctatctccaaatcggacgttctttctagctgagatttttatttttccacatctgtagtgccatgaagcgattctgtctttgacttccaatggcaaacctgggtgatcgggaacaagcacgttgtacccttggctggacatggccaagacacaaggcattccacggcggcaagctgaccgcacagcagtctggcttgattttcagccgtcatcattgggttctgttttgacagctctgctgtcccatagggactgcgactgggaccaggtcaaccacgccaggggggtgtcaccagccttttctttttttctttctttttttttttttcctccttaagctgctgtcaatccaaaccattggcatcatcgtttcttttgaattaaaaccaacatatcagcaatagtctgctctccccgggaatctctaacatgctctgtttacatcgataaatgcacttaaggaaaacaaacaaattaaagctcatcttaaagtccaaggatttttatgtccacattttccctgtaggccacacggacatggccaggtgctgggggtgggtctggacaagatggtagagcccatggattaccccatcgagcggccacctcagaggagatgccacccatcatcaaaagactaaattgggaaaagaagcctcctggcttggtgcagtggctcacacctgtaatcccagcactctgggaggccaaggcgggctgatcacttgagctcaggtgttcgagaccagcctggccaacatggtgagcctgcgtcacctggcttctggcacacagctcggccactgtgtccctcctgcctccctggcaggtccttctaggggccctctcctggctggctttccagggcattccttccactctatccagggtccttcccaagaccacacccaggtccagtcattccctaggacttggcagagagctgtactcacagccaagatcacagcaaaatcagcaaagggaaaaggcatgcagagtgaagtccagaggcaaccagacagaagcatccagaatcctctcacagtggggtcacacaccccatgcttaactcccccaacaatgagttgtaacaaca

SEQ ID NO: 173321 - DNA, 1315 bp, Homo sapiens
  Payload ID: 14069
  Gene Symbol: RAB8A
  Gene Name: RAB8A, member RAS oncogene family
  Uniprot ID: P61006
  ENST ID: ENST00000586682
  CDS Start-End: 6-629
gtaatatggcgaagacctacgattacctgttcaagctgctgctgatcggggactcgggggtggggaagacctgtgtcctgttccgcttctccgaggacgccttcaactccacttttatctccaccataggaattgactttaaaattaggaccatagagctcgatggcaagagaattaaactgcagatatgggacacagccggtcaggaacggtttcggacgatcacaacggcctactacaggggtgcaatgggcatcatgctggtctacgacatcaccaacgagaagtccttcgacaacatccggaactggattcgcaacattgaggagcacgcctctgcagacgtcgaaaagatgatactcgggaacaagtgtgatgtgaatgacaagagacaagtttccaaggaacggggagaaaagctggccctcgactatggaatcaagttcatggagaccagcgcgaaggccaacatcaatgtggaaaatagatatcaaagcaaaaatggacaaaaaattggaaggcaacagcccccaggggagcaaccagggagtcaaaatcacaccggaccagcagaagaggagcagctttttccgatgtgttcttctgtgaggaacaccgccttactctgagcctcgctcagcccagctgactgtgcctgttctgagtgagcccctcactcagccggggccctcccacctccaacgccccgcccacgccgcggccaccgggcccacggccaccagaatgcaattgagaaatcgtttattttagtaactgtctgatctttttcaactttggagatggaataagttaaaaatttgctatttttcctgtaacatctgctgaacgggcccacccacacgttgtatattcagagagagagagggagtcaaggtgtgaccgtcgaccacagccagtgtcaggcctctgcctctgggcctttgctttgtggcctcactgcaacacaaagctccaccaggaggctggttcacgtcccctaccacggaagcgaggtcccagaaggccagcggtggttccaggagcaacagctcccaaaccctgagcaaggcaaccgatcgccaggaccaggaagcatcacccaggagatttggcgcccacttccacctcttctctcagttttggacaagtgacaaaccattttgccccctcactcttcttttttaactgttaaaccaaaggaaagcacaaatgaaggaaatcctgtgtaaagcattgagaaggaaagaagcctggagcagcctctcctgtccacagccaggggttaggtctgcaggcccgtctgcggtccccatcg

SEQ ID NO: 173322 - DNA, 4943 bp, Homo sapiens
  Payload ID: 14070
  Gene Symbol: RAB8B
  Gene Name: RAB8B, member RAS oncogene family
  Uniprot ID: Q92930
  ENST ID: ENST00000321437
  CDS Start-End: 157-780
gggcggggcgcgcaggccttctccgagaggaggggcggggcgtggggcggggcgagcagcggcggattggcgggcacgccccctcgcccgcggccccctccccgcctctctccaccgcctcctctggctccccggtcagagggccggagcgagaagatggcgaagacgtacgattatctcttcaagctcctgctgatcggcgactcgggggtaggcaagacctgcctcctgttccgcttctcagaggacgccttcaacaccaccttcatctccaccatcggaattgattttaaaattagaacgatagaactagatggaaagaaaattaagcttcagatatgggacacagcgggtcaggaaagattccgaacaatcacgacagcgtactacagaggagccatgggcattatgctggtctatgacatcacaaatgaaaaatcctttgacaatattaaaaattggatcagaaacattgaagagcatgcctcttccgatgtcgaaagaatgatcctgggtaacaaatgtgatatgaatgacaaaagacaagtgtcaaaagaaagaggggagaagctagcaattgactatgggattaaattcttggagacaagcgcaaaatccagtgcaaatgtagaagaggcattttttacacttgcacgagatataatgacaaaactcaacagaaaaatgaatgacagcaattcagcaggagcaggtggaccagtgaaaataacagaaaaccgatcaaagaagaccagtttctttcgttgctcgctactttgatgaactctttctgagagactgcagcacacctagagggccctttcctgcttctctgaaagcacaggtcacccagcctcagaatcacacctcccggctgctgctgagagcaccactgaacttagacctctcaacacagtatgccaagtggattccagcctcatggcctagcaaaagaacagactccctttttcaaacatggaagcaatgaagtggagacacatgcaggacctaactcgttttttccttgttttattacctgttgcagaagcggttatctttcttttttactttgcacatcagtgttagcctttccctatttcagcacaatcttagactcatatttgcacacttttgtgtcgtgaagttctagacaaatttgtacatgtggcaatgttaaaagagcatttacagcagaggttaatatactaaaattaaagggtatttggtctggttcatatggtcaaatattactgccttggtagcatttatttaagggctttttcttaaataagaatcattaaagtcattaaaaaaatttactgaaatgcccatcttgtcatcaaaggccacaatttctttatttcttcagattaagagctttgcctcatccccgacctgttttccagagtctgggtagctgaatgaatcactttaaaatgattacctctgcctaatctatagaaactgcatttggaaatcaccataatctcatttttccctggggtttgtatttgctattctttcccatgtttgacttaagtgtaatcactcttaagtaatatttgaacattattatctgtttctatttgtgaacttcttgagctgaaattttacgtgggctgagagatataccatttagggttttagtgcagcatctaactgtgattctgtcaataaggatatgtaatatattttttcttaggttcactccttagctggctggtttagttgtaataccaaattcctaccataatccctgtctacaaaagttaggtttagattttagtttgcggaaaccttccctatatagagacagattaacttgttgatataaatttaatagagctagctcttggtaatggtgaaaataatgagttttggttggttttatttggcagatgtttttagaaataaaagtacttagacctagtgcagcctctaggaaaagtcttgccttttcattagagaaaacaggaccaaggtttcagttttcaaacagctgttgttgattgtgtagaacccagttccatctgttttggttcattgttacagaacttagtccagtcatttgggctaaagccaaccaaaagcttagttgcctttctcaacaaacactggtactggtatacttttgtagatgaaaccatcacaaggtatttagtgttaacttgtgtgccaaattcagatcactatgtcgttgttgctctagccttcagtgtcataacacaggggggataaaacagaggggatgagggaaatgaattctgttaataattattcttcctggtatgcctgttttgcttcacaaaggctactatcatgctggatagataagaacaggagatggcagtggaaagggattgcttgttaccacagagaattctcttcaaattaagatatgtcattagaatgcttggaccagtcaatcttttgtacttatttgaaaatataggaacaatttagcagctgcaaatatgcccaagctatttttaatagatatactaaacttattgttgacaaatttcagcctccttaatttttttttttttggtaattacctataggcttaaaagtcattcgttgctgttctagtataattagtagttccgtgattgaaagtttattgtaattctactatcttcaaattagatacattttcaaaaggaaaagataattttttagaaacatcttaatattcactatttcctgaaaaaatccaagcagttaacgctttctggatggtaacaaagtaccttctaaaagataagtgctatgacaccatgtatgaatgtaattctcttagtaatttacctctgactatttggtgtcttaacgctttggtttatataatctcaggggttgtctgcaaaccaaaactgacatattctgtggttagcttttattacttttttttttaacagaatgctttgctttggttatatttcttctttcttcttttgtcttatatggattaataactagtctccatgaacttcacttgaaagagcctgtaaaagttagatgagtctaaaagtgctctttgaagtagcagcaaattgggagtatatgctctgttatatagaaataaattgtccttgctattttcttacatttagctttgctagattgtatatacattgagctaagaccttaggaaattcactttctgcatgataaaatgacccaataaatattccactttgcttaataatgtacatacagtgcattattttttctatttgtagatgaatttaatgacagataattgtctgttccccgctgaaactgaagaaatctagtttttttgtgaacatttttgtggtcttatggataaggtacatgaagatttttgcagcagtattagtggttcagtggctgcactttattaatcagtgtgttaatttttgacagtgattggactagaccttttcaaatagagtctgagggtatcagacagtgaaaatgtgctgtaactaagtagcatgtaaatcagttgattgtaaaacgtttcgctgggaacttattttagctatattttacttcagacagattatgatacaataatctacctgtgcatcagttagtaggtgctgcagggtttcttactatttacagaaacattttgtgcagtctttgttataaattttcagaagactatactctttactttgaaggtctattttttaattatacctcatttagctaactagtattctaatacctggtagaaaaacagtgagccagcctttaagcatctaacaaaatttagactctttgttttgttttgaactgaagacatcattgggaaaggtaggaaatattagtttaggatagagcatacatgtcatatccagtagcataaaaaaagtattatctccctgtctccattaataaatttagctgtgcaatataggtgcgtttttgcagaagtttctagtaagagattataactccattttacaggttctgaatgctcagagtctatattaaggcttataaagtttttcctgtgatcagtaagtgacacatttaagcagacattcttttcaagttcatgacttagattcctttacaaatttagttctcaatctttaaaaaccacatttcattatgttggttaattattataaattttaagcactcatttctgcaatcaggtttctcagaattttttttttttaaacagaagagacattcctttttccttgttacatccaaggggggcacaggggtgggtggaaaggaatgtctaaaaatgaaatcccttgatatagagggacctagacggacaggatatgctaaaataatttcaaattctagcacaattttagagtagaataagtcatttttttagactaataaaattaatggctgtcatgttcactctgaaaaaaatctaaatgactgaaatgtacagaaataaaaattagcaaacaattattctagggatattttcagattttacttcatttcttgaaatgcgtgtgccatatgcaattgcatttcttgtgccaagaaactaatagaacttatttcactttacctttttttaaaatgtgaatttagttattatagttcaattttatggccttacagatggcttttattttgtttgcagctgacactgcagttcctttcatgcaaaataccataaactgtttgatgaaaatcatgcccctaatggaaactctctagtttttccatataactatcctactgtacatgtttaaacatattttatttttgctccaatggcttaatgtgaaaagctcctgcagataagtggacctgtcatgtggttaatcttgtttaagccaattcattaactgtgtactgatactgatgctatgttttttttaaatggattttattccaggtgaactttttttttataataatgttcgtctaaaataaaaactacataatgaaaatgaaaatgctaa

SEQ ID NO: 173323 - DNA, 755 bp, Homo sapiens
  Payload ID: 14070
  Gene Symbol: RAB8B
  Gene Name: RAB8B, member RAS oncogene family
  ENST ID: ENST00000559927
  CDS Start-End: 23-169
gtcagagggccggagcgagaagatggcgaagacgtacgattatctcttcaagctcctgctgatcggcgactcgggggtaggcaagacctgcctcctgttccgcttctcagaggacgccttcaacaccaccttcatctccaccatcgtgcggcctcacatagaggaataaaaacaacccattttattatcccacaaaatgtctgctaatgaagcagtgtgatgtagtggacagagtattggatttggaatcactgtcacttatagcactgtggtgttgggaattgattttaaaattagaacgatagaactagatggaaagaaaattaagcttcagatatgggacacagcgggtcaggaaagattccgaacaatcacgacagcgtactacagaggagccatgggcattatgctggtctatgacatcacaaatgaaaaatcctttgacaatattaaaaattggatcagaaacattgaagagcatgcctcttccgatgtcgaaagaatgatcctgggtaacaaatgtgatatgaatgacaaaagacaagtgtcaaaagaaagaggggagaagctagcaattgactatgggattaaattcttggagacaagcgcaaaatccagtgcaaatgtagaagaggcattttttacacttgcacgagatataatgacaaaactcaacagaaaaatgaatgacagcaattcagcaggagcaggtggaccagtgaaaataacagaaaaccgatcaaagaagaccagtt

SEQ ID NO: 173324 - DNA, 643 bp, Homo sapiens
  Payload ID: 14070
  Gene Symbol: RAB8B
  Gene Name: RAB8B, member RAS oncogene family
  ENST ID: ENST00000558990
  CDS Start-End: 66-209
ggccccctccccgcctctctccaccgcctcctctggctccccggtcagagggccggagcgagaagatggcgaagacgtacgattatctcttcaagctcctgctgatcggcgactcgggggtaggcaagacctgcctcctgttccgcttctcagaggacgccttcaacaccaccttcatctccaccatcgagcaacttccagtcctgtaagcgcctttcatgtgcggcctcacatagaggaataaaaacaacccattttattatcccacaaaatgtctgctaatgaagcagtgtgatgtagtggacagagtattggatttggaatcactgtcacttatagcactgtggtgttgggaattgattttaaaattagaacgatagaactagatggaaagaaaattaagcttcagatatgggacacagcgggtcaggaaagattccgaacaatcacgacagcgtactacagaggagccatgggcattatgctggtctatgacatcacaaatgaaaaatcctttgacaatattaaaaattggatcagaaacattgaagagcatgcctcttccgatgtcgaaagaatgatcctgggtaacaaatgtgatatgaatgacaaaagacaagtgtcaaaagaaagaggggagaag

SEQ ID NO: 173325 - DNA, 774 bp, Homo sapiens
  Payload ID: 14070
  Gene Symbol: RAB8B
  Gene Name: RAB8B, member RAS oncogene family
  ENST ID: ENST00000558119
  CDS Start-End: 32-310
ggctccccggtcagagggccggagcgagaagatggcgaagacgtacgattatctcttcaagctcctgctgatcggcgactcgggggtaggcaagacctgcctcctgttccgcttctcagaggacgccttcaacaccaccttcatctccaccatcggaattgattttaaaattagaacgatagaactagatggaaagaaaattaagcttcagatatgggacacagcgggtcaggaaagattccgaacaatcacgacagcgtactacagaggagccatggaaggaattttagggataaaaagaacatcataacagggatgatttggaatagtttacagggcattatgctggtctatgacatcacaaatgaaaaatcctttgacaatattaaaaattggatcagaaacattgaagagcatgcctcttccgatgtcgaaagaatgatcctgggtaacaaatgtgatatgaatgacaaaagacaagtgtcaaaagaaagaggggagaagctagcaattgactatgggattaaattcttggagacaagcgcaaaatccagtgcaaatgtagaagaggcattttttacacttgcacgagatataatgacaaaactcaacagaaaaatgaatgacagcaattcagcaggagcaggtggaccagtgaaaataacagaaaaccgatcaaagaagaccagtttctttcgttgctcgctactttgatgaactctttctgagagactgcagcacacctagagggccctttcctgcttctctgaaagc

SEQ ID NO: 173326 - DNA, 584 bp, Homo sapiens
  Payload ID: 14070
  Gene Symbol: RAB8B
  Gene Name: RAB8B, member RAS oncogene family
  ENST ID: ENST00000559006
  CDS Start-End: 20-584
agagggccggagcgagaagatggcgaagacgtacgattatctcttcaagctcctgctgatcggcgactcgggggtaggcaagacctgcctcctgttccgcttctcagaggacgccttcaacaccaccttcatctccaccatcggaattgattttaaaattagaacgatagaactagatggaaagaaaattaagcttcagatatgggacacagcgggtcaggaaagattccgaacaatcacgacagcgtactacagaggagccatgggcattatgctggtctatgacatcacaaatgaaaaatcctttgacaatattaaaaattggatcagaaacattgaagagcatgcctcttccgatgtcgaaagaatgatcctgggtaacaaatgtgatatgaatgacaaaagacaagtgtcaaaagaaagaggggagaagctagcaattgactatgggattaaattcttggagacaagcgcaaaatccagtgcaaatgtagaagaggcattttttacacttgcacgagatataatgacaaaactcaacagaaaaatggtttgtatcacttataatttttatttccattatg

SEQ ID NO: 173327 - DNA, 1313 bp, Homo sapiens
  Payload ID: 14071
  Gene Symbol: RABEPK
  Gene Name: Rab9 effector protein with kelch motifs
  Uniprot ID: Q7Z6M1
  ENST ID: ENST00000259460
  CDS Start-End: 170-1135
ggagtcacggctcgcgactggcctaagtcgccgcagaactgccacgtggggatgagatttgctgggctggtagcggcggctgctgcgggaggtcccgcccacgtgaagccagcctaactgagctctggactttggggacagctgtcagtggcctaggccgcaggacaccatgaagcaactgccagtcttggaacctggagacaagcccaggaaagcaacatggtacaccttgactgtccctggagacagcccctgtgctcgagttggccacagctgttcatatttacccccagttggtaatgccaagagagggaaggtcttcattgttgggggagcaaatccaaacagaagcttctcagacgtgcacaccatggatctggaaaccaggacgtggaccacgccagaagtgaccagccccccaccatccccaagaacattccacacatcatcggcagccattggaaaccagctatatgtctttgggggcggagagagaggtgcccagcccgtgcaggacacgaagctgcatgtgtttgacgcaaacactctgacctggtcacagccagagacacttggaaatcctccatctccccggcatggtcatgtgatggtggcagcagggacaaagctcttcatccacggaggcttggcgggggacagattctatgatgacctccactgcattgatataagtgacatgaaatggcagaagctaaatcccactggggctgctccagcaggctgtgctgcccactcagctgtggccatgggaaaacatgtgtacatctttggtggaatgactcctgcaggagcactggacacaatgtaccagtatcacacagaagagcagcattggaccttgcttaaatttgatactcttctaccccctggacgattggaccattccatgtgtatcattccatggccagtgacgtgtgcttctgagaaagaagattccaactctctcactctgaaccatgaagctgagaaagaggattcagctgacaaagtaatgagccacagtggtgactcacatgaggaaagccagactgctacactgctctgtttggtgtttggtgggatgaatacagaaggggaaatctatgacgattgtattgtgactgtagtggactaataaaacccacatttttattacctgtcagttactttcagaatagttaagtaaaacattagctgttttatacctccaaaatatcttctgcattatatatctgtttttctcctactttggtaggtgaagaaactaatgcaaataattcttatgtgcactaaaccttgctatattgcctctc

SEQ ID NO: 173328 - DNA, 1504 bp, Homo sapiens
  Payload ID: 14071
  Gene Symbol: RABEPK
  Gene Name: Rab9 effector protein with kelch motifs
  Uniprot ID: Q7Z6M1
  ENST ID: ENST00000373538
  CDS Start-End: 311-1429
aggggcgagggtccccggataccgggtctatcacggtctcgggcagggagtctgaatcttttaggggagtgggcccaagccgggtgcaaagaacggggaagggccttccctggctccgtcccggccactttgaccgaatcagcctgttctttcccgaccccgtctcctatcccctagaactgccacgtggggatgagatttgctgggctggtagcggcggctgctgcgggaggtcccgcccacgtgaagccagcctaactgagctctggactttggggacagctgtcagtggcctaggccgcaggacaccatgaagcaactgccagtcttggaacctggagacaagcccaggaaagcaacatggtacaccttgactgtccctggagacagcccctgtgctcgagttggccacagctgttcatatttacccccagttggtaatgccaagagagggaaggtcttcattgttgggggagcaaatccaaacagaagcttctcagacgtgcacaccatggatctgggaaaacaccagtgggacttagatacctgcaagggcctcttgccccggtatgaacatgctagcttcattccctcctgcacacctgaccgtatctgggtatttggaggtgccaaccaatcaggaaatcgaaattgtctacaagtcctgaatcctgaaaccaggacgtggaccacgccagaagtgaccagccccccaccatccccaagaacattccacacatcatcggcagccattggaaaccagctatatgtctttgggggcggagagagaggtgcccagcccgtgcaggacacgaagctgcatgtgtttgacgcaaacactctgacctggtcacagccagagacacttggaaatcctccatctccccggcatggtcatgtgatggtggcagcagggacaaagctcttcatccacggaggcttggcgggggacagattctatgatgacctccactgcattgatataagtgacatgaaatggcagaagctaaatcccactggggctgctccagcaggctgtgctgcccactcagctgtggccatgggaaaacatgtgtacatctttggtggaatgactcctgcaggagcactggacacaatgtaccagtatcacacagaagagcagcattggaccttgcttaaatttgatactcttctaccccctggacgattggaccattccatgtgtatcattccatggccagtgacgtgtgcttctgagaaagaagattccaactctctcactctgaaccatgaagctgagaaagaggattcagctgacaaagtaatgagccacagtggtgactcacatgaggaaagccagactgctacactgctctgtttggtgtttggtgggatgaatacagaaggggaaatctatgacgattgtattgtgactgtagtggactaataaaacccacatttttattacctgtcagttactttcagaatagttaagtaaaacattagctgttttatacctcca

SEQ ID NO: 173329 - DNA, 2450 bp, Homo sapiens
  Payload ID: 14071
  Gene Symbol: RABEPK
  Gene Name: Rab9 effector protein with kelch motifs
  ENST ID: ENST00000373544
  CDS Start-End: 167-631
gtcacggctcgcgactggcctaagtcgccgcagaactgccacgtggggatgagatttgctgggctggtagcggcggctgctgcgggaggtcccgcccacgtgaagccagcctaactgagctctggactttggggacagctgtcagtggcctaggccgcaggacaccatgaagcaactgccagtcttggaacctggagacaagcccaggaaagcaacatggtacaccttgactgtccctggagacagcccctgtgctcgagttggccacagctgttcatatttacccccagttggtaatgccaagagagggaaggtcttcattgttgggggagcaaatccaaacagaagcttctcagacgtgcacaccatggatctgggaaaacaccagtgggacttagatacctgcaagggcctcttgccccggtatgaacatgctagcttcattccctcctgcacacctgaccgtatctgggtatttggaggtgccaaccaatcaggaaatcgaaattgtctacaagtcctgaatcctgcttttaaatcttggggattttggactgtcttggcaaatcctaagtatcatcttcattcttccttgatgtttaaaccaggacgtggaccacgccagaagtgaccagccccccaccatccccaagaacattccacacatcatcggcagccattggaaaccagctatatgtctttgggggcggagagagaggtgcccagcccgtgcaggacacgaagctgcatgtgtttgacgcaagtatggactggtgggcaccttggggctggtcagggccatcccagtttacacattacctaatataggaagcagaagttagaaaaggaaagcctgactaagtgtctcacttctagacttctttgttatatctcttagctgatatctttttcccacagcaaaattggcatttaaaaagggatagtgaggcctggcatggtggctcacacctgtaatcccagagctttggaaggctgaggcaggtggaccgcttaaggtcaggagttcgagaacagcctggccaacataccttttctctactaaaaacacaaaaattatccgggcatgatggtatgcacctgtaatcccagttactcaggaggctgaggcaggagaatcgcttaaacccaggaggaggaagtttcagtgagccaagattgggccactgcactcagcctgggcaacagagcaatactccatctcaaataaataaataaataaataaataaataaataaataaataaaactaaaaaggtaggccgggaacggtggctcacgtctgtgatcccagcactttgtgacgcccaggtgggaggatcacctgaggtcaggagtttgaaaccagcctggccatcatggcaaaaccccatctctactaaaaatacaaaaattggccgggtgcagcggtgggtgcctgtaatcccagctactcgggaggctgaggcaggagaatcacttgaacccgggaggcggaggtggcaatgaaccaagatcgtgccattgcactccagccttggcaacagagcgagactctctcaaaaactaaataaaaaaataaaaaggtataatgatcaagttaaaaagtttaaaccatacaatttataaagtaaaaaagtaaaagaaagaataagaaagacaaaaaacaaacagaagtaaaagattccccttcagcctttcctttccccgcctcaggtacatgcctgggtgattttttttctttttctttttttttttttgagatggagtctcgctctgttgcccaggctggagtgcagttgcccgatctcggctcactgcaacctccgcctcccgggttcaagcgattctcctgcctcggcctcccaactagctgggattaccagcatgcaccaacatgtccatctaattttttgcgtttttagtagagacagggtttcaccatgttggccaggctggtcttgaagcctgacctcaggtaatctgcccacttcagcctcccaaagtgctgggattacaggcttgagccactgcacccggccagatttttgtatttttattgtagagatgcagttttgccatgttgcccaggctggtctcaaactcatgagctcaagcaatctgcctgcctctgcctgcccacctctgccaccacactcagccaaaatttttaccttgcaaagtaaaattgggaaaattaagagatagcacattcccaagccagagtatttgggaaaaaaaaaaaaaaagacacatcacagtgtgacttttctctttccagaaagaatgggctttgtgattcttttaaagcagttttaaaagtttaaataatattggttttgaatatataaaactataaggaacaagaaaaaaaacatatgtatgtgtatatgtgtgtgtgtgtgtacatgtgtatgtactatcaccccaaaattaaattactgttaacatctc

SEQ ID NO: 173330 - DNA, 1466 bp, Homo sapiens
  Payload ID: 14071
  Gene Symbol: RABEPK
  Gene Name: Rab9 effector protein with kelch motifs
  Uniprot ID: Q7Z6M1
  ENST ID: ENST00000394125
  CDS Start-End: 170-1288
ggagtcacggctcgcgactggcctaagtcgccgcagaactgccacgtggggatgagatttgctgggctggtagcggcggctgctgcgggaggtcccgcccacgtgaagccagcctaactgagctctggactttggggacagctgtcagtggcctaggccgcaggacaccatgaagcaactgccagtcttggaacctggagacaagcccaggaaagcaacatggtacaccttgactgtccctggagacagcccctgtgctcgagttggccacagctgttcatatttacccccagttggtaatgccaagagagggaaggtcttcattgttgggggagcaaatccaaacagaagcttctcagacgtgcacaccatggatctgggaaaacaccagtgggacttagatacctgcaagggcctcttgccccggtatgaacatgctagcttcattccctcctgcacacctgaccgtatctgggtatttggaggtgccaaccaatcaggaaatcgaaattgtctacaagtcctgaatcctgaaaccaggacgtggaccacgccagaagtgaccagccccccaccatccccaagaacattccacacatcatcggcagccattggaaaccagctatatgtctttgggggcggagagagaggtgcccagcccgtgcaggacacgaagctgcatgtgtttgacgcaaacactctgacctggtcacagccagagacacttggaaatcctccatctccccggcatggtcatgtgatggtggcagcagggacaaagctcttcatccacggaggcttggcgggggacagattctatgatgacctccactgcattgatataagtgacatgaaatggcagaagctaaatcccactggggctgctccagcaggctgtgctgcccactcagctgtggccatgggaaaacatgtgtacatctttggtggaatgactcctgcaggagcactggacacaatgtaccagtatcacacagaagagcagcattggaccttgcttaaatttgatactcttctaccccctggacgattggaccattccatgtgtatcattccatggccagtgacgtgtgcttctgagaaagaagattccaactctctcactctgaaccatgaagctgagaaagaggattcagctgacaaagtaatgagccacagtggtgactcacatgaggaaagccagactgctacactgctctgtttggtgtttggtgggatgaatacagaaggggaaatctatgacgattgtattgtgactgtagtggactaataaaacccacatttttattacctgtcagttactttcagaatagttaagtaaaacattagctgttttatacctccaaaatatcttctgcattatatatctgtttttctcctactttggtaggtgaagaaactaatgcaaataattcttatgtgcactaaaccttgctatattgcctctc

SEQ ID NO: 173331 - DNA, 733 bp, Homo sapiens
  Payload ID: 14071
  Gene Symbol: RABEPK
  Gene Name: Rab9 effector protein with kelch motifs
  ENST ID: ENST00000416065
  CDS Start-End: 1-733
gggcgagggtccccggataccgggtctatcacggtctcgggcagggagtctgaatcttttaggggagtgggcccaagccgggtgcaaagaacggggaagggccttccctggctccgtcccggccactttgaccgaatcagcctgttctttcccgaccccgtctcctatcccctagaactgccacgtggggatgagatttgctgggctggtagcggcggctgctgcgggaggtcccgcccacgtgaagccagcctaactgagctctggactttggggacagctgtcagtggcctaggccgcaggtacaccttgactgtccctggagacagcccctgtgctcgagttggccacagctgttcatatttacccccagttggtaatgccaagagagggaaggtcttcattgttgggggagcaaatccaaacagaagcttctcagacgtgcacaccatggatctgggaaaacaccagtgggacttagatacctgcaagggcctcttgccccggtatgaacatgctagcttcattccctcctgcacacctgaccgtatctgggtatttggaggtgccaaccaatcaggaaatcgaaattgtctacaagtcctgaatcctgaaaccaggacgtggaccacgccagaagtgaccagccccccaccatccccaagaacattccacacatcatcggcagccattggaaaccagctatatgtctttgggggcggagagagaggtg

SEQ ID NO: 173332 - DNA, 1537 bp, Homo sapiens
  Payload ID: 14071
  Gene Symbol: RABEPK
  Gene Name: Rab9 effector protein with kelch motifs
  ENST ID: ENST00000628863
  CDS Start-End: 170-634
ggagtcacggctcgcgactggcctaagtcgccgcagaactgccacgtggggatgagatttgctgggctggtagcggcggctgctgcgggaggtcccgcccacgtgaagccagcctaactgagctctggactttggggacagctgtcagtggcctaggccgcaggacaccatgaagcaactgccagtcttggaacctggagacaagcccaggaaagcaacatggtacaccttgactgtccctggagacagcccctgtgctcgagttggccacagctgttcatatttacccccagttggtaatgccaagagagggaaggtcttcattgttgggggagcaaatccaaacagaagcttctcagacgtgcacaccatggatctgggaaaacaccagtgggacttagatacctgcaagggcctcttgccccggtatgaacatgctagcttcattccctcctgcacacctgaccgtatctgggtatttggaggtgccaaccaatcaggaaatcgaaattgtctacaagtcctgaatcctgcttttaaatcttggggattttggactgtcttggcaaatcctaagtatcatcttcattcttccttgatgtttaaaccaggacgtggaccacgccagaagtgaccagccccccaccatccccaagaacattccacacatcatcggcagccattggaaaccagctatatgtctttgggggcggagagagaggtgcccagcccgtgcaggacacgaagctgcatgtgtttgacgcaaacactctgacctggtcacagccagagacacttggaaatcctccatctccccggcatggtcatgtgatggtggcagcagggacaaagctcttcatccacggaggcttggcgggggacagattctatgatgacctccactgcattgatataagtgacatgaaatggcagaagctaaatcccactggggctgctccagcaggctgtgctgcccactcagctgtggccatgggaaaacatgtgtacatctttggtggaatgactcctgcaggagcactggacacaatgtaccagtatcacacagaagagcagcattggaccttgcttaaatttgatactcttctaccccctggacgattggaccattccatgtgtatcattccatggccagtgacgtgtgcttctgagaaagaagattccaactctctcactctgaaccatgaagctgagaaagaggattcagctgacaaagtaatgagccacagtggtgactcacatgaggaaagccagactgctacactgctctgtttggtgtttggtgggatgaatacagaaggggaaatctatgacgattgtattgtgactgtagtggactaataaaacccacatttttattacctgtcagttactttcagaatagttaagtaaaacattagctgttttatacctccaaaatatcttctgcattatatatctgtttttctcctactttggtaggtgaagaaactaatgcaaataattcttatgtgcactaaaccttgctatattgcctctc

SEQ ID NO: 173333 - DNA, 2039 bp, Homo sapiens
  Payload ID: 14072
  Gene Symbol: RAB9A
  Gene Name: RAB9A, member RAS oncogene family
  Uniprot ID: P51151
  ENST ID: ENST00000464506
  CDS Start-End: 280-885
gccatgttgttccctccgcgctggacgggagcagctggagcgggagcctggctgcgctaccgcggctgcctcctgctgtgcaggtccccgaccctctctctgtcctcattgcgcccagacgggccggcccagagctcccgggtcgtctttcgtgtggccgcgagacactcttgcactcctgtaatgagcctggcactgtgatgaaacacttttcccgtgtcgtttgagtgcatcttctcaacaaccctaggagggttcttgaagcttttgagattaacaatggcaggaaaatcatcactttttaaagtaattctccttggagatggtggagttgggaagagttcacttatgaacagatatgtaactaataagtttgatacccagctcttccatacaataggtgtggaatttttaaataaagatttggaagtggatggacattttgttaccatgcagatttgggacacggcaggtcaggagcgattccgaagcctgaggacaccattttacagaggttctgactgctgcctgcttacttttagtgtcgatgattcacaaagcttccagaacttaagtaactggaagaaagaattcatatattatgcagatgtgaaagagcctgagagctttccttttgtgattctgggtaacaagattgacataagcgaacggcaggtgtctacagaagaagcccaagcttggtgcagggacaacggcgactatccttattttgaaacaagtgcaaaagatgccacaaatgtggcagcagcctttgaggaagcggttcgaagagttcttgctaccgaggataggtcagatcatttgattcagacagacacagtcaatcttcaccgaaagcccaagcctagctcatcttgctgttgattgttagattgttgatgcattctaaccaactcacacatatacacaaaatcaacatggggatggagaagagaattagcgtttgcagcagtgtatcatctactaataaaattaaactaatgttgctgcttcattagttggtgggagaagggacacatccactcttggaggaatatatttactcaataatggcaccttacatttataaattgtaacagttgtctaataacgtttctttaatttaaatatgtaagttgcagagctaataaatgaaatgaccaagactttaattataataaaaataagaaacttgactattctagaagttatacttggattttttcctgggaaaatggagaactactttttatatgtgtatgtttttatgcaattagcattgtattcttggttcagggaaatactttcctaaagcaataatgttagatattaaagattaaaatctaatgtatttgcaatgcattgttaatttacttcttcattctcttcaaaatgatttaaccattcctgttttcattctacatactagaattactctcactagtaattactcatcatttgtgtgccattcatgcacccccacccccataaatcatgttccacagtctcaggcggagggtgggcccccagtggtacaagagttgcttcatacagtctgtaatacatccagctaaattcaagttgtctatgaatggaaagcctttccatagatagagttcagttttaagaaaaaggctaactactgaacttggagaacagacaaatgtgcatttgataactgatgtaataattacaatgtactgtgtggaagatacaaaattacaattcgattaatggactaaatatttttgttactttcttgacccttggggaaagtttcttaattgaagttaaaacattcctttataacacaagacacaagctgactttatcactctcagaagaaatactaagaaggattgtactttgtgagagggtaaacgaagacatctttattcggcaatgtatttacttagtgtcttctctattactgaacatttagtgatttgctctcaaggagattttttgttagaaaaagacttgttgcagtgatcagacttgataaagcaaattgtggtcttttgtggatgaagttcata

SEQ ID NO: 173334 - DNA, 1271 bp, Homo sapiens
  Payload ID: 14072
  Gene Symbol: RAB9A
  Gene Name: RAB9A, member RAS oncogene family
  Uniprot ID: P51151
  ENST ID: ENST00000618931
  CDS Start-End: 195-800
cgtcgccatgttgttccctccgcgctggacgggagcagctggagcgggagcctggctgcgctaccgcggctgcctcctgctgtgcaggtccccgaccctctctctgtcctcattgcgcccagacgggccggcccagagctcccgggtcgtctttcgtgtggccgcgagggttcttgaagcttttgagattaacaatggcaggaaaatcatcactttttaaagtaattctccttggagatggtggagttgggaagagttcacttatgaacagatatgtaactaataagtttgatacccagctcttccatacaataggtgtggaatttttaaataaagatttggaagtggatggacattttgttaccatgcagatttgggacacggcaggtcaggagcgattccgaagcctgaggacaccattttacagaggttctgactgctgcctgcttacttttagtgtcgatgattcacaaagcttccagaacttaagtaactggaagaaagaattcatatattatgcagatgtgaaagagcctgagagctttccttttgtgattctgggtaacaagattgacataagcgaacggcaggtgtctacagaagaagcccaagcttggtgcagggacaacggcgactatccttattttgaaacaagtgcaaaagatgccacaaatgtggcagcagcctttgaggaagcggttcgaagagttcttgctaccgaggataggtcagatcatttgattcagacagacacagtcaatcttcaccgaaagcccaagcctagctcatcttgctgttgattgttagattgttgatgcattctaaccaactcacacatatacacaaaatcaacatggggatggagaagagaattagcgtttgcagcagtgtatcatctactaataaaattaaactaatgttgctgcttcattagttggtgggagaagggacacatccactcttggaggaatatatttactcaataatggcaccttacatttataaattgtaacagttgtctaataacgtttctttaatttaaatatgtaagttgcagagctaataaatgaaatgaccaagactttaattataataaaaataagaaacttgactattctagaagttatacttggattttttcctgggaaaatggagaactactttttatatgtgtatgtttttatgcaattagcattgtattcttggttcagggaaatactttcctaaagcaataatgttagatattaaagattaaaatctaatgtatttgc

SEQ ID NO: 173335 - DNA, 3748 bp, Homo sapiens
  Payload ID: 14073
  Gene Symbol: RAB9B
  Gene Name: RAB9B, member RAS oncogene family
  Uniprot ID: Q9NP90
  ENST ID: ENST00000243298
  CDS Start-End: 286-891
cgagcggcagctgtcaggccaccgaggtccaagccgcacttgctgccccattgaggacgaggaggcagcaggagcagtgacggtgactctaaggagccggattcccggcacgcagagctgacctgcctggcacccgcggccctctcctgtttccttcccattgtgttggcaccctaaaaagaaagaataaaacaacaacaggaaaaaaaggaaaatatttaaattgtgacaaaaacccactgggttctcttggttacaaactccttcccttctggtgctgcaaaaatgagtgggaaatccctgctcttaaaggtcattctcttgggtgatggtggagttgggaaaagttcgcttatgaaccgttacgtaaccaacaaatttgactcccaggcttttcacaccataggggtagagttcttaaatcgagatctggaggtagatggacgctttgtaaccctccagatctgggacactgcagggcaggaacgtttcaagagccttaggacacccttctacaggggagcagactgctgcctcttgaccttcagcgtggatgatcggcagagcttcgagaatcttggtaactggcagaaagaatttatttactatgcggatgtgaaggaccctgagcatttcccctttgtagttctgggtaacaaggtagacaaagaggataggcaagtgactactgaggaggcacaaacctggtgcatggagaatggggattacccttatttagaaactagtgccaaagatgatactaatgtgacagtggcctttgaagaagctgtcaggcaggtgctggctgtagaggaacagctggagcattgcatgttgggtcacaccattgacttgaacagtggctccaaagcagggtcttcgtgctgttaaagatagggagccttttaaaaatgtgccccaaattgatcagtcagtagtgtaagaataactgtgcccctctaagagtgcacacacacgcacacaagagggtaagagacaaggttctgattgtgaaacagagcctttcaaattgaagtgtagattgatttaaaaaaattaaaaattaaaaaaaatgaagctctatcaagccaagtgtattttgcgtgatttctgctatttccccttcttgtgtgtctcaggacatatcagaaaattttagtcctgagacagttaaatattttttaaatcacagtttaaacctagaacccagctgcatgaaggagttaaagagctacaactatttcttaaagtgttccattaatcaactaacaaatgtcactatcagactcttgccaagcagtttctgacatttctgccaaaggggaaaaaaatcagactttgagctgtattacaataaaaataataatgcaaataaggattcctaggcttgaattaaagaagttgtaatgattaggagtgcaaaagtataatgatatacactgacttgtttaaatccttatgtatggttcgctcccatctgagcttttcaaaaaatcccatctcaataagagatactctaatgacactggcaattgattatacttcttgtgtttgaagtcataggatactagtgaatggattatgcttaaatatgccaaccacctttgcaaataaatggttggtctgcttttaattcctaagtctacttttgctgcatagagatgttgcttctctgacaacctcttaccaatttagcaatgctgcttagtatatgaatttggatgcagtgctctctgctcatcatttagatggtcctttgatccaacatgctgggctcatggagaaggcttcataaaagattgggggataatgaacttttctcacaaggctccttaactcaaatatttattgcagaagaaggaactggtttcttatatgttgcactgtatgttcaactagcctaattaggacattgaaagtgacagaagagcagatcttaacccagtgttagaatgaatttcccataaacagagttgtccaacagtggaatggactgccttaatagtgagctccctgcctctgaaaatattcactggatgaccatctgttagaataccataaaaagattttctgtgctggctacatgttcaatataaagtcctttctggctctaagttctatgaatatataaactacatcagtgccatgctgtggttagatttatctgatgataacagctaagactatggagagggactttaaaaattctcaaaccattctgtgatcaatctttaacagcaactacatagctcttccttttgcttttgcactgtggcaggaaaaattcttgagctctgagtaatctttatgtgactgataaaaaacatcttaaagctcccatgttaaaatataaaaatggtttgacaatttttgattaccatgactgtcagttatatactatattatgaatatgcagtgtggttcttgttggttgatctgtttaccctgcatagattttaatctgtactttaaaacatctatgataaaaatagtgacagacagaaattaccccaaaaagagacctaggccaggaagggggtgggagctttcataggaatacagcctagaactctccattgtagccacgtatggaatcagccttacttacatgtaggacctttgtgctttaagagctctgggacatattggccaaatagaaaagaagaggacagtatttcaactcagtcatactcaatatttccaattaagatataatcctgacaccattgttcaattaactttgacgccagaagtcaaagccagaactgggaccccacagctcttaagtactggtccctatcctgcctatgcctatagccagccacactggtttccaagttctgtgatcattttgctacaatcatgttagggtgaaaatctgtacgtcagaactgttaaatgctaattatttttaagtgcatgagacctggggccttctctttctacttgcactctgcttatactagtttctatttgtagatctcaggccttcatcataaagacctctatcaactcacaaaagtatttgtctctattagagtggcatgtggtcatttgagtaaaaaaaaaaaaattacatgggtatcggattcataggcatcctgtccatctaagacaagtgttaattttattggcccatcagctggagcccctttcctcttagccataccattgttttctaccaaattaccactcaatatcttaatgaaagcactcaacattaagtgacataaacagtggcatttgggtaagcaacactcagtggggtgctgacatacagtttgggtaagattaaaaaacaccaaaggctgaaatctgtgagtaccaagaactgtgcatataggtttagaaattgactgtgtaccctagaatgtgcagtgtaatattttcaataggtgtttttttaaagaacactagatttttggaataatatatttctaattaggactatactgtttttcaatggtctgttaaaacatcatacagaatatttatttagtttattgtcatgtattggctaactttcaggggcctcagattccatatgtcttcagtggattgatgaatatcaggttaatttgtgcctgccccagccatctctactttattctgaggtattccacaatcctcttgttgcaggtgctgctaaaaaaaactcaaaattgtgtatcaaatattttctttcaactgtaaaaaatcatctgtgttaaagtgaataaaaagtgcattttgaataaccagcacacaa

SEQ ID NO: 173336 - DNA, 2490 bp, Homo sapiens
  Payload ID: 14074
  Gene Symbol: RABEP1
  Gene Name: rabaptin, RAB GTPase binding effector protein 1
  Uniprot ID: Q15276
  ENST ID: ENST00000341923
  CDS Start-End: 1-2490
atggcgcagccgggcccggcttcccagcctgacgtttctcttcagcaacgggtagcagaattggaaaaaattaatgcagaatttttacgtgcacaacagcagcttgaacaagaatttaatcaaaagagagcaaaatttaaggagttatatttggctaaagaggaggatctgaagaggcaaaatgcagtattacaagctgcacaagatgatttgggacaccttcgaacccagctgtgggaagctcaagcagagatggagaatattaaggcgattgccacagtctctgagaacaccaagcaagaagctatagatgaagtgaaaagacagtggagagaagaagttgcttcacttcaggctgttatgaaagaaacagttcgtgactatgagcaccagttccaccttaggctggagcaggagcgaacacagtgggcacagtatagagaatccgcagagagggaaatagctgatttaagaagaaggctgtctgaaggtcaagaggaggaaaatttagaaaatgaaatgaaaaaggcccaagaggatgctgagaaacttcggtccgttgtgatgccaatggaaaaggaaattgcagctttgaaggataaactgacagaggctgaagacaaaattaaagagctggaggcctcaaaggttaaagaactgaatcattatctggaagctgagaaatcttgtaggactgatctagagatgtatgtagctgttttgaatactcagaaatctgttctacaggaagatgctgagaaactgcggaaagaattgcatgaagtttgccatctcttggagcaagagcgacaacaacacaaccagttaaaacatacgtggcagaaggccaatgaccagtttctggaatctcagcgtttactgatgagagacatgcagcgaatggagattgtgctaacttcagaacagctccgacaagttgaagaactgaagaagaaagatcaggaggatgatgaacaacaaagactcaataagagaaaggatcacaaaaaagcagatgttgaggaagaaataaaaataccagtagtgtgtgctttaactcaagaagaatcttcagcccagttatcaaatgaagaggagcatttagacagcacccgtggctcagttcattccttagatgcaggcttgctgttgccatctggagatcctttcagtaaatcggacaatgacatgtttaaagatggactcaggagagcacagtctacagacagcttgggaacctcgggctcattgcaatccaaagctttaggctataactacaaagcaaaatctgctggaaacctggacgagtcagattttggaccactggtaggagcagattcagtgtctgagaactttgatactgcatcccttgggtcactccagatgccaagtgggtttatgttaaccaaagatcaggaaagagcaatcaaggcgatgacaccagaacaagaagagacagcgtccctcctctccagcgttacccagggcatggagagtgcctatgtgtcccctagtggttatcgtttagttagtgaaacagaatggaatctcttgcagaaagaggtacataatgctggaaataaacttggtagacgttgtgatatgtgttccaattacgaaaaacagttacaaggaattcagattcaggaggctgaaacgagagaccaggtgaaaaaactacagctgatgctaaggcaagctaatgaccagttagagaagacaatgaaagataagcaggagctggaagacttcataaagcaaagcagcgaagattcgagtcaccagatctctgcactcgtcctaagagcccaggcctccgagatcttacttgaagagttacagcaggggctttcccaggcaaagagggatgttcaggaacagatggcggtgctgatgcagtcacgggaacaggtttcagaagagctggtgaggttacagaaagataatgacagtctccagggaaagcacagcctgcatgtgtcattacagcaagcagaagacttcatcctcccagacactacagaggcactgcgggagttggtattaaaataccgtgaggacatcattaatgtgcggacagcagcagaccacgtagaagaaaagctgaaggctgagatacttttcctaaaagagcagatccaagcagaacagtgtttaaaagaaaatcttgaagaaactctgcaactagaaatagaaaactgcaaggaggaaatagcttctatttctagcctaaaagctgaattagaaagaataaaagtggaaaaaggacaggctaccgttgaacaactaatgtttgaagagaagaataaagctcagagattacagacagaattagatgtcagtgagcaagtccagagggattttgtaaagctttcacagacccttcaggtgcagttagagcggatccggcaagctgactccttggagagaatccgggcaattctgaatgatactaaactgacagacattaaccagcttcctgagacatga

SEQ ID NO: 173337 - DNA, 5365 bp, Homo sapiens
  Payload ID: 14074
  Gene Symbol: RABEP1
  Gene Name: rabaptin, RAB GTPase binding effector protein 1
  Uniprot ID: Q15276
  ENST ID: ENST00000537505
  CDS Start-End: 188-2776
ggaggtcggcggtcgggtccgtctctgcccgcggctgtggcggcgccggcggatccagccttagcggtttctctctgggcggcggcggcggcggctcggttgacgcctcctccgccagctgagcccgcgggagcccaggacgccgcttccccgcccatccccgctccccgaggccggccgcctggtcatggcgcagccgggcccggcttcccagcctgacgtttctcttcagcaacgggtagcagaattggaaaaaattaatgcagaatttttacgtgcacaacagcagcttgaacaagaatttaatcaaaagagagcaaaatttaaggagttatatttggctaaagaggaggatctgaagaggcaaaatgcagtattacaagctgcacaagatgatttgggacaccttcgaacccagctgtgggaagctcaagcagagatggagaatattaaggcgattgccacagtctctgagaacaccaagcaagaagctatagatgaagtgaaaagacagtggagagaagaagttgcttcacttcaggctgttatgaaagaaacagttcgtgactatgagcaccagttccaccttaggctggagcaggagcgaacacagtgggcacagtatagagaatccgcagagagggaaatagctgatttaagaagaaggctgtctgaaggtcaagaggaggaaaatttagaaaatgaaatgaaaaaggcccaagaggatgctgagaaacttcggtccgttgtgatgccaatggaaaaggaaattgcagctttgaaggataaactgacagaggctgaagacaaaattaaagagctggaggcctcaaaggttaaagaactgaatcattatctggaagctgagaaatcttgtaggactgatctagagatgtatgtagctgttttgaatactcagaaatctgttctacaggaagatgctgagaaactgcggaaagaattgcatgaagtttgccatctcttggagcaagagcgacaacaacacaaccagttaaaacatacgtggcagaaggccaatgaccagtttctggaatctcagcgtttactgatgagagacatgcagcgaatggagattgtgctaacttcagaacagctccgacaagttgaagaactgaagaagaaagatcaggaggatgatgaacaacaaagactcaataagagaaaggatcacaaaaaagcagatgttgaggaagaaataaaaataccagtagtgtgtgctttaactcaagaagaatcttcagcccagttatcaaatgaagaggagcatttagacagcacccgtggctcagttcattccttagatgcaggcttgctgttgccatctggagatcctttcagtaaatcggacaatgacatgtttaaagatggactcaggagagcacagtctacagacagcttgggaacctcgggctcattgcaatccaaagctttaggctataactacaaagcaaaatctgctggaaacctggacgagtcagattttggaccactggtaggagcagattcagtgtctgagaactttgatactgcatcccttgggtcactccagatgccaagtgggtttatgttaaccaaagatcaggaaagagcaatcaaggcgatgacaccagaacaagaagagacagcgtccctcctctccagcgttacccagggcatggagagtgcctatgtgtcccctagtggttatcgtttagttagtgaaacagaatggaatctcttgcagaaagaggtacataatgctggaaataaacttggtagacgttgtgatatgtgttccaattacgaaaaacagttacaaggaattcagattcaggaggctgaaacgagagaccaggtgaaaaaactacagctgatgctaaggcaagctaatgaccagttagagaagacaatgaaagataagcaggagctggaagacttcataaagcaaagcagcgaagattcgagtcaccagatctctgcactcgtcctaagagcccaggcctccgagatcttacttgaagagttacagcaggggctttcccaggcaaagagggatgttcaggaacagatggcggtgctgatgcagtcacgggaacaggtttcagaagagctggtgaggttacagaaagataatgacagtctccagggaaagcacagcctgcatgtgtcattacagcaagcagaagacttcatcctcccagacactacagaggcactgcgggagttggtattaaaataccgtgaggacatcattaatgtgcggacagcagcagaccacgtagaagaaaagctgaaggctgagatacttttcctaaaagagcagatccaagcagaacagtgtttaaaagaaaatcttgaagaaactctgcaactagaaatagaaaactgcaaggaggaaatagcttctatttctagcctaaaagctgaattagaaagaataaaagtggaaaaaggacagttggagtccacattaagagagaagtctcaacagcttgagagtcttcaggaaataaagatcagtttggaagagcagttaaagaaagagactgctgctaaggctaccgttgaacaactaatgtttgaagagaagaataaagctcagagattacagacagaattagatgtcagtgagcaagtccagagggattttgtaaagctttcacagacccttcaggtgcagttagagcggatccggcaagctgactccttggagagaatccgggcaattctgaatgatactaaactgacagacattaaccagcttcctgagacatgacaccctcatggcaggattctagcctgcactttgggtttttaactcatctttagagcaacagtaattattatttaactcttaactgaagaaagagaagtcacaacaaaaggaagactggagaaatgcttacttctagagggagaagactgtgcggcacaggaaacagcaaacagtggggtgatctgcagcccagagaccttcaaatgcgaacactataaactccaggcttgattccaacaggcgtgggatcagatttggtgatggaaaaagcgctgtttccttgcctgctttctccaagacagattttcggaacacatttccctaccctaaagcgacatcccagtagtgtttggaattttctgttcatagatattggaagagagaatttgctttatctgttgtctagagctcatcagtaacagtattcagttagcagacagaagtgtagtatgctgtatgaatattttatattaaaatatgaaggtttgagagcaggccattggctactgactgtattttgttttccttttaccattttatcttatcttgctttggaggaccttaaatgctactgaaacttacctgagaaccataggactgtggcaaacaaaaccaattcatgaagtgaattaatgatgaggatctgaaaacttggctggggctatatatactggaagttgaaggttaaaggaaaagcacaagaaactttggaagcactttttctgcatacttagatgatcttcatgggcccacagggtaccaggataaagccgaactggtaccatctactcttttgaagtgttttagtctagttattggatcagtgaaaaacattagtatacgtttttaaataggctaatttttcaacttggatcattaggcttacgtactacttgtttcaaatgtgtcaaatacaaaaatggtaactaggttgacagatactttgtatttttcttttgaattcagacctggaatgtaagtaagtgacaatgcttatggaaagccagttagttagaattggaaatctgtcttgtcattttacaagcattagattcctttcctgtgtgaagaaagcctcagtgaaacaggtctttgccataactttatgaagtgctacagaaagcacaaagaattgattcatgttcatcaatacctgctgagagtactgtcccaggaatatccagtggatggattcatcatccaggaggttcaaaagtaagatggttttcaaatcatttttgagactggttgcataacagcagggtacctgaaagagccttctgggagttagtgaactaggtagattgttttgttcacataacgccaccatcaacttaaagtgaattgtctttgttataaatgaggtcactatggacttaccctaaagatcttctgtacttctgtcttccataggacaaatgataagtactacatacctcatctcttgggttattattgtagtcttgcattcatggttatgaatttaaaaataaataccaattatggaaatagtactaaaggcttgccgcacatgaaacattattttaattggtttaaagtccctttataaagagtgctacatggtttagataaaggaaacatataactattgagttacaggggattttattaattataaaatgcaatcaatttaaattacgtaggtttaagactagtcccttggataagccccaagcgaatttgtcttcagattattaaaattagtgctgtaaatcagggtgggcaattcacagcctttctgaactgactgaactagagcttgcagtgaagtgttctgctgagactgagcaccttacagatatttttctccagaagatggtgctgggtaataaaatcatcacaattagggaatggttagtggtctctactgtggcaaatgccaactgttggaattcactttattgtagaaaaacccaaactgagactcttaagttttgtttagcaatgtgtttctggtatgaaacaaactactgtgtcactgtccaggtaggaaacaattctttcaactgggttttcagcataaatgggaactgatgtagaaggcaggatttagcccttctaggcaaaagaaaagctcagttgggtttcacgagtgttcctgtgcttatattcagtctgtgcctacatgttctcatgcatgtctaacctgatttacctcttacctgtaacctaccttatcatgtggcttttaattgacagtcactcagccatttctaagcagatatagtagtacctttcagaactcacattggcaagtgtaaaaagatgacttaaggtgaagtgaggacaaaatcacattctgcatactaacctatttttttctccctttaaggtgctaaacttgcacctcatgtccactcagtaacaagtattgggacgtagagcacagcctcactcagctctgaaaggtaatacagcttgtgaggaagtgagccagcagtggcctttgcaattgtggatcttgagctctgctctcagcagatttcaggtgtaaccatttgttaactgtactgaaggtgtgtcctcaagaagaaagtgttcaaattaaaaaagctgctgccaagtaca

SEQ ID NO: 173338 - DNA, 551 bp, Homo sapiens
  Payload ID: 14074
  Gene Symbol: RABEP1
  Gene Name: rabaptin, RAB GTPase binding effector protein 1
  ENST ID: ENST00000575991
  CDS Start-End: 223-551
gcactgcttatttcccgctgtcaggatgaggaggcggaggtcggcggtcgggtccgtctctgcccgcggctgtggcggcgccggcggatccagccttagcggtttctctctgggcggcggcggcggcggctcggttgacgcctcctccgccagctgagcccgcgggagcccaggacgccgcttccccgcccatccccgctccccgaggccggccgcctggtcatggcgcagccgggcccggcttcccagcctgacggagaagggaagggaagcatttttggtgggctgtcagagagaggaaactgggatgtcttcaggctgcattttaatgatcaccttttgcatttggtgtcaggcaagaaaactttgttcttccacaatcccactttgttactgcacacagaggcaagatacagagagcttgtggttctgaacaggagtgtttctcttcagcaacgggtagcagaattggaaaaaattaatgcagaatttttacgtgcacaacagcagcttgaacaagaatttaatcaaaagagagcaaaatttaagga

SEQ ID NO: 173339 - DNA, 578 bp, Homo sapiens
  Payload ID: 14074
  Gene Symbol: RABEP1
  Gene Name: rabaptin, RAB GTPase binding effector protein 1
  ENST ID: ENST00000574568
  CDS Start-End: 1-578
aaaaaagcagatgttgaggaagaaataaaaataccagtagtgtgtgctttaactcaagaagaatcttcagcccagttatcaaatgaagagaaaacaccattcaaaataaaaataactgatagatcatcctacccagaggtaacaactaatattttggagcatttagacagcacccgtggctcagttcattccttagatgcaggcttgctgttgccatctggagatcctttcagtaaatcggacaatgacatgtttaaagatggactcaggagagcacagtctacagacagcttgggaacctcgggctcattgcaatccaaagctttaggctataactacaaagcaaaatctgctggaaacctggacgagtcagattttggaccactggtaggagcagattcagtgtctgagaactttgatactgcatcccttgggtcactccagatgccaagtgggtttatgttaaccaaagatcaggaaagagcaatcaaggcgatgacaccagaacaagaagagacagcgtccctcctctccagcgttacccagggcatggagagtgcctatgtgtcccctagtgg

SEQ ID NO: 173340 - DNA, 583 bp, Homo sapiens
  Payload ID: 14074
  Gene Symbol: RABEP1
  Gene Name: rabaptin, RAB GTPase binding effector protein 1
  ENST ID: ENST00000572250
  CDS Start-End: 1-460
tttcctaaaagagcagatccaagcagaacagtgtttaaaagaaaatcttgaagaaactctgcaactagaaatagaaaactgcaaggaggaaatagcttctatttctagcctaaaagctgaattagaaagaataaaagtggaaaaaggacagttggagtccacattaagagagaagtctcaacagcttgagagtcttcaggaaataaagatcagtttggaagagcagttaaagaaagagactgctgctaaggctaccgttgaacaactaatgtttgaagagaagaataaagctcagagattacagacagaattagatgtcagtgagcaagtccagagggattttgtaaagctttcacagacccttcaggtgaggcatttggggaaccacatacagagcacgaaggcagttttgggggacagaaccttgccgatccctgacttgaccactggcagtagctagaggtttagagactggctgctcctacctccaccccaaatgtctgactcatcattcaagccagaaacctggtgtgttcttcacacttggcccatttttctttttctgtatgccttgccaattttg

SEQ ID NO: 173341 - DNA, 461 bp, Homo sapiens
  Payload ID: 14074
  Gene Symbol: RABEP1
  Gene Name: rabaptin, RAB GTPase binding effector protein 1
  ENST ID: ENST00000570487
  CDS Start-End: 1-304
gattgccacagtctctgagaacaccaagcaagaagctatagatgaagtgaaaagacagtggagagaagaagttgcttcacttcaggctgttatgaaagaaacagttcgtgactatgagcaccagttccaccttaggctggagcaggagcgaacacagtgggcacagtatagagaatccgcagagagggaaatagctgatttaagaagaaggctgtctgaaggtcaagaggaggaaaatttagaaaatgaaatgaaaaaggatcccatccaggataccatattgcatttagttgtgtctccttagatgcctcttggctgtgacagtttctcagatttttcttgtttttaatgacctttctgtcattttttaaagtgctttttaaaggttttgtttatgatgacattcagcacttggaattgtgaagtcatatttatattaataaataacttgatttgtgatc

SEQ ID NO: 173342 - DNA, 2175 bp, Homo sapiens
  Payload ID: 14075
  Gene Symbol: RABEP2
  Gene Name: rabaptin, RAB GTPase binding effector protein 2
  Uniprot ID: Q9H5N1
  ENST ID: ENST00000357573
  CDS Start-End: 52-1653
ggtgcgctccgtcaccagggagtgcgggaatccgccgtttgcgctgaggcaatggcggcagctgcgccggtggccgcggacgacgatgagcggcggcggcggccgggggctgcactggaggactcccggtcccaggaaggggcaaatggtgaggccgagtcaggtgagctcagccggcttcgggctgagctggcaggcgccctggcagaaatggaaaccatgaaggctgtggcagaggtgagcgagagcacgaaggccgaggctgtggctgcggtgcagcggcagtgccaagaggaggtggcctcgctgcaggccatcctgaaagactccatcagcagctatgaagcccagatcaccgccctgaagcaggagcgacagcagcagcagcaggactgtgaggagaaggagcgggagctgggccgcctgaagcagctgctgtcccgggcctaccccctggactccctggagaagcagatggaaaaggcccacgaggactcggagaagctgcgggagatcgtactgcccatggaaaaggagatcgaggagctgaaggcgaagctgctgagggccgaggagctgattcaggagatccagagacgtccccggcatgccccttccctgcacggctccacggagttgctgcccctgtcccgggatccatcgcccccgctggagcctctggaggagctgagcggagatgggggtccagccgctgaggccttcgctcacaactgcgatgacagcgcctccatctcctccttctcccttggcggtggggtcggcagcagctcctccctgccccaaagccgccagggcctgagccctgaacaggaagagacggcctcgctggtgtctacgggcaccctggttcccgagggcatctacctgccccctcctggctaccagctcgtcccagacactcagtgggagcagctgcagacagagatgcaggtgctcctggcccaggtccagaactcagagcagctgctgcggaccctgcaagggaccgtgagccaggcccaggagcgggtgcagctgcagatggcggagctggtcaccacccacaagtgcctgcaccatgaggtaaagcggttgaatgaggaaaaccaagggctccgggccgagcagctgccatcctcagccccccagggctcgcagcaggagcagggcgaggaggaatcactgcccagctctgtgccagagctgcagcagctgctgtgctgcacgcggcaagaggcgagggcccggctgcaggcccaggagcacggggccgagcgcctgcggatcgagatcgtgacgctgcgggaggctctggaggaggagacagtggccagggccagcctggaggggcagctgagggtgcagcgggaggagacagcctccctgtgcagcctgaggacagagatggagcgggtgcagcaggaacagagcaaggcccagctcccagacctcctctcagaacagagggccaaggtgctgcggctgcaggcagagctggagaccagtgagcaggtgcagagggatttcgtgcgactgtcccaggccctgcaggtgcgcctagagcggatccgccaggctgagaccctggagcaagtgcgcagcatcatggatgaggcgccactcacggacgtcagggacatcaaggacacctgaggggtcaggatatccccacccccaccctgggaaagacgcctttccccactcctgaaccatgaggcctcgctctggggtcttggatggcttttccaccgtccctgagactggggttgaggggactgacgggggccaccaccgccccgccctccagcgcctcctcccagggtggctgggcctcctgttctcagggatcacacctgggtgaggggcccaagcccctcccggaaccaaaggtgcaggctcaggcctgcggctttctggctgctgtgctgcctcctgggctccagccctcccctgcccccagcccgtcccctgcccagggcacagcggagccatgggggctgggagtccccatcagaggcagtgaggtgggccccggccctgggacaggcagctgccttctggtctgcatgacactaagacgcttgtccacagcggcgacccaggcctccaagcttgcacagaggcaaggccagacttttccgtcgtttattttcaataaataagcagctcagcgca

SEQ ID NO: 173343 - DNA, 2821 bp, Homo sapiens
  Payload ID: 14075
  Gene Symbol: RABEP2
  Gene Name: rabaptin, RAB GTPase binding effector protein 2
  Uniprot ID: Q9H5N1
  ENST ID: ENST00000358201
  CDS Start-End: 590-2299
aacaaaatgggggtggggacgtgcaagtttcagactccgactaactacgcggggactccgaggcgctcagaaaaatgaagccgacccggccctgccccgagggacgctccaagagggcggaggtgcagggagggccccgccacaattcgcggtaacgcaagccaggctcgggcggaagggcggccggagccgatcaaaggctggctccgggcaggggcagcgagggagcgagggggagctctccgcaggccggtgtcccggaggaggcataattggagcagggcttccaaggtcacggagagacgccgggcaagacctcttaaggatcctcttccgggcttgaaaggcaggcgtcctcccgaaccgcgcgacccagccaagaagagccggggcggggccggggccggggccgggggccgactcgggaatcttcggccgaggctcggcaatccccccatcctccgtccggggcctccagcccggggccgatccggaaacagccgagcggatccggaaacagccgagaggacccggaagcggtgcgctccgtcaccagggagtgcgggaatccgccgtttgcgctgaggcaatggcggcagctgcgccggtggccgcggacgacgatgagcggcggcggcggccgggggctgcactggaggactcccggtcccaggaaggggcaaatggtgaggccgagtcaggtgagctcagccggcttcgggctgagctggcaggcgccctggcagaaatggaaaccatgaaggctgtggcagaggtgagcgagagcacgaaggccgaggctgtggctgcggtgcagcggcagtgccaagaggaggtggcctcgctgcaggccatcctgaaagactccatcagcagctatgaagcccagatcaccgccctgaagcaggagcgacagcagcagcagcaggactgtgaggagaaggagcgggagctgggccgcctgaagcagctgctgtcccgggcctaccccctggactccctggagaagcagatggaaaaggcccacgaggactcggagaagctgcgggagatcgtactgcccatggaaaaggagatcgaggagctgaaggcgaagctgctgagggccgaggagctgattcaggagatccagagacgtccccggcatgccccttccctgcacggctccacggagttgctgcccctgtcccgggatccatcgcccccgctggagcctctggaggagctgagcggagatgggggtccagccgctgaggccttcgctcacaactgcgatgacagcgcctccatctcctccttctcccttggcggtggggtcggcagcagctcctccctgccccaaagccgccagggcctgagccctgaacaggaagagacggcctcgctggtgtctacgggcaccctggttcccgagggcatctacctgccccctcctggctaccagctcgtcccagacactcagtgggagcagctgcagacagagggccgacagctgcagaaggacctggagagcgtcagtcgcgagcgggacgagctccaagagggcctgagacggagcaatgaggactgtgccaagcagatgcaggtgctcctggcccaggtccagaactcagagcagctgctgcggaccctgcaagggaccgtgagccaggcccaggagcgggtgcagctgcagatggcggagctggtcaccacccacaagtgcctgcaccatgaggtaaagcggttgaatgaggaaaaccaagggctccgggccgagcagctgccatcctcagccccccagggctcgcagcaggagcagggcgaggaggaatcactgcccagctctgtgccagagctgcagcagctgctgtgctgcacgcggcaagaggcgagggcccggctgcaggcccaggagcacggggccgagcgcctgcggatcgagatcgtgacgctgcgggaggctctggaggaggagacagtggccagggccagcctggaggggcagctgagggtgcagcgggaggagacagaggtgctggaggcctccctgtgcagcctgaggacagagatggagcgggtgcagcaggaacagagcaaggcccagctcccagacctcctctcagaacagagggccaaggtgctgcggctgcaggcagagctggagaccagtgagcaggtgcagagggatttcgtgcgactgtcccaggccctgcaggtgcgcctagagcggatccgccaggctgagaccctggagcaagtgcgcagcatcatggatgaggcgccactcacggacgtcagggacatcaaggacacctgaggggtcaggatatccccacccccaccctgggaaagacgcctttccccactcctgaaccatgaggcctcgctctggggtcttggatggcttttccaccgtccctgagactggggttgaggggactgacgggggccaccaccgccccgccctccagcgcctcctcccagggtggctgggcctcctgttctcagggatcacacctgggtgaggggcccaagcccctcccggaaccaaaggtgcaggctcaggcctgcggctttctggctgctgtgctgcctcctgggctccagccctcccctgcccccagcccgtcccctgcccagggcacagcggagccatgggggctgggagtccccatcagaggcagtgaggtgggccccggccctgggacaggcagctgccttctggtctgcatgacactaagacgcttgtccacagcggcgacccaggcctccaagcttgcacagaggcaaggccagacttttccgtcgtttattttcaataaataagcagctcagcgca

SEQ ID NO: 173344 - DNA, 1645 bp, Homo sapiens
  Payload ID: 14075
  Gene Symbol: RABEP2
  Gene Name: rabaptin, RAB GTPase binding effector protein 2
  ENST ID: ENST00000544477
  CDS Start-End: 34-1530
ggagtgcgggaatccgccgtttgcgctgaggcaatggcggcagctgcgccggtggccgcggacgacgatgagcggcggcggcggccgggggctgactccatcagcagctatgaagcccagatcaccgccctgaagcaggagcgacagcagcagcagcaggactgtgaggagaaggagcgggagctgggccgcctgaagcagctgctgtcccgggcctaccccctggactccctggagaagcagatggaaaaggcccacgaggactcggagaagctgcgggagatcgtactgcccatggaaaaggagatcgaggagctgaaggcgaagctgctgagggccgaggagctgattcaggagatccagagacgtccccggcatgccccttccctgcacggctccacggagttgctgcccctgtcccgggatccatcgcccccgctggagcctctggaggagctgagcggagatgggggtccagccgctgaggccttcgctcacaactgcgatgacagcgcctccatctcctccttctcccttggcggtggggtcggcagcagctcctccctgccccaaagccgccagggcctgagccctgaacaggaagagacggcctcgctggtgtctacgggcaccctggttcccgagggcatctacctgccccctcctggctaccagctcgtcccagacactcagtgggagcagctgcagacagagggccgacagctgcagaaggacctggagagcgtcagtcgcgagcgggacgagctccaagagggcctgagacggagcaatgaggactgtgccaagcagatgcaggtgctcctggcccaggtccagaactcagagcagctgctgcggaccctgcaagggaccgtgagccaggcccaggagcgggtgcagctgcagatggcggagctggtcaccacccacaagtgcctgcaccatgaggtaaagcggttgaatgaggaaaaccaagggctccgggccgagcagctgccatcctcagccccccagggctcgcagcaggagcagggcgaggaggaatcactgcccagctctgtgccagagctgcagcagctgctgtgctgcacgcggcaagaggcgagggcccggctgcaggcccaggagcacggggccgagcgcctgcggatcgagatcgtgacgctgcgggaggctctggaggaggagacagtggccagggccagcctggaggggcagctgagggtgcagcgggaggagacagaggtgctggaggcctccctgtgcagcctgaggacagagatggagcgggtgcagcaggaacagagcaaggcccagctcccagacctcctctcagaacagagggccaaggtgctgcggctgcaggcagagctggagaccagtgagcaggtgcagagggatttcgtgcgactgtcccaggccctgcaggtgcgcctagagcggatccgccaggctgagaccctggagcaagtgcgcagcatcatggatgaggcgccactcacggacgtcagggacatcaaggacacctgaggggtcaggatatccccacccccaccctgggaaagacgcctttccccactcctgaaccatgaggcctcgctctggggtcttggatggcttttccaccgtccctgagactggggtt

SEQ ID NO: 173345 - DNA, 589 bp, Homo sapiens
  Payload ID: 14075
  Gene Symbol: RABEP2
  Gene Name: rabaptin, RAB GTPase binding effector protein 2
  ENST ID: ENST00000563577
  CDS Start-End: 166-309
acttgctaagccggtaggtggcctggggtaagagatgggaagagaggctgatccctgtcccccacagcactggaggactcccggtcccaggaaggggcaaatggtgaggccgagtcaggtgagctcagccggcttcgggctgagctggcaggcgccctggcagaaatggaaaccatgaaggctgtggcagaggtgagcgagagcacgaaggccgaggctgtggctgcggtgcagcggcagtgccaagaggaggtggcctcgctgcaggccatcctgaaagagcccagctcagagtctgatccagcgtaaatatttattactacgattaagggccgggtgtggtggctcatgcctgtaatcccagcactttgggaggctgagacgggaggattgcttgagctcaggagttcaagaccagcctgggcaacatgactccatcagcagctatgaagcccagatcaccgccctgaagcaggagcgacagcagcagcagcaggactgtgaggagaaggagcgggagctgggccgcctgaagcagctgctgtcccgggcctaccccctggactccctggagaagcagatggaaaag

SEQ ID NO: 173346 - DNA, 1045 bp, Homo sapiens
  Payload ID: 14075
  Gene Symbol: RABEP2
  Gene Name: rabaptin, RAB GTPase binding effector protein 2
  ENST ID: ENST00000568703
  CDS Start-End: 311-1045
gaaactggccaccgcgaagagatggagtgtaggcagcacccggcagagcgagtgggaagggggcggggcaggggcggggccaggtgagccgggcgggcccaggtgaaggaggccccagatgaaggcaacagtactaggttgcaggacttgctaagccggtaggtggcctggggtaagagatgggaagagaggctgatccctgtcccccacagcactggaggactcccggtcccaggaaggggcaaatggtgaggccgagtcaggtgagctcagccggcttcgggctgagctggcaggcgccctggcagaaatggaaaccatgaaggctgtggcagaggtgagcgagagcacgaaggccgaggctgtggctgcggtgcagcggcagtgccaagaggaggtggcctcgctgcaggccatcctgaaagactccatcagcagctatgaagcccagatcaccgccctgaagcaggagcgacagcagcagcagcaggactgtgaggagaaggagcgggagctgggccgcctgaagcagctgctgtcccgggcctaccccctggactccctggagaagcagatggaaaaggcccacgaggactcggagaagctgcgggagatcgtactgcccatggaaaaggagatcgaggagctgaaggcgaagctgctgagggccgaggagctgattcaggagatccagagacgtccccggcatgccccttccctgcacggctccacggagttgctgcccctgtcccgggatccatcgcccccgctggagcctctggaggagctgagcggagatgggggtccagccgctgaggccttcgctcacaactgcgatgacagcgcctccatctcctccttctcccttggcggtggggtcggcagcagctcctccctgccccaaagccgccagggcctgagccctgaacaggaagagacggcctcgctggtgtctacgggcaccctggttcccgagggcatctacctgccccctcctggctaccagctcgtcccagacactcagtgggagcagctgcagacagag

SEQ ID NO: 173347 - DNA, 545 bp, Homo sapiens
  Payload ID: 14075
  Gene Symbol: RABEP2
  Gene Name: rabaptin, RAB GTPase binding effector protein 2
  ENST ID: ENST00000566762
  CDS Start-End: 413-545
gtcactttgaagaatctggcgggagaagaggaagtgcacggtgagggccgacttggaatggaatggcggacccactcaagattctgtccaggccttcagaagttaaacgtgatcacttgtgctgggacagccaatagaggagtctgagatgatcatttccaaggagttcttcacagaggaggtagctttggagctgggctttgaggttgggcagtatttgaaacagtagagacggagcaaagaacccctgggcagaggaaacaactccatcagcagctatgaagcccagatcaccgccctgaagcaggagcgacagcagcagcagcaggactgtgaggagaaggagcgggagctgggccgcctgaagcagctgctgtcccgggcctaccccctggactccctggagaagcagatggaaaaggcccacgaggactcggagaagctgcgggagatcgtactgcccatggaaaaggagatcgaggagctgaaggcgaagctgctgagggccgaggagctgattcaggagatccagagacgtccccggc

SEQ ID NO: 173348 - DNA, 841 bp, Homo sapiens
  Payload ID: 14075
  Gene Symbol: RABEP2
  Gene Name: rabaptin, RAB GTPase binding effector protein 2
  ENST ID: ENST00000567483
  CDS Start-End: 1-841
ccggccattgaaggggtagggccagtgacagcactggaggactcccggtcccaggaaggggcaaatggtgaggccgagtcaggtgagctcagccggcttcgggctgagctggcaggcgccctggcagaaatggaaaccatgaaggctgtggcagaggtgagcgagagcacgaaggccgaggctgtggctgcggtgcagcggcagtgccaagaggaggtggcctcgctgcaggccatcctgaaagactccatcagcagctatgaagcccagatcaccgccctgaagcaggagcgacagcagcagcagcaggactgtgaggagaaggagcgggagctgggccgcctgaagcagctgctgtcccgggcctaccccctggactccctggagaagcagatggaaaaggcccacgaggactcggagaagctgcgggagatcgtactgcccatggaaaaggagatcgaggagctgaaggcgaagctgctgagggccgaggagctgattcaggagatccagagacgtccccggcatgccccttccctgcacggctccacggagttgctgcccctgtcccgggatccatcgcccccgctggagcctctggaggagctgagcggagatgggggtccagccgctgaggccttcgctcacaactgcgatgacagcgcctccatctcctccttctcccttggcggtggggtcggcagcagctcctccctgccccaaagccgccagggcctgagccctgaacaggaagagacggcctcgctggtgtctacgggcaccctggttcccgagggcatctacctgccccctcctggctaccagctcgtcccagacactc

SEQ ID NO: 173349 - DNA, 538 bp, Homo sapiens
  Payload ID: 14075
  Gene Symbol: RABEP2
  Gene Name: rabaptin, RAB GTPase binding effector protein 2
  ENST ID: ENST00000561501
  CDS Start-End: 322-538
atagctaagtttagctcccagcttctatctgttgccttgtcccatgtcatttcttgtccctcactgatgattgatcaaccctgaagatgggcgagaaacttctcagttccccaaaccaacctcattttagtctggacttctgggaaatagaatcagccctggcccagtctctactccatcagcagctatgaagcccagatcaccgccctgaagcaggagcgacagcagcagcagcaggactgtgaggagaaggagcgggagctgggccgcctgaagcagctgctgtcccgggcctaccccctggactccctggagaagcagatggaaaaggcccacgaggactcggagaagctgcgggagatcgtactgcccatggaaaaggagatcgaggagctgaaggcgaagctgctgagggccgaggagctgattcaggagatccagagacgtccccggcatgccccttccctgcacggctccacggagttgctgcccctgtcccgggatccatcgcccccgctggagcctctggaggagctga

SEQ ID NO: 173350 - DNA, 6678 bp, Homo sapiens
  Payload ID: 14076
  Gene Symbol: RBSN
  Gene Name: rabenosyn, RAB effector
  Uniprot ID: Q9H1K0
  ENST ID: ENST00000253699
  CDS Start-End: 615-2969
gagttccgagcgaccgatggagatggcggctgcggctgagtgacggacggtggaggcccagagcccgggcctgaagggggggacaaacctgggtgcccgcaggagcccggcagggtactgtgctaaaccctggggagacggcgaagtggaaaacatatagagtctgtgccctcccagattttacagtcttacttggtcacttcacgtatgtacctgcggttataaattgagatgagtgctgtgaaggagaagtccattctgatgctctgagtgtcttacaagtatcaagaacttactatatgtggttgaataaacaatcaaggtaaagagcatcaagtaaaaacttctgcttgttgataagtacttcagacattcccccagtggctgaagtggcatatgaattatgaagttggatcatttggaatgaatgtaagagaattgccaagggctcctcctactccagagaggaaacctcatccagggccatgaagccacttcctcaccatctgtgtgctgcttaagctaatgctgcgggaaccatggttccttgggaggaatcaagctgactcttggcatgagattcctgccttcctagggttgagagcggcactgccatggcttctctggacgacccaggggaagtgagggagggcttcctctgccctctgtgcctgaaggatctgcagtctttctatcagcttcactcacattacgaggaagaacactcaggggaagaccgtgatgtcaaagggcaaattaaaagtcttgtccagaaggctaaaaaagcaaaggacaggttgttgaaacgagaaggggatgatcgagcagagtcagggacccaaggatatgagtctttcagctatggaggggttgatccttacatgtgggaaccccaggagcttggtgctgtgagaagccatctttccgacttcaaaaaacaccgagctgctagaattgaccactatgttgtggaagtcaataaactaataatcaggttagagaagctcactgcatttgacagaacaaatactgagtctgcaaagattcgagcaatagaaaagtctgtggtgccttgggtcaacgaccaggatgtccctttctgtccagactgtgggaataagttcagcatccggaaccgccgccaccactgccgcctctgcgggtctattatgtgcaagaagtgtatggagctcatcagccttcccttggcaaacaagctcaccagtgccagcaaggagtccctgagcacccacaccagccccagccagtcacccaacagtgtccatggctcccgccgaggcagcatcagcagcatgagcagtgtcagctcggtcctggatgagaaggacgatgaccggatccgctgctgtacacactgcaaggacacgctgctcaagagagagcagcagattgatgagaaggagcacacacctgacatcgtgaagctctacgagaaattacgactttgcatggagaaagttgaccagaaagctccagaatacatcaggatggcagcatcattaaatgctggggagacaacctacagtctggaacatgccagtgaccttcgagtggaagtgcagaaagtgtatgagctgatagacgctttaagtaagaagatcttaaccttgggcttgaaccaggaccctccaccacatccaagcaatttgcggctgcagagaatgatcagatactcagctacactttttgtgcaggaaaagttgcttggtttgatgtcactgccaaccaaagaacagtttgaggaactgaaaaagaaaaggaaggaggaaatggagaggaagagggccgtggagagacaagctgccctggagtcccagcgaaggcttgaggaaaggcagagtggcctggcttctcgagcggccaacggggaggtggcatctctccgcaggggccctgcccccttgagaaaggctgagggctggctcccactgtcaggaggtcaggggcagagtgaggactcagacccgctcctccagcagatccacaacatcacatcattcatcaggcaggccaaggccgcgggccgcatggatgaagtgcgcactctgcaggagaacctgcggcagctgcaggacgagtatgaccagcagcagacagagaaggccatcgagctgtcccggaggcaggctgaggaggaggacctgcagcgggaacagctgcagatgttgcgtgaacgggagttggaacgagaaagggagcagtttcgggtggcatccctgcacacacggactcggtccctggacttcagagaaatcggcccttttcagctggagcccagcagagagcctcgcacccaccttgcttatgctttggatctaggctcttccccagttccaagcagcacagctcccaagaccccttcacttagctcaactcaacccaccagagtgtggtctgggcccccagccgttggccaggagcgcttaccccagagcagcatgccacagcaacatgaggggccctccttaaacccctttgatgaggaagacctctccagccccatggaagaggccactactggtcctcctgctgcaggggtttccttagacccttcagcccgcatcctgaaagagtacaatcctttcgaggaagaggacgaggaggaggaagcagtggcagggaatccattcattcagccagacagcccagctcctaaccccttcagtgaggaagacgaacatccccagcagaggctctcaagccctctggttcctggtaacccctttgaggaacccacctgtatcaacccctttgagatggacagtgacagtgggccagaggctgaggagcccatagaggaagagctcctcctgcagcagatcgataacatcaaggcatacatctttgatgccaagcagtgcggccgcctggatgaggtagaggtgctgacagagaatctgcgggagctgaagcacaccctggccaagcagaaggggggcactgactgaccagcagtggagagggcacctttgggcccaggggtctggcaggagccagtggagcaggacagagggcaggcaggatggatggggaaggtggcagggtgagaactcagatgcacacaggtgaggggcaggaatctgctgttttgtgttgcgcactttgaggtatttccactacagttgaataataaaatagaaactagaacagggagaatcagcattcagttgctgcttttcctgtttattattactatcttttgtaatcggaggtttaccccttttgaagggactttacatttttactaccgagatataactaaatgcagctctgttgggcccagggcagaaatggctgctgtgtacctcttgggtccatttgctactgcctagtcttggttccttatgcagtattatagggcagcctttttagagcccttcctttagccaagacagagaagatagattccactgagctctattctgctctgacagaagtccatccctagtaggctgtgagttccatttcacctggggccgcctctcccctgctctgcacttcctgtctgtacaatagaagggggaggtgctgctatgaaggggagagtttagacccaggagagcccagcacctctttttaaggtggggtgatgggaatatttcaccagggtctattttctcagtttaagttcttttttgtctctttcaggaagttaagctcccagtgcagggtatcaatgtgaatctggtcctgagctttttagaaaataagagtggtggccgggcgcgctggctcacgcctgtaatcgcaacactttgggaggccgaggcaggcagatcacaaggtcaggagatcgagaccaccctggctaacacagtgaaatcccgtctctactaaaaatacaaaaaattagccaggcgtggtggtgggtgcctgtagtcccagctactttggaggctgaggcaggagaatgctgtgaacccgggaggcagagcttgcagtgagccgagatcgcaccactgcactccagcctgggcagtgagagtgagactccgtctcaaaaaaaaataagagtggttaactttttggttgatattagtattatttgtgagaagagtttccccacccttcttctgatagaacaattgtctgtcactggagaaatctccctccagagctttggcaaagttactctgatctgggtctgtttaaaaggccgggtctctaatttaggaatcggtgatttggaagcttttgcagaacatcaccagaagaagggaagcttcccagagtcagaagctaaattaaaataatttccaaggctatttgatcagccttcttcctttttggttcattgtgtcctgacttggggcactgatgagattttttattttttttgagacagagtttcactttgttgcccaggctggagtgtagtggcatgatctcagctcactgcaacctccacctccctggttcaagtgatatttgtgcctcagccccctgaatagctaggattacaggcgtgggccaccacgcctggttaatctctgtatttttagtagaggtagagtttcaccattttggccaggctggtttcgaactcctggcctcaagtgatctgccaccttggcctcccaaagtgctgggaatacaggcgtgagccactgtgcccgccctgatgagatattttattaccaatgttagtattgagaaactgaaatgtttgaagaagcacaacccaggatcgtgctggtagcaccacagtacttaaactgttggtcaattaaggccagaaagggaaattgttaatttagctctggtgctttggtttacaggaacataactcttaactgacatctgacatcatgatagccatatgtgctcagctctgggtagagtttctgcagttactcatctgaactaatgaacaataactgaccactagtcactttatgccgtgtaactagctctaggccatactttcactggttactggtgtgaaagctgaaattcattttgttacattctggtgaagacccctcttgataatgggaatgttttaactctcttgatgaaaaaataatctgtatttgtgttgatgttcacatttctgtagcacatttcttatccttttggttgaatgaaaagatcttgtataggggtgtggagatggggagtgggtagaagtgtgtgaaggacgctttgcatttgggatctgttcacaaacagccatatgagtgtgttaatgaatgtcagccagttaccaaccctgctggttgttatgggttgttttgagaagttggcaaccaggcatctaagatgttgcctggtacaggcctcttttcttccctgaggcccatgacatttctctgttactctagagggtttctcagatggccagtaggctcctccctgcttagggtctcatttctctgaaaagaggatgaactgaaaagcaggtagttccagaagctaattgctgctttccatcataattatttttcttgtgagaacatttctcttttaattagctagtgattttgattaagactaattcactaaacatacccttccctcaaatcacctcaggtagcaatctgtaagtaactaaaagcattgaaaaacacacaagaaacatttttaaaaactatttttaaaggcctggccgggtgcagtggctcactcctgtaatcccagcactttgggaggccgagacgggtggatcacctgaggtcaggaatttgagactagcatggccaacatggtgaaaccccgtgtctactaaaaatacaaaaattagctgggcgtggtggcagacgcctgtaatcccagctactcagggaggctgaggcacgagaatcgcttgaacctgggaggcggaggttgcagtgagccaagattgcgccactgcactccaacctgggtgacaagagcaagactccgtctcacaaaaaacaaacaaaactgactgattgaatatactaaaccaaactaaaatcatattcttttgattaagtttatccatggctgtattcttctatgaattcttccatttaattcttccacgattatcttctcctgtaaatacatcacaggagttagaattctctacccatcagctgtaccatgtcgcagaattcatgcaggcacaaagttggagttacagagatgggttgacagcaggcaaacttggcctatgtattataaccacaacttcaagttcttacctcatgtgaatattcaccctttctttagtcttccaaggcaaacagccccgtctcatcaccagatgagcaaggtcttgatatggcatagcagatctccctagacacagatcatgagaaaagatggaagagacttagggattcaggcatcagatgaagttggcttttcccttttatgccttgtttgtatttaccctgtctaatacactaaggatacttactcattgtacttgcagctcaatatgtctttgctgttcagatactaaaatgtacctctgagtcattgtgagctgtgtggtaggttggacattggcatagttggtgatgggactcaaaatgaaaaggtggtctctttaccaggtcacagactgtagcagattgtgcttgttatctgacaatgactgtcactttgagggtcgttgatttgcatgcactactctggggccttgtattggagccttttttaaaaaaaataaaatctgagatagag

SEQ ID NO: 173351 - DNA, 903 bp, Homo sapiens
  Payload ID: 14076
  Gene Symbol: RBSN
  Gene Name: rabenosyn, RAB effector
  ENST ID: ENST00000449050
  CDS Start-End: 454-720
ccgagcgaccgatggagatggcggctgcggctgagtgacggacggtggaggcccagagcccgggcctgaagggggggacaaacctgggtgcccgcaggagcccggcagggtgtcttacaagtatcaagaacttactatatgtggttgaataaacaatcaaggtaaagagcatcaagtaaaaacttctgcttgttgataagtacttcagacattcccccagtggctgaagtggcatatgaattatgaagttggatcatttggaatgaatgtaagagaattgccaagggctcctcctactccagagaggaaacctcatccagggccatgaagccacttcctcaccatctgtgtgctgcttaagctaatgctgcgggaaccatggttccttgggaggaatcaagctgactcttggcatgagattcctgccttcctagggttgagagcggcactgccatggcttctctggacgacccaggggaagtgagggagggcttcctctgccctctgtgcctgaaggatctgcagtctttctatcagcttcactcacattacgaggaagaacactcaggggaagaccgtgatgtcaaagggcaaattaaaagtaagaggcgaggaccttgcctatcccctgctgtcgttgagagctttaactcacgggatagttctcatcagctttggtgttgccacaggaatatgataatagtagtagcaaacagatgactagtgtttgtcatgtgccaggcgttttcagagtttccctgtttattaatttcatttaatcctcacaataactgtgtggctgtaagccacatttcgaaccagacacagagagattagataacttgtctgaagccactcagagaaacaatctgactttgagtctagtaaatgtaattgctgtga

SEQ ID NO: 173352 - DNA, 664 bp, Homo sapiens
  Payload ID: 14076
  Gene Symbol: RBSN
  Gene Name: rabenosyn, RAB effector
  ENST ID: ENST00000426541
  CDS Start-End: 1-470
aggacacgctgctcaagagagagcagcagattgatgagaaggagcacacacctgacatcgtgaagctctacgagaaattacgactttgcatggagaaagttgaccagaaagctccagaatacatcaggatggcagcatcattaaatgctggggagacaacctacagtctggaacatgccagtgaccttcgagtggaagtgcagaaagtgtatgagctgatagacgctttaagtaagaagatcttaaccttgggcttgaaccaggaccctccaccacatccaagcaatttgcggctgcagagaatgatcagatactcagctacactttttgtgcaggaaaagttgcttggtttgatgtcactgccaaccaaagaacagtttgaggaactgaaaaagaaaaggaaggaggaaatggagaggaagagggccgtggagagacaaggcctatttttctttcagagcttctgctgattctctcatggctagaataccacagagattgacagttctccctatggcaggagttgcagaggaccaagacattaggaagttccttgtagaacatatcgggtctcccttccgcccacatatacacaaaaacatgacttgattttagcagttggatatctttgtcctgaggctgccctggagtcccagcgaaggct

SEQ ID NO: 173353 - DNA, 1352 bp, Homo sapiens
  Payload ID: 14076
  Gene Symbol: RBSN
  Gene Name: rabenosyn, RAB effector
  ENST ID: ENST00000441057
  CDS Start-End: 600-767
gatggagatggcggctgcggctgagtgacggacggtggaggcccagagcccgggcctgaagggggggacaaacctgggtgcccgcaggagcccggcagggtactgtgctaaaccctggggagacggcgaagtggaaaacatatagagtctgtgccctcccagattttacagtcttacttggtcacttcacgtatgtacctgcggttataaattgagatgagtgctgtgaaggagaagtccattctgatgctctgagtgtcttacaagtatcaagaacttactatatgtggttgaataaacaatcaaggtaaagagcatcaagtaaaaacttctgcttgttgataagtacttcagacattcccccagtggctgaagtggcatatgaattatgaagttggatcatttggaatgaatgtaagagaattgccaagggctcctcctactccagagaggaaacctcatccagggccatgaagccacttcctcaccatctgtgtgctgcttaagctaatgctgcgggaaccatggttccttgggaggaatcaagctgactcttggcatgagattcctgccttcctagggttgagagcggcactgccatggcttctctggacgacccaggggaagtgagggagggcttcctctgccctctgtgcctgaaggatctgcagtctttctatcagcttcactcacattacgaggaagaacactcaggggaagaccgtgatgtcaaagggcaaattaaaaatgttatatctgtttcttgaagctttttgcaagtattctcacatgcattcaataagtgcgtgggcagtagtggggaagcaagaactctgtgtccagttaagcctatggggaacaccagtccacggatggaggtttagctgaatcccatcctggaggtcttgtccagaaggctaaaaaagcaaaggacaggttgttgaaacgagaaggggatgatcgagcagagtcagggacccaaggatatgagtctttcagctatggaggggttgatccttacatgtgggaaccccaggagcttggtgctgtgagaagccatctttccgacttcaaaaaacaccgagctgctagaattgaccactatgttgtggaagtcaataaactaataatcaggttagagaagctcactgcatttgacagaacaaatactgagtctgcaaagattcgagcaatagaaaagtctgtggtgccttgggtcaacgaccaggatgtccctttctgtccagactgtgggaataagttcagcatccggaaccgccgccaccactgccgcctctgcgggtctattatgtgcaagaagtgtatggagctcatcagccttcccttggcaa

SEQ ID NO: 173354 - DNA, 3005 bp, Homo sapiens
  Payload ID: 14076
  Gene Symbol: RBSN
  Gene Name: rabenosyn, RAB effector
  Uniprot ID: Q9H1K0
  ENST ID: ENST00000476527
  CDS Start-End: 474-2828
gcaggcgcacctgccgagttccgagcgaccgatggagatggcggctgcggctgagtgacggacggtggaggcccagagcccgggcctgaagggggggacaaacctgggtgcccgcaggagcccggcagggtgtcttacaagtatcaagaacttactatatgtggttgaataaacaatcaaggtaaagagcatcaagtaaaaacttctgcttgttgataagtacttcagacattcccccagtggctgaagtggcatatgaattatgaagttggatcatttggaatgaatgtaagagaattgccaagggctcctcctactccagagaggaaacctcatccagggccatgaagccacttcctcaccatctgtgtgctgcttaagctaatgctgcgggaaccatggttccttgggaggaatcaagctgactcttggcatgagattcctgccttcctagggttgagagcggcactgccatggcttctctggacgacccaggggaagtgagggagggcttcctctgccctctgtgcctgaaggatctgcagtctttctatcagcttcactcacattacgaggaagaacactcaggggaagaccgtgatgtcaaagggcaaattaaaagtcttgtccagaaggctaaaaaagcaaaggacaggttgttgaaacgagaaggggatgatcgagcagagtcagggacccaaggatatgagtctttcagctatggaggggttgatccttacatgtgggaaccccaggagcttggtgctgtgagaagccatctttccgacttcaaaaaacaccgagctgctagaattgaccactatgttgtggaagtcaataaactaataatcaggttagagaagctcactgcatttgacagaacaaatactgagtctgcaaagattcgagcaatagaaaagtctgtggtgccttgggtcaacgaccaggatgtccctttctgtccagactgtgggaataagttcagcatccggaaccgccgccaccactgccgcctctgcgggtctattatgtgcaagaagtgtatggagctcatcagccttcccttggcaaacaagctcaccagtgccagcaaggagtccctgagcacccacaccagccccagccagtcacccaacagtgtccatggctcccgccgaggcagcatcagcagcatgagcagtgtcagctcggtcctggatgagaaggacgatgaccggatccgctgctgtacacactgcaaggacacgctgctcaagagagagcagcagattgatgagaaggagcacacacctgacatcgtgaagctctacgagaaattacgactttgcatggagaaagttgaccagaaagctccagaatacatcaggatggcagcatcattaaatgctggggagacaacctacagtctggaacatgccagtgaccttcgagtggaagtgcagaaagtgtatgagctgatagacgctttaagtaagaagatcttaaccttgggcttgaaccaggaccctccaccacatccaagcaatttgcggctgcagagaatgatcagatactcagctacactttttgtgcaggaaaagttgcttggtttgatgtcactgccaaccaaagaacagtttgaggaactgaaaaagaaaaggaaggaggaaatggagaggaagagggccgtggagagacaagctgccctggagtcccagcgaaggcttgaggaaaggcagagtggcctggcttctcgagcggccaacggggaggtggcatctctccgcaggggccctgcccccttgagaaaggctgagggctggctcccactgtcaggaggtcaggggcagagtgaggactcagacccgctcctccagcagatccacaacatcacatcattcatcaggcaggccaaggccgcgggccgcatggatgaagtgcgcactctgcaggagaacctgcggcagctgcaggacgagtatgaccagcagcagacagagaaggccatcgagctgtcccggaggcaggctgaggaggaggacctgcagcgggaacagctgcagatgttgcgtgaacgggagttggaacgagaaagggagcagtttcgggtggcatccctgcacacacggactcggtccctggacttcagagaaatcggcccttttcagctggagcccagcagagagcctcgcacccaccttgcttatgctttggatctaggctcttccccagttccaagcagcacagctcccaagaccccttcacttagctcaactcaacccaccagagtgtggtctgggcccccagccgttggccaggagcgcttaccccagagcagcatgccacagcaacatgaggggccctccttaaacccctttgatgaggaagacctctccagccccatggaagaggccactactggtcctcctgctgcaggggtttccttagacccttcagcccgcatcctgaaagagtacaatcctttcgaggaagaggacgaggaggaggaagcagtggcagggaatccattcattcagccagacagcccagctcctaaccccttcagtgaggaagacgaacatccccagcagaggctctcaagccctctggttcctggtaacccctttgaggaacccacctgtatcaacccctttgagatggacagtgacagtgggccagaggctgaggagcccatagaggaagagctcctcctgcagcagatcgataacatcaaggcatacatctttgatgccaagcagtgcggccgcctggatgaggtagaggtgctgacagagaatctgcgggagctgaagcacaccctggccaagcagaaggggggcactgactgaccagcagtggagagggcacctttgggcccaggggtctggcaggagccagtggagcaggacagagggcaggcaggatggatggggaaggtggcagggtgagaactcagatgcacacaggtgaggggcaggaatctgctgttttgtgttgcgcactttgaggtatttccactacagttg

SEQ ID NO: 173355 - DNA, 582 bp, Homo sapiens
  Payload ID: 14076
  Gene Symbol: RBSN
  Gene Name: rabenosyn, RAB effector
  ENST ID: ENST00000507357
  CDS Start-End: 460-582
accgatggagatggcggctgcggctgagtgacggacggtggaggcccagagcccgggcctgaagggggggacaaacctgggtgcccgcaggagcccggcagggtacatacagagggtgtcttacaagtatcaagaacttactatatgtggttgaataaacaatcaaggtaaagagcatcaagtaaaaacttctgcttgttgataagtacttcagacattcccccagtggctgaagtggcatatgaattatgaagttggatcatttggaatgaatgtaagagaattgccaagggctcctcctactccagagaggaaacctcatccagggccatgaagccacttcctcaccatctgtgtgctgcttaagctaatgctgcgggaaccatggttccttgggaggaatcaagctgactcttggcatgagattcctgccttcctagggttgagagcggcactgccatggcttctctggacgacccaggggaagtgagggagggcttcctctgccctctgtgcctgaaggatctgcagtctttctatcagcttcactcacattacgaggaagaacactcaggggaagac

SEQ ID NO: 173356 - DNA, 4679 bp, Homo sapiens
  Payload ID: 14077
  Gene Symbol: RPH3A
  Gene Name: rabphilin 3A
  Uniprot ID: Q9Y2J0
  ENST ID: ENST00000389385
  CDS Start-End: 498-2582
ggcaccgcacacataaatcacgggtgggaggcaggcttggttcccgcttggttccccctgcactgggaagctgccgccccgcttcccttgctcacacagggctttgcagtagtggtggcagccgcggcagaaactggctctggggaagcaattgattcgtctactgccagcagcccggagttgcctacgcggactggaaaggaagggagaagggagagagagagagagagagagagagagagagagagagactcacagagctaaaaccttcatccatgtggaggacagtctgagggagccactgtcccttgtccactgactcactggctggtccgagttttctccgcttctggcagtggcacctccgctgagcttttaaaccaagtcattgggacttagcgtctttctacccggcagggaagggaggagttggcaagaatttggctcacccattccccctgcaagcctccagcgtcgcggagcactagacatctactatgactgacaccgtgttcagcaacagttctaaccgttggatgtaccccagtgaccggccccttcaatcaaatgataaagaacagctccaggcaggctggtccgtccaccccggtggtcagcctgacaggcagaggaagcaggaagagctgactgatgaggagaaagaaatcatcaacagggtgattgctcgagctgagaaaatggaagagatggagcaggagcgaatcggacgcctggtggaccgcctagaaaacatgaggaagaacgtggctggagatggggtgaaccgctgcatactgtgtggagaacagctggggatgctgggctctgcctgtgtagtatgtgaggactgtaagaagaacgtctgcaccaagtgcggagtggagaccaacaaccgcctgcattctgtgtggctctgcaaaatctgcattgagcagagggaggtgtggaagcgttctggagcgtggttcttcaaaggcttccccaaacaggtcctcccacagcctatgcctataaagaagaccaagccccagcagcctgtcagtgagcctgctgcccctgaacagcctgctcctgagcccaagcaccctgcccgggctccagctcgaggtgacagtgaagataggaggggcccgggtcagaagacaggccctgacccagcctctgctcccgggcgaggaaactatgggcctcccgtgcgcagggcctccgaggcacgaatgagctcatctagccgagattcagagagctgggaccacagtgggggtgctggagactccagccggagcccagcaggtttgagacgggccaactcagtccaggcctccagacctgccccaggctcggtgcagagcccagcgccacctcagcctgggcagccagggaccccaggaggaagcagaccgggtcctgggccagcaggacgctttccagatcagaagccagaggtggctccgagcgaccctgggaccactgccccaccccgagaggagagaacagggggagtcgggggctacccagcagttggagccagagaggaccgaatgagccacccctccggaccctattcccaagcatctgcagctgccccccagcctgctgcagcccgccagccaccacccccagaggaggaggaagaggaagccaacagctacgattcggatgaagcaaccaccctgggtgccctggaattcagccttctctacgaccaggacaacagctccctgcagtgcaccatcattaaggccaagggcctgaagcccatggattcaaacggcttggctgatccctacgttaagctgcacctcctgccgggagccagcaagtccaacaagcttcgtacaaaaactctgcggaatacccggaaccccatctggaatgagaccctcgtgtatcacggcatcaccgatgaggacatgcaaaggaagaccctcaggatctccgtctgtgatgaggacaaatttggccacaatgaatttattggtgagaccagattctccctcaagaaactgaagcccaaccagaggaagaatttcaacatctgcctggagcgagtgattcctatgaaacgtgctgggaccaccgggtcagcccgaggcatggccctttatgaggaagagcaggtggagcgtgttggtgacatcgaggagcgtggcaagatcctggtctccctcatgtacagcacacagcagggaggcctcattgtgggcatcatacgctgcgtgcacctggctgccatggacgctaatggctactcagacccattcgtcaagctctggctgaaaccggacatgggaaagaaggccaaacacaagactcaaattaaaaagaaaaccttgaatcccgaattcaatgaggagtttttctatgacatcaaacacagtgacctggcaaagaagtcactggacatttcagtctgggactatgacatcggcaagtccaatgattacatcggaggctgccagctggggatctctgccaagggagagcgcttaaaacactggtacgagtgtctgaaaaataaagacaagaagatagagcgctggcaccagctacagaatgagaaccacgtgtcaagtgattaggctagtgcccaggtccccatctccatgtcccgggtcccccccagcctgctctagctgcccaccgcaccctgatctctcttctctatgcctacctccccccataccctgctgatctccctgagcctgcctttgagcccccgtcacgttgggcactgctgccaaagactccctcctccctgatgctgggatgtgggctctgaatacagcccctctctcatccctgggatggagcaatggggatggggttggggagacgtttacaaagaggttgatcatttaataacctctcagtttgggtaaattacaaaggttcttcatcatttaggactgtttttagaccctcctagccttgaacacacacatgtacacacacacacacacacacacacacacaccctttcattccctgtgttgtgtctctgtatatccccagttgtcagcagacccggacaatgctgtgagagaagcattggggcacaaatagagcctccgggctcccactgccccctgagatgtacaccctgattgccaggaaaacagactgctgtgttcagtaacacaccctccctgctccaagtgcaccaggatgcaaatgcacagaattcaccaggggcttggacgctctcctctttccgaatgtcacctgtgtgcttcctagcaaaacaaaaacaaacgacaacaacaaaaaacccttcctctgtcaccttttctcctcctccctcttctttcccttccatgatagtagattctctctttctcagcctctcccctctcctttctctccctgcctttcttccctttgcctttctctctctctaaagcagtaacaccgcaaaaacaacagcaaaaaaagtgtatgttaacctagcctcacccccttgctctcaccagcctgaccaggaaactgagaaactggcccaaacctgagattccacttgggcccacgcttcttaactgacccactcctcccgttggcagaaccagacattcccagggcttgggccaatggctggcactgccctgagtgcatggcagcatccctcaagctgtgtagatgccccatagaggactctctcatccgtgggctccccgggtgggcacggaggcatttagaagaccagggccatgggtctgaggaagcctcagccaaagcctccagcctttctcctttctccgctcttaggtaaatgaacaagctaccctcctccccaatgcccttgactctgtttcattgactcttttgcatcccatctctcactcagaaccccctccagtctctctgtctctctttgtctgtctctctgtctcctgcactctcgttactaagcttcctgggagaatcaaataatatcatggctatggaacagtagagagagacaggcctgatgccaaaggctttgggctcatcatcaatctttcactttcttcctataaaaaaaattattttataaaggaggaaaaggcaatgtgggcaaacattacaaatttgaggttgaagtcaggcaatcttcaatgccctgtgagaaaggttcgattttcccaattttgatgaagtcttccctcatgaaaatcactcccagtcatcccaaacccctgacattctctacagaagcatcagacagatactcaaactctcactttccccaaatcacatctcttaacttttcaacgccctccaccctcagctccctgcacaattcatgggaggactcatttcttgccttgaataaccattttctaaacatcgagctcttcaccttccccaaggtggccaacagcttcctggctgccatctttccttttgaccttatctttccccattagtccctggtggcacctactctcagcccacctccctcaccacagtttccccttaggagacagcatgctggctgtgtcgcccaagcctgatgctggtgtaggcgctggaatcagcatgcagcaagctcacagtgcccctagtctgggtgcccgctgtccccgacaaatgtaaccacctccctgcctagaatacacacacgtcctccggtgcatgcacaaccacccagcatctttctttgtgatgatgtagccaaaaataaagtaggagcatccaag

SEQ ID NO: 173357 - DNA, 4452 bp, Homo sapiens
  Payload ID: 14077
  Gene Symbol: RPH3A
  Gene Name: rabphilin 3A
  Uniprot ID: Q9Y2J0
  ENST ID: ENST00000415485
  CDS Start-End: 267-2351
tttctttttgtcttggtcctgcatgatttaggggtagttgatgtgtctgtgtgtctacgtgtgtgcactggtgctttgattttattttgggaagagtaggagagtcaaatgaacaattttctttcaggcacctccgctgagcttttaaaccaagtcattgggacttagcgtctttctacccggcagggaagggaggagttggcaagaatttggctcacccattccccctgcaagcctccagcgtcgcggagcactagacatctactatgactgacaccgtgttcagcaacagttctaaccgttggatgtaccccagtgaccggccccttcaatcaaatgataaagaacagctccaggcaggctggtccgtccaccccggtggtcagcctgacaggcagaggaagcaggaagagctgactgatgaggagaaagaaatcatcaacagggtgattgctcgagctgagaaaatggaagagatggagcaggagcgaatcggacgcctggtggaccgcctagaaaacatgaggaagaacgtggctggagatggggtgaaccgctgcatactgtgtggagaacagctggggatgctgggctctgcctgtgtagtatgtgaggactgtaagaagaacgtctgcaccaagtgcggagtggagaccaacaaccgcctgcattctgtgtggctctgcaaaatctgcattgagcagagggaggtgtggaagcgttctggagcgtggttcttcaaaggcttccccaaacaggtcctcccacagcctatgcctataaagaagaccaagccccagcagcctgtcagtgagcctgctgcccctgaacagcctgctcctgagcccaagcaccctgcccgggctccagctcgaggtgacagtgaagataggaggggcccgggtcagaagacaggccctgacccagcctctgctcccgggcgaggaaactatgggcctcccgtgcgcagggcctccgaggcacgaatgagctcatctagccgagattcagagagctgggaccacagtgggggtgctggagactccagccggagcccagcaggtttgagacgggccaactcagtccaggcctccagacctgccccaggctcggtgcagagcccagcgccacctcagcctgggcagccagggaccccaggaggaagcagaccgggtcctgggccagcaggacgctttccagatcagaagccagaggtggctccgagcgaccctgggaccactgccccaccccgagaggagagaacagggggagtcgggggctacccagcagttggagccagagaggaccgaatgagccacccctccggaccctattcccaagcatctgcagctgccccccagcctgctgcagcccgccagccaccacccccagaggaggaggaagaggaagccaacagctacgattcggatgaagcaaccaccctgggtgccctggaattcagccttctctacgaccaggacaacagctccctgcagtgcaccatcattaaggccaagggcctgaagcccatggattcaaacggcttggctgatccctacgttaagctgcacctcctgccgggagccagcaagtccaacaagcttcgtacaaaaactctgcggaatacccggaaccccatctggaatgagaccctcgtgtatcacggcatcaccgatgaggacatgcaaaggaagaccctcaggatctccgtctgtgatgaggacaaatttggccacaatgaatttattggtgagaccagattctccctcaagaaactgaagcccaaccagaggaagaatttcaacatctgcctggagcgagtgattcctatgaaacgtgctgggaccaccgggtcagcccgaggcatggccctttatgaggaagagcaggtggagcgtgttggtgacatcgaggagcgtggcaagatcctggtctccctcatgtacagcacacagcagggaggcctcattgtgggcatcatacgctgcgtgcacctggctgccatggacgctaatggctactcagacccattcgtcaagctctggctgaaaccggacatgggaaagaaggccaaacacaagactcaaattaaaaagaaaaccttgaatcccgaattcaatgaggagtttttctatgacatcaaacacagtgacctggcaaagaagtcactggacatttcagtctgggactatgacatcggcaagtccaatgattacatcggaggctgccagctggggatctctgccaagggagagcgcttaaaacactggtacgagtgtctgaaaaataaagacaagaagatagagcgctggcaccagctacagaatgagaaccacgtgtcaagtgattaggctagtgcccaggtccccatctccatgtcccgggtcccccccagcctgctctagctgcccaccgcaccctgatctctcttctctatgcctacctccccccataccctgctgatctccctgagcctgcctttgagcccccgtcacgttgggcactgctgccaaagactccctcctccctgatgctgggatgtgggctctgaatacagcccctctctcatccctgggatggagcaatggggatggggttggggagacgtttacaaagaggttgatcatttaataacctctcagtttgggtaaattacaaaggttcttcatcatttaggactgtttttagaccctcctagccttgaacacacacatgtacacacacacacacacacacacacacacaccctttcattccctgtgttgtgtctctgtatatccccagttgtcagcagacccggacaatgctgtgagagaagcattggggcacaaatagagcctccgggctcccactgccccctgagatgtacaccctgattgccaggaaaacagactgctgtgttcagtaacacaccctccctgctccaagtgcaccaggatgcaaatgcacagaattcaccaggggcttggacgctctcctctttccgaatgtcacctgtgtgcttcctagcaaaacaaaaacaaacgacaacaacaaaaaacccttcctctgtcaccttttctcctcctccctcttctttcccttccatgatagtagattctctctttctcagcctctcccctctcctttctctccctgcctttcttccctttgcctttctctctctctaaagcagtaacaccgcaaaaacaacagcaaaaaaagtgtatgttaacctagcctcacccccttgctctcaccagcctgaccaggaaactgagaaactggcccaaacctgagattccacttgggcccacgcttcttaactgacccactcctcccgttggcagaaccagacattcccagggcttgggccaatggctggcactgccctgagtgcatggcagcatccctcaagctgtgtagatgccccatagaggactctctcatccgtgggctccccgggtgggcacggaggcatttagaagaccagggccatgggtctgaggaagcctcagccaaagcctccagcctttctcctttctccgctcttaggtaaatgaacaagctaccctcctccccaatgcccttgactctgtttcattgactcttttgcatcccatctctcactcagaaccccctccagtctctctgtctctctttgtctgtctctctgtctcctgcactctcgttactaagcttcctgggagaatcaaataatatcatggctatggaacagtagagagagacaggcctgatgccaaaggctttgggctcatcatcaatctttcactttcttcctataaaaaaaattattttataaaggaggaaaaggcaatgtgggcaaacattacaaatttgaggttgaagtcaggcaatcttcaatgccctgtgagaaaggttcgattttcccaattttgatgaagtcttccctcatgaaaatcactcccagtcatcccaaacccctgacattctctacagaagcatcagacagatactcaaactctcactttccccaaatcacatctcttaacttttcaacgccctccaccctcagctccctgcacaattcatgggaggactcatttcttgccttgaataaccattttctaaacatcgagctcttcaccttccccaaggtggccaacagcttcctggctgccatctttccttttgaccttatctttccccattagtccctggtggcacctactctcagcccacctccctcaccacagtttccccttaggagacagcatgctggctgtgtcgcccaagcctgatgctggtgtaggcgctggaatcagcatgcagcaagctcacagtgcccctagtctgggtgcccgctgtccccgacaaatgtaaccacctccctgcctagaatacacacacgtcctccggtgcatgcacaaccacccagcatctttctttgtgatgatgtagccaaaaataaagtaggagcatccaagaaaa

SEQ ID NO: 173358 - DNA, 2581 bp, Homo sapiens
  Payload ID: 14077
  Gene Symbol: RPH3A
  Gene Name: rabphilin 3A
  Uniprot ID: Q9Y2J0
  ENST ID: ENST00000543106
  CDS Start-End: 363-2447
gttcctaacccttgatcttggcttgttaaccctttctgagcttccctttagcggggggatgaggatggtcggctgtttccacatttaagggcagagctgggtgaagggtggtgttagtgctcgagggtcacgcgcgggtggctttgccgcggtggtggcagcggtggcagaggcgacaccgctggaggcggcggagggacgggcccaccaacgctgcaggccggcacctccgctgagcttttaaaccaagtcattgggacttagcgtctttctacccggcagggaagggaggagttggcaagaatttggctcacccattccccctgcaagcctccagcgtcgcggagcactagacatctactatgactgacaccgtgttcagcaacagttctaaccgttggatgtaccccagtgaccggccccttcaatcaaatgataaagaacagctccaggcaggctggtccgtccaccccggtggtcagcctgacaggcagaggaagcaggaagagctgactgatgaggagaaagaaatcatcaacagggtgattgctcgagctgagaaaatggaagagatggagcaggagcgaatcggacgcctggtggaccgcctagaaaacatgaggaagaacgtggctggagatggggtgaaccgctgcatactgtgtggagaacagctggggatgctgggctctgcctgtgtagtatgtgaggactgtaagaagaacgtctgcaccaagtgcggagtggagaccaacaaccgcctgcattctgtgtggctctgcaaaatctgcattgagcagagggaggtgtggaagcgttctggagcgtggttcttcaaaggcttccccaaacaggtcctcccacagcctatgcctataaagaagaccaagccccagcagcctgtcagtgagcctgctgcccctgaacagcctgctcctgagcccaagcaccctgcccgggctccagctcgaggtgacagtgaagataggaggggcccgggtcagaagacaggccctgacccagcctctgctcccgggcgaggaaactatgggcctcccgtgcgcagggcctccgaggcacgaatgagctcatctagccgagattcagagagctgggaccacagtgggggtgctggagactccagccggagcccagcaggtttgagacgggccaactcagtccaggcctccagacctgccccaggctcggtgcagagcccagcgccacctcagcctgggcagccagggaccccaggaggaagcagaccgggtcctgggccagcaggacgctttccagatcagaagccagaggtggctccgagcgaccctgggaccactgccccaccccgagaggagagaacagggggagtcgggggctacccagcagttggagccagagaggaccgaatgagccacccctccggaccctattcccaagcatctgcagctgccccccagcctgctgcagcccgccagccaccacccccagaggaggaggaagaggaagccaacagctacgattcggatgaagcaaccaccctgggtgccctggaattcagccttctctacgaccaggacaacagctccctgcagtgcaccatcattaaggccaagggcctgaagcccatggattcaaacggcttggctgatccctacgttaagctgcacctcctgccgggagccagcaagtccaacaagcttcgtacaaaaactctgcggaatacccggaaccccatctggaatgagaccctcgtgtatcacggcatcaccgatgaggacatgcaaaggaagaccctcaggatctccgtctgtgatgaggacaaatttggccacaatgaatttattggtgagaccagattctccctcaagaaactgaagcccaaccagaggaagaatttcaacatctgcctggagcgagtgattcctatgaaacgtgctgggaccaccgggtcagcccgaggcatggccctttatgaggaagagcaggtggagcgtgttggtgacatcgaggagcgtggcaagatcctggtctccctcatgtacagcacacagcagggaggcctcattgtgggcatcatacgctgcgtgcacctggctgccatggacgctaatggctactcagacccattcgtcaagctctggctgaaaccggacatgggaaagaaggccaaacacaagactcaaattaaaaagaaaaccttgaatcccgaattcaatgaggagtttttctatgacatcaaacacagtgacctggcaaagaagtcactggacatttcagtctgggactatgacatcggcaagtccaatgattacatcggaggctgccagctggggatctctgccaagggagagcgcttaaaacactggtacgagtgtctgaaaaataaagacaagaagatagagcgctggcaccagctacagaatgagaaccacgtgtcaagtgattaggctagtgcccaggtccccatctccatgtcccgggtcccccccagcctgctctagctgcccaccgcaccctgatctctcttctctatgcctacctccccccataccctgctgatctccctgagcctgcctttgag

SEQ ID NO: 173359 - DNA, 561 bp, Homo sapiens
  Payload ID: 14077
  Gene Symbol: RPH3A
  Gene Name: rabphilin 3A
  ENST ID: ENST00000546703
  CDS Start-End: 313-561
agaggcgacaccgctggaggcggcggagggacgggcccaccaacgctgcaggccggttcttgctctgttgcccaggctggactgcagtggcaccagcatggctcactgcagcctcgaccccctaggctcaagtgatcctcctgcttcagcctcctgagtagctgggaccacaggcacctccgctgagcttttaaaccaagtcattgggacttagcgtctttctacccggcagggaagggaggagttggcaagaatttggctcacccattccccctgcaagcctccagcgtcgcggagcactagacatctactatgactgacaccgtgttcagcaacagttctaaccgttggatgtaccccagtgaccggccccttcaatcaaatgataaagaacagctccaggcaggctggtccgtccaccccggtggtcagcctgacaggcagaggaagcaggaagagctgactgatgaggagaaagaaatcatcaacagggtgattgctcgagctgagaaaatggaagagatggagcaggagcgaatcggacgcctggtggaccgccta

SEQ ID NO: 173360 - DNA, 570 bp, Homo sapiens
  Payload ID: 14077
  Gene Symbol: RPH3A
  Gene Name: rabphilin 3A
  ENST ID: ENST00000548197
  CDS Start-End: 259-570
ccttctgaagctggacttgaacctgagaaaatgtgacctggggctgctggcggccagcttgtccccgttaggtgacaataagcagacagaagagccaagcagctatggaggaaaatcaggcacctccgctgagcttttaaaccaagtcattgggacttagcgtctttctacccggcagggaagggaggagttggcaagaatttggctcacccattccccctgcaagcctccagcgtcgcggagcactagacatctactatgactgacaccgtgttcagcaacagttctaaccgttggatgtaccccagtgaccggccccttcaatcaaatgataaagaacagctccaggcaggctggtccgtccaccccggtggtcagcctgacaggcagaggaagcaggaagagctgactgatgaggagaaagaaatcatcaacagggtgattgctcgagctgagaaaatggaagagatggagcaggagcgaatcggacgcctggtggaccgcctagaaaacatgaggaagaacgtggctggagatggggtgaaccgctgcatactgtgtggagaacag

SEQ ID NO: 173361 - DNA, 740 bp, Homo sapiens
  Payload ID: 14077
  Gene Symbol: RPH3A
  Gene Name: rabphilin 3A
  ENST ID: ENST00000551593
  CDS Start-End: 196-740
tttagcggggggatgaggatggtcggctgtttccacatttaagggcagagctgggtgaagggtggtgttagtgctcgagggtcacgcgcgggtggctttgccgcggtggtggcagcggtggcagaggcgacaccgctggaggcggcggagggacgggcccaccaacgctgcaggccggagcactagacatctactatgactgacaccgtgttcagcaacagttctaaccgttggatgtaccccagtgaccggccccttcaatcaaatgataaagaacagctccaggcaggctggtccgtccaccccggtggtcagcctgacaggcagaggaagcaggaagagctgactgatgaggagaaagaaatcatcaacagggtgattgctcgagctgagaaaatggaagagatggagcaggagcgaatcggacgcctggtggaccgcctagaaaacatgaggaagaacgtggctggagatggggtgaaccgctgcatactgtgtggagaacagctggggatgctgggctctgcctgtgtagtatgtgaggactgtaagaagaacgtctgcaccaagtgcggagtggagaccaacaaccgcctgcattctgtgtggctctgcaaaatctgcattgagcagagggaggtgtggaagcgttctggagcgtggttcttcaaaggcttccccaaacaggtcctcccacagcctatgcctataaagaagaccaagccccagcagcctgtcag

SEQ ID NO: 173362 - DNA, 534 bp, Homo sapiens
  Payload ID: 14077
  Gene Symbol: RPH3A
  Gene Name: rabphilin 3A
  ENST ID: ENST00000549736
  CDS Start-End: 416-534
gaatttcaggaatattgggagaagtcaccagaaaagaggactgctcccttctgaagctggacttgaacctgagaaaatgtgacctggggctgctggcggccagcttgtccccgttaggtgacaataagcagacagaagagccaagcagctatggaggaaaatcaggtcatcagttgggtcaaagatggagctactagccaggcctgagacctgagcccctggacaccatgtttctattttctgcttctgtgaaattgcctcttctacatacctcatgcacctccgctgagcttttaaaccaagtcattgggacttagcgtctttctacccggcagggaagggaggagttggcaagaatttggctcacccattccccctgcaagcctccagcgtcgcggagcactagacatctactatgactgacaccgtgttcagcaacagttctaaccgttggatgtaccccagtgaccggccccttcaatcaaatgataaagaacagctccaggcaggctggtccgtccaccccggtggtca

SEQ ID NO: 173363 - DNA, 579 bp, Homo sapiens
  Payload ID: 14077
  Gene Symbol: RPH3A
  Gene Name: rabphilin 3A
  ENST ID: ENST00000551198
  CDS Start-End: 203-579
cttcatccatgtggaggacagtctgagggagccactgtcccttgtccactgactcactggctggcacctccgctgagcttttaaaccaagtcattgggacttagcgtctttctacccggcagggaagggaggagttggcaagaatttggctcacccattccccctgcaagcctccagcgtcgcggagcactagacatctactatgactgacaccgtgttcagcaacagttctaaccgttggatgtaccccagtgaccggccccttcaatcaaatgataaagaacagctccaggcaggctggtccgtccaccccggtggtcagcctgacaggcagaggaagcaggaagagctgactgatgaggagaaagaaatcatcaacagggtgattgctcgagctgagaaaatggaagagatggagcaggagcgaatcggacgcctggtggaccgcctagaaaacatgaggaagaacgtggctggagatggggtgaaccgctgcatactgtgtggagaacagctggggatgctgggctctgcctgtgtagtatgtgaggactgtaagaagaacgtctgcaccaagtg

SEQ ID NO: 173364 - DNA, 557 bp, Homo sapiens
  Payload ID: 14077
  Gene Symbol: RPH3A
  Gene Name: rabphilin 3A
  ENST ID: ENST00000551748
  CDS Start-End: 275-557
ctttgccgcggtggtggcagcggtggcagaggcgacaccgctggaggcggcggagggacgggcccaccaacgctgcagggtctcgctctgtcacccaggctggagtgcaggagcagatcatagttcaccgcaacctccgcctcctgggctccagtgatccttccatcttagcctcctgagtagctgggaccacagcccctggacaccatgtttctattttctgcttctgtgaaattgcctcttctacatacctcatgagcactagacatctactatgactgacaccgtgttcagcaacagttctaaccgttggatgtaccccagtgaccggccccttcaatcaaatgataaagaacagctccaggcaggctggtccgtccaccccggtggtcagcctgacaggcagaggaagcaggaagagctgactgatgaggagaaagaaatcatcaacagggtgattgctcgagctgagaaaatggaagagatggagcaggagcgaatcggacgcctggtggaccgcctagaaaacatgaggaagaacgtggctggagatgggg

SEQ ID NO: 173365 - DNA, 538 bp, Homo sapiens
  Payload ID: 14077
  Gene Symbol: RPH3A
  Gene Name: rabphilin 3A
  ENST ID: ENST00000549769
  CDS Start-End: 193-538
atagttcctttgctctgagagtgagcgacagtattagaaaaagtgtgtggtaggcacctccgctgagcttttaaaccaagtcattgggacttagcgtctttctacccggcagggaagggaggagttggcaagaatttggctcacccattccccctgcaagcctccagcgtcgcggagcactagacatctactatgactgacaccgtgttcagcaacagttctaaccgttggatgtaccccagtgaccggccccttcaatcaaatgataaagaacagctccaggcaggctggtccgtccaccccggtggtcagcctgacaggcagaggaagcaggaagagctgactgatgaggagaaagaaatcatcaacagggtgattgctcgagctgagaaaatggaagagatggagcaggagcgaatcggacgcctggtggaccgcctagaaaacatgaggaagaacgtggctggagatggggtgaaccgctgcatactgtgtggagaacagctggggatgctgggctctgcctgtgtagtatgtg

SEQ ID NO: 173366 - DNA, 492 bp, Homo sapiens
  Payload ID: 14077
  Gene Symbol: RPH3A
  Gene Name: rabphilin 3A
  ENST ID: ENST00000546426
  CDS Start-End: 456-492
ggtggctttgccgcggtggtggcagcggtggcagaggcgacaccgctggaggcggcggagggacgggcccaccaacgctgcaggccggttcttgctctgttgcccaggctggactgcagtggcaccagcatggctcactgcagcctcgaccccctaggctcaagtgatcctcctgcttcagcctcctgagtagctgggaccacaggtcatcagttgggtcaaagatggagctactagccaggcctgagacctgagcccctggacaccatgtttctattttctgcttctgtgaaattgcctcttctacatacctcatgcacctccgctgagcttttaaaccaagtcattgggacttagcgtctttctacccggcagggaagggaggagttggcaagaatttggctcacccattccccctgcaagcctccagcgtcgcggagcactagacatctactatgactgacaccgtgttcagcaacagttctaaccgtt

SEQ ID NO: 173367 - DNA, 595 bp, Homo sapiens
  Payload ID: 14077
  Gene Symbol: RPH3A
  Gene Name: rabphilin 3A
  ENST ID: ENST00000550901
  CDS Start-End: 354-595
agagctaaaaccttcatccatgtggaggacagtctgagggagccactgtcccttgtccactgactcactggctggtccgagttttctccgcttctggcagtggcacctccgctgagcttttaaaccaagtcattgggacttagcgtctttctacccggcagggaagggaggagttggcaagaatttggctcacccattccccctgcaagcctccagcgtcgcgtgataaagaacagctccaggcaggctggtccgtccaccccggtggtcagcctgacaggcagaggaagcaggaagagctgactgatgaggagaaagaaatcatcaacagggtgattgctcgagctgagaaaatggaagagatggagcaggagcgaatcggacgcctggtggaccgcctagaaaacatgaggaagaacgtggctggagatggggtgaaccgctgcatactgtgtggagaacagctggggatgctgggctctgcctgtgtagtatgtgaggactgtaagaagaacgtctgcaccaagtgcggagtggagaccaacaaccgcctgcattctgtgtggctctgcaaaatctgcattgagcagaggga

SEQ ID NO: 173368 - DNA, 2961 bp, Homo sapiens
  Payload ID: 14077
  Gene Symbol: RPH3A
  Gene Name: rabphilin 3A
  Uniprot ID: Q9Y2J0
  ENST ID: ENST00000551052
  CDS Start-End: 216-2288
ggacagtctgagggagccactgtcccttgtccactgactcactggctggtccgagttttctccgcttctggcagtggcacctccgctgagcttttaaaccaagtcattgggacttagcgtctttctacccggcagggaagggaggagttggcaagaatttggctcacccattccccctgcaagcctccagcgtcgcggagcactagacatctactatgactgacaccgtgttcagcaacagttctaaccgttggatgtaccccagtgaccggccccttcaatcaaagctccaggcaggctggtccgtccaccccggtggtcagcctgacaggcagaggaagcaggaagagctgactgatgaggagaaagaaatcatcaacagggtgattgctcgagctgagaaaatggaagagatggagcaggagcgaatcggacgcctggtggaccgcctagaaaacatgaggaagaacgtggctggagatggggtgaaccgctgcatactgtgtggagaacagctggggatgctgggctctgcctgtgtagtatgtgaggactgtaagaagaacgtctgcaccaagtgcggagtggagaccaacaaccgcctgcattctgtgtggctctgcaaaatctgcattgagcagagggaggtgtggaagcgttctggagcgtggttcttcaaaggcttccccaaacaggtcctcccacagcctatgcctataaagaagaccaagccccagcagcctgtcagtgagcctgctgcccctgaacagcctgctcctgagcccaagcaccctgcccgggctccagctcgaggtgacagtgaagataggaggggcccgggtcagaagacaggccctgacccagcctctgctcccgggcgaggaaactatgggcctcccgtgcgcagggcctccgaggcacgaatgagctcatctagccgagattcagagagctgggaccacagtgggggtgctggagactccagccggagcccagcaggtttgagacgggccaactcagtccaggcctccagacctgccccaggctcggtgcagagcccagcgccacctcagcctgggcagccagggaccccaggaggaagcagaccgggtcctgggccagcaggacgctttccagatcagaagccagaggtggctccgagcgaccctgggaccactgccccaccccgagaggagagaacagggggagtcgggggctacccagcagttggagccagagaggaccgaatgagccacccctccggaccctattcccaagcatctgcagctgccccccagcctgctgcagcccgccagccaccacccccagaggaggaggaagaggaagccaacagctacgattcggatgaagcaaccaccctgggtgccctggaattcagccttctctacgaccaggacaacagctccctgcagtgcaccatcattaaggccaagggcctgaagcccatggattcaaacggcttggctgatccctacgttaagctgcacctcctgccgggagccagcaagtccaacaagcttcgtacaaaaactctgcggaatacccggaaccccatctggaatgagaccctcgtgtatcacggcatcaccgatgaggacatgcaaaggaagaccctcaggatctccgtctgtgatgaggacaaatttggccacaatgaatttattggtgagaccagattctccctcaagaaactgaagcccaaccagaggaagaatttcaacatctgcctggagcgagtgattcctatgaaacgtgctgggaccaccgggtcagcccgaggcatggccctttatgaggaagagcaggtggagcgtgttggtgacatcgaggagcgtggcaagatcctggtctccctcatgtacagcacacagcagggaggcctcattgtgggcatcatacgctgcgtgcacctggctgccatggacgctaatggctactcagacccattcgtcaagctctggctgaaaccggacatgggaaagaaggccaaacacaagactcaaattaaaaagaaaaccttgaatcccgaattcaatgaggagtttttctatgacatcaaacacagtgacctggcaaagaagtcactggacatttcagtctgggactatgacatcggcaagtccaatgattacatcggaggctgccagctggggatctctgccaagggagagcgcttaaaacactggtacgagtgtctgaaaaataaagacaagaagatagagcgctggcaccagctacagaatgagaaccacgtgtcaagtgattaggctagtgcccaggtccccatctccatgtcccgggtcccccccagcctgctctagctgcccaccgcaccctgatctctcttctctatgcctacctccccccataccctgctgatctccctgagcctgcctttgagcccccgtcacgttgggcactgctgccaaagactccctcctccctgatgctgggatgtgggctctgaatacagcccctctctcatccctgggatggagcaatggggatggggttggggagacgtttacaaagaggttgatcatttaataacctctcagtttgggtaaattacaaaggttcttcatcatttaggactgtttttagaccctcctagccttgaacacacacatgtacacacacacacacacacacacacacacaccctttcattccctgtgttgtgtctctgtatatccccagttgtcagcagacccggacaatgctgtgagagaagcattggggcacaaatagagcctccgggctcccactgccccctgagatgtacaccctgattgccaggaaaacagactgctgtgttcagtaacacaccctccctgctccaagtgcaccaggatgcaaatgcacagaattcaccaggggcttggacgctctcctctttccgaatgtcacctgtgtgcttcctagcaaaacaaaaacaaa

SEQ ID NO: 173369 - DNA, 547 bp, Homo sapiens
  Payload ID: 14077
  Gene Symbol: RPH3A
  Gene Name: rabphilin 3A
  ENST ID: ENST00000547099
  CDS Start-End: 36-218
aagcctccagcgtcgcggagcactagacatctactatgactgacaccgtgttcagcaacagttctaaccgttggatgtaccccagtgaccggccccttcaatcaaagttgcagcattctaggtggactttgaaggattggttgtgctttcaagtgtctgttaagagtcttaagccaacaaattgcccttcctctgtagatggtttttccttccactgataaagaacagctccaggcaggctggtccgtccaccccggtggtcagcctgacaggcagaggaagcaggaagagctgactgatgaggagaaagaaatcatcaacagggtgattgctcgagctgagaaaatggaagagatggagcaggagcgaatcggacgcctggtggaccgcctagaaaacatgaggaagaacgtggctggagatggggtgaaccgctgcatactgtgtggagaacagctggggatgctgggctctgcctgtgtagtatgtgaggactgtaagaagaacgtctgcaccaagtgcggagtggagaccaacaaccgcctgc

SEQ ID NO: 173370 - DNA, 660 bp, Homo sapiens
  Payload ID: 14077
  Gene Symbol: RPH3A
  Gene Name: rabphilin 3A
  ENST ID: ENST00000547728
  CDS Start-End: 170-660
ttttctgctctgaattctgagaaactccaggcacctccgctgagcttttaaaccaagtcattgggacttagcgtctttctacccggcagggaagggaggagttggcaagaatttggctcacccattccccctgcaagcctccagcgtcgcggagcactagacatctactatgactgacaccgtgttcagcaacagttctaaccgttggatgtaccccagtgaccggccccttcaatcaaatgataaagaacagctccaggcaggctggtccgtccaccccggtggtcagcctgacaggcagaggaagcaggaagagctgactgatgaggagaaagaaatcatcaacagggtgattgctcgagctgagaaaatggaagagatggagcaggagcgaatcggacgcctggtggaccgcctagaaaacatgaggaagaacgtggctggagatggggtgaaccgctgcatactgtgtggagaacagctggggatgctgggctctgcctgtgtagtatgtgaggactgtaagaagaacgtctgcaccaagtgcggagtggagaccaacaaccgcctgcattctgtgtggctctgcaaaatctgcattgagcagagggaggtgtggaagcgttctggagcgtggttcttcaaaggcttccccaaaca

SEQ ID NO: 173371 - DNA, 572 bp, Homo sapiens
  Payload ID: 14077
  Gene Symbol: RPH3A
  Gene Name: rabphilin 3A
  ENST ID: ENST00000552667
  CDS Start-End: 213-572
aaggcatcttagcgctgtccgtggtgctgaccgccaatcccctggttgccgtttcgaccagctgggatctctggcacctccgctgagcttttaaaccaagtcattgggacttagcgtctttctacccggcagggaagggaggagttggcaagaatttggctcacccattccccctgcaagcctccagcgtcgcggagcactagacatctactatgactgacaccgtgttcagcaacagttctaaccgttggatgtaccccagtgaccggccccttcaatcaaatgataaagaacagctccaggcaggctggtccgtccaccccggtggtcagcctgacaggcagaggaagcaggaagagctgactgatgaggagaaagaaatcatcaacagggtgattgctcgagctgagaaaatggaagagatggagcaggagcgaatcggacgcctggtggaccgcctagaaaacatgaggaagaacgtggctggagatggggtgaaccgctgcatactgtgtggagaacagctggggatgctgggctctgcctgtgtagtatgtgaggactgtaagaag

SEQ ID NO: 173372 - DNA, 531 bp, Homo sapiens
  Payload ID: 14077
  Gene Symbol: RPH3A
  Gene Name: rabphilin 3A
  ENST ID: ENST00000547686
  CDS Start-End: 250-531
gagagggaggaagaggagggagaggggcgatggagaaggtcatcagttgggtcaaagatggagctactagccaggcctgagacctgagcccctggacaccatgtttctattttctgcttctgtgaaattgcctcttctacatacctcatgcaacgttcgttctacataattcagcaccagcttagattctcactatcaaattgaaccctttcccctttgctatccacacaggagcactagacatctactatgactgacaccgtgttcagcaacagttctaaccgttggatgtaccccagtgaccggccccttcaatcaaatgataaagaacagctccaggcaggctggtccgtccaccccggtggtcagcctgacaggcagaggaagcaggaagagctgactgatgaggagaaagaaatcatcaacagggtgattgctcgagctgagaaaatggaagagatggagcaggagcgaatcggacgcctggtggaccgcctagaaaacatgaggaagaacgtggctggagatggg

SEQ ID NO: 173373 - DNA, 562 bp, Homo sapiens
  Payload ID: 14077
  Gene Symbol: RPH3A
  Gene Name: rabphilin 3A
  ENST ID: ENST00000553114
  CDS Start-End: 162-562
gtctttctacccggcagggaagggaggagttggcaagaatttggctcacccattccccctgcaagcctccagcgtcgcggggcaagaagaggagaagaggaagattgtggtccattcatgttctccagccaatactggccaaggagcactagacatctactatgactgacaccgtgttcagcaacagttctaaccgttggatgtaccccagtgaccggccccttcaatcaaatgataaagaacagctccaggcaggctggtccgtccaccccggtggtcagcctgacaggcagaggaagcaggaagagctgactgatgaggagaaagaaatcatcaacagggtgattgctcgagctgagaaaatggaagagatggagcaggagcgaatcggacgcctggtggaccgcctagaaaacatgaggaagaacgtggctggagatggggtgaaccgctgcatactgtgtggagaacagctggggatgctgggctctgcctgtgtagtatgtgaggactgtaagaagaacgtctgcaccaagtgcggagtggagaccaacaaccgcct

SEQ ID NO: 173374 - DNA, 2429 bp, Homo sapiens
  Payload ID: 14077
  Gene Symbol: RPH3A
  Gene Name: rabphilin 3A
  ENST ID: ENST00000548866
  CDS Start-End: 95-2032
tttctacccggcagggaagggaggagttggcaagaatttggctcacccattccccctgcaagcctccagcgtcgcggagcactagacatctactatgactgacaccgtgttcagcaacagttctaaccgttggatgtaccccagtgaccggccccttcaatcaaatgataaagaacaacgcctggtggaccgcctagaaaacatgaggaagaacgtggctggagatggggtgaaccgctgcatactgtgtggagaacagctggggatgctgggctctgcctgtgtagtatgtgaggactgtaagaagaacgtctgcaccaagtgcggagtggagaccaacaaccgcctgcattctgtgtggctctgcaaaatctgcattgagcagagggaggtgtggaagcgttctggagcgtggttcttcaaaggcttccccaaacaggtcctcccacagcctatgcctataaagaagaccaagccccagcagcctgtcagtgagcctgctgcccctgaacagcctgctcctgagcccaagcaccctgcccgggctccagctcgaggtgacagtgaagataggaggggcccgggtcagaagacaggccctgacccagcctctgctcccgggcgaggaaactatgggcctcccgtgcgcagggcctccgaggcacgaatgagctcatctagccgagattcagagagctgggaccacagtgggggtgctggagactccagccggagcccagcaggtttgagacgggccaactcagtccaggcctccagacctgccccaggctcggtgcagagcccagcgccacctcagcctgggcagccagggaccccaggaggaagcagaccgggtcctgggccagcaggacgctttccagatcagaagccagaggtggctccgagcgaccctgggaccactgccccaccccgagaggagagaacagggggagtcgggggctacccagcagttggagccagagaggaccgaatgagccacccctccggaccctattcccaagcatctgcagctgccccccagcctgctgcagcccgccagccaccacccccagaggaggaggaagaggaagccaacagctacgattcggatgaagcaaccaccctgggtgccctggaattcagccttctctacgaccaggacaacagctccctgcagtgcaccatcattaaggccaagggcctgaagcccatggattcaaacggcttggctgatccctacgttaagctgcacctcctgccgggagccagcaagtccaacaagcttcgtacaaaaactctgcggaatacccggaaccccatctggaatgagaccctcgtgtatcacggcatcaccgatgaggacatgcaaaggaagaccctcaggatctccgtctgtgatgaggacaaatttggccacaatgaatttattggtgagaccagattctccctcaagaaactgaagcccaaccagaggaagaatttcaacatctgcctggagcgagtgattcctatgaaacgtgctgggaccaccgggtcagcccgaggcatggccctttatgaggaagagcaggtggagcgtgttggtgacatcgaggagcgtggcaagatcctggtctccctcatgtacagcacacagcagggaggcctcattgtgggcatcatacgctgcgtgcacctggctgccatggacgctaatggctactcagacccattcgtcaagctctggctgaaaccggacatgggaaagaaggccaaacacaagactcaaattaaaaagaaaaccttgaatcccgaattcaatgaggagtttttctatgacatcaaacacagtgacctggcaaagaagtcactggacatttcagtctgggactatgacatcggcaagtccaatgattacatcggaggctgccagctggggatctctgccaagggagagcgcttaaaacactggtacgagtgtctgaaaaataaagacaagaagatagagcgctggcaccagctacagaatgagaaccacgtgtcaagtgattaggctagtgcccaggtccccatctccatgtcccgggtcccccccagcctgctctagctgcccaccgcaccctgatctctcttctctatgcctacctccccccataccctgctgatctccctgagcctgcctttgagcccccgtcacgttgggcactgctgccaaagactccctcctccctgatgctgggatgtgggctctgaatacagcccctctctcatccctgggatggagcaatggggatggggttggggagacgtttacaaagaggttgatcatttaataacctctcagtttgggtaaattacaaaggttcttcatcatttaggactgtttttagaccctcctagccttgaacacacacatgtacacacacacacacacacacacacacacaccc

SEQ ID NO: 173375 - DNA, 561 bp, Homo sapiens
  Payload ID: 14077
  Gene Symbol: RPH3A
  Gene Name: rabphilin 3A
  ENST ID: ENST00000547840
  CDS Start-End: 181-561
acttttcactttcagaatggcgtccagtaaatcaatcctgggcacctccgctgagcttttaaaccaagtcattgggacttagcgtctttctacccggcagggaagggaggagttggcaagaatttggctcacccattccccctgcaagcctccagcgtcgcggagcactagacatctactatgactgacaccgtgttcagcaacagttctaaccgttggatgtaccccagtgaccggccccttcaatcaaatgataaagaacagctccaggcaggctggtccgtccaccccggtggtcagcctgacaggcagaggaagcaggaagagctgactgatgaggagaaagaaatcatcaacagggtgattgctcgagctgagaaaatggaagagatggagcaggagcgaatcggacgcctggtggaccgcctagaaaacatgaggaagaacgtggctggagatggggtgaaccgctgcatactgtgtggagaacagctggggatgctgggctctgcctgtgtagtatgtgaggactgtaagaagaacgtctgcaccaagtgcgga

SEQ ID NO: 173376 - DNA, 2809 bp, Homo sapiens
  Payload ID: 14078
  Gene Symbol: RPH3AL
  Gene Name: rabphilin 3A-like (without C2 domains)
  Uniprot ID: Q9UNE2
  ENST ID: ENST00000323434
  CDS Start-End: 599-1459
ccaccactgctgcctgtaagggctgttttggatacagaaaatgtgccctttctaacccaaaaaatgcttgaaatgtgtaaaagtggccagactaacagtcccaaagagggctgccctctaagaggaagcgtcccaaatctgttcagttttagagactacgtgactggggtacgtggtggggccttaccagacatccacgaggagaatccaggccttggtttggctccagctgggcctgcctggtggctgccacttattgacttaagtcccagtgattcagctcctcatctggaacacctcgggtcacccccgacaacggtggtgggagggagagcggcctcctcctccctggtggggcctgtctgggtgaagcccctctgttcccgaggatcgtctgccttattgaaaccatctaattggagatccgcagattaggctaccaagacacagctgcctccagcagaatttgtgtagtggacacttgtacgtgcactttggagacagcaagcatgaggcctgcagctgacagctttgagtggctgtgaacctgactatggaaaagatgtgactccccacccccagccgggtgctccgagccatggccgacaccatcttcggcagcgggaatgatcagtgggtttgccccaatgaccggcagcttgcccttcgagccaagctgcagacgggctggtccgtgcacacctaccagacggagaagcagaggaggaagcagcacctcagcccggcggaggtggaggccatcctgcaggtcatccagagggcagagcggctcgacgtcctggagcagcagagaatcgggcggctggtggagcggctggagaccatgaggcggaatgtgatggggaacggcctgtcccagtgtctgctctgcggggaggtgctgggcttcctgggcagctcgtcggtgttctgcaaagactgcaggaaggtctggaagaggtcgggggcctggttctacaaagggctccccaagtatatcttgcccctgaagacccctggccgagctgatgacccccacttccgacctttgcccacggaaccggcagagcgagagcccagaagctctgagaccagccgcatctacacgtgggcccgaggaagagtggtttccagtgacagtgacagtgactcggatcttagctcctccagcctagaggacagactcccatccactggggtcagggaccggaaaggcgacaaaccctggaaggagtcaggtggcagcgtggaggcccccaggatggggttcacccacccgccgggccacctctctgggtgccagagcagcctggccagtggtgagacggggacaggctctgctgacccgccagggggaccccgccccgggctgacccgaagggccccggtaaaagacacacctggacgagcccccgctgctgacgcagctccagcaggcccctccagctgcctgggctgaggtgtctggtgcctggaacagacttccctgtggaggattcctgccagaccctgcccggctcctccctgaccggtccttgtgccctcaccagacaccctgttggccatgactcaacaaaccagtgttgggagccgtctgcctccccagctcagtgcctttctgcaccccttctctcctggggagctgtctgcatccgccaccccctccaaccactgccctcagcccccgaccttatttattaccctcccctcccacacccccaatctacctggtgatgattttaagtttgcgcgtgtcttgggttgggctggggggtttcccacatgcagtgtcagaggggccgcccggtggggctatctccgttgctatattaatggcaagactaaatgaaacctagggcacggcctccgaagctgcgtgtggccccttagaggtgagcatcagagccagagcagtgagggggagactcacccaccctctccctctcccttcagctctgggaggcaggcgcagtgcccccctcccatgggctggcccaggaccgtgggtgaaacctgggtctgtttagtttctttggtttttgtatgtttgtttgtttttgacacagtctcgctttgttgcccaggctggggtgcagtggcacgatcgcggctcactgcaacctccacctcccgggctcaagcgattctctcacctcagcctcctgagtaggtgggattacagatgcccgccaccacacccagttaatttttgtatttttagaagagatggggtttctccatgttggccaggctggtcttgaactcctggtctcaagtgatctgcccgcctcggcctcccaaagtgctgggattacaggtgtgagccaccgcacccaatcctattaggtttctttgaatcccctcatggcctgcctggtttttgctcagcctgtcttcagcttgaggagctgggaagctctggtggatgctatgaactcacttgctgaagagcagcgttcaggtgcatccccagccagggcacgtggctccctcagccatgaattcacttctcttcaggaggtttggcttggcatgaaaatacttcattcagagtatgggcaaatgcttctggaaaacccttccctgaagagagagaacgtgtgtgtgtgtgtcggtgatcacaccctcccatccttcctgcctcctgccccaaaccccgggttcctgggtctggaagggccttctctccaagctgggagctcctgggcccccaccattcactttttgtccttgctgctggcaaacagtaaagaaactcactttccctgtggcacgttatgcttcagaattaaaacaatgaagattaaaa

SEQ ID NO: 173377 - DNA, 2606 bp, Homo sapiens
  Payload ID: 14078
  Gene Symbol: RPH3AL
  Gene Name: rabphilin 3A-like (without C2 domains)
  Uniprot ID: Q9UNE2
  ENST ID: ENST00000331302
  CDS Start-End: 309-1256
ggaacacctcgggtcacccccgacaacggtggtgggagggagagcggcctcctcctccctggtggggcctgtctgggtgaagcccctctgttcccgaggatcgtctgccttattgaaaccatctaattggagatccgcagattaggctaccaagacacagctgcctccagcagaatttgtgtagtggacacttgtacgtgcactttggagacagcaagcatgaggcctgcagctgacagctttgagtggctgtgaacctgactatggaaaagatgtgactccccacccccagccgggtgctccgagccatggccgacaccatcttcggcagcgggaatgatcagtgggtttgccccaatgaccggcagcttgcccttcgagccaagctgcagacgggctggtccgtgcacacctaccagacggagaagcagaggaggaagcagcacctcagcccggcggaggtggaggccatcctgcaggtcatccagagggcagagcggctcgacgtcctggagcagcagagaatcgggcggctggtggagcggctggagaccatgaggcggaatgtgatggggaacggcctgtcccagtgtctgctctgcggggaggtgctgggcttcctgggcagctcgtcggtgttctgcaaagactgcaggaagaaagtctgcaccaaatgtgggatcgaggcctcccctggccagaagcggcccctgtggctgtgtaagatctgcagtgagcaaagagaggtctggaagaggtcgggggcctggttctacaaagggctccccaagtatatcttgcccctgaagacccctggccgagctgatgacccccacttccgacctttgcccacggaaccggcagagcgagagcccagaagctctgagaccagccgcatctacacgtgggcccgaggaagagtggtttccagtgacagtgacagtgactcggatcttagctcctccagcctagaggacagactcccatccactggggtcagggaccggaaaggcgacaaaccctggaaggagtcaggtggcagcgtggaggcccccaggatggggttcacccacccgccgggccacctctctgggtgccagagcagcctggccagtggtgagacggggacaggctctgctgacccgccagggggaccccgccccgggctgacccgaagggccccggtaaaagacacacctggacgagcccccgctgctgacgcagctccagcaggcccctccagctgcctgggctgaggtgtctggtgcctggaacagacttccctgtggaggattcctgccagaccctgcccggctcctccctgaccggtccttgtgccctcaccagacaccctgttggccatgactcaacaaaccagtgttgggagccgtctgcctccccagctcagtgcctttctgcaccccttctctcctggggagctgtctgcatccgccaccccctccaaccactgccctcagcccccgaccttatttattaccctcccctcccacacccccaatctacctggtgatgattttaagtttgcgcgtgtcttgggttgggctggggggtttcccacatgcagtgtcagaggggccgcccggtggggctatctccgttgctatattaatggcaagactaaatgaaacctagggcacggcctccgaagctgcgtgtggccccttagaggtgagcatcagagccagagcagtgagggggagactcacccaccctctccctctcccttcagctctgggaggcaggcgcagtgcccccctcccatgggctggcccaggaccgtgggtgaaacctgggtctgtttagtttctttggtttttgtatgtttgtttgtttttgacacagtctcgctttgttgcccaggctggggtgcagtggcacgatcgcggctcactgcaacctccacctcccgggctcaagcgattctctcacctcagcctcctgagtaggtgggattacagatgcccgccaccacacccagttaatttttgtatttttagaagagatggggtttctccatgttggccaggctggtcttgaactcctggtctcaagtgatctgcccgcctcggcctcccaaagtgctgggattacaggtgtgagccaccgcacccaatcctattaggtttctttgaatcccctcatggcctgcctggtttttgctcagcctgtcttcagcttgaggagctgggaagctctggtggatgctatgaactcacttgctgaagagcagcgttcaggtgcatccccagccagggcacgtggctccctcagccatgaattcacttctcttcaggaggtttggcttggcatgaaaatacttcattcagagtatgggcaaatgcttctggaaaacccttccctgaagagagagaacgtgtgtgtgtgtgtcggtgatcacaccctcccatccttcctgcctcctgccccaaaccccgggttcctgggtctggaagggccttctctccaagctgggagctcctgggcccccaccattcactttttgtccttgctgctggcaaacagtaaagaaactcactttccctgtggcacgttatgcttcagaattaaaacaatgaagattaaaa

SEQ ID NO: 173378 - DNA, 1235 bp, Homo sapiens
  Payload ID: 14078
  Gene Symbol: RPH3AL
  Gene Name: rabphilin 3A-like (without C2 domains)
  Uniprot ID: Q9UNE2
  ENST ID: ENST00000536489
  CDS Start-End: 168-1028
attgacttaagtcccagtgattcagctcctcatctggaacacctcgggtcacccccgacaacggtggtgggagggagagcggcctcctcctccctggtggggcctgtctgggtgaagcccctctgttcccgatgtgactccccacccccagccgggtgctccgagccatggccgacaccatcttcggcagcgggaatgatcagtgggtttgccccaatgaccggcagcttgcccttcgagccaagctgcagacgggctggtccgtgcacacctaccagacggagaagcagaggaggaagcagcacctcagcccggcggaggtggaggccatcctgcaggtcatccagagggcagagcggctcgacgtcctggagcagcagagaatcgggcggctggtggagcggctggagaccatgaggcggaatgtgatggggaacggcctgtcccagtgtctgctctgcggggaggtgctgggcttcctgggcagctcgtcggtgttctgcaaagactgcaggaaggtctggaagaggtcgggggcctggttctacaaagggctccccaagtatatcttgcccctgaagacccctggccgagctgatgacccccacttccgacctttgcccacggaaccggcagagcgagagcccagaagctctgagaccagccgcatctacacgtgggcccgaggaagagtggtttccagtgacagtgacagtgactcggatcttagctcctccagcctagaggacagactcccatccactggggtcagggaccggaaaggcgacaaaccctggaaggagtcaggtggcagcgtggaggcccccaggatggggttcacccacccgccgggccacctctctgggtgccagagcagcctggccagtggtgagacggggacaggctctgctgacccgccagggggaccccgccccgggctgacccgaagggccccggtaaaagacacacctggacgagcccccgctgctgacgcagctccagcaggcccctccagctgcctgggctgaggtgtctggtgcctggaacagacttccctgtggaggattcctgccagaccctgcccggctcctccctgaccggtccttgtgccctcaccagacaccctgttggccatgactcaacaaaccagtgttgggagccgtctgcctccccagctcagtgcctttctgcaccccttctctcctggggagctgtctgcatccgccaccccctcc

SEQ ID NO: 173379 - DNA, 487 bp, Homo sapiens
  Payload ID: 14078
  Gene Symbol: RPH3AL
  Gene Name: rabphilin 3A-like (without C2 domains)
  ENST ID: ENST00000573448
  CDS Start-End: 375-487
ccaagcgggtgaggagggttgaggcttctttttccctagaagcttctctgcttcatggagaggtttctcttgggctccttcaacaagcagttcccaggtgggagccgaaatcaggtttcctctgcaaagattctgcctgcctgggactttccagacccacatacatcacgtaaatggaagcaggcctgcgtttctgcattaaaagacaaatagcatgaatgctcgatactgcccgtcccaagccaggtgcccggcagcctgggagcacttgggcattttctgggcagagagtgctcaggggccacaggtacctacgtattattctggtcacgtttgcaatgtgactccccacccccagccgggtgctccgagccatggccgacaccatcttcggcagcgggaatgatcagtgggtttgccccaatgaccggcagcttgcccttcgagccaagctgcagacgggctggtccgtgcacacctaccagac

SEQ ID NO: 173380 - DNA, 566 bp, Homo sapiens
  Payload ID: 14078
  Gene Symbol: RPH3AL
  Gene Name: rabphilin 3A-like (without C2 domains)
  ENST ID: ENST00000575736
  CDS Start-End: 189-566
aaactgggcacctggtgccagcttatggggccttgggcacgtggctgcccctctcgagctggtttcttcttttctgaaaggagtgatgatcacgtcgtcctctggggcttgtgatgattccagttggtcagccagtggcgggcacctggcagatgtgactccccacccccagccgggtgctccgagccatggccgacaccatcttcggcagcgggaatgatcagtgggtttgccccaatgaccggcagcttgcccttcgagccaagctgcagacgggctggtccgtgcacacctaccagacggagaagcagaggaggaagcagcacctcagcccggcggaggtggaggccatcctgcaggtcatccagagggcagagcggctcgacgtcctggagcagcagagaatcgggcggctggtggagcggctggagaccatgaggcggaatgtgatggggaacggcctgtcccagtgtctgctctgcggggaggtgctgggcttcctgggcagctcgtcggtgttctgcaaagactgcaggaagaaagtctgcaccaaatgtgggatcgag

SEQ ID NO: 173381 - DNA, 692 bp, Homo sapiens
  Payload ID: 14078
  Gene Symbol: RPH3AL
  Gene Name: rabphilin 3A-like (without C2 domains)
  ENST ID: ENST00000574953
  CDS Start-End: 1-474
atcttcggcagcgggaatgatcagtgggtttgccccaatgaccggcagcttgcccttcgagccaagctgcagacgggctggtccgtgcacacctaccagacggagaagcagaggaggaagcagcacctcagcccggcggaggtggaggccatcctgcaggtcatccagagggcagagcggctcgacgtcctggagcagcagagaatcgggcggctggtggagcggctggagaccatgaggcggaatgtgatggggaacggcctgtcccagtgtctgctctgcggggaggtgctgggcttcctgggcagctcgtcggtgttctgcaaagactgcaggaagaaagtctgcaccaaatgtgggatcgaggcctcccctggccagaagcggcccctgtggctgtgtaagatctgcagtgagcaaagagagcttttttattttaccatctatcgtgtggagccttctgttttcctgtgagacgccctccagaccccagagtagttcctgagcgctgccttccgggaacttcccctcagctcaccttttgagttggagactgtttccaggatcctgtgttttccctttcttgtttttcacttgtgtttttctggaacccgtcctaagttcttaaaaagagtgtgtgtaagggaaactcagcgtccttatgagtttaaaaacatctgtgttctgccctc

SEQ ID NO: 173382 - DNA, 586 bp, Homo sapiens
  Payload ID: 14078
  Gene Symbol: RPH3AL
  Gene Name: rabphilin 3A-like (without C2 domains)
  ENST ID: ENST00000574722
  CDS Start-End: 141-586
ttgaaattgcaggaggcggttgctccggcctgtctcaagctctgttgggtgccgatggggaaactgaggctcaggaagacagttgacttgttcctggacttctaatgtgactccccacccccagccgggtgctccgagccatggccgacaccatcttcggcagcgggaatgatcagtgggtttgccccaatgaccggcagcttgcccttcgagccaagctgcagacgggctggtccgtgcacacctaccagacggagaagcagaggaggaagcagcacctcagcccggcggaggtggaggccatcctgcaggtcatccagagggcagagcggctcgacgtcctggagcagcagagaatcgggcggctggtggagcggctggagaccatgaggcggaatgtgatggggaacggcctgtcccagtgtctgctctgcggggaggtgctgggcttcctgggcagctcgtcggtgttctgcaaagactgcaggaaggtctggaagaggtcgggggcctggttctacaaagggctccccaagtatatcttgcccctgaagacccctggccgagctgatgacccccacttccg

SEQ ID NO: 173383 - DNA, 814 bp, Homo sapiens
  Payload ID: 14078
  Gene Symbol: RPH3AL
  Gene Name: rabphilin 3A-like (without C2 domains)
  ENST ID: ENST00000577079
  CDS Start-End: 235-814
ccccgacaacggtggtgggagggagagcggcctcctcctccctggtggggcctgtctgggtgaagcccctctgttcccggtaggtgtttcggggtctcatggctccaaggacattggaagatgcctctgttttcctggagtcaggggcccagttcatgcaggggttttcacagaactttgctaacttccggggaaaagatgtgactccccacccccagccgggtgctccgagccatggccgacaccatcttcggcagcgggaatgatcagtgggtttgccccaatgaccggcagcttgcccttcgagccaagctgcagacgggctggtccgtgcacacctaccagacggagaagcagaggaggaagcagcacctcagcccggcggaggtggaggccatcctgcaggtcatccagagggcagagcggctcgacgtcctggagcagcagagaatcgggcggctggtggagcggctggagaccatgaggcggaatgtgatggggaacggcctgtcccagtgtctgctctgcggggaggtgctgggcttcctgggcagctcgtcggtgttctgcaaagactgcaggaagaaagtctgcaccaaatgtgggatcgaggcctcccctggccagaagcggcccctgtggctgtgtaagatctgcagtgagcaaagagaggtctggaagaggtcgggggcctggttctacaaagggctccccaagtatatcttgcccctgaagacccctggccgagctgatgacccccacttccgacctttgcccacggaaccggcagagcgagagcccagaagctctgaga

SEQ ID NO: 173384 - DNA, 593 bp, Homo sapiens
  Payload ID: 14078
  Gene Symbol: RPH3AL
  Gene Name: rabphilin 3A-like (without C2 domains)
  ENST ID: ENST00000573588
  CDS Start-End: 345-593
agtgctggctttaccagcttctgagcccacaaatgctgttaaggagatagaagccttcttttaagtagatgcaactgtttgcaaagaagaggccctttattttattttatttatttatttttttgcgaatagaggatcgtctgccttattgaaaccatctaattggagatccgcagattaggctaccaagacacagctgcctccagcagaatttgtgtagtggacacttgtacgtgcactttggagacagcaagcatgaggcctgcagctgacagctttgagtggctgtgaacctgactatggaaaagatgtgactccccacccccagccgggtgctccgagccatggccgacaccatcttcggcagcgggaatgatcagtgggtttgccccaatgaccggcagcttgcccttcgagccaagctgcagacgggctggtccgtgcacacctaccagacggagaagcagaggaggaagcagcacctcagcccggcggaggtggaggccatcctgcaggtcatccagagggcagagcggctcgacgtcctggagcagcagagaatcgggcggctggtggagcggctggagaccatg

SEQ ID NO: 173385 - DNA, 531 bp, Homo sapiens
  Payload ID: 14078
  Gene Symbol: RPH3AL
  Gene Name: rabphilin 3A-like (without C2 domains)
  ENST ID: ENST00000573780
  CDS Start-End: 95-531
acggttttgccgccagagggcagcgagggagcgcgcgggctgcggggccgaaccccggatgtgactccccacccccagccgggtgctccgagccatggccgacaccatcttcggcagcgggaatgatcagtgggtttgccccaatgaccggcagcttgcccttcgagccaagctgcagacgggctggtccgtgcacacctaccagacggagaagcagaggaggaagcagcacctcagcccggcggaggtggaggccatcctgcaggtcatccagagggcagagcggctcgacgtcctggagcagcagagaatcgggcggctggtggagcggctggagaccatgaggcggaatgtgatggggaacggcctgtcccagtgtctgctctgcggggaggtgctgggcttcctgggcagctcgtcggtgttctgcaaagactgcaggaagaaagtctgcaccaaatgtgggatcgaggcctcccctggccagaagcggcccctgtggctgtgtaagatctgcagtgagcaaagaga

SEQ ID NO: 173386 - DNA, 820 bp, Homo sapiens
  Payload ID: 14078
  Gene Symbol: RPH3AL
  Gene Name: rabphilin 3A-like (without C2 domains)
  ENST ID: ENST00000576420
  CDS Start-End: 217-820
gaggtgaggggaggaaggttggagaagtacctggcaggacccgcggagagccacctgggagctggagtctgggctgggccgtgcagaagctgctggcggaggcaggggtgtgggacgctgccccccggggcctggagcaccgccctcagcacacctgaggactgggccttttccaagcggatgtgactccccacccccagccgggtgctccgagccatggccgacaccatcttcggcagcgggaatgatcagtgggtttgccccaatgaccggcagcttgcccttcgagccaagctgcagacgggctggtccgtgcacacctaccagacggagaagcagaggaggaagcagcacctcagcccggcggaggtggaggccatcctgcaggtcatccagagggcagagcggctcgacgtcctggagcagcagagaatcgggcggctggtggagcggctggagaccatgaggcggaatgtgatggggaacggcctgtcccagtgtctgctctgcggggaggtgctgggcttcctgggcagctcgtcggtgttctgcaaagactgcaggaagaaagtctgcaccaaatgtgggatcgaggcctcccctggccagaagcggcccctgtggctgtgtaagatctgcagtgagcaaagagaggtctggaagaggtcgggggcctggttctacaaagggctccccaagtatatcttgcccctgaagacccctggccgagctgatgacccccacttccgacctttgcccacggaaccggcagagcgagagcccagaagctctgagaccagccgcatctacacgtgggccc

SEQ ID NO: 173387 - DNA, 579 bp, Homo sapiens
  Payload ID: 14078
  Gene Symbol: RPH3AL
  Gene Name: rabphilin 3A-like (without C2 domains)
  ENST ID: ENST00000575130
  CDS Start-End: 250-579
agcgagggagcgcgcgggctgcggggccgaaccccggaggatcgtctgccttattgaaaccatctaattggagatccgcagattaggctaccaagacacagctgcctccagcagaatttgtgtagtggacacttgtacgtgcactttggagacagcaagcatgaggcctgcagctgacagctttgagtggctgtgaacctgactatggaaaagatgtgactccccacccccagccgggtgctccgagccatggccgacaccatcttcggcagcgggaatgatcagtgggtttgccccaatgaccggcagcttgcccttcgagccaagctgcagacgggctggtccgtgcacacctaccagacggagaagcagaggaggaagcagcacctcagcccggcggaggtggaggccatcctgcaggtcatccagagggcagagcggctcgacgtcctggagcagcagagaatcgggcggctggtggagcggctggagaccatgaggcggaatgtgatggggaacggcctgtcccagtgtctgctctgcggggaggtgctgggcttcctgggcagctcgtcggtg

SEQ ID NO: 173388 - DNA, 537 bp, Homo sapiens
  Payload ID: 14078
  Gene Symbol: RPH3AL
  Gene Name: rabphilin 3A-like (without C2 domains)
  ENST ID: ENST00000570638
  CDS Start-End: 81-537
agatagcaggcgaggtcagccggggatggccttggctgctggctatgtgactccccacccccagccgggtgctccgagccatggccgacaccatcttcggcagcgggaatgatcagtgggtttgccccaatgaccggcagcttgcccttcgagccaagctgcagacgggctggtccgtgcacacctaccagacggagaagcagaggaggaagcagcacctcagcccggcggaggtggaggccatcctgcaggtcatccagagggcagagcggctcgacgtcctggagcagcagagaatcgggcggctggtggagcggctggagaccatgaggcggaatgtgatggggaacggcctgtcccagtgtctgctctgcggggaggtgctgggcttcctgggcagctcgtcggtgttctgcaaagactgcaggaagaaagtctgcaccaaatgtgggatcgaggcctcccctggccagaagcggcccctgtggctgtgtaagatctgcagtgagcaaagagaggtctggaagaggtcggggg

SEQ ID NO: 173389 - DNA, 571 bp, Homo sapiens
  Payload ID: 14078
  Gene Symbol: RPH3AL
  Gene Name: rabphilin 3A-like (without C2 domains)
  ENST ID: ENST00000575634
  CDS Start-End: 308-571
gttggaaggactgttctttctccgtcgtatggtctcggcatccttgttgaaagtcagttgaccacggatgtatgggtttatttctgggctctcagttctattccagtgccacagttttcagtaccatatgggcaggaggcatcctgctctgagggagtgtttggtccagtaggagaggtcagacacgttcaccagaaactgcgaagttctgggaagaggtaaaaacagtgtgcttatgaggacgaggcagcgattgcttcagccctgggcaatgtgactccccacccccagccgggtgctccgagccatggccgacaccatcttcggcagcgggaatgatcagtgggtttgccccaatgaccggcagcttgcccttcgagccaagctgcagacgggctggtccgtgcacacctaccagacggagaagcagaggaggaagcagcacctcagcccggcggaggtggaggccatcctgcaggtcatccagagggcagagcggctcgacgtcctggagcagcagagaatcgggcggctggtggagcggctggagaccatgaggcggaatgtgatg

SEQ ID NO: 173390 - DNA, 579 bp, Homo sapiens
  Payload ID: 14078
  Gene Symbol: RPH3AL
  Gene Name: rabphilin 3A-like (without C2 domains)
  ENST ID: ENST00000609977
  CDS Start-End: 250-579
agcgagggagcgcgcgggctgcggggccgaaccccggaggatcgtctgccttattgaaaccatctaattggagatccgcagattaggctaccaagacacagctgcctccagcagaatttgtgtagtggacacttgtacgtgcactttggagacagcaagcatgaggcctgcagctgacagctttgagtggctgtgaacctgactatggaaaagatgtgactcccaacccccagccgggtgctccgagccatggccgacaccatcttcggcagcgggaatgatcagtgggtttgccccaatgaccggcagcttgcccttcgagccaagctgcagacgggctggtccgtgcacacctaccagacggagaagcagaggaggaagcagcacctcagcccggcggaggtggaggccatcctgcaggtcatccagagggcagagcggctcgacgtcctggagcagcagagaatcgggcggctggtggagcggctggagaccatgaggcggaatgtgatggggaacggcctgtcccagtgtctgctctgcggggaggtgctgggcttcctgggcagctcgtcggtg

SEQ ID NO: 173391 - DNA, 978 bp, Homo sapiens
  Payload ID: 14078
  Gene Symbol: RPH3AL
  Gene Name: rabphilin 3A-like (without C2 domains)
  Uniprot ID: Q9UNE2
  ENST ID: ENST00000608519
  CDS Start-End: 38-898
gatgtgactcccaacccccagccgggtgctccgagccatggccgacaccatcttcggcagcgggaatgatcagtgggtttgccccaatgaccggcagcttgcccttcgagccaagctgcagacgggctggtccgtgcacacctaccagacggagaagcagaggaggaagcagcacctcagcccggcggaggtggaggccatcctgcaggtcatccagagggcagagcggctcgacgtcctggagcagcagagaatcgggcggctggtggagcggctggagaccatgaggcggaatgtgatggggaacggcctgtcccagtgtctgctctgcggggaggtgctgggcttcctgggcagctcgtcggtgttctgcaaagactgcaggaaggtctggaagaggtcgggggcctggttctacaaagggctccccaagtatatcttgcccctgaagacccctggccgagctgatgacccccacttccgacctttgcccacggaaccggcagagcgagagcccagaagctctgagaccagccgcatctacacgtgggcccgaggaagagtggtttccagtgacagtgacagtgactcggatcttagctcctccagcctagaggacagactcccatccactggggtcagggaccggaaaggcgacaaaccctggaaggagtcaggtggcagcgtggaggcccccaggatggggttcacccacccgccgggccacctctctgggtgccagagcagcctggccagtggtgagacggggacaggctctgctgacccgccagggggaccccgccccgggctgacccgaagggccccggtaaaagacacacctggacgagcccccgctgctgacgcagctccagcaggcccctccagctgcctgggctgaggtgtctggtgcctggaacagacttccctgtggaggattcctgccagaccctgcccggctcctccctgaccggtccttgt

SEQ ID NO: 173392 - DNA, 2578 bp, Homo sapiens
  Payload ID: 14078
  Gene Symbol: RPH3AL
  Gene Name: rabphilin 3A-like (without C2 domains)
  Uniprot ID: Q9UNE2
  ENST ID: ENST00000618002
  CDS Start-End: 168-1115
attgacttaagtcccagtgattcagctcctcatctggaacacctcgggtcacccccgacaacggtggtgggagggagagcggcctcctcctccctggtggggcctgtctgggtgaagcccctctgttcccgatgtgactccccacccccagccgggtgctccgagccatggccgacaccatcttcggcagcgggaatgatcagtgggtttgccccaatgaccggcagcttgcccttcgagccaagctgcagacgggctggtccgtgcacacctaccagacggagaagcagaggaggaagcagcacctcagcccggcggaggtggaggccatcctgcaggtcatccagagggcagagcggctcgacgtcctggagcagcagagaatcgggcggctggtggagcggctggagaccatgaggcggaatgtgatggggaacggcctgtcccagtgtctgctctgcggggaggtgctgggcttcctgggcagctcgtcggtgttctgcaaagactgcaggaagaaagtctgcaccaaatgtgggatcgaggcctcccctggccagaagcggcccctgtggctgtgtaagatctgcagtgagcaaagagaggtctggaagaggtcgggggcctggttctacaaagggctccccaagtatatcttgcccctgaagacccctggccgagctgatgacccccacttccgacctttgcccacggaaccggcagagcgagagcccagaagctctgagaccagccgcatctacacgtgggcccgaggaagagtggtttccagtgacagtgacagtgactcggatcttagctcctccagcctagaggacagactcccatccactggggtcagggaccggaaaggcgacaaaccctggaaggagtcaggtggcagcgtggaggcccccaggatggggttcacccacccgccgggccacctctctgggtgccagagcagcctggccagtggtgagacggggacaggctctgctgacccgccagggggaccccgccccgggctgacccgaagggccccggtaaaagacacacctggacgagcccccgctgctgacgcagctccagcaggcccctccagctgcctgggctgaggtgtctggtgcctggaacagacttccctgtggaggattcctgccagaccctgcccggctcctccctgaccggtccttgtgccctcaccagacaccctgttggccatgactcaacaaaccagtgttgggagccgtctgcctccccagctcagtgcctttctgcaccccttctctcctggggagctgtctgcatccgccaccccctccaaccactgccctcagcccccgaccttatttattaccctcccctcccacacccccaatctacctggtgatgattttaagtttgcgcgtgtcttgggttgggctggggggtttcccacatgcagtgtcagaggggccgcccggtggggctatctccgttgctatattaatggcaagactaaatgaaacctagggcacggcctccgaagctgcgtgtggccccttagaggtgagcatcagagccagagcagtgagggggagactcacccaccctctccctctcccttcagctctgggaggcaggcgcagtgcccccctcccatgggctggcccaggaccgtgggtgaaacctgggtctgtttagtttctttggtttttgtatgtttgtttgtttttgacacagtctcgctttgttgcccaggctggggtgcagtggcacgatcgcggctcactgcaacctccacctcccgggctcaagcgattctctcacctcagcctcctgagtaggtgggattacagatgcccgccaccacacccagttaatttttgtatttttagaagagatggggtttctccatgttggccaggctggtcttgaactcctggtctcaagtgatctgcccgcctcggcctcccaaagtgctgggattacaggtgtgagccaccgcacccaatcctattaggtttctttgaatcccctcatggcctgcctggtttttgctcagcctgtcttcagcttgaggagctgggaagctctggtggatgctatgaactcacttgctgaagagcagcgttcaggtgcatccccagccagggcacgtggctccctcagccatgaattcacttctcttcaggaggtttggcttggcatgaaaatacttcattcagagtatgggcaaatgcttctggaaaacccttccctgaagagagagaacgtgtgtgtgtgtgtcggtgatcacaccctcccatccttcctgcctcctgccccaaaccccgggttcctgggtctggaagggccttctctccaagctgggagctcctgggcccccaccattcactttttgtccttgctgctggcaaacagtaaagaaactcactttccctgtggcacgttatgcttcagaattaaaacaatgaagattaaaatttgcaccgagccagtgtgttgatcgaagaccacgattgcctgtgtttctgagatgcgtccatggaaaaatggaaaaaactgtggtgcgttgacttgctggaacccttcctaa

SEQ ID NO: 173393 - DNA, 1065 bp, Homo sapiens
  Payload ID: 14078
  Gene Symbol: RPH3AL
  Gene Name: rabphilin 3A-like (without C2 domains)
  Uniprot ID: Q9UNE2
  ENST ID: ENST00000608278
  CDS Start-End: 38-985
gatgtgactcccaacccccagccgggtgctccgagccatggccgacaccatcttcggcagcgggaatgatcagtgggtttgccccaatgaccggcagcttgcccttcgagccaagctgcagacgggctggtccgtgcacacctaccagacggagaagcagaggaggaagcagcacctcagcccggcggaggtggaggccatcctgcaggtcatccagagggcagagcggctcgacgtcctggagcagcagagaatcgggcggctggtggagcggctggagaccatgaggcggaatgtgatggggaacggcctgtcccagtgtctgctctgcggggaggtgctgggcttcctgggcagctcgtcggtgttctgcaaagactgcaggaagaaagtctgcaccaaatgtgggatcgaggcctcccctggccagaagcggcccctgtggctgtgtaagatctgcagtgagcaaagagaggtctggaagaggtcgggggcctggttctacaaagggctccccaagtatatcttgcccctgaagacccctggccgagctgatgacccccacttccgacctttgcccacggaaccggcagagcgagagcccagaagctctgagaccagccgcatctacacgtgggcccgaggaagagtggtttccagtgacagtgacagtgactcggatcttagctcctccagcctagaggacagactcccatccactggggtcagggaccggaaaggcgacaaaccctggaaggagtcaggtggcagcgtggaggcccccaggatggggttcacccacccgccgggccacctctctgggtgccagagcagcctggccagtggtgagacggggacaggctctgctgacccgccagggggaccccgccccgggctgacccgaagggccccggtaaaagacacacctggacgagcccccgctgctgacgcagctccagcaggcccctccagctgcctgggctgaggtgtctggtgcctggaacagacttccctgtggaggattcctgccagaccctgcccggctcctccctgaccggtccttgt

SEQ ID NO: 173394 - DNA, 531 bp, Homo sapiens; identical to SEQ ID NO: 173385
  Payload ID: 14078
  Gene Symbol: RPH3AL
  Gene Name: rabphilin 3A-like (without C2 domains)
  ENST ID: ENST00000634042
  CDS Start-End: 95-531

SEQ ID NO: 173395 - DNA, 692 bp, Homo sapiens; identical to SEQ ID NO: 173381
  Payload ID: 14078
  Gene Symbol: RPH3AL
  Gene Name: rabphilin 3A-like (without C2 domains)
  ENST ID: ENST00000632671
  CDS Start-End: 1-474

SEQ ID NO: 173396 - DNA, 2608 bp, Homo sapiens
  Payload ID: 14078
  Gene Symbol: RPH3AL
  Gene Name: rabphilin 3A-like (without C2 domains)
  Uniprot ID: Q9UNE2
  ENST ID: ENST00000632616
  CDS Start-End: 309-1256
ggaacacctcgggtcacccccgacaacggtggtgggagggagagcggcctcctcctccctggtggggcctgtctgggtgaagcccctctgttcccgaggatcgtctgccttattgaaaccatctaattggagatccgcagattaggctaccaagacacagctgcctccagcagaatttgtgtagtggacacttgtacgtgcactttggagacagcaagcatgaggcctgcagctgacagctttgagtggctgtgaacctgactatggaaaagatgtgactcccaacccccagccgggtgctccgagccatggccgacaccatcttcggcagcgggaatgatcagtgggtttgccccaatgaccggcagcttgcccttcgagccaagctgcagacgggctggtccgtgcacacctaccagacggagaagcagaggaggaagcagcacctcagcccggcggaggtggaggccatcctgcaggtcatccagagggcagagcggctcgacgtcctggagcagcagagaatcgggcggctggtggagcggctggagaccatgaggcggaatgtgatggggaacggcctgtcccagtgtctgctctgcggggaggtgctgggcttcctgggcagctcgtcggtgttctgcaaagactgcaggaagaaagtctgcaccaaatgtgggatcgaggcctcccctggccagaagcggcccctgtggctgtgtaagatctgcagtgagcaaagagaggtctggaagaggtcgggggcctggttctacaaagggctccccaagtatatcttgcccctgaagacccctggccgagctgatgacccccacttccgacctttgcccacggaaccggcagagcgagagcccagaagctctgagaccagccgcatctacacgtgggcccgaggaagagtggtttccagtgacagtgacagtgactcggatcttagctcctccagcctagaggacagactcccatccactggggtcagggaccggaaaggcgacaaaccctggaaggagtcaggtggcagcgtggaggcccccaggatggggttcacccacccgccgggccacctctctgggtgccagagcagcctggccagtggtgagacggggacaggctctgctgacccgccagggggaccccgccccgggctgacccgaagggccccggtaaaagacacacctggacgagcccccgctgctgacgcagctccagcaggcccctccagctgcctgggctgaggtgtctggtgcctggaacagacttccctgtggaggattcctgccagaccctgcccggctcctccctgaccggtccttgtgccctcaccagacaccctgttggccatgactcaacaaaccagtgttgggagccgtctgcctccccagctcagtgcctttctgcaccccttctctcctggggagctgtctgcatccgccaccccctccaaccactgccctcagcccccgaccttatttattaccctcccctcccacacccccaatctacctggtgatgattttaagtttgcgcgtgtcttgggttgggctggggggtttcccacatgcagtgtcagaggggccgcccggtggggctatctccgttgctatattaatggcaagactaaatgaaacctagggcacggcctccgaagctgcgtgtggccccttagaggtgagcatcagagccagagcagtgagggggagactcacccaccctctccctctcccttcagctctgggaggcaggcgcagtgcccccctcccgtgggctggcccaggaccgcagtgaaacctgggtctgtttagtttctttggtttttgtatgtttgtttgtttttgacacagtctcgctttgttgcccaggctggggtgcagtggcacgatcgcggctcactgcaacctccacctcccgggctcaagcgattctctcacctcagcctcctgagtaggtgggattacagatgcccgccaccacacccagttaatttttgtatttttagaagagatggggtttctccatgttggccaggctggtcttgaactcctggtctcaagtgatccgcccgcctcggcctcccaaagtgctgggattacaggtgtgagccaccgcacccaatcctattaggtttctttgaatcccctcatggcctgcctggtttttgctcagcctgtcttcagcttgaggagctgggaagctctggtggatgctatgaactcacttgctgaagagcagcgttcaggtgcatccccagccagggcacgtggctccctcagccatgaattcacttctcttcaggaggtttggcttggcatgaaaatacttcattcagagtatgggcaaatgcttctggaaaacccttccctgaagagagagaacgtgtgtgtgtgtgtcggtgttcacaccctcccatccttcctgcctcctgccccaaaccccgggttcctgggtctggaagggccttctctccaagctgggagctcctgggcccccaccattcactttttgtccttgctgctggcaaacagtaaagaaactcactttccctgtggcacgttatgcttcagaattaaaacaatgaagattaaaattt

SEQ ID NO: 173397 - DNA, 2808 bp, Homo sapiens
  Payload ID: 14078
  Gene Symbol: RPH3AL
  Gene Name: rabphilin 3A-like (without C2 domains)
  Uniprot ID: Q9UNE2
  ENST ID: ENST00000632000
  CDS Start-End: 599-1459
ccaccactgctgcctgtaagggctgttttggatacagaaaatgtgccctttctaacccaaaaaatgcttgaaatgtgtaaaagtggccagactaacagtcccaaagagggctgccctctaagaggaagcgtcccaaatctgttcagttttagagactacgtgactggggtacgtggtggggccttaccagacatccacgaggagaatccaggccttggtttggctccagctgggcctgcctggtggctgccacttattgacttaagtcccagtgattcagctcctcatctggaacacctcgggtcacccccgacaacggtggtgggagggagagcggcctcctcctccctggtggggcctgtctgggtgaagcccctctgttcccgaggatcgtctgccttattgaaaccatctaattggagatccgcagattaggctaccaagacacagctgcctccagcagaatttgtgtagtggacacttgtacgtgcactttggagacagcaagcatgaggcctgcagctgacagctttgagtggctgtgaacctgactatggaaaagatgtgactcccaacccccagccgggtgctccgagccatggccgacaccatcttcggcagcgggaatgatcagtgggtttgccccaatgaccggcagcttgcccttcgagccaagctgcagacgggctggtccgtgcacacctaccagacggagaagcagaggaggaagcagcacctcagcccggcggaggtggaggccatcctgcaggtcatccagagggcagagcggctcgacgtcctggagcagcagagaatcgggcggctggtggagcggctggagaccatgaggcggaatgtgatggggaacggcctgtcccagtgtctgctctgcggggaggtgctgggcttcctgggcagctcgtcggtgttctgcaaagactgcaggaaggtctggaagaggtcgggggcctggttctacaaagggctccccaagtatatcttgcccctgaagacccctggccgagctgatgacccccacttccgacctttgcccacggaaccggcagagcgagagcccagaagctctgagaccagccgcatctacacgtgggcccgaggaagagtggtttccagtgacagtgacagtgactcggatcttagctcctccagcctagaggacagactcccatccactggggtcagggaccggaaaggcgacaaaccctggaaggagtcaggtggcagcgtggaggcccccaggatggggttcacccacccgccgggccacctctctgggtgccagagcagcctggccagtggtgagacggggacaggctctgctgacccgccagggggaccccgccccgggctgacccgaagggccccggtaaaagacacacctggacgagcccccgctgctgacgcagctccagcaggcccctccagctgcctgggctgaggtgtctggtgcctggaacagacttccctgtggaggattcctgccagaccctgcccggctcctccctgaccggtccttgtgccctcaccagacaccctgttggccatgactcaacaaaccagtgttgggagccgtctgcctccccagctcagtgcctttctgcaccccttctctcctggggagctgtctgcatccgccaccccctccaaccactgccctcagcccccgaccttatttattaccctcccctcccacacccccaatctacctggtgatgattttaagtttgcgcgtgtcttgggttgggctggggggtttcccacatgcagtgtcagaggggccgcccggtggggctatctccgttgctatattaatggcaagactaaatgaaacctagggcacggcctccgaagctgcgtgtggccccttagaggtgagcatcagagccagagcagtgagggggagactcacccaccctctccctctcccttcagctctgggaggcaggcgcagtgcccccctcccgtgggctggcccaggaccgcagtgaaacctgggtctgtttagtttctttggtttttgtatgtttgtttgtttttgacacagtctcgctttgttgcccaggctggggtgcagtggcacgatcgcggctcactgcaacctccacctcccgggctcaagcgattctctcacctcagcctcctgagtaggtgggattacagatgcccgccaccacacccagttaatttttgtatttttagaagagatggggtttctccatgttggccaggctggtcttgaactcctggtctcaagtgatccgcccgcctcggcctcccaaagtgctgggattacaggtgtgagccaccgcacccaatcctattaggtttctttgaatcccctcatggcctgcctggtttttgctcagcctgtcttcagcttgaggagctgggaagctctggtggatgctatgaactcacttgctgaagagcagcgttcaggtgcatccccagccagggcacgtggctccctcagccatgaattcacttctcttcaggaggtttggcttggcatgaaaatacttcattcagagtatgggcaaatgcttctggaaaacccttccctgaagagagagaacgtgtgtgtgtgtgtcggtgttcacaccctcccatccttcctgcctcctgccccaaaccccgggttcctgggtctggaagggccttctctccaagctgggagctcctgggcccccaccattcactttttgtccttgctgctggcaaacagtaaagaaactcactttccctgtggcacgttatgcttcagaattaaaacaatgaagattaaaa

SEQ ID NO: 173398 - DNA, 518 bp, Homo sapiens
  Payload ID: 14078
  Gene Symbol: RPH3AL
  Gene Name: rabphilin 3A-like (without C2 domains)
  ENST ID: ENST00000632337
  CDS Start-End: 168-518
attgacttaagtcccagtgattcagctcctcatctggaacacctcgggtcacccccgacaacggtggtgggagggagagcggcctcctcctccctggtggggcctgtctgggtgaagcccctctgttcccgatgtgactccccacccccagccgggtgctccgagccatggccgacaccatcttcggcagcgggaatgatcagtgggtttgccccaatgaccggcagcttgcccttcgagccaagctgcagacgggctggtccgtgcacacctaccagacggagaagcagaggaggaagcagcacctcagcccggcggaggtggaggccatcctgcaggtcatccagagggcagagcggctcgacgtcctggagcagcagagaatcgggcggctggtggagcggctggagaccatgaggcggaatgtgatggggaacggcctgtcccagtgtctgctctgcggggaggtgctgggcttcctgggcagctcgtcggtgttctgcaaagactgcaggaag

SEQ ID NO: 173399 - DNA, 1235 bp, Homo sapiens
  Payload ID: 14078
  Gene Symbol: RPH3AL
  Gene Name: rabphilin 3A-like (without C2 domains)
  Uniprot ID: Q9UNE2
  ENST ID: ENST00000632545
  CDS Start-End: 168-1028
attgacttaagtcccagtgattcagctcctcatctggaacacctcgggtcacccccgacaacggtggtgggagggagagcggcctcctcctccctggtggggcctgtctgggtgaagcccctctgttcccgatgtgactcccaacccccagccgggtgctccgagccatggccgacaccatcttcggcagcgggaatgatcagtgggtttgccccaatgaccggcagcttgcccttcgagccaagctgcagacgggctggtccgtgcacacctaccagacggagaagcagaggaggaagcagcacctcagcccggcggaggtggaggccatcctgcaggtcatccagagggcagagcggctcgacgtcctggagcagcagagaatcgggcggctggtggagcggctggagaccatgaggcggaatgtgatggggaacggcctgtcccagtgtctgctctgcggggaggtgctgggcttcctgggcagctcgtcggtgttctgcaaagactgcaggaaggtctggaagaggtcgggggcctggttctacaaagggctccccaagtatatcttgcccctgaagacccctggccgagctgatgacccccacttccgacctttgcccacggaaccggcagagcgagagcccagaagctctgagaccagccgcatctacacgtgggcccgaggaagagtggtttccagtgacagtgacagtgactcggatcttagctcctccagcctagaggacagactcccatccactggggtcagggaccggaaaggcgacaaaccctggaaggagtcaggtggcagcgtggaggcccccaggatggggttcacccacccgccgggccacctctctgggtgccagagcagcctggccagtggtgagacggggacaggctctgctgacccgccagggggaccccgccccgggctgacccgaagggccccggtaaaagacacacctggacgagcccccgctgctgacgcagctccagcaggcccctccagctgcctgggctgaggtgtctggtgcctggaacagacttccctgtggaggattcctgccagaccctgcccggctcctccctgaccggtccttgtgccctcaccagacaccctgttggccatgactcaacaaaccagtgttgggagccgtctgcctccccagctcagtgcctttctgcaccccttctctcctggggagctgtctgcatccgccaccccctcc

SEQ ID NO: 173400 - DNA, 487 bp, Homo sapiens; identical to SEQ ID NO: 173379
  Payload ID: 14078
  Gene Symbol: RPH3AL
  Gene Name: rabphilin 3A-like (without C2 domains)
  ENST ID: ENST00000632511
  CDS Start-End: 375-487

SEQ ID NO: 173401 - DNA, 487 bp, Homo sapiens
  Payload ID: 14078
  Gene Symbol: RPH3AL
  Gene Name: rabphilin 3A-like (without C2 domains)
  ENST ID: ENST00000634137
  CDS Start-End: 375-487
ccaagcgggtgaggagggttgaggcttctttttccctagaagcttctctgcttcatggagaggtttctcttgggctccttcaacaagcagttcccaggtgggagccgaaatcaggtttcctctgcaaagattctgcctgcctgggactttccagacccacatacatcacgtaaatggaagcaggcctgcgtttctgcattaaaagacaaatagcatgaatgctcgatactgcccgtcccaagccaggtgcccggcagcctgggagcacttgggcattttctgggcagagagtgctcaggggccacaggtacctacgtattattctggtcacgtttgcaatgtgactcccaacccccagccgggtgctccgagccatggccgacaccatcttcggcagcgggaatgatcagtgggtttgccccaatgaccggcagcttgcccttcgagccaagctgcagacgggctggtccgtgcacacctaccagac

SEQ ID NO: 173402 - DNA, 949 bp, Homo sapiens
  Payload ID: 14078
  Gene Symbol: RPH3AL
  Gene Name: rabphilin 3A-like (without C2 domains)
  ENST ID: ENST00000633184
  CDS Start-End: 599-949
ccaccactgctgcctgtaagggctgttttggatacagaaaatgtgccctttctaacccaaaaaatgcttgaaatgtgtaaaagtggccagactaacagtcccaaagagggctgccctctaagaggaagcgtcccaaatctgttcagttttagagactacgtgactggggtacgtggtggggccttaccagacatccacgaggagaatccaggccttggtttggctccagctgggcctgcctggtggctgccacttattgacttaagtcccagtgattcagctcctcatctggaacacctcgggtcacccccgacaacggtggtgggagggagagcggcctcctcctccctggtggggcctgtctgggtgaagcccctctgttcccgaggatcgtctgccttattgaaaccatctaattggagatccgcagattaggctaccaagacacagctgcctccagcagaatttgtgtagtggacacttgtacgtgcactttggagacagcaagcatgaggcctgcagctgacagctttgagtggctgtgaacctgactatggaaaagatgtgactccccacccccagccgggtgctccgagccatggccgacaccatcttcggcagcgggaatgatcagtgggtttgccccaatgaccggcagcttgcccttcgagccaagctgcagacgggctggtccgtgcacacctaccagacggagaagcagaggaggaagcagcacctcagcccggcggaggtggaggccatcctgcaggtcatccagagggcagagcggctcgacgtcctggagcagcagagaatcgggcggctggtggagcggctggagaccatgaggcggaatgtgatggggaacggcctgtcccagtgtctgctctgcggggaggtgctgggcttcctgggcagctcgtcggtgttctgcaaagactgcaggaag

SEQ ID NO: 173403 - DNA, 579 bp, Homo sapiens; identical to SEQ ID NO: 173387
  Payload ID: 14078
  Gene Symbol: RPH3AL
  Gene Name: rabphilin 3A-like (without C2 domains)
  ENST ID: ENST00000633332
  CDS Start-End: 250-579

SEQ ID NO: 173404 - DNA, 814 bp, Homo sapiens
  Payload ID: 14078
  Gene Symbol: RPH3AL
  Gene Name: rabphilin 3A-like (without C2 domains)
  ENST ID: ENST00000633301
  CDS Start-End: 235-814
ccccgacaacggtggtgggagggagagcggcctcctcctccctggtggggcctgtctgggtgaagcccctctgttcccggtaggtgtttcggggtctcatggctccaaggacattggaagatgcctctgttttcctggagtcaggggcccagttcatgcaggggttttcacagaactttgctaacttccggggaaaagatgtgactcccaacccccagccgggtgctccgagccatggccgacaccatcttcggcagcgggaatgatcagtgggtttgccccaatgaccggcagcttgcccttcgagccaagctgcagacgggctggtccgtgcacacctaccagacggagaagcagaggaggaagcagcacctcagcccggcggaggtggaggccatcctgcaggtcatccagagggcagagcggctcgacgtcctggagcagcagagaatcgggcggctggtggagcggctggagaccatgaggcggaatgtgatggggaacggcctgtcccagtgtctgctctgcggggaggtgctgggcttcctgggcagctcgtcggtgttctgcaaagactgcaggaagaaagtctgcaccaaatgtgggatcgaggcctcccctggccagaagcggcccctgtggctgtgtaagatctgcagtgagcaaagagaggtctggaagaggtcgggggcctggttctacaaagggctccccaagtatatcttgcccctgaagacccctggccgagctgatgacccccacttccgacctttgcccacggaaccggcagagcgagagcccagaagctctgaga

SEQ ID NO: 173405 - DNA, 820 bp, Homo sapiens
  Payload ID: 14078
  Gene Symbol: RPH3AL
  Gene Name: rabphilin 3A-like (without C2 domains)
  ENST ID: ENST00000634169
  CDS Start-End: 217-820
gaggtgaggggaggaaggttggagaagtacctggcaggacccgcggagagccacctgggagctggagtctgggctgggccgtgcagaagctgctggcggaggcaggggtgtgggacgctgccccccggggcctggagcaccgccctcagcacacctgaggactgggccttttccaagcggatgtgactcccaacccccagccgggtgctccgagccatggccgacaccatcttcggcagcgggaatgatcagtgggtttgccccaatgaccggcagcttgcccttcgagccaagctgcagacgggctggtccgtgcacacctaccagacggagaagcagaggaggaagcagcacctcagcccggcggaggtggaggccatcctgcaggtcatccagagggcagagcggctcgacgtcctggagcagcagagaatcgggcggctggtggagcggctggagaccatgaggcggaatgtgatggggaacggcctgtcccagtgtctgctctgcggggaggtgctgggcttcctgggcagctcgtcggtgttctgcaaagactgcaggaagaaagtctgcaccaaatgtgggatcgaggcctcccctggccagaagcggcccctgtggctgtgtaagatctgcagtgagcaaagagaggtctggaagaggtcgggggcctggttctacaaagggctccccaagtatatcttgcccctgaagacccctggccgagctgatgacccccacttccgacctttgcccacggaaccggcagagcgagagcccagaagctctgagaccagccgcatctacacgtgggccc

SEQ ID NO: 173406 - DNA, 571 bp, Homo sapiens; identical to SEQ ID NO: 173389
  Payload ID: 14078
  Gene Symbol: RPH3AL
  Gene Name: rabphilin 3A-like (without C2 domains)
  ENST ID: ENST00000633046
  CDS Start-End: 308-571

SEQ ID NO: 173407 - DNA, 571 bp, Homo sapiens
  Payload ID: 14078
  Gene Symbol: RPH3AL
  Gene Name: rabphilin 3A-like (without C2 domains)
  ENST ID: ENST00000633168
  CDS Start-End: 308-571
gttggaaagactgttctttctccgtcgtatggtctcggcatccttgttgaaagtcagttgaccacggatgtatgggtttatttctgggctctcagttctattccagtgccacagttttcagtaccatatgggcaggaggcatcctgctctgagggagtgtttggtccagtaggagaggtcagacacgttcaccagaaactgcgaagttctgggaagaggtaaaaacagtgtgcttatgaggacgaggcagcgattgcttcagccctgggcaatgtgactcccaacccccagccgggtgctccgagccatggccgacaccatcttcggcagcgggaatgatcagtgggtttgccccaatgaccggcagcttgcccttcgagccaagctgcagacgggctggtccgtgcacacctaccagacggagaagcagaggaggaagcagcacctcagcccggcggaggtggaggccatcctgcaggtcatccagagggcagagcggctcgacgtcctggagcagcagagaatcgggcggctggtggagcggctggagaccatgaggcggaatgtgatg

SEQ ID NO: 173408 - DNA, 566 bp, Homo sapiens
  Payload ID: 14078
  Gene Symbol: RPH3AL
  Gene Name: rabphilin 3A-like (without C2 domains)
  ENST ID: ENST00000631901
  CDS Start-End: 189-566
aaactgggcacctggtgccagcttatggggccttgggcacgtggctgcccctctcgagctggtttcttcttttctgaaaggagtgatgatcacgtcgtcctctggggcttgtgatgattccagttggtcagccagtggcgggcacctggcagatgtgactcccaacccccagccgggtgctccgagccatggccgacaccatcttcggcagcgggaatgatcagtgggtttgccccaatgaccggcagcttgcccttcgagccaagctgcagacgggctggtccgtgcacacctaccagacggagaagcagaggaggaagcagcacctcagcccggcggaggtggaggccatcctgcaggtcatccagagggcagagcggctcgacgtcctggagcagcagagaatcgggcggctggtggagcggctggagaccatgaggcggaatgtgatggggaacggcctgtcccagtgtctgctctgcggggaggtgctgggcttcctgggcagctcgtcggtgttctgcaaagactgcaggaagaaagtctgcaccaaatgtgggatcgag

SEQ ID NO: 173409 - DNA, 654 bp, Homo sapiens
  Payload ID: 14078
  Gene Symbol: RPH3AL
  Gene Name: rabphilin 3A-like (without C2 domains)
  ENST ID: ENST00000634024
  CDS Start-End: 217-654
gaggtgaggggaggaaggttggagaagtacctggcaggacccgcggagagccacctgggagctggagtctgggctgggccgtgcagaagctgctggcggaggcaggggtgtgggacgctgccccccggggcctggagcaccgccctcagcacacctgaggactgggccttttccaagcggatgtgactccccacccccagccgggtgctccgagccatggccgacaccatcttcggcagcgggaatgatcagtgggtttgccccaatgaccggcagcttgcccttcgagccaagctgcagacgggctggtccgtgcacacctaccagacggagaagcagaggaggaagcagcacctcagcccggcggaggtggaggccatcctgcaggtcatccagagggcagagcggctcgacgtcctggagcagcagagaatcgggcggctggtggagcggctggagaccatgaggcggaatgtgatggggaacggcctgtcccagtgtctgctctgcggggaggtgctgggcttcctgggcagctcgtcggtgttctgcaaagactgcaggaagaaagtctgcaccaaatgtgggatcgaggcctcccctggccagaagcggcccctgtggctgtgtaagatctgcagtgagcaaagagag

SEQ ID NO: 173410 - DNA, 531 bp, Homo sapiens
  Payload ID: 14078
  Gene Symbol: RPH3AL
  Gene Name: rabphilin 3A-like (without C2 domains)
  ENST ID: ENST00000633726
  CDS Start-End: 95-531
acggttttgccgccagagggcagcgagggagcgcgcgggctgcggggccgaaccccggatgtgactcccaacccccagccgggtgctccgagccatggccgacaccatcttcggcagcgggaatgatcagtgggtttgccccaatgaccggcagcttgcccttcgagccaagctgcagacgggctggtccgtgcacacctaccagacggagaagcagaggaggaagcagcacctcagcccggcggaggtggaggccatcctgcaggtcatccagagggcagagcggctcgacgtcctggagcagcagagaatcgggcggctggtggagcggctggagaccatgaggcggaatgtgatggggaacggcctgtcccagtgtctgctctgcggggaggtgctgggcttcctgggcagctcgtcggtgttctgcaaagactgcaggaagaaagtctgcaccaaatgtgggatcgaggcctcccctggccagaagcggcccctgtggctgtgtaagatctgcagtgagcaaagaga

SEQ ID NO: 173411 - DNA, 586 bp, Homo sapiens
  Payload ID: 14078
  Gene Symbol: RPH3AL
  Gene Name: rabphilin 3A-like (without C2 domains)
  ENST ID: ENST00000632176
  CDS Start-End: 141-586
ttgaaattgcaggaggcggttgctccggcctgtctcaagctctgttgggtgccgatggggaaactgaggctcaggaagacagttgacttgttcctggacttctaatgtgactcccaacccccagccgggtgctccgagccatggccgacaccatcttcggcagcgggaatgatcagtgggtttgccccaatgaccggcagcttgcccttcgagccaagctgcagacgggctggtccgtgcacacctaccagacggagaagcagaggaggaagcagcacctcagcccggcggaggtggaggccatcctgcaggtcatccagagggcagagcggctcgacgtcctggagcagcagagaatcgggcggctggtggagcggctggagaccatgaggcggaatgtgatggggaacggcctgtcccagtgtctgctctgcggggaggtgctgggcttcctgggcagctcgtcggtgttctgcaaagactgcaggaaggtctggaagaggtcgggggcctggttctacaaagggctccccaagtatatcttgcccctgaagacccctggccgagctgatgacccccacttccg

SEQ ID NO: 173412 - DNA, 566 bp, Homo sapiens; identical to SEQ ID NO: 173380
  Payload ID: 14078
  Gene Symbol: RPH3AL
  Gene Name: rabphilin 3A-like (without C2 domains)
  ENST ID: ENST00000632678
  CDS Start-End: 189-566

SEQ ID NO: 173413 - DNA, 491 bp, Homo sapiens
  Payload ID: 14078
  Gene Symbol: RPH3AL
  Gene Name: rabphilin 3A-like (without C2 domains)
  ENST ID: ENST00000633744
  CDS Start-End: 141-491
ttgaaattgcaggaggcggttgctccggcctgtctcaagctctgttgggtgccgatggggaaactgaggctcaggaagacagttgacttgttcctggacttctaatgtgactccccacccccagccgggtgctccgagccatggccgacaccatcttcggcagcgggaatgatcagtgggtttgccccaatgaccggcagcttgcccttcgagccaagctgcagacgggctggtccgtgcacacctaccagacggagaagcagaggaggaagcagcacctcagcccggcggaggtggaggccatcctgcaggtcatccagagggcagagcggctcgacgtcctggagcagcagagaatcgggcggctggtggagcggctggagaccatgaggcggaatgtgatggggaacggcctgtcccagtgtctgctctgcggggaggtgctgggcttcctgggcagctcgtcggtgttctgcaaagactgcaggaag

SEQ ID NO: 173414 - DNA, 518 bp, Homo sapiens
  Payload ID: 14078
  Gene Symbol: RPH3AL
  Gene Name: rabphilin 3A-like (without C2 domains)
  ENST ID: ENST00000632735
  CDS Start-End: 81-518
agatagcaggcgaggtcagccggggatggccttggctgctggctatgtgactccccacccccagccgggtgctccgagccatggccgacaccatcttcggcagcgggaatgatcagtgggtttgccccaatgaccggcagcttgcccttcgagccaagctgcagacgggctggtccgtgcacacctaccagacggagaagcagaggaggaagcagcacctcagcccggcggaggtggaggccatcctgcaggtcatccagagggcagagcggctcgacgtcctggagcagcagagaatcgggcggctggtggagcggctggagaccatgaggcggaatgtgatggggaacggcctgtcccagtgtctgctctgcggggaggtgctgggcttcctgggcagctcgtcggtgttctgcaaagactgcaggaagaaagtctgcaccaaatgtgggatcgaggcctcccctggccagaagcggcccctgtggctgtgtaagatctgcagtgagcaaagagag

SEQ ID NO: 173415 - DNA, 593 bp, Homo sapiens
  Payload ID: 14078
  Gene Symbol: RPH3AL
  Gene Name: rabphilin 3A-like (without C2 domains)
  ENST ID: ENST00000632071
  CDS Start-End: 345-593
agtgctggctttaccagcttctgagcccacaaatgctgttaaggagatagaagccttcttttaagtagatgcaactgtttgcaaagaagaggccctttattttattttatttatttatttttttgcgaatagaggatcgtctgccttattgaaaccatctaattggagatccgcagattaggctaccaagacacagctgcctccagcagaatttgtgtagtggacacttgtacgtgcactttggagacagcaagcatgaggcctgcagctgacagctttgagtggctgtgaacctgactatggaaaagatgtgactcccaacccccagccgggtgctccgagccatggccgacaccatcttcggcagcgggaatgatcagtgggtttgccccaatgaccggcagcttgcccttcgagccaagctgcagacgggctggtccgtgcacacctaccagacggagaagcagaggaggaagcagcacctcagcccggcggaggtggaggccatcctgcaggtcatccagagggcagagcggctcgacgtcctggagcagcagagaatcgggcggctggtggagcggctggagaccatg

SEQ ID NO: 173416 - DNA, 537 bp, Homo sapiens
  Payload ID: 14078
  Gene Symbol: RPH3AL
  Gene Name: rabphilin 3A-like (without C2 domains)
  ENST ID: ENST00000632610
  CDS Start-End: 81-537
agatagcaggcgaggtcagccggggatggccttggctgctggctatgtgactcccaacccccagccgggtgctccgagccatggccgacaccatcttcggcagcgggaatgatcagtgggtttgccccaatgaccggcagcttgcccttcgagccaagctgcagacgggctggtccgtgcacacctaccagacggagaagcagaggaggaagcagcacctcagcccggcggaggtggaggccatcctgcaggtcatccagagggcagagcggctcgacgtcctggagcagcagagaatcgggcggctggtggagcggctggagaccatgaggcggaatgtgatggggaacggcctgtcccagtgtctgctctgcggggaggtgctgggcttcctgggcagctcgtcggtgttctgcaaagactgcaggaagaaagtctgcaccaaatgtgggatcgaggcctcccctggccagaagcggcccctgtggctgtgtaagatctgcagtgagcaaagagaggtctggaagaggtcggggg

SEQ ID NO: 173417 - DNA, 672 bp, Homo sapiens
  Payload ID: 14078
  Gene Symbol: RPH3AL
  Gene Name: rabphilin 3A-like (without C2 domains)
  ENST ID: ENST00000632083
  CDS Start-End: 235-672
ccccgacaacggtggtgggagggagagcggcctcctcctccctggtggggcctgtctgggtgaagcccctctgttcccggtaggtgtttcggggtctcatggctccaaggacattggaagatgcctctgttttcctggagtcaggggcccagttcatgcaggggttttcacagaactttgctaacttccggggaaaagatgtgactccccacccccagccgggtgctccgagccatggccgacaccatcttcggcagcgggaatgatcagtgggtttgccccaatgaccggcagcttgcccttcgagccaagctgcagacgggctggtccgtgcacacctaccagacggagaagcagaggaggaagcagcacctcagcccggcggaggtggaggccatcctgcaggtcatccagagggcagagcggctcgacgtcctggagcagcagagaatcgggcggctggtggagcggctggagaccatgaggcggaatgtgatggggaacggcctgtcccagtgtctgctctgcggggaggtgctgggcttcctgggcagctcgtcggtgttctgcaaagactgcaggaagaaagtctgcaccaaatgtgggatcgaggcctcccctggccagaagcggcccctgtggctgtgtaagatctgcagtgagcaaagagag

SEQ ID NO: 173418 - DNA, 746 bp, Homo sapiens
  Payload ID: 14078
  Gene Symbol: RPH3AL
  Gene Name: rabphilin 3A-like (without C2 domains)
  ENST ID: ENST00000633904
  CDS Start-End: 309-746
ggaacacctcgggtcacccccgacaacggtggtgggagggagagcggcctcctcctccctggtggggcctgtctgggtgaagcccctctgttcccgaggatcgtctgccttattgaaaccatctaattggagatccgcagattaggctaccaagacacagctgcctccagcagaatttgtgtagtggacacttgtacgtgcactttggagacagcaagcatgaggcctgcagctgacagctttgagtggctgtgaacctgactatggaaaagatgtgactccccacccccagccgggtgctccgagccatggccgacaccatcttcggcagcgggaatgatcagtgggtttgccccaatgaccggcagcttgcccttcgagccaagctgcagacgggctggtccgtgcacacctaccagacggagaagcagaggaggaagcagcacctcagcccggcggaggtggaggccatcctgcaggtcatccagagggcagagcggctcgacgtcctggagcagcagagaatcgggcggctggtggagcggctggagaccatgaggcggaatgtgatggggaacggcctgtcccagtgtctgctctgcggggaggtgctgggcttcctgggcagctcgtcggtgttctgcaaagactgcaggaagaaagtctgcaccaaatgtgggatcgaggcctcccctggccagaagcggcccctgtggctgtgtaagatctgcagtgagcaaagagag

SEQ ID NO: 173419 - DNA, 593 bp, Homo sapiens; identical to SEQ ID NO: 173384
  Payload ID: 14078
  Gene Symbol: RPH3AL
  Gene Name: rabphilin 3A-like (without C2 domains)
  ENST ID: ENST00000632576
  CDS Start-End: 345-593

SEQ ID NO: 173420 - DNA, 3073 bp, Homo sapiens
  Payload ID: 14079
  Gene Symbol: RACGAP1
  Gene Name: Rac GTPase activating protein 1
  Uniprot ID: Q9H0H5
  ENST ID: ENST00000312377
  CDS Start-End: 69-1967
tctgccgttgggtgaggcgcggagcgaagtgaagggtggcccaggtggggccaggctgactgaaaaagatggatactatgatgctgaatgtgcggaatctgtttgagcagcttgtgcgccgggtggagattctcagtgaaggaaatgaagtccaatttatccagttggcgaaggactttgaggatttccgtaaaaagtggcagaggactgaccatgagctggggaaatacaaggatcttttgatgaaagcagagactgagcgaagtgctctggatgttaagctgaagcatgcacgtaatcaggtggatgtagagatcaaacggagacagagagctgaggctgactgcgaaaagctggaacgacagattcagctgattcgagagatgctcatgtgtgacacatctggcagcattcaactaagcgaggagcaaaaatcagctctggcttttctcaacagaggccaaccatccagcagcaatgctgggaacaaaagactatcaaccattgatgaatctggttccattttatcagatatcagctttgacaagactgatgaatcactggattgggactcttctttggtgaagactttcaaactgaagaagagagaaaagaggcgctctactagccgacagtttgttgatggtccccctggacctgtaaagaaaactcgttccattggctctgcagtagaccaggggaatgaatccatagttgcaaaaactacagtgactgttcccaatgatggcgggcccatcgaagctgtgtccactattgagactgtgccatattggaccaggagccgaaggaaaacaggtactttacaaccttggaacagtgactccaccctgaacagcaggcagctggagccaagaactgagacagacagtgtgggcacgccacagagtaatggagggatgcgcctgcatgactttgtttctaagacggttattaaacctgaatcctgtgttccatgtggaaagcggataaaatttggcaaattatctctgaagtgtcgagactgtcgtgtggtctctcatccagaatgtcgggaccgctgtccccttccctgcattcctaccctgataggaacacctgtcaagattggagagggaatgctggcagactttgtgtcccagacttctccaatgatcccctccattgttgtgcattgtgtaaatgagattgagcaaagaggtctgactgagacaggcctgtataggatctctggctgtgaccgcacagtaaaagagctgaaagagaaattcctcagagtgaaaactgtacccctcctcagcaaagtggatgatatccatgctatctgtagccttctaaaagactttcttcgaaacctcaaagaacctcttctgacctttcgccttaacagagcctttatggaagcagcagaaatcacagatgaagacaacagcatagctgccatgtaccaagctgttggtgaactgccccaggccaacagggacacattagctttcctcatgattcacttgcagagagtggctcagagtccacatactaaaatggatgttgccaatctggctaaagtctttggccctacaatagtggcccatgctgtgcccaatccagacccagtgacaatgttacaggacatcaagcgtcaacccaaggtggttgagcgcctgctttccttgcctctggagtattggagtcagttcatgatggtggagcaagagaacattgaccccctacatgtcattgaaaactcaaatgccttttcaacaccacagacaccagatattaaagtgagtttactgggacctgtgaccactcctgaacatcagcttctcaagactccttcatctagttccctgtcacagagagtccgttccaccctcaccaagaacactcctagatttgggagcaaaagcaagtctgccactaacctaggacgacaaggcaacttttttgcttctccaatgctcaagtgaagtcacatctgcctgttacttcccagcattgactgactataagaaaggacacatctgtactctgctctgcagcctcctgtactcattactacttttagcattctccaggcttttactcaagtttaattgtgcatgagggttttattaaaactatatatatctccccttccttctcctcaagtcacataatatcagcactttgtgctggtcattgttgggagcttttagatgagacatctttccaggggtagaagggttagtatggaattggttgtgattctttttggggaagggggttattgttcctttggcttaaagccaaatgctgctcatagaatgatctttctctagtttcatttagaactgatttccgtgagacaatgacagaaaccctacctatctgataagattagcttgtctcagggtgggaagtgggagggcagggcaaagaaaggattagaccagaggatttaggatgcctccttctaagaaccagaagttctcattccccattatgaactgagctataatatggagctttcataaaaatgggatgcattgaggacagaactagtgatgggagtatgcgtagctttgatttggatgattaggtctttaatagtgttgagtggcacaaccttgtaaatgtgaaagtacaactcgtatttatctctgatgtgctgctggctgaactttgggttcatttggggtcaaagccagtttttcttttaaaattgaattcattctgatgcttggcccccatacccccaaccttgtccagtggagcccaacttctaaaggtcaatatatcatcctttggcatcccaactaacaataaagagtaggctataagggaagattgtcaatattttgtggtaagaaaagctacagtcattttttctttgcactttggatgctgaaatttttcccatggaacatagccacatctagatagatgtgagctttttcttctgttaaaattattcttaatgtctgtaaaaacgattttcttctgtagaatgtttgacttcgtattgacccttatctgtaaaacacctatttgggataatatttggaaaaaaagtaaatagctttttcaaaatgaa

SEQ ID NO: 173421 - DNA, 3229 bp, Homo sapiens
  Payload ID: 14079
  Gene Symbol: RACGAP1
  Gene Name: Rac GTPase activating protein 1
  Uniprot ID: Q9H0H5
  ENST ID: ENST00000427314
  CDS Start-End: 225-2123
gcgaagtgaagggtggcccaggtggggccaggctgactgaatgtatctcctagctatggactaaataatacatggggggaaataaacaagtattcatgagggtgaaaatgtgacccagcaggaaaattacaactattttcaattgacgttgaataggatgagtcatggaatttaagtgatttactgaagattatactactggtagatagaagagctaaagaaagatggatactatgatgctgaatgtgcggaatctgtttgagcagcttgtgcgccgggtggagattctcagtgaaggaaatgaagtccaatttatccagttggcgaaggactttgaggatttccgtaaaaagtggcagaggactgaccatgagctggggaaatacaaggatcttttgatgaaagcagagactgagcgaagtgctctggatgttaagctgaagcatgcacgtaatcaggtggatgtagagatcaaacggagacagagagctgaggctgactgcgaaaagctggaacgacagattcagctgattcgagagatgctcatgtgtgacacatctggcagcattcaactaagcgaggagcaaaaatcagctctggcttttctcaacagaggccaaccatccagcagcaatgctgggaacaaaagactatcaaccattgatgaatctggttccattttatcagatatcagctttgacaagactgatgaatcactggattgggactcttctttggtgaagactttcaaactgaagaagagagaaaagaggcgctctactagccgacagtttgttgatggtccccctggacctgtaaagaaaactcgttccattggctctgcagtagaccaggggaatgaatccatagttgcaaaaactacagtgactgttcccaatgatggcgggcccatcgaagctgtgtccactattgagactgtgccatattggaccaggagccgaaggaaaacaggtactttacaaccttggaacagtgactccaccctgaacagcaggcagctggagccaagaactgagacagacagtgtgggcacgccacagagtaatggagggatgcgcctgcatgactttgtttctaagacggttattaaacctgaatcctgtgttccatgtggaaagcggataaaatttggcaaattatctctgaagtgtcgagactgtcgtgtggtctctcatccagaatgtcgggaccgctgtccccttccctgcattcctaccctgataggaacacctgtcaagattggagagggaatgctggcagactttgtgtcccagacttctccaatgatcccctccattgttgtgcattgtgtaaatgagattgagcaaagaggtctgactgagacaggcctgtataggatctctggctgtgaccgcacagtaaaagagctgaaagagaaattcctcagagtgaaaactgtacccctcctcagcaaagtggatgatatccatgctatctgtagccttctaaaagactttcttcgaaacctcaaagaacctcttctgacctttcgccttaacagagcctttatggaagcagcagaaatcacagatgaagacaacagcatagctgccatgtaccaagctgttggtgaactgccccaggccaacagggacacattagctttcctcatgattcacttgcagagagtggctcagagtccacatactaaaatggatgttgccaatctggctaaagtctttggccctacaatagtggcccatgctgtgcccaatccagacccagtgacaatgttacaggacatcaagcgtcaacccaaggtggttgagcgcctgctttccttgcctctggagtattggagtcagttcatgatggtggagcaagagaacattgaccccctacatgtcattgaaaactcaaatgccttttcaacaccacagacaccagatattaaagtgagtttactgggacctgtgaccactcctgaacatcagcttctcaagactccttcatctagttccctgtcacagagagtccgttccaccctcaccaagaacactcctagatttgggagcaaaagcaagtctgccactaacctaggacgacaaggcaacttttttgcttctccaatgctcaagtgaagtcacatctgcctgttacttcccagcattgactgactataagaaaggacacatctgtactctgctctgcagcctcctgtactcattactacttttagcattctccaggcttttactcaagtttaattgtgcatgagggttttattaaaactatatatatctccccttccttctcctcaagtcacataatatcagcactttgtgctggtcattgttgggagcttttagatgagacatctttccaggggtagaagggttagtatggaattggttgtgattctttttggggaagggggttattgttcctttggcttaaagccaaatgctgctcatagaatgatctttctctagtttcatttagaactgatttccgtgagacaatgacagaaaccctacctatctgataagattagcttgtctcagggtgggaagtgggagggcagggcaaagaaaggattagaccagaggatttaggatgcctccttctaagaaccagaagttctcattccccattatgaactgagctataatatggagctttcataaaaatgggatgcattgaggacagaactagtgatgggagtatgcgtagctttgatttggatgattaggtctttaatagtgttgagtggcacaaccttgtaaatgtgaaagtacaactcgtatttatctctgatgtgctgctggctgaactttgggttcatttggggtcaaagccagtttttcttttaaaattgaattcattctgatgcttggcccccatacccccaaccttgtccagtggagcccaacttctaaaggtcaatatatcatcctttggcatcccaactaacaataaagagtaggctataagggaagattgtcaatattttgtggtaagaaaagctacagtcattttttctttgcactttggatgctgaaatttttcccatggaacatagccacatctagatagatgtgagctttttcttctgttaaaattattcttaatgtctgtaaaaacgattttcttctgtagaatgtttgacttcgtattgacccttatctgtaaaacacctatttgggataatatttggaaaaaaagtaaatagctttttcaaaatgaa

SEQ ID NO: 173422 - DNA, 3080 bp, Homo sapiens
  Payload ID: 14079
  Gene Symbol: RACGAP1
  Gene Name: Rac GTPase activating protein 1
  Uniprot ID: Q9H0H5
  ENST ID: ENST00000454520
  CDS Start-End: 78-1976
gaagtgagtagtgggggtgccagaccaggtgcgtctgccgctggattgtgataggaagcagagtgttcgtgtgaaagatggatactatgatgctgaatgtgcggaatctgtttgagcagcttgtgcgccgggtggagattctcagtgaaggaaatgaagtccaatttatccagttggcgaaggactttgaggatttccgtaaaaagtggcagaggactgaccatgagctggggaaatacaaggatcttttgatgaaagcagagactgagcgaagtgctctggatgttaagctgaagcatgcacgtaatcaggtggatgtagagatcaaacggagacagagagctgaggctgactgcgaaaagctggaacgacagattcagctgattcgagagatgctcatgtgtgacacatctggcagcattcaactaagcgaggagcaaaaatcagctctggcttttctcaacagaggccaaccatccagcagcaatgctgggaacaaaagactatcaaccattgatgaatctggttccattttatcagatatcagctttgacaagactgatgaatcactggattgggactcttctttggtgaagactttcaaactgaagaagagagaaaagaggcgctctactagccgacagtttgttgatggtccccctggacctgtaaagaaaactcgttccattggctctgcagtagaccaggggaatgaatccatagttgcaaaaactacagtgactgttcccaatgatggcgggcccatcgaagctgtgtccactattgagactgtgccatattggaccaggagccgaaggaaaacaggtactttacaaccttggaacagtgactccaccctgaacagcaggcagctggagccaagaactgagacagacagtgtgggcacgccacagagtaatggagggatgcgcctgcatgactttgtttctaagacggttattaaacctgaatcctgtgttccatgtggaaagcggataaaatttggcaaattatctctgaagtgtcgagactgtcgtgtggtctctcatccagaatgtcgggaccgctgtccccttccctgcattcctaccctgataggaacacctgtcaagattggagagggaatgctggcagactttgtgtcccagacttctccaatgatcccctccattgttgtgcattgtgtaaatgagattgagcaaagaggtctgactgagacaggcctgtataggatctctggctgtgaccgcacagtaaaagagctgaaagagaaattcctcagagtgaaaactgtacccctcctcagcaaagtggatgatatccatgctatctgtagccttctaaaagactttcttcgaaacctcaaagaacctcttctgacctttcgccttaacagagcctttatggaagcagcagaaatcacagatgaagacaacagcatagctgccatgtaccaagctgttggtgaactgccccaggccaacagggacacattagctttcctcatgattcacttgcagagagtggctcagagtccacatactaaaatggatgttgccaatctggctaaagtctttggccctacaatagtggcccatgctgtgcccaatccagacccagtgacaatgttacaggacatcaagcgtcaacccaaggtggttgagcgcctgctttccttgcctctggagtattggagtcagttcatgatggtggagcaagagaacattgaccccctacatgtcattgaaaactcaaatgccttttcaacaccacagacaccagatattaaagtgagtttactgggacctgtgaccactcctgaacatcagcttctcaagactccttcatctagttccctgtcacagagagtccgttccaccctcaccaagaacactcctagatttgggagcaaaagcaagtctgccactaacctaggacgacaaggcaacttttttgcttctccaatgctcaagtgaagtcacatctgcctgttacttcccagcattgactgactataagaaaggacacatctgtactctgctctgcagcctcctgtactcattactacttttagcattctccaggcttttactcaagtttaattgtgcatgagggttttattaaaactatatatatctccccttccttctcctcaagtcacataatatcagcactttgtgctggtcattgttgggagcttttagatgagacatctttccaggggtagaagggttagtatggaattggttgtgattctttttggggaagggggttattgttcctttggcttaaagccaaatgctgctcatagaatgatctttctctagtttcatttagaactgatttccgtgagacaatgacagaaaccctacctatctgataagattagcttgtctcagggtgggaagtgggagggcagggcaaagaaaggattagaccagaggatttaggatgcctccttctaagaaccagaagttctcattccccattatgaactgagctataatatggagctttcataaaaatgggatgcattgaggacagaactagtgatgggagtatgcgtagctttgatttggatgattaggtctttaatagtgttgagtggcacaaccttgtaaatgtgaaagtacaactcgtatttatctctgatgtgctgctggctgaactttgggttcatttggggtcaaagccagtttttcttttaaaattgaattcattctgatgcttggcccccatacccccaaccttgtccagtggagcccaacttctaaaggtcaatatatcatcctttggcatcccaactaacaataaagagtaggctataagggaagattgtcaatattttgtggtaagaaaagctacagtcattttttctttgcactttggatgctgaaatttttcccatggaacatagccacatctagatagatgtgagctttttcttctgttaaaattattcttaatgtctgtaaaaacgattttcttctgtagaatgtttgacttcgtattgacccttatctgtaaaacacctatttgggataatatttggaaaaaaagtaaatagctttttcaaaatg

SEQ ID NO: 173423 - DNA, 570 bp, Homo sapiens
  Payload ID: 14079
  Gene Symbol: RACGAP1
  Gene Name: Rac GTPase activating protein 1
  ENST ID: ENST00000550149
  CDS Start-End: 104-570
gtgggcgcggcgctgctctgccgttgggtgaggcgcggagcgaagtgaagggtggcccaggtggggccaggctgactgaaaaagatggatactatgatgctgaatgtgcggaatctgtttgagcagcttgtgcgccgggtggagattctcagtgaaggaaatgaagtccgaacgacagattcagctgattcgagagatgctcatgtgtgacacatctggcagcattcaactaagcgaggagcaaaaatcagctctggcttttctcaacagaggccaaccatccagcagcaatgctgggaacaaaagactatcaaccattgatgaatctggttccattttatcagatatcagctttgacaagactgatgaatcactggattgggactcttctttggtgaagactttcaaactgaagaagagagaaaagaggcgctctactagccgacagtttgttgatggtccccctggacctgtaaagaaaactcgttccattggctctgcagtagaccaggggaatgaatccatagttgcaaaaactacagtgactgttcccaatgatggcgggcccat

SEQ ID NO: 173424 - DNA, 387 bp, Homo sapiens
  Payload ID: 14079
  Gene Symbol: RACGAP1
  Gene Name: Rac GTPase activating protein 1
  ENST ID: ENST00000548961
  CDS Start-End: 7-360
actaaaatggatgttgccaatctggctaaagtctttggccctacaatagtggcccatgctgtgcccaatccagacccagtgacaatgttacaggacatcaagcgtcaacccaaggtggttgagcgcctgctttccttgcctctggagtattggagtcagttcatgatggtggagcaagagaacattgaccccctacatgtcattgaaaactcaaatgccttttcaacaccacagacaccagatattaaagcagtccctggaggaggattgtgtgtccattttacagctggagaagccgagatccagaaaggacccccaagttgtgggcagaataaatctacagcagcttttaactattaaaccaacttagattttggtagtctttca

SEQ ID NO: 173425 - DNA, 581 bp, Homo sapiens
  Payload ID: 14079
  Gene Symbol: RACGAP1
  Gene Name: Rac GTPase activating protein 1
  ENST ID: ENST00000546764
  CDS Start-End: 165-581
ggagctgtgggcgcggcgctgctctgccgttgggtgaggcgcggagcgaagtgaagggtggcccaggtggggccaggctgactgaagagagccaaaggaaatcaacatttgaattgactacccaatgtcctgcccctgtttctgtcctgtagcacttaggaaagatggatactatgatgctgaatgtgcggaatctgtttgagcagcttgtgcgccgggtggagattctcagtgaaggaaatgaagtccaatttatccagttggcgaaggactttgaggatttccgtaaaaagtggcagaggactgaccatgagctggggaaatacaaggatcttttgatgaaagcagagactgagcgaagtgctctggatgttaagctgaagcatgcacgtaatcaggtggatgtagagatcaaacggagacagagagctgaggctgactgcgaaaagctggaacgacagattcagctgattcgagagatgctcatgtgtgacacatctggcagcattcaactaagcgaggagcaaaaatcagctctggcttttctcaacagaggccaaccatccagcagcaatgctggg

SEQ ID NO: 173426 - DNA, 563 bp, Homo sapiens
  Payload ID: 14079
  Gene Symbol: RACGAP1
  Gene Name: Rac GTPase activating protein 1
  ENST ID: ENST00000552921
  CDS Start-End: 112-563
gtacgtcacaccgtagagggacggcgcgggaggaataaatttctctgtgattggttggtgaaggttttcaaaccggagctgtgggcgcggcgctgctctgccgttggaaagatggatactatgatgctgaatgtgcggaatctgtttgagcagcttgtgcgccgggtggagattctcagtgaaggaaatgaagtccaatttatccagttggcgaaggactttgaggatttccgtaaaaagtggcagaggactgaccatgagctggggaaatacaaggatcttttgatgaaagcagagactgagcgaagtgctctggatgttaagctgaagcatgcacgtaatcaggtggatgtagagatcaaacggagacagagagctgaggctgactgcgaaaagctggaacgacagattcagctgattcgagagatgctcatgtgtgacacatctggcagcattcaactaagcgaggagcaaaaatcagctctggcttttctcaacagaggccaaccatccagcagcaatgctgggaacaaaagactatcaaccattgatgaatctggttc

SEQ ID NO: 173427 - DNA, 568 bp, Homo sapiens
  Payload ID: 14079
  Gene Symbol: RACGAP1
  Gene Name: Rac GTPase activating protein 1
  ENST ID: ENST00000546786
  CDS Start-End: 160-568
gctctgccgttgggtgaggcgcggagcgaagtgaagggtggcccaggtggggccaggctgactgaagtgagtagtgggggtgccagaccaggtgcgtctgccgctggattgtgataggaagcagagtgttcgtgtgaaagatggatactatgatgctgaatgtgcggaatctgtttgagcagcttgtgcgccgggtggagattctcagtgaaggaaatgaagtccgaacgacagattcagctgattcgagagatgctcatgtgtgacacatctggcagcattcaactaagcgaggagcaaaaatcagctctggcttttctcaacagaggccaaccatccagcagcaatgctgggaacaaaagactatcaaccattgatgaatctggttccattttatcagatatcagctttgacaagactgatgaatcactggattgggactcttctttggtgaagactttcaaactgaagaagagagaaaagaggcgctctactagccgacagtttgttgatggtccccctggacctgtaaagaaaactcgttccattggctctgcagtagaccagg

SEQ ID NO: 173428 - DNA, 530 bp, Homo sapiens
  Payload ID: 14079
  Gene Symbol: RACGAP1
  Gene Name: Rac GTPase activating protein 1
  ENST ID: ENST00000552004
  CDS Start-End: 208-530
aaaccggagctgtgggcgcggcgctgctctgccgttgggtgaggcgcggagcgaagtgaagggtggcccaggtggggccaggctgactgaatgtatctcctagctatggactaaataatacatggggggaaataaacaagtattcatgagggtgaaaatgtgacccagcaggaaaattacaactattttcaattgacgttgaataggatggatactatgatgctgaatgtgcggaatctgtttgagcagcttgtgcgccgggtggagattctcagtgaaggaaatgaagtccaatttatccagttggcgaaggactttgaggatttccgtaaaaagtggcagaggactgaccatgagctggggaaatacaaggatcttttgatgaaagcagagactgagcgaagtgctctggatgttaagctgaagcatgcacgtaatcaggtggatgtagagatcaaacggagacagagagctgaggctgactgcgaaaagctggaacgacagattcagctgattcgagagatgctcat

SEQ ID NO: 173429 - DNA, 554 bp, Homo sapiens
  Payload ID: 14079
  Gene Symbol: RACGAP1
  Gene Name: Rac GTPase activating protein 1
  ENST ID: ENST00000548320
  CDS Start-End: 451-554
ttttcaaaccggagctgtgggcgcggcgctgctctgccgttgggtgaggcgcggagcgaagtgaagggtggcccaggtggggccaggctgactgaagattgggactcttctttggtgaagactttcaaactgaagaagagagaaaagaggcgctctactagccgacagtttgttgatggtccccctggacctgtaaagaaaactcgttccattggctctgcagtagaccaggggaatgaatccatagttgcaaaaactacagtgactgttcccaatgatggcgggcccatcgaagctgtgtccactattgagactgtgccatattggaccaggagccgaaggaaaacaggtactttacaaccttggaacagtgactccaccctgaacagcaggcagctggagccaagaactgagacagacagtgtgggcacgccacagagtaatggagggatgcgcctgcatgactttgtttctaagacggttattaaacctgaatcctgtgttccatgtggaaagcggataaaatttggcaaattatctctgaagtgtcgaga

SEQ ID NO: 173430 - DNA, 932 bp, Homo sapiens
  Payload ID: 14079
  Gene Symbol: RACGAP1
  Gene Name: Rac GTPase activating protein 1
  ENST ID: ENST00000552310
  CDS Start-End: 52-932
gaggcgcggagcgaagtgaagggtggcccaggtggggccaggctgactgaaatggatactatgatgctgaatgtgcggaatctgtttgagcagcttgtgcgccgggtggagattctcagtgaaggaaatgaagtccaatttatccagttggcgaaggactttgaggatttccgtaaaaagtggcagaggactgaccatgagctggggaaatacaaggatcttttgatgaaagcagagactgagcgaagtgctctggatgttaagctgaagcatgcacgtaatcaggtggatgtagagatcaaacggagacagagagctgaggctgactgcgaaaagctggaacgacagattcagctgattcgagagatgctcatgtgtgacacatctggcagcattcaactaagcgaggagcaaaaatcagctctggcttttctcaacagaggccaaccatccagcagcaatgctgggaacaaaagactatcaaccattgatgaatctggttccattttatcagatatcagctttgacaagactgatgaatcactggattgggactcttctttggtgaagactttcaaactgaagaagagagaaaagaggcgctctactagccgacagtttgttgatggtccccctggacctgtaaagaaaactcgttccattggctctgcagtagaccaggggaatgaatccatagttgcaaaaactacagtgactgttcccaatgatggcgggcccatcgaagctgtgtccactattgagactgtgccatattggaccaggagccgaaggaaaacaggtactttacaaccttggaacagtgactccaccctgaacagcaggcagctggagccaagaactgagacagacagtgtgggcacgccacagagtaatggagggatgcgcctgcatgactttgtttctaagacggt

SEQ ID NO: 173431 - DNA, 570 bp, Homo sapiens
  Payload ID: 14079
  Gene Symbol: RACGAP1
  Gene Name: Rac GTPase activating protein 1
  ENST ID: ENST00000549777
  CDS Start-End: 184-570
aagtgaagggtggcccaggtggggccaggctgactgaagtgagtagtgggggtgccagaccagtgtatctcctagctatggactaaataatacatggggggaaataaacaagtattcatgagggtgaaaatgtgacccagcaggaaaattacaactattttcaattgacgttgaataggaaagatggatactatgatgctgaatgtgcggaatctgtttgagcagcttgtgcgccgggtggagattctcagtgaaggaaatgaagtccaatttatccagttggcgaaggactttgaggatttccgtaaaaagtggcagaggactgaccatgagctggggaaatacaaggatcttttgatgaaagcagagactgagcgaagtgctctggatgttaagctgaagcatgcacgtaatcaggtggatgtagagatcaaacggagacagagagctgaggctgactgcgaaaagctggaacgacagattcagctgattcgagagatgctcatgtgtgacacatctggcagcattcaactaagcgaggagcaaaaatcagctctggcttttctcaac

SEQ ID NO: 173432 - DNA, 555 bp, Homo sapiens
  Payload ID: 14079
  Gene Symbol: RACGAP1
  Gene Name: Rac GTPase activating protein 1
  ENST ID: ENST00000551260
  CDS Start-End: 64-234
aagtgaagggtggcccaggtggggccaggctgactgaagtgagtagtgggggtgccagaccagatggatactatgatgctgaatgtgcggaatctgtttgagcagcttgtgcgccgggtggagattctcagtgaaggaaatgaaaatttatccagttggcgaaggactttgaggatttccgtaaaaagtggcagaggactgaccatgagctggggaaatacaaggatcttttgatgaaagcagagactgagcgaagtgctctggatgttaagctgaagcatgcacgtaatcaggtggatgtagagatcaaacggagacagagagctgaggctgactgcgaaaagctggaacgacagattcagctgattcgagagatgctcatgtgtgacacatctggcagcattcaactaagcgaggagcaaaaatcagctctggcttttctcaacagaggccaaccatccagcagcaatgctgggaacaaaagactatcaaccattgatgaatctggttccattttatcagatatcagctttgacaagactgatgaatcactgg

SEQ ID NO: 173433 - DNA, 386 bp, Homo sapiens
  Payload ID: 14079
  Gene Symbol: RACGAP1
  Gene Name: Rac GTPase activating protein 1
  ENST ID: ENST00000552157
  CDS Start-End: 136-386
gcggagcgaagtgaagggtggcccaggtggggccaggctgactgaaaatttatccagttggcgaaggactttgaggatttccgtaaaaagtggcagaggactgaccatgagctggggaaatacaaggatcttttgatgaaagcagagactgagcgaagtgctctggatgttaagctgaagcatgcacgtaatcaggtggatgtagagatcaaacggagacagagagctgaggctgactgcgaaaagctggaacgacagattcagctgattcgagagatgctcatgtgtgacacatctggcagcattcaactaagcgaggagcaaaaatcagctctggcttttctcaacagaggccaaccatccagcagcaatgctgggaacaaaag

SEQ ID NO: 173434 - DNA, 586 bp, Homo sapiens
  Payload ID: 14079
  Gene Symbol: RACGAP1
  Gene Name: Rac GTPase activating protein 1
  ENST ID: ENST00000548824
  CDS Start-End: 63-586
agtgaagggtggcccaggtggggccaggctgactgaagtgagtagtgggggtgccagaccagatggatactatgatgctgaatgtgcggaatctgtttgagcagcttgtgcgccgggtggagattctcagtgaaggaaatgaagtccaatttatccagttggcgaaggactttgaggatttccgtaaaaagtggcagaggactgaccatgagctggggaaatacaaggatcttttgatgaaagcagagactgagcgaagtgctctggatgttaagctgaagcatgcacgtaatcaggtggatgtagagatcaaacggagacagagagctgaggctgactgcgaaaagctggaacgacagattcagctgattcgagagatgctcatgtgtgacacatctggcagcattcaactaagcgaggagcaaaaatcagctctggcttttctcaacagaggccaaccatccagcagcaatgctgggaacaaaagactatcaaccattgatgaatctggttccattttatcagatatcagctttgacaagactgatgaatcactggattgggactcttctttggtgaagacttt

SEQ ID NO: 173435 - DNA, 539 bp, Homo sapiens
  Payload ID: 14079
  Gene Symbol: RACGAP1
  Gene Name: Rac GTPase activating protein 1
  ENST ID: ENST00000551876
  CDS Start-End: 150-539
aaactggcaaaattattatattaatcaataggcttgacttgaagaaccacattttcttgttggtcagtcacttgctaatgaactgacatgctctttcctatttgttttctgctccaagtgattggaggggctgttatattcaaagaaagatggatactatgatgctgaatgtgcggaatctgtttgagcagcttgtgcgccgggtggagattctcagtgaaggaaatgaagtccaatttatccagttggcgaaggactttgaggatttccgtaaaaagtggcagaggactgaccatgagctggggaaatacaaggatcttttgatgaaagcagagactgagcgaagtgctctggatgttaagctgaagcatgcacgtaatcaggtggatgtagagatcaaacggagacagagagctgaggctgactgcgaaaagctggaacgacagattcagctgattcgagagatgctcatgtgtgacacatctggcagcattcaactaagcgaggagcaaaaatcagctctggcttttctcaacaga

SEQ ID NO: 173436 - DNA, 2190 bp, Homo sapiens
  Payload ID: 14079
  Gene Symbol: RACGAP1
  Gene Name: Rac GTPase activating protein 1
  Uniprot ID: Q9H0H5
  ENST ID: ENST00000547905
  CDS Start-End: 292-2190
gttttcaaaccggagctgtgggcgcggcgctgctctgccgttgggtgaggcgcggagcgaagtgaagggtggcccaggtggggccaggctgactgaatgtatctcctagctatggactaaataatacatggggggaaataaacaagtattcatgagggtgaaaatgtgacccagcaggaaaattacaactattttcaattgacgttgaatagggagagccaaaggaaatcaacatttgaattgactacccaatgtcctgcccctgtttctgtcctgtagcacttaggaaagatggatactatgatgctgaatgtgcggaatctgtttgagcagcttgtgcgccgggtggagattctcagtgaaggaaatgaagtccaatttatccagttggcgaaggactttgaggatttccgtaaaaagtggcagaggactgaccatgagctggggaaatacaaggatcttttgatgaaagcagagactgagcgaagtgctctggatgttaagctgaagcatgcacgtaatcaggtggatgtagagatcaaacggagacagagagctgaggctgactgcgaaaagctggaacgacagattcagctgattcgagagatgctcatgtgtgacacatctggcagcattcaactaagcgaggagcaaaaatcagctctggcttttctcaacagaggccaaccatccagcagcaatgctgggaacaaaagactatcaaccattgatgaatctggttccattttatcagatatcagctttgacaagactgatgaatcactggattgggactcttctttggtgaagactttcaaactgaagaagagagaaaagaggcgctctactagccgacagtttgttgatggtccccctggacctgtaaagaaaactcgttccattggctctgcagtagaccaggggaatgaatccatagttgcaaaaactacagtgactgttcccaatgatggcgggcccatcgaagctgtgtccactattgagactgtgccatattggaccaggagccgaaggaaaacaggtactttacaaccttggaacagtgactccaccctgaacagcaggcagctggagccaagaactgagacagacagtgtgggcacgccacagagtaatggagggatgcgcctgcatgactttgtttctaagacggttattaaacctgaatcctgtgttccatgtggaaagcggataaaatttggcaaattatctctgaagtgtcgagactgtcgtgtggtctctcatccagaatgtcgggaccgctgtccccttccctgcattcctaccctgataggaacacctgtcaagattggagagggaatgctggcagactttgtgtcccagacttctccaatgatcccctccattgttgtgcattgtgtaaatgagattgagcaaagaggtctgactgagacaggcctgtataggatctctggctgtgaccgcacagtaaaagagctgaaagagaaattcctcagagtgaaaactgtacccctcctcagcaaagtggatgatatccatgctatctgtagccttctaaaagactttcttcgaaacctcaaagaacctcttctgacctttcgccttaacagagcctttatggaagcagcagaaatcacagatgaagacaacagcatagctgccatgtaccaagctgttggtgaactgccccaggccaacagggacacattagctttcctcatgattcacttgcagagagtggctcagagtccacatactaaaatggatgttgccaatctggctaaagtctttggccctacaatagtggcccatgctgtgcccaatccagacccagtgacaatgttacaggacatcaagcgtcaacccaaggtggttgagcgcctgctttccttgcctctggagtattggagtcagttcatgatggtggagcaagagaacattgaccccctacatgtcattgaaaactcaaatgccttttcaacaccacagacaccagatattaaagtgagtttactgggacctgtgaccactcctgaacatcagcttctcaagactccttcatctagttccctgtcacagagagtccgttccaccctcaccaagaacactcctagatttgggagcaaaagcaagtctgccactaacctaggacgacaaggcaacttttttgcttctccaatgctcaagtga

SEQ ID NO: 173437 - DNA, 2193 bp, Homo sapiens
  Payload ID: 14079
  Gene Symbol: RACGAP1
  Gene Name: Rac GTPase activating protein 1
  Uniprot ID: Q9H0H5
  ENST ID: ENST00000551016
  CDS Start-End: 6-1904
gaaagatggatactatgatgctgaatgtgcggaatctgtttgagcagcttgtgcgccgggtggagattctcagtgaaggaaatgaagtccaatttatccagttggcgaaggactttgaggatttccgtaaaaagtggcagaggactgaccatgagctggggaaatacaaggatcttttgatgaaagcagagactgagcgaagtgctctggatgttaagctgaagcatgcacgtaatcaggtggatgtagagatcaaacggagacagagagctgaggctgactgcgaaaagctggaacgacagattcagctgattcgagagatgctcatgtgtgacacatctggcagcattcaactaagcgaggagcaaaaatcagctctggcttttctcaacagaggccaaccatccagcagcaatgctgggaacaaaagactatcaaccattgatgaatctggttccattttatcagatatcagctttgacaagactgatgaatcactggattgggactcttctttggtgaagactttcaaactgaagaagagagaaaagaggcgctctactagccgacagtttgttgatggtccccctggacctgtaaagaaaactcgttccattggctctgcagtagaccaggggaatgaatccatagttgcaaaaactacagtgactgttcccaatgatggcgggcccatcgaagctgtgtccactattgagactgtgccatattggaccaggagccgaaggaaaacaggtactttacaaccttggaacagtgactccaccctgaacagcaggcagctggagccaagaactgagacagacagtgtgggcacgccacagagtaatggagggatgcgcctgcatgactttgtttctaagacggttattaaacctgaatcctgtgttccatgtggaaagcggataaaatttggcaaattatctctgaagtgtcgagactgtcgtgtggtctctcatccagaatgtcgggaccgctgtccccttccctgcattcctaccctgataggaacacctgtcaagattggagagggaatgctggcagactttgtgtcccagacttctccaatgatcccctccattgttgtgcattgtgtaaatgagattgagcaaagaggtctgactgagacaggcctgtataggatctctggctgtgaccgcacagtaaaagagctgaaagagaaattcctcagagtgaaaactgtacccctcctcagcaaagtggatgatatccatgctatctgtagccttctaaaagactttcttcgaaacctcaaagaacctcttctgacctttcgccttaacagagcctttatggaagcagcagaaatcacagatgaagacaacagcatagctgccatgtaccaagctgttggtgaactgccccaggccaacagggacacattagctttcctcatgattcacttgcagagagtggctcagagtccacatactaaaatggatgttgccaatctggctaaagtctttggccctacaatagtggcccatgctgtgcccaatccagacccagtgacaatgttacaggacatcaagcgtcaacccaaggtggttgagcgcctgctttccttgcctctggagtattggagtcagttcatgatggtggagcaagagaacattgaccccctacatgtcattgaaaactcaaatgccttttcaacaccacagacaccagatattaaagtgagtttactgggacctgtgaccactcctgaacatcagcttctcaagactccttcatctagttccctgtcacagagagtccgttccaccctcaccaagaacactcctagatttgggagcaaaagcaagtctgccactaacctaggacgacaaggcaacttttttgcttctccaatgctcaagtgaagtcacatctgcctgttacttcccagcattgactgactataagaaaggacacatctgtactctgctctgcagcctcctgtactcattactacttttagcattctccaggcttttactcaagtttaattgtgcatgagggttttattaaaactatatatatctccccttccttctcctcaagtcacataatatcagcactttgtgctggtcattgttgggagcttttagatgagacatctttccaggggtagaagggttagtatggaattggttgtgattctttttgggg

SEQ ID NO: 173438 - DNA, 841 bp, Homo sapiens
  Payload ID: 14079
  Gene Symbol: RACGAP1
  Gene Name: Rac GTPase activating protein 1
  ENST ID: ENST00000549342
  CDS Start-End: 1-841
caggggaatgaatccatagttgcaaaaactacagtgactgttcccaatgatggcgggcccatcgaagctgtgtccactattgagactgtgccatattggaccaggagccgaaggaaaacaggtactttacaaccttggaacagtgactccaccctgaacagcaggcagctggagccaagaactgagacagacagtgtgggcacgccacagagtaatggagggatgcgcctgcatgactttgtttctaagacgggaatgctggcagactttgtgtcccagacttctccaatgatcccctccattgttgtgcattgtgtaaatgagattgagcaaagaggtctgactgagacaggcctgtataggatctctggctgtgaccgcacagtaaaagagctgaaagagaaattcctcagagtgaaaactgtacccctcctcagcaaagtggatgatatccatgctatctgtagccttctaaaagactttcttcgaaacctcaaagaacctcttctgacctttcgccttaacagagcctttatggaagcagcagaaatcacagatgaagacaacagcatagctgccatgtaccaagctgttggtgaactgccccaggccaacagggacacattagctttcctcatgattcacttgcagagagtggctcagagtccacatactaaaatggatgttgccaatctggctaaagtctttggccctacaatagtggcccatgctgtgcccaatccagacccagtgacaatgttacaggacatcaagcgtcaacccaaggtggttgagcgcctgctttccttgcctctggagtattggagtcagttcatgatgg

SEQ ID NO: 173439 - DNA, 582 bp, Homo sapiens
  Payload ID: 14079
  Gene Symbol: RACGAP1
  Gene Name: Rac GTPase activating protein 1
  ENST ID: ENST00000548598
  CDS Start-End: 69-218
tctgccgttgggtgaggcgcggagcgaagtgaagggtggcccaggtggggccaggctgactgaaaaagatggatactatgatgctgaatgtgcggaatctgtttgagcagcttgtgcgccgggtggagattctcagtgaaggaaatgaagtccgattgggactcttctttggtgaagactttcaaactgaagaagagagaaaagaggcgctctactagccgacagtttgttgatggtccccctggacctgtaaagaaaactcgttccattggctctgcagtagaccaggggaatgaatccatagttgcaaaaactacagtgactgttcccaatgatggcgggcccatcgaagctgtgtccactattgagactgtgccatattggaccaggagccgaaggaaaacaggtactttacaaccttggaacagtgactccaccctgaacagcaggcagctggagccaagaactgagacagacagtgtgggcacgccacagagtaatggagggatgcgcctgcatgactttgtttctaagacggttattaaacctgaatcctgtgttccatgtggaaagcggataaaa

SEQ ID NO: 173440 - DNA, 624 bp, Homo sapiens
  Payload ID: 14079
  Gene Symbol: RACGAP1
  Gene Name: Rac GTPase activating protein 1
  ENST ID: ENST00000548644
  CDS Start-End: 93-624
ggtgaggcgcggagcgaagtgaagggtggcccaggtggggccaggctgactgaagagagccaaaggaaatcaacatttgaattgactacccaatgtcctgcccctgtttctgtcctgtagcacttaggatggatactatgatgctgaatgtgcggaatctgtttgagcagcttgtgcgccgggtggagattctcagtgaaggaaatgaagtccaatttatccagttggcgaaggactttgaggatttccgtaaaaagtggcagaggactgaccatgagctggggaaatacaaggatcttttgatgaaagcagagactgagcgaagtgctctggatgttaagctgaagcatgcacgtaatcaggtggatgtagagatcaaacggagacagagagctgaggctgactgcgaaaagctggaacgacagattcagctgattcgagagatgctcatgtgtgacacatctggcagcattcaactaagcgaggagcaaaaatcagctctggcttttctcaacagaggccaaccatccagcagcaatgctgggaacaaaagactatcaaccattgatgaatctggttccattttatcagatatcagctttgacaagactgatgaatcactgg

SEQ ID NO: 173441 - DNA, 574 bp, Homo sapiens
  Payload ID: 14079
  Gene Symbol: RACGAP1
  Gene Name: Rac GTPase activating protein 1
  ENST ID: ENST00000546723
  CDS Start-End: 110-574
gaagtgaagggtggcccaggtggggccaggctgactgaagtgagtagtgggggtgccagaccaggtgcgtctgccgctggattgtgataggaagcagagtgttcgtgtgatggatactatgatgctgaatgtgcggaatctgtttgagcagcttgtgcgccgggtggagattctcagtgaaggaaatgaagtccaatttatccagttggcgaaggactttgaggatttccgtaaaaagtggcagaggactgaccatgagctggggaaatacaaggatcttttgatgaaagcagagactgagcgaagtgctctggatgttaagctgaagcatgcacgtaatcaggtggatgtagagatcaaacggagacagagagctgaggctgactgcgaaaagctggaacgacagattcagctgattcgagagatgctcatgtgtgacacatctggcagcattcaactaagcgaggagcaaaaatcagctctggcttttctcaacagaggccaaccatccagcagcaatgctgggaacaaaagactatcaaccattgatgaatctggttccattttatcagat

SEQ ID NO: 173442 - DNA, 551 bp, Homo sapiens
  Payload ID: 14079
  Gene Symbol: RACGAP1
  Gene Name: Rac GTPase activating protein 1
  ENST ID: ENST00000550651
  CDS Start-End: 218-551
gttttcaaaccggagctgtgggcgcggcgctgctctgccgttgggtgaggcgcggagcgaagtgaagggtggcccaggtggggccaggctgactgaatgtatctcctagctatggactaaataatacatggggggaaataaacaagtattcatgagggtgaaaatgtgacccagcaggaaaattacaactattttcaattgacgttgaataggaaagatggatactatgatgctgaatgtgcggaatctgtttgagcagcttgtgcgccgggtggagattctcagtgaaggaaatgaagtccaatttatccagttggcgaaggactttgaggatttccgtaaaaagtggcagaggactgaccatgagctggggaaatacaaggatcttttgatgaaagcagagactgagcgaagtgctctggatgttaagctgaagcatgcacgtaatcaggtggatgtagagatcaaacggagacagagagctgaggctgactgcgaaaagctggaacgacagattcagctgattcgagagatgctcatgtgtgacacat

SEQ ID NO: 173443 - DNA, 634 bp, Homo sapiens
  Payload ID: 14079
  Gene Symbol: RACGAP1
  Gene Name: Rac GTPase activating protein 1
  ENST ID: ENST00000546595
  CDS Start-End: 179-634
tggggccaggctgactgaagtgagtagtgggggtgccagaccaggtgcgtctgccgctggattgtgataggaagcagagtgttcgtgtgaatttatccagttggcgaaggactttgaggatttccgtaaaaagtggcagaggactgaccatgagctggggaaatacaaggatcttttgatgaaagcagagactgagcgaagtgctctggatgttaagctgaagcatgcacgtaatcaggtggatgtagagatcaaacggagacagagagctgaggctgactgcgaaaagctggaacgacagattcagctgattcgagagatgctcatgtgtgacacatctggcagcattcaactaagcgaggagcaaaaatcagctctggcttttctcaacagaggccaaccatccagcagcaatgctgggaacaaaagactatcaaccattgatgaatctggttccattttatcagatatcagctttgacaagactgatgaatcactggattgggactcttctttggtgaagactttcaaactgaagaagagagaaaagaggcgctctactagccgacagtttgttgatggtccccctggacctgtaaagaaaactcgttccattggctctgcagtagaccag

SEQ ID NO: 173444 - DNA, 584 bp, Homo sapiens
  Payload ID: 14079
  Gene Symbol: RACGAP1
  Gene Name: Rac GTPase activating protein 1
  ENST ID: ENST00000551145
  CDS Start-End: 211-584
tttctctgtgattggttggtgaaggttttcaaaccggagctgtgggcgcggcgctgctctgccgttgggtgaggcgcggagcgaagtgaagggtggcccaggtggggccaggctgactgaaaatttatccagttggcgaaggactttgaggatttccgtaaaaagtggcagaggactgaccatgagctggggaaatacaaggatcttttgatgaaagcagagactgagcgaagtgctctggatgttaagctgaagcatgcacgtaatcaggtggatgtagagatcaaacggagacagagagctgaggctgactgcgaaaagctggaacgacagattcagctgattcgagagatgctcatgtgtgacacatctggcagcattcaactaagcgaggagcaaaaatcagctctggcttttctcaacagaggccaaccatccagcagcaatgctgggaacaaaagactatcaaccattgatgaatctggttccattttatcagatatcagctttgacaagactgatgaatcactggattgggactcttctttggtgaagactttcaaactgaagaagagagaaaagag

SEQ ID NO: 173445 - DNA, 564 bp, Homo sapiens
  Payload ID: 14079
  Gene Symbol: RACGAP1
  Gene Name: Rac GTPase activating protein 1
  ENST ID: ENST00000548247
  CDS Start-End: 362-564
gcggaacccagcgaaggcgagagaatgaagacacgcatcgggctgtggccagacggttggcagccagggacctagccaagcctccctgcccccgacgcccgcgtccagggatcgtcgatgacagttcgcctgtcgggacatcggatcaggcggccgcccctggggagatgagcaagtcaagccacagctgacctgtgaaaggccgtgtaacagtgactggaagaaccaggaagcctaaacaaatcaggagtatgaaagggagagaacacagtgctgcgggagtttatgccaaaggcacggacccaggcatcagcgtttaagtttaaactgtctagaggaaagatggatactatgatgctgaatgtgcggaatctgtttgagcagcttgtgcgccgggtggagattctcagtgaaggaaatgaagtccgaacgacagattcagctgattcgagagatgctcatgtgtgacacatctggcagcattcaactaagcgaggagcaaaaatcagctctggcttttctcaacagaggccaaccatccagcagcaatgctgggaacaaaag

SEQ ID NO: 173446 - DNA, 6019 bp, Homo sapiens
  Payload ID: 14080
  Gene Symbol: ARHGEF6
  Gene Name: Rac/Cdc42 guanine nucleotide exchange factor (GEF) 6
  Uniprot ID: Q15052
  ENST ID: ENST00000250617
  CDS Start-End: 1207-3537
attaaagttggccttatcataaatttcccaatagtatgcctatttcaagtggttctgaaaatgtttgagaatgatgaagatctcttgttatagacagtttttttttcagagcagtattttaagtgcaaagtgtttttttgttgttgttgttgttgggaaaataagaatcttccatattgtagtgtagacagaggacaagtgctcttttgttctcaaacattctattttttcaagtgtattttacccacttatgtgactgagtctgagcctttgctaagggtactgcagctggattatgtagtggaaccaggtccagaaaaagaattgctaaagaatgcaagtaaacaggatgtcagatgttatccttagcctatttccctaaacatagctttttggctgcaaagtaaaatgccattcttctagcttctgcttatacacagtgatggctgacagcaggcataatcttcgtttgcttggcacgttgtcaccatgcaactcaacgtgttttgcaaggaatgatcgtgacacaccatctctgggagatactatgaggacatccggctatttcttggaagaattttctgtctaccttctttgagccctgttgtgccagcacatctccccatgaggctcagatctgtctgacctaagagccagttggcatcgtcctcctaacagaagccagattttcactggggctagactatttattgacagtgttttcccagactggcccatgagtgtctcatttccaaggtcccctgaagtgctggctcacctctgtttcccaaagcacttgcttgcttgtctctcctccctccccagcatccttttcactttcttcccttataacttcttgcactctgtgtgcgtgtgtgtgtatgcgtgtgtgcatgtgcgtttcttctttttttttatcctaacgaatttgttttgcaggttttgaaaaggaaaaaccagcgttatccaggattgttaaattaattcttatctgtttccacatcttggaccgtgatctctgtggttttaaaatcccatattttgagtgggttccgctgttgtttaagaaaagttgctttaaacctttgctctgcaagcacccgaagagaactcataaaaaggaagacaacagcagatgcaatcgcggatgtggcttagtccttgcagctgccccagagtgctgtttggagtgtaccgtcctcagtaatgaatccagaagaacaaatcgtgacatggcttatatctttgggagttttagagtcccctaaaaagaccatctgtgatccggaggagtttttaaagtcctcgctgaaaaatggggtagttctgtgcaaactgatcaacagactcatgcctggctctgtggaaaagttttgtctggatccccaaactgaagctgactgcatcaacaacatcaatgacttcctgaaaggatgtgcaaccctccaagtggaaatatttgatcctgatgacctttattcaggggtcaatttctccaaggtactgagtactcttttagctgtcaacaaagcaacagaagatcagctatcagaaagaccatgtggacgttcctcttctcttagtgctgctaatacttctcagacaaacccacagggagcagtttctagcacagtttcagggctgcaaaggcagtcaaagacagtggagatgacggaaaatggaagtcatcagttgatagtaaaagcaagattcaactttaagcagactaatgaggatgaactgtcagtttgtaagggggacatcatttacgtcacacgagttgaagaaggaggctggtgggaaggcacattaaatgggagaacaggctggttccccagtaattatgtccgtgaaattaaatccagtgagagacctctctccccaaaagccgtcaaaggatttgaaactgctccacttaccaagaattattatactgtggtgttacagaacatcctggacactgaaaaagaatatgctaaagaacttcagtctcttcttgttacttacttaagacccctgcagtccaataacaatctgagtactgtggaggttacatctttactgggaaacttcgaggaagtatgcacatttcaacagacactctgccaagccttggaagaatgttcaaagtttccagaaaaccagcacaaagtaggaggttgtctactgagtctcatgcctcattttaaatctatgtatctggcttactgtgcaaaccatccttcagctgtaaatgtgctcactcagcacagtgatgagttggaacaattcatggaaaatcaaggtgcatcgagcccaggtatcctcattttaacaacaaacctcagcaaaccattcatgcgactggagaaatatgttactctcttgcaagagttagaacggcatatggaggatactcatccagatcatcaggatattctgaaagcaatcgtagcattcaaaactctcatggggcaatgtcaagatctgaggaagagaaaacagctggagttacagatactgtccgaacctattcaggcatgggaaggagaagatattaaaaacttgggaaatgtgatttttatgtcacaagtaatggtgcagtatggagcatgtgaggaaaaagaggagcggtaccttatgttattttcaaatgtcctgataatgttatctgcaagtcctcggatgagtggctttatctatcagggaaaaataccaatagcaggaacggtggtgactagattagatgaaattgaagggaatgactgcacatttgaaatcactggtaacacagtggagagaattgtggtccattgtaacaacaaccaggacttccaggaatggttggagcagctgaacagactgatcagaggacctgcctcttgcagttcattatccaaaacctcatcgtcatcatgtagtgctcattcttcttttagctctaccggacagccccgaggacccttggagcctcctcaaattataaaaccgtggagtttaagttgtctacgacctgcacctccacttagaccatcagcagcactaggttataaagagaggatgtcttatatcttaaaggagtctagtaaaagccctaaaacgatgaagaaatttcttcataaaaggaagactgagagaaaaccatcggaggaggaatatgtgattaggaaaagtacagctgctctggaagaggatgctcaaatccttaaagtgatcgaagcctactgcaccagcgcaaattttcaacaaggccatggctcaagtactcgaaaagattccattccacaagtcctactccctgaggaagagaaactcatcattgaagaaaccagaagcaacggccagaccatcatggaagaaaagagccttgttgatactgtttacgccttgaaggacgaggtcagagaactgaagcaggaaaataaaagaatgaagcaatgcctggaagaagaactgaaatcaagaagggacctagaaaagctggtgcggaggcttttgaagcaaacagatgagtgtattcgaggcgagtccagtagcaagacctcaattcttccataaccatcactgtgccactgggtggagtgtgccttcagggcatcttgaaatgtcccgctgaatgatttgactcagtttgctcacttctttggcttttgttttgtgtttgagtctctctctctctctccctctctcttctctttctctccccgctgtgtgcatatgtgtgtgcgtgcacgtgcgcgcttgggcatttgctgttgtttggttattggttggttgttcattttttttttcaacaggtgaaaaagcaggaagtggtggtagagatggcctcagagtcttttccattcagtaagaaagagaaagggaatgcaggccagttacttaaaaggtcttcagattgccttcagttcacagtgcctctgcaacagccattgccctcaggtcacattctttgggctggctgcccttgcaaagcagctggccaaggcttattaaatgtgaacccaacttttccccagggctttcctgtacctgcaagcctcttagtacttaatttaccgaaggcaaatcttccagactatggcttgagtaggatgaaagacaaacacatctgcccaatgatccagctgcccttccttagaccatcacatgcctcccctcaatcacaggttttaaaattactgccctatgttgtctataagaccaagaaaactgtagtacccttattccttttgtgtcatgtaaattgtaactcaggggggcagaagctctggtcacccacaccaacaccaaatccatcagcaaattctactggacaatcctcccttttagtagcagagttgaccgccttttcccattgcatgataggtttctttccctcattctgcctagtgtgtaagttttctatttccccagtacttttagccaaccttaccaagtggtgtgtaaactagtatgtatgtgctttgcttactttttaaaaaaatgtagttagactgtgaggagttactttatgtacgttgcatattcaaactgtgatgttttatccttcaaaacaatctgcattaagaagatattgtgccctactagacagctttcattcactttattactctctcatatatgctgtgagaagttgtaatattaattggcctctttgggtgggactctaagcagtatttgcagaaatatgcttctggtccaacttgtacatccagaacaaaagggcccctctagtagctgtgtgctggattattcaggactgattaactcaagttgctcattgaatcacatcatccactttatcccagaaactagaactgtgagaaaccaggtttagaagacagtcacagaacagcacacatccaaattcagcgccattgaaagttggcctaaggctcagtgccactcacccctccctccccaaaagacaagagaaatttggccagatggggaaggtcactggaaattgaggccaaagggctgatcagaattgcctttataatatatttgatggatgcctataaatgtgggttttgcaaatattgtttaaaaaccaaacttgaagccaggcatggtggcccacacctgtggtcccagctactcaggaggctgaggtgggaggatcatttgagcccaggaggtcaaggctgcagtgagctgtgatgacaccactgcactccaacctaggtaacagagagacacctctgtctctgaaaaaacaaaacttgaagtttgaaacccccagcttgctgaggagccctttttatttttggtactgagagtctcaaggtcccatagctacatggtacagggctgttgtctgcttgctgcacagcagaaattacaccatccacaggaaatggactatttttgcagtccaacatcagccaaccacacacagccgtgtttggaagctgaagagtaaagaaatttctaggaatggctgttgttctgttttttagcacagccatttagatataacatccttcacttaaaaattaaaaacatcagtactaccaccaccaccaacaacatcaacacagatcttcacatctgcccattctgtggttagtcaatggcttgcaataaatgtgcaaactgcatctataggaaacatttttgtgattacggaatactttagttgattgctgaaaatattgaaaggtcttcattttacagtgatgagtacatatgcatgtttcggggacttggcccttctgatgaggggccctcggtactctggataacgaagcttgtgcagagtggtaaccatgcttacacactaaactataatataaaggaaatgaagccatgttaatctgagagcagtgtcgccatagttgtgttgtttacaatactctataaatgggttcctgttgccctgtaattaaactgctgcccgtagaggcctttcagttccttttctgtccttccccttcttaacacaagctcaaattttctaacttgtttttattttgaagacttttaaaatggacattttcaatacataaaaataaacagtgctttataaaaataa

SEQ ID NO: 173447 - DNA, 4764 bp, Homo sapiens
  Payload ID: 14080
  Gene Symbol: ARHGEF6
  Gene Name: Rac/Cdc42 guanine nucleotide exchange factor (GEF) 6
  Uniprot ID: Q15052
  ENST ID: ENST00000370620
  CDS Start-End: 414-2282
agtttcgccctggtggcggccgcgctcagggcagggtcccagctccggctgggttgatctgttcccgcagccttggcacaggcttgcccgcccgctcgccggccccgtgactcgggagggcgaacggcttccaggaggcggcggcggcgcggctggagtgagggagcagctggaggacaggcgggcagcggccgagccagatatttgatcctgatgacctttattcaggggtcaatttctccaaggtactgagtactcttttagctgtcaacaaagcaacagaagatcagctatcagaaagaccatgtggacgttcctcttctcttagtgctgctaatacttctcagacaaacccacagggagcagtttctagcacagtttcagggctgcaaaggcagtcaaagacagtggagatgacggaaaatggaagtcatcagttgatagtaaaagcaagattcaactttaagcagactaatgaggatgaactgtcagtttgtaagggggacatcatttacgtcacacgagttgaagaaggaggctggtgggaaggcacattaaatgggagaacaggctggttccccagtaattatgtccgtgaaattaaatccagtgagagacctctctccccaaaagccgtcaaaggatttgaaactgctccacttaccaagaattattatactgtggtgttacagaacatcctggacactgaaaaagaatatgctaaagaacttcagtctcttcttgttacttacttaagacccctgcagtccaataacaatctgagtactgtggaggttacatctttactgggaaacttcgaggaagtatgcacatttcaacagacactctgccaagccttggaagaatgttcaaagtttccagaaaaccagcacaaagtaggaggttgtctactgagtctcatgcctcattttaaatctatgtatctggcttactgtgcaaaccatccttcagctgtaaatgtgctcactcagcacagtgatgagttggaacaattcatggaaaatcaaggtgcatcgagcccaggtatcctcattttaacaacaaacctcagcaaaccattcatgcgactggagaaatatgttactctcttgcaagagttagaacggcatatggaggatactcatccagatcatcaggatattctgaaagcaatcgtagcattcaaaactctcatggggcaatgtcaagatctgaggaagagaaaacagctggagttacagatactgtccgaacctattcaggcatgggaaggagaagatattaaaaacttgggaaatgtgatttttatgtcacaagtaatggtgcagtatggagcatgtgaggaaaaagaggagcggtaccttatgttattttcaaatgtcctgataatgttatctgcaagtcctcggatgagtggctttatctatcagggaaaaataccaatagcaggaacggtggtgactagattagatgaaattgaagggaatgactgcacatttgaaatcactggtaacacagtggagagaattgtggtccattgtaacaacaaccaggacttccaggaatggttggagcagctgaacagactgatcagaggacctgcctcttgcagttcattatccaaaacctcatcgtcatcatgtagtgctcattcttcttttagctctaccggacagccccgaggacccttggagcctcctcaaattataaaaccgtggagtttaagttgtctacgacctgcacctccacttagaccatcagcagcactaggttataaagagaggatgtcttatatcttaaaggagtctagtaaaagccctaaaacgatgaagaaatttcttcataaaaggaagactgagagaaaaccatcggaggaggaatatgtgattaggaaaagtacagctgctctggaagaggatgctcaaatccttaaagtgatcgaagcctactgcaccagcgcaaattttcaacaaggccatggctcaagtactcgaaaagattccattccacaagtcctactccctgaggaagagaaactcatcattgaagaaaccagaagcaacggccagaccatcatggaagaaaagagccttgttgatactgtttacgccttgaaggacgaggtcagagaactgaagcaggaaaataaaagaatgaagcaatgcctggaagaagaactgaaatcaagaagggacctagaaaagctggtgcggaggcttttgaagcaaacagatgagtgtattcgaggcgagtccagtagcaagacctcaattcttccataaccatcactgtgccactgggtggagtgtgccttcagggcatcttgaaatgtcccgctgaatgatttgactcagtttgctcacttctttggcttttgttttgtgtttgagtctctctctctctctccctctctcttctctttctctccccgctgtgtgcatatgtgtgtgcgtgcacgtgcgcgcttgggcatttgctgttgtttggttattggttggttgttcattttttttttcaacaggtgaaaaagcaggaagtggtggtagagatggcctcagagtcttttccattcagtaagaaagagaaagggaatgcaggccagttacttaaaaggtcttcagattgccttcagttcacagtgcctctgcaacagccattgccctcaggtcacattctttgggctggctgcccttgcaaagcagctggccaaggcttattaaatgtgaacccaacttttccccagggctttcctgtacctgcaagcctcttagtacttaatttaccgaaggcaaatcttccagactatggcttgagtaggatgaaagacaaacacatctgcccaatgatccagctgcccttccttagaccatcacatgcctcccctcaatcacaggttttaaaattactgccctatgttgtctataagaccaagaaaactgtagtacccttattccttttgtgtcatgtaaattgtaactcaggggggcagaagctctggtcacccacaccaacaccaaatccatcagcaaattctactggacaatcctcccttttagtagcagagttgaccgccttttcccattgcatgataggtttctttccctcattctgcctagtgtgtaagttttctatttccccagtacttttagccaaccttaccaagtggtgtgtaaactagtatgtatgtgctttgcttactttttaaaaaaatgtagttagactgtgaggagttactttatgtacgttgcatattcaaactgtgatgttttatccttcaaaacaatctgcattaagaagatattgtgccctactagacagctttcattcactttattactctctcatatatgctgtgagaagttgtaatattaattggcctctttgggtgggactctaagcagtatttgcagaaatatgcttctggtccaacttgtacatccagaacaaaagggcccctctagtagctgtgtgctggattattcaggactgattaactcaagttgctcattgaatcacatcatccactttatcccagaaactagaactgtgagaaaccaggtttagaagacagtcacagaacagcacacatccaaattcagcgccattgaaagttggcctaaggctcagtgccactcacccctccctccccaaaagacaagagaaatttggccagatggggaaggtcactggaaattgaggccaaagggctgatcagaattgcctttataatatatttgatggatgcctataaatgtgggttttgcaaatattgtttaaaaaccaaacttgaagccaggcatggtggcccacacctgtggtcccagctactcaggaggctgaggtgggaggatcatttgagcccaggaggtcaaggctgcagtgagctgtgatgacaccactgcactccaacctaggtaacagagagacacctctgtctctgaaaaaacaaaacttgaagtttgaaacccccagcttgctgaggagccctttttatttttggtactgagagtctcaaggtcccatagctacatggtacagggctgttgtctgcttgctgcacagcagaaattacaccatccacaggaaatggactatttttgcagtccaacatcagccaaccacacacagccgtgtttggaagctgaagagtaaagaaatttctaggaatggctgttgttctgttttttagcacagccatttagatataacatccttcacttaaaaattaaaaacatcagtactaccaccaccaccaacaacatcaacacagatcttcacatctgcccattctgtggttagtcaatggcttgcaataaatgtgcaaactgcatctataggaaacatttttgtgattacggaatactttagttgattgctgaaaatattgaaaggtcttcattttacagtgatgagtacatatgcatgtttcggggacttggcccttctgatgaggggccctcggtactctggataacgaagcttgtgcagagtggtaaccatgcttacacactaaactataatataaaggaaatgaagccatgttaatctgagagcagtgtcgccatagttgtgttgtttacaatactctataaatgggttcctgttgccctgtaattaaactgctgcccgtagaggcctttcagttccttttctgtccttccccttcttaacacaagctcaaattttctaacttgtttttattttgaagacttttaaaatggacattttcaatacataaaaataaacagtgctttataaaaataa

SEQ ID NO: 173448 - DNA, 4779 bp, Homo sapiens
  Payload ID: 14080
  Gene Symbol: ARHGEF6
  Gene Name: Rac/Cdc42 guanine nucleotide exchange factor (GEF) 6
  Uniprot ID: Q15052
  ENST ID: ENST00000370622
  CDS Start-End: 429-2297
gccctgaccctgccacttgtgtgaagtcaggatctcctttcccaggcctcagttgagtcatctgtaaaatgaggagactagagtaggggttgggtaatgtctaatggttgtaatgtctgtttttaacttgcccatttccatcagtttccgctaggcaaagctttgcatatttagctgctcagttggaactagtaggaagaccaaagaggattttgatatttgatcctgatgacctttattcaggggtcaatttctccaaggtactgagtactcttttagctgtcaacaaagcaacagaagatcagctatcagaaagaccatgtggacgttcctcttctcttagtgctgctaatacttctcagacaaacccacagggagcagtttctagcacagtttcagggctgcaaaggcagtcaaagacagtggagatgacggaaaatggaagtcatcagttgatagtaaaagcaagattcaactttaagcagactaatgaggatgaactgtcagtttgtaagggggacatcatttacgtcacacgagttgaagaaggaggctggtgggaaggcacattaaatgggagaacaggctggttccccagtaattatgtccgtgaaattaaatccagtgagagacctctctccccaaaagccgtcaaaggatttgaaactgctccacttaccaagaattattatactgtggtgttacagaacatcctggacactgaaaaagaatatgctaaagaacttcagtctcttcttgttacttacttaagacccctgcagtccaataacaatctgagtactgtggaggttacatctttactgggaaacttcgaggaagtatgcacatttcaacagacactctgccaagccttggaagaatgttcaaagtttccagaaaaccagcacaaagtaggaggttgtctactgagtctcatgcctcattttaaatctatgtatctggcttactgtgcaaaccatccttcagctgtaaatgtgctcactcagcacagtgatgagttggaacaattcatggaaaatcaaggtgcatcgagcccaggtatcctcattttaacaacaaacctcagcaaaccattcatgcgactggagaaatatgttactctcttgcaagagttagaacggcatatggaggatactcatccagatcatcaggatattctgaaagcaatcgtagcattcaaaactctcatggggcaatgtcaagatctgaggaagagaaaacagctggagttacagatactgtccgaacctattcaggcatgggaaggagaagatattaaaaacttgggaaatgtgatttttatgtcacaagtaatggtgcagtatggagcatgtgaggaaaaagaggagcggtaccttatgttattttcaaatgtcctgataatgttatctgcaagtcctcggatgagtggctttatctatcagggaaaaataccaatagcaggaacggtggtgactagattagatgaaattgaagggaatgactgcacatttgaaatcactggtaacacagtggagagaattgtggtccattgtaacaacaaccaggacttccaggaatggttggagcagctgaacagactgatcagaggacctgcctcttgcagttcattatccaaaacctcatcgtcatcatgtagtgctcattcttcttttagctctaccggacagccccgaggacccttggagcctcctcaaattataaaaccgtggagtttaagttgtctacgacctgcacctccacttagaccatcagcagcactaggttataaagagaggatgtcttatatcttaaaggagtctagtaaaagccctaaaacgatgaagaaatttcttcataaaaggaagactgagagaaaaccatcggaggaggaatatgtgattaggaaaagtacagctgctctggaagaggatgctcaaatccttaaagtgatcgaagcctactgcaccagcgcaaattttcaacaaggccatggctcaagtactcgaaaagattccattccacaagtcctactccctgaggaagagaaactcatcattgaagaaaccagaagcaacggccagaccatcatggaagaaaagagccttgttgatactgtttacgccttgaaggacgaggtcagagaactgaagcaggaaaataaaagaatgaagcaatgcctggaagaagaactgaaatcaagaagggacctagaaaagctggtgcggaggcttttgaagcaaacagatgagtgtattcgaggcgagtccagtagcaagacctcaattcttccataaccatcactgtgccactgggtggagtgtgccttcagggcatcttgaaatgtcccgctgaatgatttgactcagtttgctcacttctttggcttttgttttgtgtttgagtctctctctctctctccctctctcttctctttctctccccgctgtgtgcatatgtgtgtgcgtgcacgtgcgcgcttgggcatttgctgttgtttggttattggttggttgttcattttttttttcaacaggtgaaaaagcaggaagtggtggtagagatggcctcagagtcttttccattcagtaagaaagagaaagggaatgcaggccagttacttaaaaggtcttcagattgccttcagttcacagtgcctctgcaacagccattgccctcaggtcacattctttgggctggctgcccttgcaaagcagctggccaaggcttattaaatgtgaacccaacttttccccagggctttcctgtacctgcaagcctcttagtacttaatttaccgaaggcaaatcttccagactatggcttgagtaggatgaaagacaaacacatctgcccaatgatccagctgcccttccttagaccatcacatgcctcccctcaatcacaggttttaaaattactgccctatgttgtctataagaccaagaaaactgtagtacccttattccttttgtgtcatgtaaattgtaactcaggggggcagaagctctggtcacccacaccaacaccaaatccatcagcaaattctactggacaatcctcccttttagtagcagagttgaccgccttttcccattgcatgataggtttctttccctcattctgcctagtgtgtaagttttctatttccccagtacttttagccaaccttaccaagtggtgtgtaaactagtatgtatgtgctttgcttactttttaaaaaaatgtagttagactgtgaggagttactttatgtacgttgcatattcaaactgtgatgttttatccttcaaaacaatctgcattaagaagatattgtgccctactagacagctttcattcactttattactctctcatatatgctgtgagaagttgtaatattaattggcctctttgggtgggactctaagcagtatttgcagaaatatgcttctggtccaacttgtacatccagaacaaaagggcccctctagtagctgtgtgctggattattcaggactgattaactcaagttgctcattgaatcacatcatccactttatcccagaaactagaactgtgagaaaccaggtttagaagacagtcacagaacagcacacatccaaattcagcgccattgaaagttggcctaaggctcagtgccactcacccctccctccccaaaagacaagagaaatttggccagatggggaaggtcactggaaattgaggccaaagggctgatcagaattgcctttataatatatttgatggatgcctataaatgtgggttttgcaaatattgtttaaaaaccaaacttgaagccaggcatggtggcccacacctgtggtcccagctactcaggaggctgaggtgggaggatcatttgagcccaggaggtcaaggctgcagtgagctgtgatgacaccactgcactccaacctaggtaacagagagacacctctgtctctgaaaaaacaaaacttgaagtttgaaacccccagcttgctgaggagccctttttatttttggtactgagagtctcaaggtcccatagctacatggtacagggctgttgtctgcttgctgcacagcagaaattacaccatccacaggaaatggactatttttgcagtccaacatcagccaaccacacacagccgtgtttggaagctgaagagtaaagaaatttctaggaatggctgttgttctgttttttagcacagccatttagatataacatccttcacttaaaaattaaaaacatcagtactaccaccaccaccaacaacatcaacacagatcttcacatctgcccattctgtggttagtcaatggcttgcaataaatgtgcaaactgcatctataggaaacatttttgtgattacggaatactttagttgattgctgaaaatattgaaaggtcttcattttacagtgatgagtacatatgcatgtttcggggacttggcccttctgatgaggggccctcggtactctggataacgaagcttgtgcagagtggtaaccatgcttacacactaaactataatataaaggaaatgaagccatgttaatctgagagcagtgtcgccatagttgtgttgtttacaatactctataaatgggttcctgttgccctgtaattaaactgctgcccgtagaggcctttcagttccttttctgtccttccccttcttaacacaagctcaaattttctaacttgtttttattttgaagacttttaaaatggacattttcaatacataaaaataaacagtgctttataaaaataa

SEQ ID NO: 173449 - DNA, 1153 bp, Homo sapiens
  Payload ID: 14081
  Gene Symbol: RAD1
  Gene Name: RAD1 checkpoint DNA exonuclease
  Uniprot ID: O60671
  ENST ID: ENST00000325577
  CDS Start-End: 203-409
ggccgaggtggagggccggtctgaagagtggcgggactggcttcacttcctccgcggttcctcggagccgcctcgctcctcttcagggactttgctgagaagggctctcgggcgtccagaccccaccgcaaaggtgtttggcgatccgccgagaagttgttggccccaggagcatccctcggggccgaatgcgcagtggacgatgccccttctgacccaacagatccaagacgaggatgatcagtacagccttgtggccagccttgacaacgttaggaatctctccactatcttgaaagctattcatttccgagaacatgccacgtgtttcgcaactaaaaatggtatcaaagtaacagtggaaaatgcaaagtgtgtgcaagcaaatgcttttattcagggactttaactgcacttcgaatgtgttaccaaggttatggttaccctttgatgctgttcctggaagaaggaggagtggtgacagtctgcaaaatcaatacacaggaacctgaggagaccctggactttgatttctgcagcaccaatgttattaataaaattattctgcagtcagaggggctccgtgaagcattttctgaattggatatgacgagtgaagtcctacaaattaccatgtctcctgacaagccttatttcaggttatctacttttggaaatgcaggaagttcccaccttgactatcccaaagattctgatttgatggaagcatttcattgtaatcagacccaagtcaacagatacaagatttccttactgaaaccctctacaaaggcattagtcctatcttgtaaggtatctattcggacagataacagaggcttcctttcattacagtatatgattagaaatgaagatggacaaatatgttttgtggaatattactgctgccctgatgaagaagttcctgaatctgagtcttgagtatgacaattcactgatatttatgtgtacatttatgatagatgaagttcttattctgagtacagtactctttgtcatttcatattggattttctatagagaagaagcacaatggggaagataggagcaaggtcatgtaccctaatagttactatgttttgtaaatccattttgtagagggcatgtaaataaatgttttcctgtagtcata

SEQ ID NO: 173450 - DNA, 2341 bp, Homo sapiens
  Payload ID: 14081
  Gene Symbol: RAD1
  Gene Name: RAD1 checkpoint DNA exonuclease
  Uniprot ID: O60671
  ENST ID: ENST00000341754
  CDS Start-End: 900-1748
catgagctaccatgcccggccatactgttcttgcctgtaaaataacccactgcttaaaaataaataaataacctggcatttagaaataggctctgactccaacttaaaaagtgctttgaattctatcccaggtccatttttcaataaaaacagttaaaaaaaaaaaaaaaaaggcccaaaaagcaacatgtggcagtccttagcacttaggacaaaccatcccacctatctcaggaccttcagaagcattacagtgaaggcattcctggaccttcaagaaatgtttcaataatattaggacacctgttttaaaaagtaaagaatctacctaatgaaatctaaagaatttcttacgaaatgttaactggaaaaattgtggcacttgaaaggataaaaggcattgtgtttttttcgtgagaacactgaacaaatgaagaatatataaaataagtgaaaacataaaaatagggtctcacactgttgcccaggctgaagtgctcacggctcactgcagtttcaagttcctgggctcaaagatgggagtctccctatgttgcccaggctggtctccaacacctgggctcaagtggcttggcctcccaaagcgctgggattataggtctgtgccgcctccttccggtctcggtggcgcggcacgcgcggctctctaggcctccttcagctctgtggtgacggtggccgaggtggagggccggtctgaagagtggcgggactggcttcacttcctccgcggttcctcggagccgcctcgctcctcttcagggactttgctgagaagggctctcgggcgtccagaccccaccgcaaaggtgtttggcgatccgccgagaagttgttggccccaggagcatccctcggggccgaatgcgcagtggacgatgccccttctgacccaacagatccaagacgaggatgatcagtacagccttgtggccagccttgacaacgttaggaatctctccactatcttgaaagctattcatttccgagaacatgccacgtgtttcgcaactaaaaatggtatcaaagtaacagtggaaaatgcaaagtgtgtgcaagcaaatgcttttattcaggctggaatatttcaggagtttaaagttcaggaagagtctgttacttttcgaattaatttaactgtccttttagactgtttatctatttttggatcaagtcctatgccagggactttaactgcacttcgaatgtgttaccaaggttatggttaccctttgatgctgttcctggaagaaggaggagtggtgacagtctgcaaaatcaatacacaggaacctgaggagaccctggactttgatttctgcagcaccaatgttattaataaaattattctgcagtcagaggggctccgtgaagcattttctgaattggatatgacgagtgaagtcctacaaattaccatgtctcctgacaagccttatttcaggttatctacttttggaaatgcaggaagttcccaccttgactatcccaaagattctgatttgatggaagcatttcattgtaatcagacccaagtcaacagatacaagatttccttactgaaaccctctacaaaggcattagtcctatcttgtaaggtatctattcggacagataacagaggcttcctttcattacagtatatgattagaaatgaagatggacaaatatgttttgtggaatattactgctgccctgatgaagaagttcctgaatctgagtcttgagtatgacaattcactgatatttatgtgtacatttatgatagatgaagttcttattctgagtacagtactctttgtcatttcatattggattttctatagagaagaagcacaatggggaagataggagcaaggtcatgtaccctaatagttactatgttttgtaaatccattttgtagagggcatgtaaataaatgttttcctgtagtcatagattattcaggactgtcctttagttctgtcttttgaactcatgggaataattgtgagtcagcgtaacatttcaagagtctaaaggtggccgggtgtggtggctttaatcccagcactttgggaagccgaggtgggcggatcacctgaggtcaggagttcgagaccagcctgaccaacgtggagaaaccccatctctactaaaaatacaaaaaattagccggacgtggtggcacatgcctgtaatgccagctactcgggaggctgaggcaggagaattgcttgaacccgggaggcggaggttgtggtgagctgagatgacgccattgcactccagcctaggcaataagagcaaaactctgcctcaaaaaaaaaaaaaaaaaaa

SEQ ID NO: 173451 - DNA, 5770 bp, Homo sapiens
  Payload ID: 14081
  Gene Symbol: RAD1
  Gene Name: RAD1 checkpoint DNA exonuclease
  Uniprot ID: O60671
  ENST ID: ENST00000382038
  CDS Start-End: 1421-2269
gcttgccatcacaccacacggggtcatttacttatcacctactccgcgctagagtactatgctaagtgcggaggacgcaaaaattaatgtcaaagataatccttgttcacagtattctgtctagcttaagaagagttcttagttgaatgaaagctaattctaacaacttgtgtgcacttcttttgaataaaaaccatcaacttatttgaattcttaagtttcctcctaaactccaacatttcaggaggaagaggtcacattctagtcatctttgcaatctcaaacccaaaggaagcctaacttggtacagtgcatggcacattcaatgtctgttgaatacaagtaaagctcatactacctagtctatttttcagtatctcttgagttaatgacctggttaacaagtcagagtcacagtcccaagggcaacaactttttaaaggctcccctaacgtacttcaggatccctgactgagagtggctgactatggcagtatatgggcatactaatcactggagaaataatagcgagaaataaccaaggaaaagcactactctccaaaaacattaaaaaaaaaaaacaactgaacaactagtaagaaagaacgctggatctgagcaccctgtaagtcgcttccccgtgggccgggtaaaggttttaaaacccgccgcctccaggaagacggccacgtgcacaaggattagctgcaaactccgtgcccagtctggccgggagaattgctaaaaccgacctaccgttaacacccgggctactctgaaattaagcaaggctgtagtcaagtaagtaacccaagaaaaggcgcacagagccgccgccgcaggtgtagcccggggacatcccctcctaccttgcaaacggggcctgggatccggtccctctcttcttcctccacctcctctgctgtggcgtgccgcttagctggcggctccgcatctatttcgtttctttttggcttcttcgcctgaactgcaaagcctccacgccgtttcctcttggttgccgccatcttgcctcgccgcccgcgctcttggcctcctttccggcgctgccgctcgctcctatttccgatctctatggttcggcggctctaagcgctcagctccgcggtcgtcctccaggtctgtgccgcctccttccggtctcggtggcgcggcacgcgcggctctctaggcctccttcagctctgtggtgacggtggccgaggtggagggccggtctgaagagtggcgggactggcttcacttcctccgcggttcctcggagccgcctcgctcctcttcagggactttgctgagaagggctctcgggcgtccagaccccaccgcaaaggtgtttggcgatccgccgagaagttgttggccccaggagcatccctcggggccgaatgcgcagtggacgatgccccttctgacccaacagatccaagacgaggatgatcagtacagccttgtggccagccttgacaacgttaggaatctctccactatcttgaaagctattcatttccgagaacatgccacgtgtttcgcaactaaaaatggtatcaaagtaacagtggaaaatgcaaagtgtgtgcaagcaaatgcttttattcaggctggaatatttcaggagtttaaagttcaggaagagtctgttacttttcgaattaatttaactgtccttttagactgtttatctatttttggatcaagtcctatgccagggactttaactgcacttcgaatgtgttaccaaggttatggttaccctttgatgctgttcctggaagaaggaggagtggtgacagtctgcaaaatcaatacacaggaacctgaggagaccctggactttgatttctgcagcaccaatgttattaataaaattattctgcagtcagaggggctccgtgaagcattttctgaattggatatgacgagtgaagtcctacaaattaccatgtctcctgacaagccttatttcaggttatctacttttggaaatgcaggaagttcccaccttgactatcccaaagattctgatttgatggaagcatttcattgtaatcagacccaagtcaacagatacaagatttccttactgaaaccctctacaaaggcattagtcctatcttgtaaggtatctattcggacagataacagaggcttcctttcattacagtatatgattagaaatgaagatggacaaatatgttttgtggaatattactgctgccctgatgaagaagttcctgaatctgagtcttgagtatgacaattcactgatatttatgtgtacatttatgatagatgaagttcttattctgagtacagtactctttgtcatttcatattggattttctatagagaagaagcacaatggggaagataggagcaaggtcatgtaccctaatagttactatgttttgtaaatccattttgtagagggcatgtaaataaatgttttcctgtagtcatagattattcaggactgtcctttagttctgtcttttgaactcatgggaataattgtgagtcagcgtaacatttcaagagtctaaaggtggccgggtgtggtggctttaatcccagcactttgggaagccgaggtgggcggatcacctgaggtcaggagttcgagaccagcctgaccaacgtggagaaaccccatctctactaaaaatacaaaaaattagccggacgtggtggcacatgcctgtaatgccagctactcgggaggctgaggcaggagaattgcttgaacccgggaggcggaggttgtggtgagctgagatgacgccattgcactccagcctaggcaataagagcaaaactctgcctcaaaaaaaaaaaaaaaaaaagtctaaaggcttaaagtttgatgcagctacctgaaatgatcttttatttatttattattagaaaaagcaaaggcatatgggcattgcttattagtttgaattctagagactagatcttaaagtagtggttctcaaagtgttgtgcccgcaccaacatcagaatggcctgcaaacttgtagcaaactctggggaggaggccagcattctgtattttaacaagcttccctcaggagattctgatgcctgctaaattttgggaaccactgttttaaaggaaactttttttttctttaatagcatttaattgtatgagatgattgcttttacatgtgatttccttgcaaatgttctgaagttgaggcatcaccaaacaagtctgaacaattctttatgtgatttatttttaaagtagaccttttgaagagatctatgaatgggatataaagcaattttcagtgttacaggttttcttcttcttctcaaaactgtttgctgtaagtaactgcaatcagtacttactactttccatttgcttatgagtttcttgacaaatcaaggtgtagaaaaccagttattaagtgattttgtactttcctggtagttgtcactaaaataatttttgtggcatataaatatatttaataaaatgcaaaaattatcttcctgtctagtagaaaaaattacatgagtaaagtgaagcttctgtctttgttactgtaccaggtgacaacagctgagtgtccctccatggacagtcactattggccttttgagtgagacagttctttaggataaaaacctgtcatcccattgcaggattcatttagcctttctggcccttacccactgatgctagtcattgtgaccaccccacctcccccaaataaaagtgtgccaaactattcattgttgagaaccattcaattgtattcaccaaaattggaggatatattggaatgccctaccttaatataggtcacatagcattagagaaaattggtttggagagtattacagcaaagtgtgctgcaaggaggctactccagcacaatggcaggcactgcttcccaggcatatggacaattctgggaggtggccagggtcagcacctgataactagtaagtgtctcaatctcagcatacaaaatttagcagtgactacaaaagaagttggaattttctaaaatgtttgtattcaagaaggaaacaaatgaatttactaaatgttgtcagagtattttttgtttagataaccaccaagaacagaacaaacctaaaagatacttgggaaaatatctaatcagtcaacattctaaggactgttaaatgtgaaatagcatagttattttttgtcttttgttactagtgtgaacaaagaacggcgcctaacatataatgggcatttagtaactctgttagatgaaagactctccaatttcagattttcttttagcatcttattagtcactacttaattctgatgatttagctctaaatttattttgatctcagtttttttatttttatttttggagacaagatcttgctctgttgcccaggctggagtacagttgtaggattacagttcactccagcctcaatctcctaggctcaagcaatcctcccatctcagcttcccaaatagctacgactacaggtgcatgcctccatgccctgctaatttttgtattttttgtagagatggggttttactatgttccctaggctaatcttgaactcctgagctcaagcaatccacccgcctcggcctcccaaagggctgggattacaggcgtgagctatcatgcctggcctaatgtattttttaaaagttgaatctaaaaagaatttaaaacaaatataaatcagctcagtaaggatggatatttttgtacatttaaaactattattttaggccgggagtggtggctcacacctgtaatcccagcattttgggaagccgaggcagggggatcatctgaggtcaggaagttcgagatcagcctggccaacatggtgaaacccctacctctactaaaaatacaaaaattagctgggtgtggtggtgggtgtctgtaatcccagctacttgagaggctgaggcaagagaatcacttgaaactggaaggcgggggttgcagtgagccgagattgcaccattgcactccagcctgggtgacagagcaagactccgtctcaaaaacaaaaaaaattaaaataaaaattattgttttagctgcatgtcttcagctatttagaattcaaagactaatgaattgtttctaagtcaccctaacatcaaggtacttattttataaagaatttcctccttatttgtgttctaattgacccaggaatttttactttaataaaagtttaactttatttcctatggaaaatcactagggggagtgctccctcaggcagagcaggcgacactttggtgccactacaaattgatgtgtagtatatagaagaatacagtcttatatttaaagacttttagttctgtctttttgaagtttatctctctttctagtaaaatggtgcttactgtgaatggataatcttttttttcatttttcatttgttgatttcccattcgatgatgtagtgcttccaccgagaattgatgaaatgcttcaaaataataaaagtatttgttaaattccactttaataaaaataaggcatgtaacacagtcattttaacaggaagccacagggtttctgtggtgttaccaaagtcctagtaaaaattaattaaaattgctaaaagggcagaatgtggcactctcaacagtggggtaggcagtccttcagaacatagagacttccttctttccttccctgtcttcacattgcttgtcccttatccccacctgaaataaaatctattgggtcctga

SEQ ID NO: 173452 - DNA, 1328 bp, Homo sapiens
  Payload ID: 14081
  Gene Symbol: RAD1
  Gene Name: RAD1 checkpoint DNA exonuclease
  ENST ID: ENST00000513914
  CDS Start-End: 270-524
ctccttccggtctcggtggcgcggcacgcgcggctctctaggcctccttcagctctgtggtgacggtggccgaggtggagggccggtctgaagagtggcgggactggcttcacttcctccgcggttcctcggagccgcctcgctcctcttcagggactttgctgagaagggctctcgggcgtccagaccccaccgcaaaggtgtttggcgatccgccgagaagttgttggccccaggagcatccctcggggccgaatgcgcagtggacgatgccccttctgacccaacagatccaagacgaggatgatcagtacagccttgtggccagccttgacaacgttaggaatctctccactatcttgaaagctattcatttccgagaacatgccacgtgtttcgcaactaaaaatggtatcaaagtaacagtggaaaatgcaaagtgtgtgcaagcaaatgcttttattcaggggcatggtatggtggctcacacctgtatttccagctgctcaggagaccgaggctgaagcacgaagatcgcttgagctcaggcattaaagaccagcctgggctggaatatttcaggagtttaaagttcaggaagagtctgttacttttcgaattaatttaactgtccttttagactgtttatctatttttggatcaagtcctatgccagggactttaactgcacttcgaatgtgttaccaaggttatggttaccctttgatgctgttcctggaagaaggaggagtggtgacagtctgcaaaatcaatacacaggaacctgaggagaccctggactttgatttctgcagcaccaatgttattaataaaattattctgcagtcagaggggctccgtgaagcattttctgaattggatatgacgagtgaagtcctacaaattaccatgtctcctgacaagccttatttcaggttatctacttttggaaatgcaggaagttcccaccttgactatcccaaagattctgatttgatggaagcatttcattgtaatcagacccaagtcaacagatacaagatttccttactgaaaccctctacaaaggcattagtcctatcttgtaaggtatctattcggacagataacagaggcttcctttcattacagtatatgattagaaatgaagatggacaaatatgttttgtggaatattactgctgccctgatgaagaagttcctgaatctgagtcttgagtatgacaattcactgatatttatgtgtacatttatgatagatgaagttcttattctgagtacagtactctttgtcatttcatattggattttctatagagaagaagcac

SEQ ID NO: 173453 - DNA, 664 bp, Homo sapiens
  Payload ID: 14081
  Gene Symbol: RAD1
  Gene Name: RAD1 checkpoint DNA exonuclease
  ENST ID: ENST00000511456
  CDS Start-End: 172-426
cgggactggcttcacttcctccgcggttcctcggagccgcctcgctcctcttcagggactttgctgagaagggctctcgggcgtccagaccccaccgcaaaggtgtttggcgatccgccgagaagttgttggccccaggagcatccctcggggccgaatgcgcagtggacgatgccccttctgacccaacagatccaagacgaggatgatcagtacagccttgtggccagccttgacaacgttaggaatctctccactatcttgaaagctattcatttccgagaacatgccacgtgtttcgcaactaaaaatggtatcaaagtaacagtggaaaatgcaaagtgtgtgcaagcaaatgcttttattcaggggcatggtatggtggctcacacctgtatttccagctgctcaggagaccgaggctgaagcacgaagatcgcttgagctcaggcattaaagaccagcctggggactttaactgcacttcgaatgtgttaccaaggttatggttaccctttgatgctgttcctggaagaaggaggagtggtgacagtctgcaaaatcaatacacaggaacctgaggagaccctggactttgatttctgcagcaccaatgttattaataaaattattctgcagtcagaggggctccgtgaagcatttt

SEQ ID NO: 173454 - DNA, 1678 bp, Homo sapiens
  Payload ID: 14081
  Gene Symbol: RAD1
  Gene Name: RAD1 checkpoint DNA exonuclease
  ENST ID: ENST00000628399
  CDS Start-End: 1424-1678
agagcttgccatcacaccacacggggtcatttacttatcacctactccgcgctagagtactatgctaagtgcggaggacgcaaaaattaatgtcaaagataatccttgttcacagtattctgtctagcttaagaagagttcttagttgaatgaaagctaattctaacaacttgtgtgcacttcttttgaataaaaaccatcaacttatttgaattcttaagtttcctcctaaactccaacatttcaggaggaagaggtcacattctagtcatctttgcaatctcaaacccaaaggaagcctaacttggtacagtgcatggcacattcaatgtctgttgaatacaagtaaagctcatactacctagtctatttttcagtatctcttgagttaatgacctggttaacaagtcagagtcacagtcccaagggcaacaactttttaaaggctcccctaacgtacttcaggatccctgactgagagtggctgactatggcagtatatgggcatactaatcactggagaaataatagcgagaaataaccaaggaaaagcactactctccaaaaacattaaaaaaaaaaaacaactgaacaactagtaagaaagaacgctggatctgagcaccctgtaagtcgcttccccgtgggccgggtaaaggttttaaaacccgccgcctccaggaagacggccacgtgcacaaggattagctgcaaactccgtgcccagtctggccgggagaattgctaaaaccgacctaccgttaacacccgggctactctgaaattaagcaaggctgtagtcaagtaagtaacccaagaaaaggcgcacagagccgccgccgcaggtgtagcccggggacatcccctcctaccttgcaaacggggcctgggatccggtccctctcttcttcctccacctcctctgctgtggcgtgccgcttagctggcggctccgcatctatttcgtttctttttggcttcttcgcctgaactgcaaagcctccacgccgtttcctcttggttgccgccatcttgcctcgccgcccgcgctcttggcctcctttccggcgctgccgctcgctcctatttccgatctctatggttcggcggctctaagcgctcagctccgcggtcgtcctccaggtctgtgccgcctccttccggtctcggtggcgcggcacgcgcggctctctaggcctccttcagctctgtggtgacggtggccgaggtggagggccggtctgaagagtggcgggactggcttcacttcctccgcggttcctcggagccgcctcgctcctcttcagggactttgctgagaagggctctcgggcgtccagaccccaccgcaaaggtgtttggcgatccgccgagaagttgttggccccaggagcatccctcggggccgaatgcgcagtggacgatgccccttctgacccaacagatccaagacgaggatgatcagtacagccttgtggccagccttgacaacgttaggaatctctccactatcttgaaagctattcatttccgagaacatgccacgtgtttcgcaactaaaaatggtatcaaagtaacagtggaaaatgcaaagtgtgtgcaagcaaatgcttttattcaggggcatggtatggtggctcacacctgtatttccagctgctcaggagaccgaggctga

SEQ ID NO: 173455 - DNA, 2135 bp, Homo sapiens
  Payload ID: 14082
  Gene Symbol: RAD17
  Gene Name: RAD17 checkpoint clamp loader component
  Uniprot ID: O75943
  ENST ID: ENST00000282891
  CDS Start-End: 313-2067
caagtgaattcatggtattttacttttttgggaaatactggaaatgaagacctgcaactgtaatttgaaataaggaaaactttaattttcagtataaaaattgctcaaatagaattgcctgattttaatgacaaaagtatatgggagtccacatttatgtaagaaatgaaactataaaatgtataaataatttgcaaatcagaattgctgtcgaaagttttactataatgaaagatattttcatactctcaaaaatatagaggaaaggggccaagattatagtaccagtcacaatcttttgatgaggacgaaatgaatcagcatgaacttgctgtgcataaaaagaaaattgaagaagtcgaaacctggttaaaagctcaagttttagaaaggcaaccaaaacagggtggatctattttattaataacaggtcctcctggatgtggaaagacaacgaccttaaaaatactatcaaaggagcatggtattcaagtacaagagtggattaatccagttttaccagacttccaaaaagatgatttcaaggggatgtttaatactgaatcaagcttccatatgtttccctatcagtctcagatagcagttttcaaagagtttctactaagagcgacaaagtataacaagttacaaatgcttggagatgatctgagaactgataagaagataattctggttgaagatttacctaaccagttttatcgggattctcatactttacatgaagttctaaggaagtatgtgaggattggtcgatgtcctcttatatttataatctcggacagtctcagtggagataataatcaaaggttattgtttcccaaagaaattcaggaagagtgttctatctcaaatattagtttcaaccctgtggcaccaacaattatgatgaaatttcttaatcgaatagtgactatagaagctaacaagaatggaggaaaaattactgtccctgacaaaacttctctagagttgctctgtcagggatgttctggtgatatcagaagtgcaataaacagcctccagttttcttcttcaaaaggagaaaacaacttacggccaaggaaaaaaggaatgtctttaaaatcagatgctgtgctgtcaaaatcaaaacgaagaaaaaaacctgatagggtttttgaaaatcaagaggtccaagctattggtggcaaagatgtttctctgtttctcttcagagctttggggaaaattctatattgtaaaagagcatctttaacagaattagactcacctcggttgccctctcatttatcagaatatgaacgggatacattacttgttgaacctgaggaggtagtagaaatgtcacacatgcctggagacttatttaatttatatcttcaccaaaactacatagatttcttcatggaaattgatgatattgtgagagccagtgaatttctgagttttgcagatatcctcagtggtgactggaatacacgctctttactcagggaatatagcacatctatagctacgagaggtgtgatgcattccaacaaagcccgaggatatgctcattgccaaggaggaggatcaagttttcgacccttgcacaaacctcagtggtttctaataaataaaaagtatcgggaaaattgcctggcagcaaaagcactttttcctgacttctgcctaccagctttatgcctccaaactcagctattgccataccttgctctactaaccattccaatgagaaatcaagctcagatttcttttatccaagatattggaaggctccctctgaagcgacactttggaagattgaaaatggaagccctgactgacagggaacatggaatgatagaccctgacagcggagatgaagcccagcttaatggaggacattctgcagaggaatctctgggtgaacccactcaagccactgtgccggaaacctggtctcttcctttgagtcagaatagtgccagtgaactgcctgctagccagccccagcccttttcagcccaaggagacatggaagaaaacataataatagaagactacgagagtgatgggacatagaagccagcctgctaatcagattgctacttcacagcttcatttttgtttcattcagtggtacttcagca

SEQ ID NO: 173456 - DNA, 3164 bp, Homo sapiens
  Payload ID: 14082
  Gene Symbol: RAD17
  Gene Name: RAD17 checkpoint clamp loader component
  Uniprot ID: O75943
  ENST ID: ENST00000305138
  CDS Start-End: 643-2655
acctgtataccttttgaaacgtcacagtctctaatcgtgaacgatttggggcggagggctgaacaatgtgttttctagtgtgtcgaggtgtttataggctatgtgtgcctccaaactgtaaagtagtccagtatactttccaatgtataagtttgtagaccttaaacttttcttctggctaacttaaaatcgttgaattcactagtttgcataaacatttaagaatttgaaaacacggttgaaaaacagtgttaccaagaaattttgtaataacatgttcaaatgaagacaaaaattttacagtttaagacttaaattcttcgtccacagcaagtgaattcatggtattttacttttttgggaaatactggaaatgaagacctgcaactgtaatttgaaataaggaaaactttaattttcagtataaaaattgctcaaatagaattgcctgattttaatgacaaaagtatatgggagtccacatttatgtaagaaatgaaactataaaatgtataaataatttgcaaatcagaattgctgtcgaaagttttactataatgaaagatattttcatactctcaaaaatatagaggaaaggggccaagattatagtaccagtcacaatcttttgatgaggacgaaatgaatcaggtaacagactgggttgacccatcatttgatgattttctagagtgtagtggcgtctctactattactgccacatcattaggtgtgaataactcaagtcatagaagaaaaaatgggccttctacattagaaagcagcagatttccagcgagaaaaagaggaaatctatcttccttagaacagatttatggtttagaaaattcaaaagaatatctgtctgaaaatgaaccatgggtggataaatataaaccagaaactcagcatgaacttgctgtgcataaaaagaaaattgaagaagtcgaaacctggttaaaagctcaagttttagaaaggcaaccaaaacagggtggatctattttattaataacaggtcctcctggatgtggaaagacaacgaccttaaaaatactatcaaaggagcatggtattcaagtacaagagtggattaatccagttttaccagacttccaaaaagatgatttcaaggggatgtttaatactgaatcaagcttccatatgtttccctatcagtctcagatagcagttttcaaagagtttctactaagagcgacaaagtataacaagttacaaatgcttggagatgatctgagaactgataagaagataattctggttgaagatttacctaaccagttttatcgggattctcatactttacatgaagttctaaggaagtatgtgaggattggtcgatgtcctcttatatttataatctcggacagtctcagtggagataataatcaaaggttattgtttcccaaagaaattcaggaagagtgttctatctcaaatattagtttcaaccctgtggcaccaacaattatgatgaaatttcttaatcgaatagtgactatagaagctaacaagaatggaggaaaaattactgtccctgacaaaacttctctagagttgctctgtcagggatgttctggtgatatcagaagtgcaataaacagcctccagttttcttcttcaaaaggagaaaacaacttacggccaaggaaaaaaggaatgtctttaaaatcagatgctgtgctgtcaaaatcaaaacgaagaaaaaaacctgatagggtttttgaaaatcaagaggtccaagctattggtggcaaagatgtttctctgtttctcttcagagctttggggaaaattctatattgtaaaagagcatctttaacagaattagactcacctcggttgccctctcatttatcagaatatgaacgggatacattacttgttgaacctgaggaggtagtagaaatgtcacacatgcctggagacttatttaatttatatcttcaccaaaactacatagatttcttcatggaaattgatgatattgtgagagccagtgaatttctgagttttgcagatatcctcagtggtgactggaatacacgctctttactcagggaatatagcacatctatagctacgagaggtgtgatgcattccaacaaagcccgaggatatgctcattgccaaggaggaggatcaagttttcgacccttgcacaaacctcagtggtttctaataaataaaaagtatcgggaaaattgcctggcagcaaaagcactttttcctgacttctgcctaccagctttatgcctccaaactcagctattgccataccttgctctactaaccattccaatgagaaatcaagctcagatttcttttatccaagatattggaaggctccctctgaagcgacactttggaagattgaaaatggaagccctgactgacagggaacatggaatgatagaccctgacagcggagatgaagcccagcttaatggaggacattctgcagaggaatctctgggtgaacccactcaagccactgtgccggaaacctggtctcttcctttgagtcagaatagtgccagtgaactgcctgctagccagccccagcccttttcagcccaaggagacatggaagaaaacataataatagaagactacgagagtgatgggacatagaagccagcctgctaatcagattgctacttcacagcttcatttttgtttcattcagtggtacttcagcagagttaatatgcttttctgatgaattacacaacagtttgttaattcttcattcttgtagtatttcatcacaagaaacctactcttctgtcatcttgaagtaaatagaagatcaagccttcaaatctcttaattttttcggtatttattaaatctgtgagtggtttaaggagcggtcagtgtgtataaagtgtgtttgaacattatgccaaatatcaagatgtgaaggactaattcaggatgcaaaaacgttattggggggttgtaaatatcaactattcaacagtttaggatgcaattacgagtgtaaactgtgtgccttatttacactttattgtctcccgcttctcagatagttttgatgtgttgtacagtggaatatcttagatactttttggaaagtatttacataagttatatcacaattaaaatgttgaatttaa

SEQ ID NO: 173457 - DNA, 2789 bp, Homo sapiens
  Payload ID: 14082
  Gene Symbol: RAD17
  Gene Name: RAD17 checkpoint clamp loader component
  Uniprot ID: O75943
  ENST ID: ENST00000345306
  CDS Start-End: 268-2280
agcccgggtagggccaggtggctgccctttcacctagggtagtccctggtcgcctccgctcttcgcctaaaaggggatgcagctccgggaaatatatgggagtccacatttatgtaagaaatgaaactataaaatgtataaataatttgcaaatcagaattgctgtcgaaagttttactataatgaaagatattttcatactctcaaaaatatagaggaaaggggccaagattatagtaccagtcacaatcttttgatgaggacgaaatgaatcaggtaacagactgggttgacccatcatttgatgattttctagagtgtagtggcgtctctactattactgccacatcattaggtgtgaataactcaagtcatagaagaaaaaatgggccttctacattagaaagcagcagatttccagcgagaaaaagaggaaatctatcttccttagaacagatttatggtttagaaaattcaaaagaatatctgtctgaaaatgaaccatgggtggataaatataaaccagaaactcagcatgaacttgctgtgcataaaaagaaaattgaagaagtcgaaacctggttaaaagctcaagttttagaaaggcaaccaaaacagggtggatctattttattaataacaggtcctcctggatgtggaaagacaacgaccttaaaaatactatcaaaggagcatggtattcaagtacaagagtggattaatccagttttaccagacttccaaaaagatgatttcaaggggatgtttaatactgaatcaagcttccatatgtttccctatcagtctcagatagcagttttcaaagagtttctactaagagcgacaaagtataacaagttacaaatgcttggagatgatctgagaactgataagaagataattctggttgaagatttacctaaccagttttatcgggattctcatactttacatgaagttctaaggaagtatgtgaggattggtcgatgtcctcttatatttataatctcggacagtctcagtggagataataatcaaaggttattgtttcccaaagaaattcaggaagagtgttctatctcaaatattagtttcaaccctgtggcaccaacaattatgatgaaatttcttaatcgaatagtgactatagaagctaacaagaatggaggaaaaattactgtccctgacaaaacttctctagagttgctctgtcagggatgttctggtgatatcagaagtgcaataaacagcctccagttttcttcttcaaaaggagaaaacaacttacggccaaggaaaaaaggaatgtctttaaaatcagatgctgtgctgtcaaaatcaaaacgaagaaaaaaacctgatagggtttttgaaaatcaagaggtccaagctattggtggcaaagatgtttctctgtttctcttcagagctttggggaaaattctatattgtaaaagagcatctttaacagaattagactcacctcggttgccctctcatttatcagaatatgaacgggatacattacttgttgaacctgaggaggtagtagaaatgtcacacatgcctggagacttatttaatttatatcttcaccaaaactacatagatttcttcatggaaattgatgatattgtgagagccagtgaatttctgagttttgcagatatcctcagtggtgactggaatacacgctctttactcagggaatatagcacatctatagctacgagaggtgtgatgcattccaacaaagcccgaggatatgctcattgccaaggaggaggatcaagttttcgacccttgcacaaacctcagtggtttctaataaataaaaagtatcgggaaaattgcctggcagcaaaagcactttttcctgacttctgcctaccagctttatgcctccaaactcagctattgccataccttgctctactaaccattccaatgagaaatcaagctcagatttcttttatccaagatattggaaggctccctctgaagcgacactttggaagattgaaaatggaagccctgactgacagggaacatggaatgatagaccctgacagcggagatgaagcccagcttaatggaggacattctgcagaggaatctctgggtgaacccactcaagccactgtgccggaaacctggtctcttcctttgagtcagaatagtgccagtgaactgcctgctagccagccccagcccttttcagcccaaggagacatggaagaaaacataataatagaagactacgagagtgatgggacatagaagccagcctgctaatcagattgctacttcacagcttcatttttgtttcattcagtggtacttcagcagagttaatatgcttttctgatgaattacacaacagtttgttaattcttcattcttgtagtatttcatcacaagaaacctactcttctgtcatcttgaagtaaatagaagatcaagccttcaaatctcttaattttttcggtatttattaaatctgtgagtggtttaaggagcggtcagtgtgtataaagtgtgtttgaacattatgccaaatatcaagatgtgaaggactaattcaggatgcaaaaacgttattggggggttgtaaatatcaactattcaacagtttaggatgcaattacgagtgtaaactgtgtgccttatttacactttattgtctcccgcttctcagatagttttgatgtgttgtacagtggaatatcttagatactttttggaaagtatttacataagttatatcacaattaaaatgttgaatttaa

SEQ ID NO: 173458 - DNA, 2943 bp, Homo sapiens
  Payload ID: 14082
  Gene Symbol: RAD17
  Gene Name: RAD17 checkpoint clamp loader component
  Uniprot ID: O75943
  ENST ID: ENST00000354312
  CDS Start-End: 422-2434
cgagaggctcggcgttgagcccgggtagggccaggtggctgccctttcacctagggtagtccctggtcgcctccgctcttcgcctaaaaggggatgcagctccgggaaacaagtgaattcatggtattttacttttttgggaaatactggaaatgaagacctgcaactgtaatttgaaataaggaaaactttaattttcagtataaaaattgctcaaatagaattgcctgattttaatgacaaaagtatatgggagtccacatttatgtaagaaatgaaactataaaatgtataaataatttgcaaatcagaattgctgtcgaaagttttactataatgaaagatattttcatactctcaaaaatatagaggaaaggggccaagattatagtaccagtcacaatcttttgatgaggacgaaatgaatcaggtaacagactgggttgacccatcatttgatgattttctagagtgtagtggcgtctctactattactgccacatcattaggtgtgaataactcaagtcatagaagaaaaaatgggccttctacattagaaagcagcagatttccagcgagaaaaagaggaaatctatcttccttagaacagatttatggtttagaaaattcaaaagaatatctgtctgaaaatgaaccatgggtggataaatataaaccagaaactcagcatgaacttgctgtgcataaaaagaaaattgaagaagtcgaaacctggttaaaagctcaagttttagaaaggcaaccaaaacagggtggatctattttattaataacaggtcctcctggatgtggaaagacaacgaccttaaaaatactatcaaaggagcatggtattcaagtacaagagtggattaatccagttttaccagacttccaaaaagatgatttcaaggggatgtttaatactgaatcaagcttccatatgtttccctatcagtctcagatagcagttttcaaagagtttctactaagagcgacaaagtataacaagttacaaatgcttggagatgatctgagaactgataagaagataattctggttgaagatttacctaaccagttttatcgggattctcatactttacatgaagttctaaggaagtatgtgaggattggtcgatgtcctcttatatttataatctcggacagtctcagtggagataataatcaaaggttattgtttcccaaagaaattcaggaagagtgttctatctcaaatattagtttcaaccctgtggcaccaacaattatgatgaaatttcttaatcgaatagtgactatagaagctaacaagaatggaggaaaaattactgtccctgacaaaacttctctagagttgctctgtcagggatgttctggtgatatcagaagtgcaataaacagcctccagttttcttcttcaaaaggagaaaacaacttacggccaaggaaaaaaggaatgtctttaaaatcagatgctgtgctgtcaaaatcaaaacgaagaaaaaaacctgatagggtttttgaaaatcaagaggtccaagctattggtggcaaagatgtttctctgtttctcttcagagctttggggaaaattctatattgtaaaagagcatctttaacagaattagactcacctcggttgccctctcatttatcagaatatgaacgggatacattacttgttgaacctgaggaggtagtagaaatgtcacacatgcctggagacttatttaatttatatcttcaccaaaactacatagatttcttcatggaaattgatgatattgtgagagccagtgaatttctgagttttgcagatatcctcagtggtgactggaatacacgctctttactcagggaatatagcacatctatagctacgagaggtgtgatgcattccaacaaagcccgaggatatgctcattgccaaggaggaggatcaagttttcgacccttgcacaaacctcagtggtttctaataaataaaaagtatcgggaaaattgcctggcagcaaaagcactttttcctgacttctgcctaccagctttatgcctccaaactcagctattgccataccttgctctactaaccattccaatgagaaatcaagctcagatttcttttatccaagatattggaaggctccctctgaagcgacactttggaagattgaaaatggaagccctgactgacagggaacatggaatgatagaccctgacagcggagatgaagcccagcttaatggaggacattctgcagaggaatctctgggtgaacccactcaagccactgtgccggaaacctggtctcttcctttgagtcagaatagtgccagtgaactgcctgctagccagccccagcccttttcagcccaaggagacatggaagaaaacataataatagaagactacgagagtgatgggacatagaagccagcctgctaatcagattgctacttcacagcttcatttttgtttcattcagtggtacttcagcagagttaatatgcttttctgatgaattacacaacagtttgttaattcttcattcttgtagtatttcatcacaagaaacctactcttctgtcatcttgaagtaaatagaagatcaagccttcaaatctcttaattttttcggtatttattaaatctgtgagtggtttaaggagcggtcagtgtgtataaagtgtgtttgaacattatgccaaatatcaagatgtgaaggactaattcaggatgcaaaaacgttattggggggttgtaaatatcaactattcaacagtttaggatgcaattacgagtgtaaactgtgtgccttatttacactttattgtctcccgcttctcagatagttttgatgtgttgtacagtggaatatcttagatactttttggaaagtatttacataagttatatcacaattaaaatgttgaatttaa

SEQ ID NO: 173459 - DNA, 3060 bp, Homo sapiens
  Payload ID: 14082
  Gene Symbol: RAD17
  Gene Name: RAD17 checkpoint clamp loader component
  Uniprot ID: O75943
  ENST ID: ENST00000354868
  CDS Start-End: 539-2551
gaggccgtacctccgagaggctcggcgttgagcccgggtagggccaggtggctgccctttcacctagggtagtccctggtcgcctccgctcttcgcctaaaaggggatgcagctccgggaaacaagtgaattcatggtattttacttttttgggaaatactggaaatgaagacctgcaactgtaatttgaaataaggaaaactttaattttcagtataaaaattgctcaaatagaattgcctgattttaatgacaaaaggtgaattatagtttaatgtactgcaagtcctaaactacggatgggaactattacagtttataatgtcaaaaacttttcttagaccaaaggtatcttccacaaagtatatgggagtccacatttatgtaagaaatgaaactataaaatgtataaataatttgcaaatcagaattgctgtcgaaagttttactataatgaaagatattttcatactctcaaaaatatagaggaaaggggccaagattatagtaccagtcacaatcttttgatgaggacgaaatgaatcaggtaacagactgggttgacccatcatttgatgattttctagagtgtagtggcgtctctactattactgccacatcattaggtgtgaataactcaagtcatagaagaaaaaatgggccttctacattagaaagcagcagatttccagcgagaaaaagaggaaatctatcttccttagaacagatttatggtttagaaaattcaaaagaatatctgtctgaaaatgaaccatgggtggataaatataaaccagaaactcagcatgaacttgctgtgcataaaaagaaaattgaagaagtcgaaacctggttaaaagctcaagttttagaaaggcaaccaaaacagggtggatctattttattaataacaggtcctcctggatgtggaaagacaacgaccttaaaaatactatcaaaggagcatggtattcaagtacaagagtggattaatccagttttaccagacttccaaaaagatgatttcaaggggatgtttaatactgaatcaagcttccatatgtttccctatcagtctcagatagcagttttcaaagagtttctactaagagcgacaaagtataacaagttacaaatgcttggagatgatctgagaactgataagaagataattctggttgaagatttacctaaccagttttatcgggattctcatactttacatgaagttctaaggaagtatgtgaggattggtcgatgtcctcttatatttataatctcggacagtctcagtggagataataatcaaaggttattgtttcccaaagaaattcaggaagagtgttctatctcaaatattagtttcaaccctgtggcaccaacaattatgatgaaatttcttaatcgaatagtgactatagaagctaacaagaatggaggaaaaattactgtccctgacaaaacttctctagagttgctctgtcagggatgttctggtgatatcagaagtgcaataaacagcctccagttttcttcttcaaaaggagaaaacaacttacggccaaggaaaaaaggaatgtctttaaaatcagatgctgtgctgtcaaaatcaaaacgaagaaaaaaacctgatagggtttttgaaaatcaagaggtccaagctattggtggcaaagatgtttctctgtttctcttcagagctttggggaaaattctatattgtaaaagagcatctttaacagaattagactcacctcggttgccctctcatttatcagaatatgaacgggatacattacttgttgaacctgaggaggtagtagaaatgtcacacatgcctggagacttatttaatttatatcttcaccaaaactacatagatttcttcatggaaattgatgatattgtgagagccagtgaatttctgagttttgcagatatcctcagtggtgactggaatacacgctctttactcagggaatatagcacatctatagctacgagaggtgtgatgcattccaacaaagcccgaggatatgctcattgccaaggaggaggatcaagttttcgacccttgcacaaacctcagtggtttctaataaataaaaagtatcgggaaaattgcctggcagcaaaagcactttttcctgacttctgcctaccagctttatgcctccaaactcagctattgccataccttgctctactaaccattccaatgagaaatcaagctcagatttcttttatccaagatattggaaggctccctctgaagcgacactttggaagattgaaaatggaagccctgactgacagggaacatggaatgatagaccctgacagcggagatgaagcccagcttaatggaggacattctgcagaggaatctctgggtgaacccactcaagccactgtgccggaaacctggtctcttcctttgagtcagaatagtgccagtgaactgcctgctagccagccccagcccttttcagcccaaggagacatggaagaaaacataataatagaagactacgagagtgatgggacatagaagccagcctgctaatcagattgctacttcacagcttcatttttgtttcattcagtggtacttcagcagagttaatatgcttttctgatgaattacacaacagtttgttaattcttcattcttgtagtatttcatcacaagaaacctactcttctgtcatcttgaagtaaatagaagatcaagccttcaaatctcttaattttttcggtatttattaaatctgtgagtggtttaaggagcggtcagtgtgtataaagtgtgtttgaacattatgccaaatatcaagatgtgaaggactaattcaggatgcaaaaacgttattggggggttgtaaatatcaactattcaacagtttaggatgcaattacgagtgtaaactgtgtgccttatttacactttattgtctcccgcttctcagatagttttgatgtgttgtacagtggaatatcttagatactttttggaaagtatttacataagttatatcacaattaaaatgttgaatttaa

SEQ ID NO: 173460 - DNA, 2648 bp, Homo sapiens
  Payload ID: 14082
  Gene Symbol: RAD17
  Gene Name: RAD17 checkpoint clamp loader component
  Uniprot ID: O75943
  ENST ID: ENST00000358030
  CDS Start-End: 624-2141
caagtgaattcatggtattttacttttttgggaaatactggaaatgaagacctgcaactgtaatttgaaataaggaaaactttaattttcagtataaaaattgctcaaatagaattgcctgattttaatgacaaaaggtaacagactgggttgacccatcatttgatgattttctagagtgtagtggcgtctctactattactgccacatcattaggtgtgaataactcaagtcatagaagaaaaaatgggccttctacattagaaagcagcagatttccagcgagaaaaagaggaaatctatcttccttagaacagatttatggtttagaaaattcaaaagaatatctgtctgaaaatgaaccatgggtggataaatataaaccagaaactcagcatgaacttgctgtgcataaaaagaaaattgaagaagtcgaaacctggttaaaagctcaagttttagaaaggcaaccaaaacagggtggatctattttattaataacaggtcctcctggatgtggaaagacaacgaccttaaaaatactatcaaaggagcatggtattcaagtacaagagtggattaatccagttttaccagacttccaaaaagatgatttcaaggggatgtttaatactgaatcaagcttccatatgtttccctatcagtctcagatagcagttttcaaagagtttctactaagagcgacaaagtataacaagttacaaatgcttggagatgatctgagaactgataagaagataattctggttgaagatttacctaaccagttttatcgggattctcatactttacatgaagttctaaggaagtatgtgaggattggtcgatgtcctcttatatttataatctcggacagtctcagtggagataataatcaaaggttattgtttcccaaagaaattcaggaagagtgttctatctcaaatattagtttcaaccctgtggcaccaacaattatgatgaaatttcttaatcgaatagtgactatagaagctaacaagaatggaggaaaaattactgtccctgacaaaacttctctagagttgctctgtcagggatgttctggtgatatcagaagtgcaataaacagcctccagttttcttcttcaaaaggagaaaacaacttacggccaaggaaaaaaggaatgtctttaaaatcagatgctgtgctgtcaaaatcaaaacgaagaaaaaaacctgatagggtttttgaaaatcaagaggtccaagctattggtggcaaagatgtttctctgtttctcttcagagctttggggaaaattctatattgtaaaagagcatctttaacagaattagactcacctcggttgccctctcatttatcagaatatgaacgggatacattacttgttgaacctgaggaggtagtagaaatgtcacacatgcctggagacttatttaatttatatcttcaccaaaactacatagatttcttcatggaaattgatgatattgtgagagccagtgaatttctgagttttgcagatatcctcagtggtgactggaatacacgctctttactcagggaatatagcacatctatagctacgagaggtgtgatgcattccaacaaagcccgaggatatgctcattgccaaggaggaggatcaagttttcgacccttgcacaaacctcagtggtttctaataaataaaaagtatcgggaaaattgcctggcagcaaaagcactttttcctgacttctgcctaccagctttatgcctccaaactcagctattgccataccttgctctactaaccattccaatgagaaatcaagctcagatttcttttatccaagatattggaaggctccctctgaagcgacactttggaagattgaaaatggaagccctgactgacagggaacatggaatgatagaccctgacagcggagatgaagcccagcttaatggaggacattctgcagaggaatctctgggtgaacccactcaagccactgtgccggaaacctggtctcttcctttgagtcagaatagtgccagtgaactgcctgctagccagccccagcccttttcagcccaaggagacatggaagaaaacataataatagaagactacgagagtgatgggacatagaagccagcctgctaatcagattgctacttcacagcttcatttttgtttcattcagtggtacttcagcagagttaatatgcttttctgatgaattacacaacagtttgttaattcttcattcttgtagtatttcatcacaagaaacctactcttctgtcatcttgaagtaaatagaagatcaagccttcaaatctcttaattttttcggtatttattaaatctgtgagtggtttaaggagcggtcagtgtgtataaagtgtgtttgaacattatgccaaatatcaagatgtgaaggactaattcaggatgcaaaaacgttattggggggttgtaaatatcaactattcaacagtttaggatgcaattacgagtgtaaactgtgtgccttatttacactttattgtctcccgcttctcagatagttttgatgtgttgtacagtggaatatcttagatactttttggaaagtatttacataagttatatcacaattaaaatgttgaattt

SEQ ID NO: 173461 - DNA, 3002 bp, Homo sapiens
  Payload ID: 14082
  Gene Symbol: RAD17
  Gene Name: RAD17 checkpoint clamp loader component
  Uniprot ID: O75943
  ENST ID: ENST00000361732
  CDS Start-End: 481-2493
gcaacgcccgcgagggtcggctcccggggcgctgacaaccgcctcgtggccctcggccggcctctgaagagggcagtgaggggcccccacctgggcgcccgatgcccagagcactctgcgcccccagcctgccccagcccagtccctcccggccgcgcgccctgaccgcaagtgaattcatggtattttacttttttgggaaatactggaaatgaagacctgcaactgtaatttgaaataaggaaaactttaattttcagtataaaaattgctcaaatagaattgcctgattttaatgacaaaagtatatgggagtccacatttatgtaagaaatgaaactataaaatgtataaataatttgcaaatcagaattgctgtcgaaagttttactataatgaaagatattttcatactctcaaaaatatagaggaaaggggccaagattatagtaccagtcacaatcttttgatgaggacgaaatgaatcaggtaacagactgggttgacccatcatttgatgattttctagagtgtagtggcgtctctactattactgccacatcattaggtgtgaataactcaagtcatagaagaaaaaatgggccttctacattagaaagcagcagatttccagcgagaaaaagaggaaatctatcttccttagaacagatttatggtttagaaaattcaaaagaatatctgtctgaaaatgaaccatgggtggataaatataaaccagaaactcagcatgaacttgctgtgcataaaaagaaaattgaagaagtcgaaacctggttaaaagctcaagttttagaaaggcaaccaaaacagggtggatctattttattaataacaggtcctcctggatgtggaaagacaacgaccttaaaaatactatcaaaggagcatggtattcaagtacaagagtggattaatccagttttaccagacttccaaaaagatgatttcaaggggatgtttaatactgaatcaagcttccatatgtttccctatcagtctcagatagcagttttcaaagagtttctactaagagcgacaaagtataacaagttacaaatgcttggagatgatctgagaactgataagaagataattctggttgaagatttacctaaccagttttatcgggattctcatactttacatgaagttctaaggaagtatgtgaggattggtcgatgtcctcttatatttataatctcggacagtctcagtggagataataatcaaaggttattgtttcccaaagaaattcaggaagagtgttctatctcaaatattagtttcaaccctgtggcaccaacaattatgatgaaatttcttaatcgaatagtgactatagaagctaacaagaatggaggaaaaattactgtccctgacaaaacttctctagagttgctctgtcagggatgttctggtgatatcagaagtgcaataaacagcctccagttttcttcttcaaaaggagaaaacaacttacggccaaggaaaaaaggaatgtctttaaaatcagatgctgtgctgtcaaaatcaaaacgaagaaaaaaacctgatagggtttttgaaaatcaagaggtccaagctattggtggcaaagatgtttctctgtttctcttcagagctttggggaaaattctatattgtaaaagagcatctttaacagaattagactcacctcggttgccctctcatttatcagaatatgaacgggatacattacttgttgaacctgaggaggtagtagaaatgtcacacatgcctggagacttatttaatttatatcttcaccaaaactacatagatttcttcatggaaattgatgatattgtgagagccagtgaatttctgagttttgcagatatcctcagtggtgactggaatacacgctctttactcagggaatatagcacatctatagctacgagaggtgtgatgcattccaacaaagcccgaggatatgctcattgccaaggaggaggatcaagttttcgacccttgcacaaacctcagtggtttctaataaataaaaagtatcgggaaaattgcctggcagcaaaagcactttttcctgacttctgcctaccagctttatgcctccaaactcagctattgccataccttgctctactaaccattccaatgagaaatcaagctcagatttcttttatccaagatattggaaggctccctctgaagcgacactttggaagattgaaaatggaagccctgactgacagggaacatggaatgatagaccctgacagcggagatgaagcccagcttaatggaggacattctgcagaggaatctctgggtgaacccactcaagccactgtgccggaaacctggtctcttcctttgagtcagaatagtgccagtgaactgcctgctagccagccccagcccttttcagcccaaggagacatggaagaaaacataataatagaagactacgagagtgatgggacatagaagccagcctgctaatcagattgctacttcacagcttcatttttgtttcattcagtggtacttcagcagagttaatatgcttttctgatgaattacacaacagtttgttaattcttcattcttgtagtatttcatcacaagaaacctactcttctgtcatcttgaagtaaatagaagatcaagccttcaaatctcttaattttttcggtatttattaaatctgtgagtggtttaaggagcggtcagtgtgtataaagtgtgtttgaacattatgccaaatatcaagatgtgaaggactaattcaggatgcaaaaacgttattggggggttgtaaatatcaactattcaacagtttaggatgcaattacgagtgtaaactgtgtgccttatttacactttattgtctcccgcttctcagatagttttgatgtgttgtacagtggaatatcttagatactttttggaaagtatttacataagttatatcacaattaaaatgttgaatttaa

SEQ ID NO: 173462 - DNA, 2117 bp, Homo sapiens
  Payload ID: 14082
  Gene Symbol: RAD17
  Gene Name: RAD17 checkpoint clamp loader component
  Uniprot ID: O75943
  ENST ID: ENST00000380774
  CDS Start-End: 63-2108
gtgaattatagtttaatgtactgcaagtcctaaactacggatgggaactattacagtttataatgtcaaaaacttttcttagaccaaaggtatcttccacaaaggtaacagactgggttgacccatcatttgatgattttctagagtgtagtggcgtctctactattactgccacatcattaggtgtgaataactcaagtcatagaagaaaaaatgggccttctacattagaaagcagcagatttccagcgagaaaaagaggaaatctatcttccttagaacagatttatggtttagaaaattcaaaagaatatctgtctgaaaatgaaccatgggtggataaatataaaccagaaactcagcatgaacttgctgtgcataaaaagaaaattgaagaagtcgaaacctggttaaaagctcaagttttagaaaggcaaccaaaacagggtggatctattttattaataacaggtcctcctggatgtggaaagacaacgaccttaaaaatactatcaaaggagcatggtattcaagtacaagagtggattaatccagttttaccagacttccaaaaagatgatttcaaggggatgtttaatactgaatcaagcttccatatgtttccctatcagtctcagatagcagttttcaaagagtttctactaagagcgacaaagtataacaagttacaaatgcttggagatgatctgagaactgataagaagataattctggttgaagatttacctaaccagttttatcgggattctcatactttacatgaagttctaaggaagtatgtgaggattggtcgatgtcctcttatatttataatctcggacagtctcagtggagataataatcaaaggttattgtttcccaaagaaattcaggaagagtgttctatctcaaatattagtttcaaccctgtggcaccaacaattatgatgaaatttcttaatcgaatagtgactatagaagctaacaagaatggaggaaaaattactgtccctgacaaaacttctctagagttgctctgtcagggatgttctggtgatatcagaagtgcaataaacagcctccagttttcttcttcaaaaggagaaaacaacttacggccaaggaaaaaaggaatgtctttaaaatcagatgctgtgctgtcaaaatcaaaacgaagaaaaaaacctgatagggtttttgaaaatcaagaggtccaagctattggtggcaaagatgtttctctgtttctcttcagagctttggggaaaattctatattgtaaaagagcatctttaacagaattagactcacctcggttgccctctcatttatcagaatatgaacgggatacattacttgttgaacctgaggaggtagtagaaatgtcacacatgcctggagacttatttaatttatatcttcaccaaaactacatagatttcttcatggaaattgatgatattgtgagagccagtgaatttctgagttttgcagatatcctcagtggtgactggaatacacgctctttactcagggaatatagcacatctatagctacgagaggtgtgatgcattccaacaaagcccgaggatatgctcattgccaaggaggaggatcaagttttcgacccttgcacaaacctcagtggtttctaataaataaaaagtatcgggaaaattgcctggcagcaaaagcactttttcctgacttctgcctaccagctttatgcctccaaactcagctattgccataccttgctctactaaccattccaatgagaaatcaagctcagatttcttttatccaagatattggaaggctccctctgaagcgacactttggaagattgaaaatggaagccctgactgacagggaacatggaatgatagaccctgacagcggagatgaagcccagcttaatggaggacattctgcagaggaatctctgggtgaacccactcaagccactgtgccggaaacctggtctcttcctttgagtcagaatagtgccagtgaactgcctgctagccagccccagcccttttcagcccaaggagacatggaagaaaacataataatagaagactacgagagtgatgggacatagaagccagcc

SEQ ID NO: 173463 - DNA, 496 bp, Homo sapiens
  Payload ID: 14082
  Gene Symbol: RAD17
  Gene Name: RAD17 checkpoint clamp loader component
  ENST ID: ENST00000507927
  CDS Start-End: 435-496
gggtcggctcccggggcgctgacaaccgcctcgtggccctcggccggcctctgaagagggcagtgaggggcccccacctgggcgcccgatgcccagagcactctgcgcccccagcctgccccagcccagtccctcccggccgcgcgccctgaccggtgaattatagtttaatgtactgcaagtcctaaactacggatgggaactattacagtttataatgtcaaaaacttttcttagaccaaaggtatcttccacaaagtatatgggagtccacatttatgtaagaaatgaaactataaaatgtataaataatttgcaaatcagaattgctgtcgaaagttttactataatgaaagatattttcatactctcaaaaatatagaggaaaggggccaagattatagtaccagtcacaatcttttgatgaggacgaaatgaatcaggtaacagactgggttgacccatcatttgatgattttctagagtgtagtggcgt

SEQ ID NO: 173464 - DNA, 803 bp, Homo sapiens
  Payload ID: 14082
  Gene Symbol: RAD17
  Gene Name: RAD17 checkpoint clamp loader component
  ENST ID: ENST00000508320
  CDS Start-End: 1-498
tcggacagtctcagtggagataataatcaaaggttattgtttcccaaagaaattcaggaagagtgttctatctcaaatattagtttcaaccctgtggcaccaacaattatgatgaaatttcttaatcgaatagtgactatagaagctaacaagaatggaggaaaaattactgtccctgacaaaacttctctagagttgctctgtcagggatgttctggtgatatcagaagtgcaataaacagcctccagttttcttcttcaaaaggagaaaacaacttacggccaaggaaaaaaggaatgtctttaaaatcagatgctgtgctgtcaaaatcaaaacgaagaaaaaaacctgatagggtttttgaaaatcaagaggtccaagctattggtggcaaagatgtttctctgtttctcttcagagctttggggaaaattctatattgtaaaatgaatggaattcgtattctttcatgtagagagcaacatcttcctacatagtaaataaaagagtaaagaccactgtattgagatgagaaatcaagggaagaaagcaacccaaagctgaaaaaggagcatctttaacagaattagactcacctcggttgccctctcatttatcagaatatgaacgggatacattacttgttgaacctgaggaggtagtagaaatgtcacacatgcctggagacttatttaatttatatcttcaccaaaactacatagatttcttcatggaaattgatgatattgtgagagccagtgaatttctgagttttgcagatatcctcagtggtgactggaat

SEQ ID NO: 173465 - DNA, 859 bp, Homo sapiens
  Payload ID: 14082
  Gene Symbol: RAD17
  Gene Name: RAD17 checkpoint clamp loader component
  ENST ID: ENST00000506564
  CDS Start-End: 352-859
ctcgcatcttcagggacagttatctgctttttaaaggagcaagtgaattcatggtattttacttttttgggaaatactggaaatgaagacctgcaactgtaatttgaaataaggaaaactttaattttcagtataaaaattgctcaaatagaattgcctgattttaatgacaaaagtatatgggagtccacatttatgtaagaaatgaaactataaaatgtataaataatttgcaaatcagaattgctgtcgaaagttttactataatgaaagatattttcatactctcaaaaatatagaggaaaggggccaagattatagtaccagtcacaatcttttgatgaggacgaaatgaatcaggtaacagactgggttgacccatcatttgatgattttctagagtgtagtggcgtctctactattactgccacatcattaggtgtgaataactcaagtcatagaagaaaaaatgggccttctacattagaaagcagcagatttccagcgagaaaaagaggaaatctatcttccttagaacagatttatggtttagaaaattcaaaagaatatctgtctgaaaatgaaccatgggtggataaatataaaccagaaactcagcatgaacttgctgtgcataaaaagaaaattgaagaagtcgaaacctggttaaaagctcaagttttagaaaggcaaccaaaacagggtggatctattttattaataacaggtcctcctggatgtggaaagacaacgaccttaaaaatactatcaaaggagcatggtattcaagtacaagagtggattaatccagttttaccagacttccaaaaagatgatttcaaggggatgtttaatactg

SEQ ID NO: 173466 - DNA, 775 bp, Homo sapiens
  Payload ID: 14082
  Gene Symbol: RAD17
  Gene Name: RAD17 checkpoint clamp loader component
  ENST ID: ENST00000513214
  CDS Start-End: 1-555
tctctgtttctcttcagagctttggggaaaattctatattgtaaaagagcatctttaacagaattagactcacctcggttgccctctcatttatcagaatatgaacgggatacattacttgttgaacctgaggaggtagtagaaatgtcacacatgcctggagacttatttaatttatatcttcaccaaaactacatagatttcttcatggaaattgatgatattgtgagagccagtgaatttctgagttttgcagatatcctcagtggtgactggaatacacgctctttactcagggaatatagcacatctatagctacgagaggtgtgatgcattccaacaaagcccgaggatatgctcattgccaaggaggaggatcaagttttcgacccttgcacaaacctcagtggtttctaataaataaaaagtatcgggaaaattgcctggcagcaaaagcactttttcctgacttctgcctaccagctttatgcctccaaactcagctattgccataccttgctctactaaccattccaatgagaaatcaagattgaaaatggaagccctgactgacagggaacatggaatgatagaccctgacagcggagatgaagcccagcttaatggaggacattctgcagaggaatctctgggtgaacccactcaagccactgtgccggaaacctggtctcttcctttgagtcagaatagtgccagtgaactgcctgctagccagccccagcccttttcagcccaaggagacatggaagaaaa

SEQ ID NO: 173467 - DNA, 3233 bp, Homo sapiens
  Payload ID: 14082
  Gene Symbol: RAD17
  Gene Name: RAD17 checkpoint clamp loader component
  Uniprot ID: O75943
  ENST ID: ENST00000509734
  CDS Start-End: 679-2724
ccccgggaggccgtacctccgagaggctcggcgttgagcccgggtagggccaggtggctgccctttcacctagggtagtccctggtcgcctccgctcttcgcctaaaaggggatgcagctccgggaaagtaaggccgccgcggttgcggctatattatgtatatgtcttagagacgtgagtctatctctgccttcaagctttcctgggctctcgtcgctcctcctcccgacccgcccatcccatctggggatgagaagattgagggtgcagagccctgtcctgcagcggggatttgcgagctcaacccggcaccccactgattacaggattacgttggacgaatatttgagcttagtattccctgttcactgtgtggggtggtggtgggtcggctaggaatagtcttgaaggtctacctctgacatctcatttcagtaacctcgcatcttcagggacagttatctgctttttaaaggagcaagtgaattcatggtattttacttttttgggaaatactggaaatgaagacctgcaactgtaatttgaaataaggaaaactttaattttcagtataaaaattgctcaaatagaattgcctgattttaatgacaaaaggtgaattatagtttaatgtactgcaagtcctaaactacggatgggaactattacagtttataatgtcaaaaacttttcttagaccaaaggtatcttccacaaaggtaacagactgggttgacccatcatttgatgattttctagagtgtagtggcgtctctactattactgccacatcattaggtgtgaataactcaagtcatagaagaaaaaatgggccttctacattagaaagcagcagatttccagcgagaaaaagaggaaatctatcttccttagaacagatttatggtttagaaaattcaaaagaatatctgtctgaaaatgaaccatgggtggataaatataaaccagaaactcagcatgaacttgctgtgcataaaaagaaaattgaagaagtcgaaacctggttaaaagctcaagttttagaaaggcaaccaaaacagggtggatctattttattaataacaggtcctcctggatgtggaaagacaacgaccttaaaaatactatcaaaggagcatggtattcaagtacaagagtggattaatccagttttaccagacttccaaaaagatgatttcaaggggatgtttaatactgaatcaagcttccatatgtttccctatcagtctcagatagcagttttcaaagagtttctactaagagcgacaaagtataacaagttacaaatgcttggagatgatctgagaactgataagaagataattctggttgaagatttacctaaccagttttatcgggattctcatactttacatgaagttctaaggaagtatgtgaggattggtcgatgtcctcttatatttataatctcggacagtctcagtggagataataatcaaaggttattgtttcccaaagaaattcaggaagagtgttctatctcaaatattagtttcaaccctgtggcaccaacaattatgatgaaatttcttaatcgaatagtgactatagaagctaacaagaatggaggaaaaattactgtccctgacaaaacttctctagagttgctctgtcagggatgttctggtgatatcagaagtgcaataaacagcctccagttttcttcttcaaaaggagaaaacaacttacggccaaggaaaaaaggaatgtctttaaaatcagatgctgtgctgtcaaaatcaaaacgaagaaaaaaacctgatagggtttttgaaaatcaagaggtccaagctattggtggcaaagatgtttctctgtttctcttcagagctttggggaaaattctatattgtaaaagagcatctttaacagaattagactcacctcggttgccctctcatttatcagaatatgaacgggatacattacttgttgaacctgaggaggtagtagaaatgtcacacatgcctggagacttatttaatttatatcttcaccaaaactacatagatttcttcatggaaattgatgatattgtgagagccagtgaatttctgagttttgcagatatcctcagtggtgactggaatacacgctctttactcagggaatatagcacatctatagctacgagaggtgtgatgcattccaacaaagcccgaggatatgctcattgccaaggaggaggatcaagttttcgacccttgcacaaacctcagtggtttctaataaataaaaagtatcgggaaaattgcctggcagcaaaagcactttttcctgacttctgcctaccagctttatgcctccaaactcagctattgccataccttgctctactaaccattccaatgagaaatcaagctcagatttcttttatccaagatattggaaggctccctctgaagcgacactttggaagattgaaaatggaagccctgactgacagggaacatggaatgatagaccctgacagcggagatgaagcccagcttaatggaggacattctgcagaggaatctctgggtgaacccactcaagccactgtgccggaaacctggtctcttcctttgagtcagaatagtgccagtgaactgcctgctagccagccccagcccttttcagcccaaggagacatggaagaaaacataataatagaagactacgagagtgatgggacatagaagccagcctgctaatcagattgctacttcacagcttcatttttgtttcattcagtggtacttcagcagagttaatatgcttttctgatgaattacacaacagtttgttaattcttcattcttgtagtatttcatcacaagaaacctactcttctgtcatcttgaagtaaatagaagatcaagccttcaaatctcttaattttttcggtatttattaaatctgtgagtggtttaaggagcggtcagtgtgtataaagtgtgtttgaacattatgccaaatatcaagatgtgaaggactaattcaggatgcaaaaacgttattggggggttgtaaatatcaactattcaacagtttaggatgcaattacgagtgtaaactgtgtgccttatttacactttattgtctcccgcttctcagatagttttgatgtgttgtacagtggaatatcttagatactttttggaaagtatttacataagttatatcacaattaaaatgttgaatttaa

SEQ ID NO: 173468 - DNA, 966 bp, Homo sapiens
  Payload ID: 14082
  Gene Symbol: RAD17
  Gene Name: RAD17 checkpoint clamp loader component
  ENST ID: ENST00000512785
  CDS Start-End: 817-966
cggggatttgcgagctcaacccggcaccccactgattacaggattacgttggacgaatatttgagcttagtattccctgttcactgtgtggggtggtggtgggtcggctaggaatagtcttgaaggtctacctctgacatctcatttcagtaacctcgcatcttcagggacagttatctgctttttaaaggagcaagtgaattcatggtattttacttttttgggaaatactggaaatgaagacctgcaactgtaatttgaaataaggaaaactttaattttcagtataaaaattgctcaaatagaattgcctgattttaatgacaaaaggtaacagactgggttgacccatcatttgatgattttctagagtgtagtggcgtctctactattactgccacatcattaggtgtgaataactcaagtcatagaagaaaaaatgggccttctacattagaaagcagcagatttccagcgagaaaaagaggaaatctatcttccttagaacagatttatggtttagaaaattcaaaagaatatctgtctgaaaatgaaccatgggtggataaatataaaccagaaactcagcatgaacttgctgtgcataaaaagaaaattgaagaagtcgaaacctggttaaaagctcaagttttagaaaggcaaccaaaacagggtggatctattttattaataacaggtcctcctggatgtggaaagacaacgaccttaaaaatactatcaaaggagcatggtattcaagtacaagagtggattaatccagttttaccagacttccaaaaagatgatttcaaggggatgtttaatactgaatcaagcttccatatgtttccctatcagtctcagatagcagttttcaaagagtttctactaagagcgacaaagtataacaagttacaaatgcttggagatgatctgagaactgataagaagataattctggttgaa

SEQ ID NO: 173469 - DNA, 2323 bp, Homo sapiens
  Payload ID: 14082
  Gene Symbol: RAD17
  Gene Name: RAD17 checkpoint clamp loader component
  Uniprot ID: O75943
  ENST ID: ENST00000521422
  CDS Start-End: 738-2255
acctccgagaggctcggcgttgagcccgggtagggccaggtggctgccctttcacctagggtagtccctggtcgcctccgctcttcgcctaaaaggggatgcagctccgggaaacaagtgaattcatggtattttacttttttgggaaatactggaaatgaagacctgcaactgtaatttgaaataaggaaaactttaattttcagtataaaaattgctcaaatagaattgcctgattttaatgacaaaaggtaacagactgggttgacccatcatttgatgattttctagagtgtagtggcgtctctactattactgccacatcattaggtgtgaataactcaagtcatagaagaaaaaatgggccttctacattagaaagcagcagatttccagcgagaaaaagaggaaatctatcttccttagaacagatttatggtttagaaaattcaaaagaatatctgtctgaaaatgaaccatgggtggataaatataaaccagaaactcagcatgaacttgctgtgcataaaaagaaaattgaagaagtcgaaacctggttaaaagctcaagttttagaaaggcaaccaaaacagggtggatctattttattaataacaggtcctcctggatgtggaaagacaacgaccttaaaaatactatcaaaggagcatggtattcaagtacaagagtggattaatccagttttaccagacttccaaaaagatgatttcaaggggatgtttaatactgaatcaagcttccatatgtttccctatcagtctcagatagcagttttcaaagagtttctactaagagcgacaaagtataacaagttacaaatgcttggagatgatctgagaactgataagaagataattctggttgaagatttacctaaccagttttatcgggattctcatactttacatgaagttctaaggaagtatgtgaggattggtcgatgtcctcttatatttataatctcggacagtctcagtggagataataatcaaaggttattgtttcccaaagaaattcaggaagagtgttctatctcaaatattagtttcaaccctgtggcaccaacaattatgatgaaatttcttaatcgaatagtgactatagaagctaacaagaatggaggaaaaattactgtccctgacaaaacttctctagagttgctctgtcagggatgttctggtgatatcagaagtgcaataaacagcctccagttttcttcttcaaaaggagaaaacaacttacggccaaggaaaaaaggaatgtctttaaaatcagatgctgtgctgtcaaaatcaaaacgaagaaaaaaacctgatagggtttttgaaaatcaagaggtccaagctattggtggcaaagatgtttctctgtttctcttcagagctttggggaaaattctatattgtaaaagagcatctttaacagaattagactcacctcggttgccctctcatttatcagaatatgaacgggatacattacttgttgaacctgaggaggtagtagaaatgtcacacatgcctggagacttatttaatttatatcttcaccaaaactacatagatttcttcatggaaattgatgatattgtgagagccagtgaatttctgagttttgcagatatcctcagtggtgactggaatacacgctctttactcagggaatatagcacatctatagctacgagaggtgtgatgcattccaacaaagcccgaggatatgctcattgccaaggaggaggatcaagttttcgacccttgcacaaacctcagtggtttctaataaataaaaagtatcgggaaaattgcctggcagcaaaagcactttttcctgacttctgcctaccagctttatgcctccaaactcagctattgccataccttgctctactaaccattccaatgagaaatcaagctcagatttcttttatccaagatattggaaggctccctctgaagcgacactttggaagattgaaaatggaagccctgactgacagggaacatggaatgatagaccctgacagcggagatgaagcccagcttaatggaggacattctgcagaggaatctctgggtgaacccactcaagccactgtgccggaaacctggtctcttcctttgagtcagaatagtgccagtgaactgcctgctagccagccccagcccttttcagcccaaggagacatggaagaaaacataataatagaagactacgagagtgatgggacatagaagccagcctgctaatcagattgctacttcacagcttcatttttgtttcattcagtggtacttcagca

SEQ ID NO: 173470 - DNA, 2943 bp, Homo sapiens
  Payload ID: 14082
  Gene Symbol: RAD17
  Gene Name: RAD17 checkpoint clamp loader component
  Uniprot ID: O75943
  ENST ID: ENST00000611523
  CDS Start-End: 422-2434
cgagaggctcggcgttgagcccgggtagggccaggtggctgccctttcacctagggtagtccctggtcgcctccgctcttcgcccaaaaggggatgcagctccgggaaacaagtgaattcatggtattttacttttttgggaaatactggaaatgaagacctgcaactgtaatttgaaataaggaaaactttaattttcagtataaaaattgctcaaatagaattgcctgattttaatgacaaaagtatatgggagtccacatttatgtaagaaatgaaactataaaatgtataaataatttgcaaatcagaattgctgtcgaaagttttactataatgaaagatattttcatactctcaaaaatatagaggaaaggggccaagattatagtaccagtcacaatcttttgatgaggacgaaatgaatcaggtaacagactgggttgacccatcatttgatgattttctagagtgtagtggcgtctctactattactgccacatcattaggtgtgaataactcaagtcatagaagaaaaaatgggccttctacattagaaagcagcagatttccagcgagaaaaagaggaaatctatcttccttagaacagatttatggtttagaaaattcaaaagaatatctgtctgaaaatgaaccatgggtggataaatataaaccagaaactcagcatgaacttgctgtgcataaaaagaaaattgaagaagtcgaaacctggttaaaagctcaagttttagaaaggcaaccaaaacagggtggatctattttattaataacaggtcctcctggatgtggaaagacaacgaccttaaaaatactatcaaaggagcatggtattcaagtacaagagtggattaatccagttttaccagacttccaaaaagatgatttcaaggggatgtttaatactgaatcaagcttccatatgtttccctatcagtctcagatagcagttttcaaagagtttctactaagagcgacaaagtataacaagttacaaatgcttggagatgatctgagaactgataagaagataattctggttgaagatttacctaaccagttttatcgggattctcatactttacatgaagttctaaggaagtatgtgaggattggtcgatgtcctcttatatttataatctcggacagtctcagtggagataataatcaaaggttattgtttcccaaagaaattcaggaagagtgttctatctcaaatattagtttcaaccctgtggcaccaacaattatgatgaaatttcttaatcgaatagtgactatagaagctaacaagaatggaggaaaaattactgtccctgacaaaacttctctagagttgctctgtcagggatgttctggtgatatcagaagtgcaataaacagcctccagttttcttcttcaaaaggagaaaacaacttacggccaaggaaaaaaggaatgtctttaaaatcagatgctgtgctgtcaaaatcaaaacgaagaaaaaaacctgatagggtttttgaaaatcaagaggtccaagctattggtggcaaagatgtttctctgtttctcttcagagctttggggaaaattctatattgtaaaagagcatctttaacagaattagactcacctcggttgccctctcatttatcagaatatgaacgggatacattacttgttgaacctgaggaggtagtagaaatgtcacacatgcctggagacttatttaatttatatcttcaccaaaactacatagatttcttcatggaaattgatgatattgtgagagccagtgaatttctgagttttgcagatatcctcagtggtgactggaatacacgctctttactcagggaatatagcacatctatagctacgagaggtgtgatgcattccaacaaagcccgaggatatgctcattgccaaggaggaggatcaagttttcgacccttgcacaaacctcagtggtttctaataaataaaaagtatcgggaaaattgcctggcagcaaaagcactttttcctgacttctgcctaccagctttatgccgccaaactcagctattgccataccttgctctactaaccattccaatgagaaatcaagctcagatttcttttatccaagatattggaaggctccctctgaagcgacactttggaagattgaaaatggaagccctgactgacagggaacatggaatgatagaccctgacagcggagatgaagcccagcttaatggaggacattctgcagaggaatctctgggtgaacccactcaagccactgtgccggaaacctggtctcttcctttgagtcagaatagtgccagtgaactgcctgctagccagccccagcccttttcagcccaaggagacatggaagaaaacataataatagaagactacgagagtgatgggacatagaagccagcctgctaatcagattgctacttcacagcttcatttttgtttcattcagtggtacttcagcagagttaatatgcttttctgatgaattacacaacagtttgttaattcttcattcttgtagtatttcatcacaagaaacctactcttctgtcatcttgaagtaaatagaagatcaagccttcaaatctcttaattttttcggtatttattaaatctgtgagtggtttaaggagcggtcagtgtgtataaagtgtgtttgaacattatgccaaatatcaagatgtgaaggactaattcaggatgcaaaaacgttattggggggttgtaaatatcaactattcaacagtttaggatgcaattacgagtgtaaactgtgtgccttatttacactttattgtctcccgcttctcagatagttttgatgtgttgtacagtggaatatcttagatactttttggaaagtatttacataagttatatcacaattaaaatgttgaatttaa

SEQ ID NO: 173471 - DNA, 3164 bp, Homo sapiens
  Payload ID: 14082
  Gene Symbol: RAD17
  Gene Name: RAD17 checkpoint clamp loader component
  Uniprot ID: O75943
  ENST ID: ENST00000612044
  CDS Start-End: 643-2655
acctgtataccttttgaaacgtcacagtctctaatcgtgaacgatttggggcggagggctgaacaatgtgttttctagtgtgtcgaggtgtttataggctatgtgtgcctccaaactgtaaagtagtccagtatactttccaatgtataagtttgtagaccttaaacttttcttctggctaacttaaaatcgttgaattcactagtttgcataaacatttaagaatttgaaaacacggttgaaaaacagtgttaccaagaaattttgtaataacatgttcaaatgaagacaaaaattttacagtttaagacttaaattcttcgtccacagcaagtgaattcatggtattttacttttttgggaaatactggaaatgaagacctgcaactgtaatttgaaataaggaaaactttaattttcagtataaaaattgctcaaatagaattgcctgattttaatgacaaaagtatatgggagtccacatttatgtaagaaatgaaactataaaatgtataaataatttgcaaatcagaattgctgtcgaaagttttactataatgaaagatattttcatactctcaaaaatatagaggaaaggggccaagattatagtaccagtcacaatcttttgatgaggacgaaatgaatcaggtaacagactgggttgacccatcatttgatgattttctagagtgtagtggcgtctctactattactgccacatcattaggtgtgaataactcaagtcatagaagaaaaaatgggccttctacattagaaagcagcagatttccagcgagaaaaagaggaaatctatcttccttagaacagatttatggtttagaaaattcaaaagaatatctgtctgaaaatgaaccatgggtggataaatataaaccagaaactcagcatgaacttgctgtgcataaaaagaaaattgaagaagtcgaaacctggttaaaagctcaagttttagaaaggcaaccaaaacagggtggatctattttattaataacaggtcctcctggatgtggaaagacaacgaccttaaaaatactatcaaaggagcatggtattcaagtacaagagtggattaatccagttttaccagacttccaaaaagatgatttcaaggggatgtttaatactgaatcaagcttccatatgtttccctatcagtctcagatagcagttttcaaagagtttctactaagagcgacaaagtataacaagttacaaatgcttggagatgatctgagaactgataagaagataattctggttgaagatttacctaaccagttttatcgggattctcatactttacatgaagttctaaggaagtatgtgaggattggtcgatgtcctcttatatttataatctcggacagtctcagtggagataataatcaaaggttattgtttcccaaagaaattcaggaagagtgttctatctcaaatattagtttcaaccctgtggcaccaacaattatgatgaaatttcttaatcgaatagtgactatagaagctaacaagaatggaggaaaaattactgtccctgacaaaacttctctagagttgctctgtcagggatgttctggtgatatcagaagtgcaataaacagcctccagttttcttcttcaaaaggagaaaacaacttacggccaaggaaaaaaggaatgtctttaaaatcagatgctgtgctgtcaaaatcaaaacgaagaaaaaaacctgatagggtttttgaaaatcaagaggtccaagctattggtggcaaagatgtttctctgtttctcttcagagctttggggaaaattctatattgtaaaagagcatctttaacagaattagactcacctcggttgccctctcatttatcagaatatgaacgggatacattacttgttgaacctgaggaggtagtagaaatgtcacacatgcctggagacttatttaatttatatcttcaccaaaactacatagatttcttcatggaaattgatgatattgtgagagccagtgaatttctgagttttgcagatatcctcagtggtgactggaatacacgctctttactcagggaatatagcacatctatagctacgagaggtgtgatgcattccaacaaagcccgaggatatgctcattgccaaggaggaggatcaagttttcgacccttgcacaaacctcagtggtttctaataaataaaaagtatcgggaaaattgcctggcagcaaaagcactttttcctgacttctgcctaccagctttatgccgccaaactcagctattgccataccttgctctactaaccattccaatgagaaatcaagctcagatttcttttatccaagatattggaaggctccctctgaagcgacactttggaagattgaaaatggaagccctgactgacagggaacatggaatgatagaccctgacagcggagatgaagcccagcttaatggaggacattctgcagaggaatctctgggtgaacccactcaagccactgtgccggaaacctggtctcttcctttgagtcagaatagtgccagtgaactgcctgctagccagccccagcccttttcagcccaaggagacatggaagaaaacataataatagaagactacgagagtgatgggacatagaagccagcctgctaatcagattgctacttcacagcttcatttttgtttcattcagtggtacttcagcagagttaatatgcttttctgatgaattacacaacagtttgttaattcttcattcttgtagtatttcatcacaagaaacctactcttctgtcatcttgaagtaaatagaagatcaagccttcaaatctcttaattttttcggtatttattaaatctgtgagtggtttaaggagcggtcagtgtgtataaagtgtgtttgaacattatgccaaatatcaagatgtgaaggactaattcaggatgcaaaaacgttattggggggttgtaaatatcaactattcaacagtttaggatgcaattacgagtgtaaactgtgtgccttatttacactttattgtctcccgcttctcagatagttttgatgtgttgtacagtggaatatcttagatactttttggaaagtatttacataagttatatcacaattaaaatgttgaatttaa

SEQ ID NO: 173472 - DNA, 3060 bp, Homo sapiens
  Payload ID: 14082
  Gene Symbol: RAD17
  Gene Name: RAD17 checkpoint clamp loader component
  Uniprot ID: O75943
  ENST ID: ENST00000610770
  CDS Start-End: 539-2551
gaggccgtacctccgagaggctcggcgttgagcccgggtagggccaggtggctgccctttcacctagggtagtccctggtcgcctccgctcttcgcccaaaaggggatgcagctccgggaaacaagtgaattcatggtattttacttttttgggaaatactggaaatgaagacctgcaactgtaatttgaaataaggaaaactttaattttcagtataaaaattgctcaaatagaattgcctgattttaatgacaaaaggtgaattatagtttaatgtactgcaagtcctaaactacggatgggaactattacagtttataatgtcaaaaacttttcttagaccaaaggtatcttccacaaagtatatgggagtccacatttatgtaagaaatgaaactataaaatgtataaataatttgcaaatcagaattgctgtcgaaagttttactataatgaaagatattttcatactctcaaaaatatagaggaaaggggccaagattatagtaccagtcacaatcttttgatgaggacgaaatgaatcaggtaacagactgggttgacccatcatttgatgattttctagagtgtagtggcgtctctactattactgccacatcattaggtgtgaataactcaagtcatagaagaaaaaatgggccttctacattagaaagcagcagatttccagcgagaaaaagaggaaatctatcttccttagaacagatttatggtttagaaaattcaaaagaatatctgtctgaaaatgaaccatgggtggataaatataaaccagaaactcagcatgaacttgctgtgcataaaaagaaaattgaagaagtcgaaacctggttaaaagctcaagttttagaaaggcaaccaaaacagggtggatctattttattaataacaggtcctcctggatgtggaaagacaacgaccttaaaaatactatcaaaggagcatggtattcaagtacaagagtggattaatccagttttaccagacttccaaaaagatgatttcaaggggatgtttaatactgaatcaagcttccatatgtttccctatcagtctcagatagcagttttcaaagagtttctactaagagcgacaaagtataacaagttacaaatgcttggagatgatctgagaactgataagaagataattctggttgaagatttacctaaccagttttatcgggattctcatactttacatgaagttctaaggaagtatgtgaggattggtcgatgtcctcttatatttataatctcggacagtctcagtggagataataatcaaaggttattgtttcccaaagaaattcaggaagagtgttctatctcaaatattagtttcaaccctgtggcaccaacaattatgatgaaatttcttaatcgaatagtgactatagaagctaacaagaatggaggaaaaattactgtccctgacaaaacttctctagagttgctctgtcagggatgttctggtgatatcagaagtgcaataaacagcctccagttttcttcttcaaaaggagaaaacaacttacggccaaggaaaaaaggaatgtctttaaaatcagatgctgtgctgtcaaaatcaaaacgaagaaaaaaacctgatagggtttttgaaaatcaagaggtccaagctattggtggcaaagatgtttctctgtttctcttcagagctttggggaaaattctatattgtaaaagagcatctttaacagaattagactcacctcggttgccctctcatttatcagaatatgaacgggatacattacttgttgaacctgaggaggtagtagaaatgtcacacatgcctggagacttatttaatttatatcttcaccaaaactacatagatttcttcatggaaattgatgatattgtgagagccagtgaatttctgagttttgcagatatcctcagtggtgactggaatacacgctctttactcagggaatatagcacatctatagctacgagaggtgtgatgcattccaacaaagcccgaggatatgctcattgccaaggaggaggatcaagttttcgacccttgcacaaacctcagtggtttctaataaataaaaagtatcgggaaaattgcctggcagcaaaagcactttttcctgacttctgcctaccagctttatgccgccaaactcagctattgccataccttgctctactaaccattccaatgagaaatcaagctcagatttcttttatccaagatattggaaggctccctctgaagcgacactttggaagattgaaaatggaagccctgactgacagggaacatggaatgatagaccctgacagcggagatgaagcccagcttaatggaggacattctgcagaggaatctctgggtgaacccactcaagccactgtgccggaaacctggtctcttcctttgagtcagaatagtgccagtgaactgcctgctagccagccccagcccttttcagcccaaggagacatggaagaaaacataataatagaagactacgagagtgatgggacatagaagccagcctgctaatcagattgctacttcacagcttcatttttgtttcattcagtggtacttcagcagagttaatatgcttttctgatgaattacacaacagtttgttaattcttcattcttgtagtatttcatcacaagaaacctactcttctgtcatcttgaagtaaatagaagatcaagccttcaaatctcttaattttttcggtatttattaaatctgtgagtggtttaaggagcggtcagtgtgtataaagtgtgtttgaacattatgccaaatatcaagatgtgaaggactaattcaggatgcaaaaacgttattggggggttgtaaatatcaactattcaacagtttaggatgcaattacgagtgtaaactgtgtgccttatttacactttattgtctcccgcttctcagatagttttgatgtgttgtacagtggaatatcttagatactttttggaaagtatttacataagttatatcacaattaaaatgttgaatttaa

SEQ ID NO: 173473 - DNA, 496 bp, Homo sapiens; identical to SEQ ID NO: 173463
  Payload ID: 14082
  Gene Symbol: RAD17
  Gene Name: RAD17 checkpoint clamp loader component
  ENST ID: ENST00000611548
  CDS Start-End: 435-496

SEQ ID NO: 173474 - DNA, 2789 bp, Homo sapiens
  Payload ID: 14082
  Gene Symbol: RAD17
  Gene Name: RAD17 checkpoint clamp loader component
  Uniprot ID: O75943
  ENST ID: ENST00000616759
  CDS Start-End: 268-2280
agcccgggtagggccaggtggctgccctttcacctagggtagtccctggtcgcctccgctcttcgcccaaaaggggatgcagctccgggaaatatatgggagtccacatttatgtaagaaatgaaactataaaatgtataaataatttgcaaatcagaattgctgtcgaaagttttactataatgaaagatattttcatactctcaaaaatatagaggaaaggggccaagattatagtaccagtcacaatcttttgatgaggacgaaatgaatcaggtaacagactgggttgacccatcatttgatgattttctagagtgtagtggcgtctctactattactgccacatcattaggtgtgaataactcaagtcatagaagaaaaaatgggccttctacattagaaagcagcagatttccagcgagaaaaagaggaaatctatcttccttagaacagatttatggtttagaaaattcaaaagaatatctgtctgaaaatgaaccatgggtggataaatataaaccagaaactcagcatgaacttgctgtgcataaaaagaaaattgaagaagtcgaaacctggttaaaagctcaagttttagaaaggcaaccaaaacagggtggatctattttattaataacaggtcctcctggatgtggaaagacaacgaccttaaaaatactatcaaaggagcatggtattcaagtacaagagtggattaatccagttttaccagacttccaaaaagatgatttcaaggggatgtttaatactgaatcaagcttccatatgtttccctatcagtctcagatagcagttttcaaagagtttctactaagagcgacaaagtataacaagttacaaatgcttggagatgatctgagaactgataagaagataattctggttgaagatttacctaaccagttttatcgggattctcatactttacatgaagttctaaggaagtatgtgaggattggtcgatgtcctcttatatttataatctcggacagtctcagtggagataataatcaaaggttattgtttcccaaagaaattcaggaagagtgttctatctcaaatattagtttcaaccctgtggcaccaacaattatgatgaaatttcttaatcgaatagtgactatagaagctaacaagaatggaggaaaaattactgtccctgacaaaacttctctagagttgctctgtcagggatgttctggtgatatcagaagtgcaataaacagcctccagttttcttcttcaaaaggagaaaacaacttacggccaaggaaaaaaggaatgtctttaaaatcagatgctgtgctgtcaaaatcaaaacgaagaaaaaaacctgatagggtttttgaaaatcaagaggtccaagctattggtggcaaagatgtttctctgtttctcttcagagctttggggaaaattctatattgtaaaagagcatctttaacagaattagactcacctcggttgccctctcatttatcagaatatgaacgggatacattacttgttgaacctgaggaggtagtagaaatgtcacacatgcctggagacttatttaatttatatcttcaccaaaactacatagatttcttcatggaaattgatgatattgtgagagccagtgaatttctgagttttgcagatatcctcagtggtgactggaatacacgctctttactcagggaatatagcacatctatagctacgagaggtgtgatgcattccaacaaagcccgaggatatgctcattgccaaggaggaggatcaagttttcgacccttgcacaaacctcagtggtttctaataaataaaaagtatcgggaaaattgcctggcagcaaaagcactttttcctgacttctgcctaccagctttatgccgccaaactcagctattgccataccttgctctactaaccattccaatgagaaatcaagctcagatttcttttatccaagatattggaaggctccctctgaagcgacactttggaagattgaaaatggaagccctgactgacagggaacatggaatgatagaccctgacagcggagatgaagcccagcttaatggaggacattctgcagaggaatctctgggtgaacccactcaagccactgtgccggaaacctggtctcttcctttgagtcagaatagtgccagtgaactgcctgctagccagccccagcccttttcagcccaaggagacatggaagaaaacataataatagaagactacgagagtgatgggacatagaagccagcctgctaatcagattgctacttcacagcttcatttttgtttcattcagtggtacttcagcagagttaatatgcttttctgatgaattacacaacagtttgttaattcttcattcttgtagtatttcatcacaagaaacctactcttctgtcatcttgaagtaaatagaagatcaagccttcaaatctcttaattttttcggtatttattaaatctgtgagtggtttaaggagcggtcagtgtgtataaagtgtgtttgaacattatgccaaatatcaagatgtgaaggactaattcaggatgcaaaaacgttattggggggttgtaaatatcaactattcaacagtttaggatgcaattacgagtgtaaactgtgtgccttatttacactttattgtctcccgcttctcagatagttttgatgtgttgtacagtggaatatcttagatactttttggaaagtatttacataagttatatcacaattaaaatgttgaatttaa

SEQ ID NO: 173475 - DNA, 2648 bp, Homo sapiens
  Payload ID: 14082
  Gene Symbol: RAD17
  Gene Name: RAD17 checkpoint clamp loader component
  ENST ID: ENST00000621274
  CDS Start-End: 624-2141
caagtgaattcatggtattttacttttttgggaaatactggaaatgaagacctgcaactgtaatttgaaataaggaaaactttaattttcagtataaaaattgctcaaatagaattgcctgattttaatgacaaaaggtaacagactgggttgacccatcatttgatgattttctagagtgtagtggcgtctctactattactgccacatcattaggtgtgaataactcaagtcatagaagaaaaaatgggccttctacattagaaagcagcagatttccagcgagaaaaagaggaaatctatcttccttagaacagatttatggtttagaaaattcaaaagaatatctgtctgaaaatgaaccatgggtggataaatataaaccagaaactcagcatgaacttgctgtgcataaaaagaaaattgaagaagtcgaaacctggttaaaagctcaagttttagaaaggcaaccaaaacagggtggatctattttattaataacaggtcctcctggatgtggaaagacaacgaccttaaaaatactatcaaaggagcatggtattcaagtacaagagtggattaatccagttttaccagacttccaaaaagatgatttcaaggggatgtttaatactgaatcaagcttccatatgtttccctatcagtctcagatagcagttttcaaagagtttctactaagagcgacaaagtataacaagttacaaatgcttggagatgatctgagaactgataagaagataattctggttgaagatttacctaaccagttttatcgggattctcatactttacatgaagttctaaggaagtatgtgaggattggtcgatgtcctcttatatttataatctcggacagtctcagtggagataataatcaaaggttattgtttcccaaagaaattcaggaagagtgttctatctcaaatattagtttcaaccctgtggcaccaacaattatgatgaaatttcttaatcgaatagtgactatagaagctaacaagaatggaggaaaaattactgtccctgacaaaacttctctagagttgctctgtcagggatgttctggtgatatcagaagtgcaataaacagcctccagttttcttcttcaaaaggagaaaacaacttacggccaaggaaaaaaggaatgtctttaaaatcagatgctgtgctgtcaaaatcaaaacgaagaaaaaaacctgatagggtttttgaaaatcaagaggtccaagctattggtggcaaagatgtttctctgtttctcttcagagctttggggaaaattctatattgtaaaagagcatctttaacagaattagactcacctcggttgccctctcatttatcagaatatgaacgggatacattacttgttgaacctgaggaggtagtagaaatgtcacacatgcctggagacttatttaatttatatcttcaccaaaactacatagatttcttcatggaaattgatgatattgtgagagccagtgaatttctgagttttgcagatatcctcagtggtgactggaatacacgctctttactcagggaatatagcacatctatagctacgagaggtgtgatgcattccaacaaagcccgaggatatgctcattgccaaggaggaggatcaagttttcgacccttgcacaaacctcagtggtttctaataaataaaaagtatcgggaaaattgcctggcagcaaaagcactttttcctgacttctgcctaccagctttatgccgccaaactcagctattgccataccttgctctactaaccattccaatgagaaatcaagctcagatttcttttatccaagatattggaaggctccctctgaagcgacactttggaagattgaaaatggaagccctgactgacagggaacatggaatgatagaccctgacagcggagatgaagcccagcttaatggaggacattctgcagaggaatctctgggtgaacccactcaagccactgtgccggaaacctggtctcttcctttgagtcagaatagtgccagtgaactgcctgctagccagccccagcccttttcagcccaaggagacatggaagaaaacataataatagaagactacgagagtgatgggacatagaagccagcctgctaatcagattgctacttcacagcttcatttttgtttcattcagtggtacttcagcagagttaatatgcttttctgatgaattacacaacagtttgttaattcttcattcttgtagtatttcatcacaagaaacctactcttctgtcatcttgaagtaaatagaagatcaagccttcaaatctcttaattttttcggtatttattaaatctgtgagtggtttaaggagcggtcagtgtgtataaagtgtgtttgaacattatgccaaatatcaagatgtgaaggactaattcaggatgcaaaaacgttattggggggttgtaaatatcaactattcaacagtttaggatgcaattacgagtgtaaactgtgtgccttatttacactttattgtctcccgcttctcagatagttttgatgtgttgtacagtggaatatcttagatactttttggaaagtatttacataagttatatcacaattaaaatgttgaattt

SEQ ID NO: 173476 - DNA, 966 bp, Homo sapiens; identical to SEQ ID NO: 173468
  Payload ID: 14082
  Gene Symbol: RAD17
  Gene Name: RAD17 checkpoint clamp loader component
  ENST ID: ENST00000614140
  CDS Start-End: 817-966

SEQ ID NO: 173477 - DNA, 3233 bp, Homo sapiens
  Payload ID: 14082
  Gene Symbol: RAD17
  Gene Name: RAD17 checkpoint clamp loader component
  ENST ID: ENST00000610584
  CDS Start-End: 679-2724
ccccgggaggccgtacctccgagaggctcggcgttgagcccgggtagggccaggtggctgccctttcacctagggtagtccctggtcgcctccgctcttcgcccaaaaggggatgcagctccgggaaagtaaggccgccgcggttgcggctatattatgtatatgtcttagagacgcgagtctatctctgccttcaagctttcctgggctctcgtcgctcctcctcccgacccgcccatcccatctggggatgagaagattgagggtgcagagccctgtcctgcagcggggatttgcgagctcaacccggcaccccactgattacaggattacgttggacgaatatttgagcttagtattccctgttcactgtgtggggtggtggtgggtcggctaggaatagtcttgaaggtctacctctgacatctcatttcagtaacctcgcatcttcagggacagttatctgctttttaaaggagcaagtgaattcatggtattttacttttttgggaaatactggaaatgaagacctgcaactgtaatttgaaataaggaaaactttaattttcagtataaaaattgctcaaatagaattgcctgattttaatgacaaaaggtgaattatagtttaatgtactgcaagtcctaaactacggatgggaactattacagtttataatgtcaaaaacttttcttagaccaaaggtatcttccacaaaggtaacagactgggttgacccatcatttgatgattttctagagtgtagtggcgtctctactattactgccacatcattaggtgtgaataactcaagtcatagaagaaaaaatgggccttctacattagaaagcagcagatttccagcgagaaaaagaggaaatctatcttccttagaacagatttatggtttagaaaattcaaaagaatatctgtctgaaaatgaaccatgggtggataaatataaaccagaaactcagcatgaacttgctgtgcataaaaagaaaattgaagaagtcgaaacctggttaaaagctcaagttttagaaaggcaaccaaaacagggtggatctattttattaataacaggtcctcctggatgtggaaagacaacgaccttaaaaatactatcaaaggagcatggtattcaagtacaagagtggattaatccagttttaccagacttccaaaaagatgatttcaaggggatgtttaatactgaatcaagcttccatatgtttccctatcagtctcagatagcagttttcaaagagtttctactaagagcgacaaagtataacaagttacaaatgcttggagatgatctgagaactgataagaagataattctggttgaagatttacctaaccagttttatcgggattctcatactttacatgaagttctaaggaagtatgtgaggattggtcgatgtcctcttatatttataatctcggacagtctcagtggagataataatcaaaggttattgtttcccaaagaaattcaggaagagtgttctatctcaaatattagtttcaaccctgtggcaccaacaattatgatgaaatttcttaatcgaatagtgactatagaagctaacaagaatggaggaaaaattactgtccctgacaaaacttctctagagttgctctgtcagggatgttctggtgatatcagaagtgcaataaacagcctccagttttcttcttcaaaaggagaaaacaacttacggccaaggaaaaaaggaatgtctttaaaatcagatgctgtgctgtcaaaatcaaaacgaagaaaaaaacctgatagggtttttgaaaatcaagaggtccaagctattggtggcaaagatgtttctctgtttctcttcagagctttggggaaaattctatattgtaaaagagcatctttaacagaattagactcacctcggttgccctctcatttatcagaatatgaacgggatacattacttgttgaacctgaggaggtagtagaaatgtcacacatgcctggagacttatttaatttatatcttcaccaaaactacatagatttcttcatggaaattgatgatattgtgagagccagtgaatttctgagttttgcagatatcctcagtggtgactggaatacacgctctttactcagggaatatagcacatctatagctacgagaggtgtgatgcattccaacaaagcccgaggatatgctcattgccaaggaggaggatcaagttttcgacccttgcacaaacctcagtggtttctaataaataaaaagtatcgggaaaattgcctggcagcaaaagcactttttcctgacttctgcctaccagctttatgccgccaaactcagctattgccataccttgctctactaaccattccaatgagaaatcaagctcagatttcttttatccaagatattggaaggctccctctgaagcgacactttggaagattgaaaatggaagccctgactgacagggaacatggaatgatagaccctgacagcggagatgaagcccagcttaatggaggacattctgcagaggaatctctgggtgaacccactcaagccactgtgccggaaacctggtctcttcctttgagtcagaatagtgccagtgaactgcctgctagccagccccagcccttttcagcccaaggagacatggaagaaaacataataatagaagactacgagagtgatgggacatagaagccagcctgctaatcagattgctacttcacagcttcatttttgtttcattcagtggtacttcagcagagttaatatgcttttctgatgaattacacaacagtttgttaattcttcattcttgtagtatttcatcacaagaaacctactcttctgtcatcttgaagtaaatagaagatcaagccttcaaatctcttaattttttcggtatttattaaatctgtgagtggtttaaggagcggtcagtgtgtataaagtgtgtttgaacattatgccaaatatcaagatgtgaaggactaattcaggatgcaaaaacgttattggggggttgtaaatatcaactattcaacagtttaggatgcaattacgagtgtaaactgtgtgccttatttacactttattgtctcccgcttctcagatagttttgatgtgttgtacagtggaatatcttagatactttttggaaagtatttacataagttatatcacaattaaaatgttgaatttaa

SEQ ID NO: 173478 - DNA, 2323 bp, Homo sapiens
  Payload ID: 14082
  Gene Symbol: RAD17
  Gene Name: RAD17 checkpoint clamp loader component
  ENST ID: ENST00000611001
  CDS Start-End: 738-2255
acctccgagaggctcggcgttgagcccgggtagggccaggtggctgccctttcacctagggtagtccctggtcgcctccgctcttcgcccaaaaggggatgcagctccgggaaacaagtgaattcatggtattttacttttttgggaaatactggaaatgaagacctgcaactgtaatttgaaataaggaaaactttaattttcagtataaaaattgctcaaatagaattgcctgattttaatgacaaaaggtaacagactgggttgacccatcatttgatgattttctagagtgtagtggcgtctctactattactgccacatcattaggtgtgaataactcaagtcatagaagaaaaaatgggccttctacattagaaagcagcagatttccagcgagaaaaagaggaaatctatcttccttagaacagatttatggtttagaaaattcaaaagaatatctgtctgaaaatgaaccatgggtggataaatataaaccagaaactcagcatgaacttgctgtgcataaaaagaaaattgaagaagtcgaaacctggttaaaagctcaagttttagaaaggcaaccaaaacagggtggatctattttattaataacaggtcctcctggatgtggaaagacaacgaccttaaaaatactatcaaaggagcatggtattcaagtacaagagtggattaatccagttttaccagacttccaaaaagatgatttcaaggggatgtttaatactgaatcaagcttccatatgtttccctatcagtctcagatagcagttttcaaagagtttctactaagagcgacaaagtataacaagttacaaatgcttggagatgatctgagaactgataagaagataattctggttgaagatttacctaaccagttttatcgggattctcatactttacatgaagttctaaggaagtatgtgaggattggtcgatgtcctcttatatttataatctcggacagtctcagtggagataataatcaaaggttattgtttcccaaagaaattcaggaagagtgttctatctcaaatattagtttcaaccctgtggcaccaacaattatgatgaaatttcttaatcgaatagtgactatagaagctaacaagaatggaggaaaaattactgtccctgacaaaacttctctagagttgctctgtcagggatgttctggtgatatcagaagtgcaataaacagcctccagttttcttcttcaaaaggagaaaacaacttacggccaaggaaaaaaggaatgtctttaaaatcagatgctgtgctgtcaaaatcaaaacgaagaaaaaaacctgatagggtttttgaaaatcaagaggtccaagctattggtggcaaagatgtttctctgtttctcttcagagctttggggaaaattctatattgtaaaagagcatctttaacagaattagactcacctcggttgccctctcatttatcagaatatgaacgggatacattacttgttgaacctgaggaggtagtagaaatgtcacacatgcctggagacttatttaatttatatcttcaccaaaactacatagatttcttcatggaaattgatgatattgtgagagccagtgaatttctgagttttgcagatatcctcagtggtgactggaatacacgctctttactcagggaatatagcacatctatagctacgagaggtgtgatgcattccaacaaagcccgaggatatgctcattgccaaggaggaggatcaagttttcgacccttgcacaaacctcagtggtttctaataaataaaaagtatcgggaaaattgcctggcagcaaaagcactttttcctgacttctgcctaccagctttatgccgccaaactcagctattgccataccttgctctactaaccattccaatgagaaatcaagctcagatttcttttatccaagatattggaaggctccctctgaagcgacactttggaagattgaaaatggaagccctgactgacagggaacatggaatgatagaccctgacagcggagatgaagcccagcttaatggaggacattctgcagaggaatctctgggtgaacccactcaagccactgtgccggaaacctggtctcttcctttgagtcagaatagtgccagtgaactgcctgctagccagccccagcccttttcagcccaaggagacatggaagaaaacataataatagaagactacgagagtgatgggacatagaagccagcctgctaatcagattgctacttcacagcttcatttttgtttcattcagtggtacttcagca

SEQ ID NO: 173479 - DNA, 803 bp, Homo sapiens
  Payload ID: 14082
  Gene Symbol: RAD17
  Gene Name: RAD17 checkpoint clamp loader component
  ENST ID: ENST00000617338
  CDS Start-End: 1-498
tcggacagtctcagtggagataataatcaaaggttattgtttcccaaagaaattcaggaagagtgttctatctcaaatattagtttcaaccctgtggcaccaacaattatgatgaaatttcttaatcgaatagtgactatagaagctaacaagaatggaggaaaaattactgtccctgacaaaacttctctagagttgctctgtcagggatgttctggtgatatcagaagtgcaataaacagcctccagttttcttcttcaaaaggagaaaacaacttacggccaaggaaaaaaggaatgtctttaaaatcagatgctgtgctgtcaaaatcaaaacgaagaaaaaaacctgatagggtttttgaaaatcaagaggtccaagctattggtggcaaagatgtttctctgtttctcttcagagctttggggaaaattctatattgtaaaatgaatggaatccgtattctttcatgtagagagcaacatcttcctacatagtaaataaaagagtaaagaccactgtattgagatgagaaatcaagggaagaaagcaacccaaagctgaaaaaggagcatctttaacagaattagactcacctcggttgccctctcatttatcagaatatgaacgggatacattacttgttgaacctgaggaggtagtagaaatgtcacacatgcctggagacttatttaatttatatcttcaccaaaactacatagatttcttcatggaaattgatgatattgtgagagccagtgaatttctgagttttgcagatatcctcagtggtgactggaat

SEQ ID NO: 173480 - DNA, 3002 bp, Homo sapiens
  Payload ID: 14082
  Gene Symbol: RAD17
  Gene Name: RAD17 checkpoint clamp loader component
  Uniprot ID: O75943
  ENST ID: ENST00000620889
  CDS Start-End: 481-2493
gcaacgcccgcgagggtcggctcccggggcgctgacaaccgcctcgtggccctcggccggcctctgaagagggcagtgaggggcccccacctgggcgcccgatgcccagagcactctgcgcccccagcctgccccagcccagtccctcccggccgcgcgccctgaccgcaagtgaattcatggtattttacttttttgggaaatactggaaatgaagacctgcaactgtaatttgaaataaggaaaactttaattttcagtataaaaattgctcaaatagaattgcctgattttaatgacaaaagtatatgggagtccacatttatgtaagaaatgaaactataaaatgtataaataatttgcaaatcagaattgctgtcgaaagttttactataatgaaagatattttcatactctcaaaaatatagaggaaaggggccaagattatagtaccagtcacaatcttttgatgaggacgaaatgaatcaggtaacagactgggttgacccatcatttgatgattttctagagtgtagtggcgtctctactattactgccacatcattaggtgtgaataactcaagtcatagaagaaaaaatgggccttctacattagaaagcagcagatttccagcgagaaaaagaggaaatctatcttccttagaacagatttatggtttagaaaattcaaaagaatatctgtctgaaaatgaaccatgggtggataaatataaaccagaaactcagcatgaacttgctgtgcataaaaagaaaattgaagaagtcgaaacctggttaaaagctcaagttttagaaaggcaaccaaaacagggtggatctattttattaataacaggtcctcctggatgtggaaagacaacgaccttaaaaatactatcaaaggagcatggtattcaagtacaagagtggattaatccagttttaccagacttccaaaaagatgatttcaaggggatgtttaatactgaatcaagcttccatatgtttccctatcagtctcagatagcagttttcaaagagtttctactaagagcgacaaagtataacaagttacaaatgcttggagatgatctgagaactgataagaagataattctggttgaagatttacctaaccagttttatcgggattctcatactttacatgaagttctaaggaagtatgtgaggattggtcgatgtcctcttatatttataatctcggacagtctcagtggagataataatcaaaggttattgtttcccaaagaaattcaggaagagtgttctatctcaaatattagtttcaaccctgtggcaccaacaattatgatgaaatttcttaatcgaatagtgactatagaagctaacaagaatggaggaaaaattactgtccctgacaaaacttctctagagttgctctgtcagggatgttctggtgatatcagaagtgcaataaacagcctccagttttcttcttcaaaaggagaaaacaacttacggccaaggaaaaaaggaatgtctttaaaatcagatgctgtgctgtcaaaatcaaaacgaagaaaaaaacctgatagggtttttgaaaatcaagaggtccaagctattggtggcaaagatgtttctctgtttctcttcagagctttggggaaaattctatattgtaaaagagcatctttaacagaattagactcacctcggttgccctctcatttatcagaatatgaacgggatacattacttgttgaacctgaggaggtagtagaaatgtcacacatgcctggagacttatttaatttatatcttcaccaaaactacatagatttcttcatggaaattgatgatattgtgagagccagtgaatttctgagttttgcagatatcctcagtggtgactggaatacacgctctttactcagggaatatagcacatctatagctacgagaggtgtgatgcattccaacaaagcccgaggatatgctcattgccaaggaggaggatcaagttttcgacccttgcacaaacctcagtggtttctaataaataaaaagtatcgggaaaattgcctggcagcaaaagcactttttcctgacttctgcctaccagctttatgccgccaaactcagctattgccataccttgctctactaaccattccaatgagaaatcaagctcagatttcttttatccaagatattggaaggctccctctgaagcgacactttggaagattgaaaatggaagccctgactgacagggaacatggaatgatagaccctgacagcggagatgaagcccagcttaatggaggacattctgcagaggaatctctgggtgaacccactcaagccactgtgccggaaacctggtctcttcctttgagtcagaatagtgccagtgaactgcctgctagccagccccagcccttttcagcccaaggagacatggaagaaaacataataatagaagactacgagagtgatgggacatagaagccagcctgctaatcagattgctacttcacagcttcatttttgtttcattcagtggtacttcagcagagttaatatgcttttctgatgaattacacaacagtttgttaattcttcattcttgtagtatttcatcacaagaaacctactcttctgtcatcttgaagtaaatagaagatcaagccttcaaatctcttaattttttcggtatttattaaatctgtgagtggtttaaggagcggtcagtgtgtataaagtgtgtttgaacattatgccaaatatcaagatgtgaaggactaattcaggatgcaaaaacgttattggggggttgtaaatatcaactattcaacagtttaggatgcaattacgagtgtaaactgtgtgccttatttacactttattgtctcccgcttctcagatagttttgatgtgttgtacagtggaatatcttagatactttttggaaagtatttacataagttatatcacaattaaaatgttgaatttaa

SEQ ID NO: 173481 - DNA, 775 bp, Homo sapiens
  Payload ID: 14082
  Gene Symbol: RAD17
  Gene Name: RAD17 checkpoint clamp loader component
  ENST ID: ENST00000613417
  CDS Start-End: 1-555
tctctgtttctcttcagagctttggggaaaattctatattgtaaaagagcatctttaacagaattagactcacctcggttgccctctcatttatcagaatatgaacgggatacattacttgttgaacctgaggaggtagtagaaatgtcacacatgcctggagacttatttaatttatatcttcaccaaaactacatagatttcttcatggaaattgatgatattgtgagagccagtgaatttctgagttttgcagatatcctcagtggtgactggaatacacgctctttactcagggaatatagcacatctatagctacgagaggtgtgatgcattccaacaaagcccgaggatatgctcattgccaaggaggaggatcaagttttcgacccttgcacaaacctcagtggtttctaataaataaaaagtatcgggaaaattgcctggcagcaaaagcactttttcctgacttctgcctaccagctttatgccgccaaactcagctattgccataccttgctctactaaccattccaatgagaaatcaagattgaaaatggaagccctgactgacagggaacatggaatgatagaccctgacagcggagatgaagcccagcttaatggaggacattctgcagaggaatctctgggtgaacccactcaagccactgtgccggaaacctggtctcttcctttgagtcagaatagtgccagtgaactgcctgctagccagccccagcccttttcagcccaaggagacatggaagaaaa

SEQ ID NO: 173482 - DNA, 3057 bp, Homo sapiens
  Payload ID: 14082
  Gene Symbol: RAD17
  Gene Name: RAD17 checkpoint clamp loader component
  Uniprot ID: O75943
  ENST ID: ENST00000616683
  CDS Start-End: 538-2550
gaagattgagggtgcagagccctgtcctgcagcggggatttgcgagctcaacccggcaccccactgattacaggattacgttggacgaatatttgagcttagtattccctgttcactgtgtggggtggtggtgggtcggctaggaatagtcttgaaggtctacctctgacatctcatttcagtaacctcgcatcttcagggacagttatctgctttttaaaggagcaagtgaattcatggtattttacttttttgggaaatactggaaatgaagacctgcaactgtaatttgaaataaggaaaactttaattttcagtataaaaattgctcaaatagaattgcctgattttaatgacaaaagtatatgggagtccacatttatgtaagaaatgaaactataaaatgtataaataatttgcaaatcagaattgctgtcgaaagttttactataatgaaagatattttcatactctcaaaaatatagaggaaaggggccaagattatagtaccagtcacaatcttttgatgaggacgaaatgaatcaggtaacagactgggttgacccatcatttgatgattttctagagtgtagtggcgtctctactattactgccacatcattaggtgtgaataactcaagtcatagaagaaaaaatgggccttctacattagaaagcagcagatttccagcgagaaaaagaggaaatctatcttccttagaacagatttatggtttagaaaattcaaaagaatatctgtctgaaaatgaaccatgggtggataaatataaaccagaaactcagcatgaacttgctgtgcataaaaagaaaattgaagaagtcgaaacctggttaaaagctcaagttttagaaaggcaaccaaaacagggtggatctattttattaataacaggtcctcctggatgtggaaagacaacgaccttaaaaatactatcaaaggagcatggtattcaagtacaagagtggattaatccagttttaccagacttccaaaaagatgatttcaaggggatgtttaatactgaatcaagcttccatatgtttccctatcagtctcagatagcagttttcaaagagtttctactaagagcgacaaagtataacaagttacaaatgcttggagatgatctgagaactgataagaagataattctggttgaagatttacctaaccagttttatcgggattctcatactttacatgaagttctaaggaagtatgtgaggattggtcgatgtcctcttatatttataatctcggacagtctcagtggagataataatcaaaggttattgtttcccaaagaaattcaggaagagtgttctatctcaaatattagtttcaaccctgtggcaccaacaattatgatgaaatttcttaatcgaatagtgactatagaagctaacaagaatggaggaaaaattactgtccctgacaaaacttctctagagttgctctgtcagggatgttctggtgatatcagaagtgcaataaacagcctccagttttcttcttcaaaaggagaaaacaacttacggccaaggaaaaaaggaatgtctttaaaatcagatgctgtgctgtcaaaatcaaaacgaagaaaaaaacctgatagggtttttgaaaatcaagaggtccaagctattggtggcaaagatgtttctctgtttctcttcagagctttggggaaaattctatattgtaaaagagcatctttaacagaattagactcacctcggttgccctctcatttatcagaatatgaacgggatacattacttgttgaacctgaggaggtagtagaaatgtcacacatgcctggagacttatttaatttatatcttcaccaaaactacatagatttcttcatggaaattgatgatattgtgagagccagtgaatttctgagttttgcagatatcctcagtggtgactggaatacacgctctttactcagggaatatagcacatctatagctacgagaggtgtgatgcattccaacaaagcccgaggatatgctcattgccaaggaggaggatcaagttttcgacccttgcacaaacctcagtggtttctaataaataaaaagtatcgggaaaattgcctggcagcaaaagcactttttcctgacttctgcctaccagctttatgcctccaaactcagctattgccataccttgctctactaaccattccaatgagaaatcaagctcagatttcttttatccaagatattggaaggctccctctgaagcgacactttggaagattgaaaatggaagccctgactgacagggaacatggaatgatagaccctgacagcggagatgaagcccagcttaatggaggacattctgcagaggaatctctgggtgaacccactcaagccactgtgccggaaacctggtctcttcctttgagtcagaatagtgccagtgaactgcctgctagccagccccagcccttttcagcccaaggagacatggaagaaaacataataatagaagactacgagagtgatgggacatagaagccagcctgctaatcagattgctacttcacagcttcatttttgtttcattcagtggtacttcagcagagttaatatgcttttctgatgaattacacaacagtttgttaattcttcattcttgtagtatttcatcacaagaaacctactcttctgtcatcttgaagtaaatagaagatcaagccttcaaatctcttaattttttcggtatttattaaatctgtgagtggtttaaggagcggtcagtgtgtataaagtgtgtttgaacattatgccaaatatcaagatgtgaaggactaattcaggatgcaaaaacgttattggggggttgtaaatatcaactattcaacagtttaggatgcaattacgagtgtaaactgtgtgccttatttacactttattgtctcccgcttctcagatagttttgatgtgttgtacagtggaatatcttagatactttttggaaagtatttacataagttatatcacaattaaaatgttgaattt

SEQ ID NO: 173483 - DNA, 2135 bp, Homo sapiens
  Payload ID: 14082
  Gene Symbol: RAD17
  Gene Name: RAD17 checkpoint clamp loader component
  ENST ID: ENST00000616158
  CDS Start-End: 313-2067
caagtgaattcatggtattttacttttttgggaaatactggaaatgaagacctgcaactgtaatttgaaataaggaaaactttaattttcagtataaaaattgctcaaatagaattgcctgattttaatgacaaaagtatatgggagtccacatttatgtaagaaatgaaactataaaatgtataaataatttgcaaatcagaattgctgtcgaaagttttactataatgaaagatattttcatactctcaaaaatatagaggaaaggggccaagattatagtaccagtcacaatcttttgatgaggacgaaatgaatcagcatgaacttgctgtgcataaaaagaaaattgaagaagtcgaaacctggttaaaagctcaagttttagaaaggcaaccaaaacagggtggatctattttattaataacaggtcctcctggatgtggaaagacaacgaccttaaaaatactatcaaaggagcatggtattcaagtacaagagtggattaatccagttttaccagacttccaaaaagatgatttcaaggggatgtttaatactgaatcaagcttccatatgtttccctatcagtctcagatagcagttttcaaagagtttctactaagagcgacaaagtataacaagttacaaatgcttggagatgatctgagaactgataagaagataattctggttgaagatttacctaaccagttttatcgggattctcatactttacatgaagttctaaggaagtatgtgaggattggtcgatgtcctcttatatttataatctcggacagtctcagtggagataataatcaaaggttattgtttcccaaagaaattcaggaagagtgttctatctcaaatattagtttcaaccctgtggcaccaacaattatgatgaaatttcttaatcgaatagtgactatagaagctaacaagaatggaggaaaaattactgtccctgacaaaacttctctagagttgctctgtcagggatgttctggtgatatcagaagtgcaataaacagcctccagttttcttcttcaaaaggagaaaacaacttacggccaaggaaaaaaggaatgtctttaaaatcagatgctgtgctgtcaaaatcaaaacgaagaaaaaaacctgatagggtttttgaaaatcaagaggtccaagctattggtggcaaagatgtttctctgtttctcttcagagctttggggaaaattctatattgtaaaagagcatctttaacagaattagactcacctcggttgccctctcatttatcagaatatgaacgggatacattacttgttgaacctgaggaggtagtagaaatgtcacacatgcctggagacttatttaatttatatcttcaccaaaactacatagatttcttcatggaaattgatgatattgtgagagccagtgaatttctgagttttgcagatatcctcagtggtgactggaatacacgctctttactcagggaatatagcacatctatagctacgagaggtgtgatgcattccaacaaagcccgaggatatgctcattgccaaggaggaggatcaagttttcgacccttgcacaaacctcagtggtttctaataaataaaaagtatcgggaaaattgcctggcagcaaaagcactttttcctgacttctgcctaccagctttatgccgccaaactcagctattgccataccttgctctactaaccattccaatgagaaatcaagctcagatttcttttatccaagatattggaaggctccctctgaagcgacactttggaagattgaaaatggaagccctgactgacagggaacatggaatgatagaccctgacagcggagatgaagcccagcttaatggaggacattctgcagaggaatctctgggtgaacccactcaagccactgtgccggaaacctggtctcttcctttgagtcagaatagtgccagtgaactgcctgctagccagccccagcccttttcagcccaaggagacatggaagaaaacataataatagaagactacgagagtgatgggacatagaagccagcctgctaatcagattgctacttcacagcttcatttttgtttcattcagtggtacttcagca

SEQ ID NO: 173484 - DNA, 859 bp, Homo sapiens; identical to SEQ ID NO: 173465
  Payload ID: 14082
  Gene Symbol: RAD17
  Gene Name: RAD17 checkpoint clamp loader component
  ENST ID: ENST00000613281
  CDS Start-End: 352-859

SEQ ID NO: 173485 - DNA, 2117 bp, Homo sapiens
  Payload ID: 14082
  Gene Symbol: RAD17
  Gene Name: RAD17 checkpoint clamp loader component
  ENST ID: ENST00000621806
  CDS Start-End: 63-2108
gtgaattatagtttaatgtactgcaagtcctaaactacggatgggaactattacagtttataatgtcaaaaacttttcttagaccaaaggtatcttccacaaaggtaacagactgggttgacccatcatttgatgattttctagagtgtagtggcgtctctactattactgccacatcattaggtgtgaataactcaagtcatagaagaaaaaatgggccttctacattagaaagcagcagatttccagcgagaaaaagaggaaatctatcttccttagaacagatttatggtttagaaaattcaaaagaatatctgtctgaaaatgaaccatgggtggataaatataaaccagaaactcagcatgaacttgctgtgcataaaaagaaaattgaagaagtcgaaacctggttaaaagctcaagttttagaaaggcaaccaaaacagggtggatctattttattaataacaggtcctcctggatgtggaaagacaacgaccttaaaaatactatcaaaggagcatggtattcaagtacaagagtggattaatccagttttaccagacttccaaaaagatgatttcaaggggatgtttaatactgaatcaagcttccatatgtttccctatcagtctcagatagcagttttcaaagagtttctactaagagcgacaaagtataacaagttacaaatgcttggagatgatctgagaactgataagaagataattctggttgaagatttacctaaccagttttatcgggattctcatactttacatgaagttctaaggaagtatgtgaggattggtcgatgtcctcttatatttataatctcggacagtctcagtggagataataatcaaaggttattgtttcccaaagaaattcaggaagagtgttctatctcaaatattagtttcaaccctgtggcaccaacaattatgatgaaatttcttaatcgaatagtgactatagaagctaacaagaatggaggaaaaattactgtccctgacaaaacttctctagagttgctctgtcagggatgttctggtgatatcagaagtgcaataaacagcctccagttttcttcttcaaaaggagaaaacaacttacggccaaggaaaaaaggaatgtctttaaaatcagatgctgtgctgtcaaaatcaaaacgaagaaaaaaacctgatagggtttttgaaaatcaagaggtccaagctattggtggcaaagatgtttctctgtttctcttcagagctttggggaaaattctatattgtaaaagagcatctttaacagaattagactcacctcggttgccctctcatttatcagaatatgaacgggatacattacttgttgaacctgaggaggtagtagaaatgtcacacatgcctggagacttatttaatttatatcttcaccaaaactacatagatttcttcatggaaattgatgatattgtgagagccagtgaatttctgagttttgcagatatcctcagtggtgactggaatacacgctctttactcagggaatatagcacatctatagctacgagaggtgtgatgcattccaacaaagcccgaggatatgctcattgccaaggaggaggatcaagttttcgacccttgcacaaacctcagtggtttctaataaataaaaagtatcgggaaaattgcctggcagcaaaagcactttttcctgacttctgcctaccagctttatgccgccaaactcagctattgccataccttgctctactaaccattccaatgagaaatcaagctcagatttcttttatccaagatattggaaggctccctctgaagcgacactttggaagattgaaaatggaagccctgactgacagggaacatggaatgatagaccctgacagcggagatgaagcccagcttaatggaggacattctgcagaggaatctctgggtgaacccactcaagccactgtgccggaaacctggtctcttcctttgagtcagaatagtgccagtgaactgcctgctagccagccccagcccttttcagcccaaggagacatggaagaaaacataataatagaagactacgagagtgatgggacatagaagccagcc

SEQ ID NO: 173486 - DNA, 3057 bp, Homo sapiens
  Payload ID: 14082
  Gene Symbol: RAD17
  Gene Name: RAD17 checkpoint clamp loader component
  Uniprot ID: O75943
  ENST ID: ENST00000616488
  CDS Start-End: 538-2550
gaagattgagggtgcagagccctgtcctgcagcggggatttgcgagctcaacccggcaccccactgattacaggattacgttggacgaatatttgagcttagtattccctgttcactgtgtggggtggtggtgggtcggctaggaatagtcttgaaggtctacctctgacatctcatttcagtaacctcgcatcttcagggacagttatctgctttttaaaggagcaagtgaattcatggtattttacttttttgggaaatactggaaatgaagacctgcaactgtaatttgaaataaggaaaactttaattttcagtataaaaattgctcaaatagaattgcctgattttaatgacaaaagtatatgggagtccacatttatgtaagaaatgaaactataaaatgtataaataatttgcaaatcagaattgctgtcgaaagttttactataatgaaagatattttcatactctcaaaaatatagaggaaaggggccaagattatagtaccagtcacaatcttttgatgaggacgaaatgaatcaggtaacagactgggttgacccatcatttgatgattttctagagtgtagtggcgtctctactattactgccacatcattaggtgtgaataactcaagtcatagaagaaaaaatgggccttctacattagaaagcagcagatttccagcgagaaaaagaggaaatctatcttccttagaacagatttatggtttagaaaattcaaaagaatatctgtctgaaaatgaaccatgggtggataaatataaaccagaaactcagcatgaacttgctgtgcataaaaagaaaattgaagaagtcgaaacctggttaaaagctcaagttttagaaaggcaaccaaaacagggtggatctattttattaataacaggtcctcctggatgtggaaagacaacgaccttaaaaatactatcaaaggagcatggtattcaagtacaagagtggattaatccagttttaccagacttccaaaaagatgatttcaaggggatgtttaatactgaatcaagcttccatatgtttccctatcagtctcagatagcagttttcaaagagtttctactaagagcgacaaagtataacaagttacaaatgcttggagatgatctgagaactgataagaagataattctggttgaagatttacctaaccagttttatcgggattctcatactttacatgaagttctaaggaagtatgtgaggattggtcgatgtcctcttatatttataatctcggacagtctcagtggagataataatcaaaggttattgtttcccaaagaaattcaggaagagtgttctatctcaaatattagtttcaaccctgtggcaccaacaattatgatgaaatttcttaatcgaatagtgactatagaagctaacaagaatggaggaaaaattactgtccctgacaaaacttctctagagttgctctgtcagggatgttctggtgatatcagaagtgcaataaacagcctccagttttcttcttcaaaaggagaaaacaacttacggccaaggaaaaaaggaatgtctttaaaatcagatgctgtgctgtcaaaatcaaaacgaagaaaaaaacctgatagggtttttgaaaatcaagaggtccaagctattggtggcaaagatgtttctctgtttctcttcagagctttggggaaaattctatattgtaaaagagcatctttaacagaattagactcacctcggttgccctctcatttatcagaatatgaacgggatacattacttgttgaacctgaggaggtagtagaaatgtcacacatgcctggagacttatttaatttatatcttcaccaaaactacatagatttcttcatggaaattgatgatattgtgagagccagtgaatttctgagttttgcagatatcctcagtggtgactggaatacacgctctttactcagggaatatagcacatctatagctacgagaggtgtgatgcattccaacaaagcccgaggatatgctcattgccaaggaggaggatcaagttttcgacccttgcacaaacctcagtggtttctaataaataaaaagtatcgggaaaattgcctggcagcaaaagcactttttcctgacttctgcctaccagctttatgccgccaaactcagctattgccataccttgctctactaaccattccaatgagaaatcaagctcagatttcttttatccaagatattggaaggctccctctgaagcgacactttggaagattgaaaatggaagccctgactgacagggaacatggaatgatagaccctgacagcggagatgaagcccagcttaatggaggacattctgcagaggaatctctgggtgaacccactcaagccactgtgccggaaacctggtctcttcctttgagtcagaatagtgccagtgaactgcctgctagccagccccagcccttttcagcccaaggagacatggaagaaaacataataatagaagactacgagagtgatgggacatagaagccagcctgctaatcagattgctacttcacagcttcatttttgtttcattcagtggtacttcagcagagttaatatgcttttctgatgaattacacaacagtttgttaattcttcattcttgtagtatttcatcacaagaaacctactcttctgtcatcttgaagtaaatagaagatcaagccttcaaatctcttaattttttcggtatttattaaatctgtgagtggtttaaggagcggtcagtgtgtataaagtgtgtttgaacattatgccaaatatcaagatgtgaaggactaattcaggatgcaaaaacgttattggggggttgtaaatatcaactattcaacagtttaggatgcaattacgagtgtaaactgtgtgccttatttacactttattgtctcccgcttctcagatagttttgatgtgttgtacagtggaatatcttagatactttttggaaagtatttacataagttatatcacaattaaaatgttgaattt

SEQ ID NO: 173487 - DNA, 5886 bp, Homo sapiens
  Payload ID: 14083
  Gene Symbol: RAD18
  Gene Name: RAD18 E3 ubiquitin protein ligase
  Uniprot ID: Q9NS91
  ENST ID: ENST00000264926
  CDS Start-End: 118-1605
cccgcctctggcgcgtcgcgggctgctgacgtaatgcggtagcgcggggaatttcgagtggtgttggagcgccggaggctagtgggtggctgacccccagcatcctcgggagcgaccatggactccctggccgagtctcggtggcctccgggcctggcagtcatgaagacaatagatgatttgctgcggtgtggaatttgcttcgagtatttcaacattgcaatgataatacctcagtgttcacataactactgctctctctgtataagaaaatttctgtcctataaaactcagtgtccaacttgctgtgtgactgtcacagagccggatctgaaaaataaccgcatattagatgaactggtaaaaagcttgaattttgcacggaatcatctgctgcagtttgctttagagtcaccagccaaatctcctgcttcttcctcttcaaagaatcttgctgtcaaagtatatactcctgtagcctccagacagtctttaaagcaggggagcaggttaatggataatttcttgatcagagaaatgagtggttctacatcagagttgttgataaaagaaaataaaagcaaattcagccctcaaaaagaggcgagccctgctgcaaagaccaaagagacacgttctgtagaagagatcgctccagatccctcagaggctaagcgtcctgagccaccctcgacatccactttgaaacaagttactaaagtggattgtcctgtttgcggggttaacattccagaaagtcacattaataagcatttagacagctgtttatcacgcgaagagaagaaggaaagcctcagaagttctgttcacaaaaggaagccgctgcccaaaactgtatataatttgctctctgatcgtgatttaaagaaaaagctaaaagagcatggattatctattcaaggaaataaacaacagctcattaaaaggcaccaagaatttgtacacatgtacaatgcccaatgcgatgctttgcatcctaaatcagctgctgaaatagttcgagaaatcgaaaatatagagaagactaggatgcgtcttgaagctagtaaactcaatgaaagtgtaatggtttttacaaaggaccaaacagaaaaggaaatagatgaaatccacagtaaatatcgtaaaaaacataagagtgaatttcagcttctggtggatcaggctagaaaaggatacaagaaaattgctggaatgtcacaaaaaacagtaacaataacaaaagaagatgaatctacagaaaagctatcttctgtatgcatgggacaggaagataatatgacctcagtaacaaaccacttttctcaatcaaagctggactccccagaggaattggaacctgacagagaagaggattcttctagctgtattgatattcaagaagttctttcttcatcagaatcagattcatgcaatagttccagttcagacatcataagagatcttttagaagaagaggaagcctgggaagcatcacataaaaacgatcttcaagacacagaaataagtccaagacagaatcgccgcacaagagccgctgaaagtgctgagattgaaccaagaaacaagcgtaataggaattaatgtgggcttttgctgacttttcaaatgcattgattagaataccgtacttttggttgccacagatagattttctatttataaatgcccaaggaaagatgctaaattctaaatattacggttagctgatattcattcttttctgcttttccagaggggaaaaatgttacaaaatatccttacttggtcagttgcctcctgcctctaaaacatctctctctaaaaatactgacatttcacacaggtaccagctttgcagaggaggtagactctttggcactttggcacagggatttggtttggtttggtttggtttgataattaaatttcagaatgtccttaggccattctccttctcttccatggagaatccagcctcacaaaaggattctttcaacttctttattgcaagaaacagttgagttaaatgtttgtttttggaaaggcgggatgtcagttcacatccttggtgtgtgtaagtaccgatgcacgccaccaccatgcctgtgttacagcagctccatgatggttgttgcccgaggttaatgtagttgtttgttagacctgtgtcttacacatttctcagagtaggatattagtattataatttaaagctacgacagtcacaaagtcacaataacttagaaacattgcgcatattcttctgaaatagcacttaaaaatgattagtgtcagtattttttcacttgggtcaatcaaatctgtaacactgaatccaagctattaaacaaaaagtatgcaatgaatgaattttgtaaatgaatagagagtatcagtttacaataatgttcttaaaacagtatcctctggatagttgagtatgggttagaaatcattgaaatggattggtcagaaattgctatctgtgtaaaatgtctaccagtagccagatgcttccagagttcttaatgcctctctggcatttcagagccagcatcccccaactcccacccctctgccatcacccaacccaaacacatcagctttcaaatgagatgatagtaaatgcggcaatgttaagacaagaaatttatgatttgccagattcaacatttatgacctccccttccaaagactgtctccgttgaccttgtctttttggtatgccttggggtttctgataatgtgtggagtctcattatggctgagagtttagtgttttcacagtgaagtgcagacatttgatttctttatgagttccctgtgttagaaatggctatagaaaaatttgtcataataatttcatttgcatgaaatcctgaggggtgcattaaggaaactaaaagcaccacttaccaaatctatcggcagaactgatgtgaggtaagtgagcatgtcaaacaaaataggagctcacatggatatatttatgtcactgagttgtcagaaattatgtcaaaatgaaaactgtttgtttcatgacaaattatatagtctataaattaaactggaagtaattattactttaattgcagcaaaaggagtttgtgagggagcggtgagacccaagattgggaaagtaggcacatgagttcattcagcaaatatttggttatctatgtctgtcactgtgctgacactgggaatacaaaggtggccaaagatcatctagaacaatggttcccagtggggtgggcagaaagattttgccccccaggagacagctggcaatgtgtggagacacttttggaggtggagggtggtgaggggtactaccagtatcaatgggtggaggccagggatgaggctaaacacccaaccctcatggattagtttgccagggctgccgtcacaagatactgcagacggggaagcttacacaacagaaatgtgtattctcagaattctggaggctggaagtccaagatcagtagggtttcttcttcggcctctctccttggcttccactcatggtgtccttgcatggtcttttctctgtgtgcacatgactgtgcaggactggtgtcccgatttcttgtagggacagcagtcattggatcagggcccatgcgtatggcctcattttacttcagttacctcttttttagatagagggccctatctctaaatactgtcacattctgagataccggcagttaagacttccaacatatttagtggtaggggttaaggggcacgctttagactacaacactccacagtaaagaattatccagtctaacatgtcagttgtgccaagactgagaaacctgtaatgtaaaggaactcccaagtctacctgaaaagtaaggtctaaagagcatttattgagcactatctgttagcacttagcatatgtttaatattcatacattgaaagaaatgtatgttcatatccatctgacaaagattaaggaacttagagtaagtaatagatccaaaattgaaactgataaacttctggttctaaaattcaccttttagtgaaaatacagtttctcaccaaacttacagtaattcagagttattaactctttctacctcctcactcccctcaaagttataacatctcccatcaacatcagctcagaatggcagtgatgcttatggtttgtgggggtgcaggtgagctgctggatgcactttagatggcctagtatgccaggccgtcctttcatcctctactctcgtctttctttttcgacctcatgttgaggattactggtctagttgaaaaaagaattcatacacataagaccatgtatataatagagggaggtatgcctttaaaaacaaaattacatggtaaagactgatgtgtcaacagggatagacaacatagagaaggctagaactgtttctggaaaaaaacccaaaaacaatggatttcaaacttcttagcatccgataaaagaaagtagcaattattcaaatgagaaacacttctgtctgttatgtacatattatgaaagtatgaacataagagggaaaaccacaaccattacattttttaccatttcagtaatttttttttggtttttagtctgtttttagacatccttaagaacaactatctgaggctgtaaacaagtatttacattaacacccatgatactgactttatactccctacctgcattgagaccttaaagggggcatttctccattccttctgtgtatttctgggtatccccaggttcagatattcagaatacagatacaagtccatgcttgcatatgttgctgctccccccgacagacttctaccagcatctgccctcctcaccgctgctctgtcacgtgcactgcggctggccctgctggaaagtcctaccttgcctaggacgccatccccgatatagccccaagatgcaaacctgccaagtgctagggcagccctgccttcctgtccatttcagtctcttggccttgctgtgttccaagtggaaatgggagtgtgctttcctggtttgctagtgtactatcacccggaccacagcgtcctgtgcaaaaatttgcttcctctctcttcccctttcactctttctcttttctcttccccacccccttttttttctctttccccttacctttctttcctttccactcttcctgtccttccttccttcaactattaggactatatgtcaagtaatgtgcaaaacaaagacagttcctgccctgatggagcttgtagatcagaagggaagatgagcattaagtaattatatagattaatgtacaactgtgatgagtgcaacaaaagagaggttcatggcactatcaaacatgcaatggacggattttgtttttgcctataaactcttgccatagaaagcttgaaaatcagtccagggggacagcattaatcaccatgttctttccttatccctgtcttccccaaaattcatgtgttgaaacttaacaagaggtgggaactttaggatgtgattaagtcgtgagggcacagctcttatagatggggtcacggtccttctaaaagggcttgagggagtggttttgtttccttccatcccttccgccacatgaggacacagtcttcgttccctctggaggactcagcaacaacacaccatcttggaagcagagagcagtcctcaccagacacggaatctgccagtgccttgatcttggacttaccagcctccatacctgtgagaaataaatttctattgtctataagttacccagactgtggtattttcttctggcagcacaaatggacacccagaaactgatgcatgcatcttctgactcctttgattccaaaatacaaaatattagaataaagttatggaagtc

SEQ ID NO: 173488 - DNA, 516 bp, Homo sapiens
  Payload ID: 14083
  Gene Symbol: RAD18
  Gene Name: RAD18 E3 ubiquitin protein ligase
  ENST ID: ENST00000429790
  CDS Start-End: 1-240
ctatcttctgtatgcatgggacaggaagataatatgacctcagtaacaaaccacttttctcaatcaaagctggactccccagaggaattggaacctgacagagaagaggattcttctagctgtattgatattcaagaagttctttcttcatcagaatcagattcatgcaatagttccagttcagacatcataagagatcttttagaagaagaggaagcctgggaagcatcacataagtgagttctcataatcatgaaataagcatgcactttgacctgagaaattatacttctatgcagctgattttcaaacaaaattatatttttgctttctggtttaaagaagtagtaatcctcatgcaaggtaaagattttcagtttactacttgtttctatatatttctgctaagaaatggaatcctatgtaataactgtagttatgtatcagatgttatttctgtatggataaattgttcttatgggcaattaatacagtcatgcatcacttaacaatggg

SEQ ID NO: 173489 - DNA, 563 bp, Homo sapiens
  Payload ID: 14083
  Gene Symbol: RAD18
  Gene Name: RAD18 E3 ubiquitin protein ligase
  ENST ID: ENST00000418463
  CDS Start-End: 86-247
aatgcggtagcgcggggaatttcgagtggtgttggagcgccggaggctagtgggtggctgacccccagcatcctcgggagcgaccatggactccctggccgagtctcggtggcctccgggcctggcagtcatgaagacaatagatgatttgctgcggtgtggaatttgcttcgagtatttcaacattgcaatgataatacctcagtgttcacataactactgtcacagagccggatctgaaaaataaccgcatattagatgaactggtaaaaagcttgaattttgcacggaatcatctgctgcagtttgctttagagtcaccagccaaatctcctgcttcttcctcttcaaagaatcttgctgtcaaagtatatactcctgtagcctccagacagtctttaaagcaggggagcaggttaatggataatttcttgatcagagaaatgagtggttctacatcagagttgttgataaaagaaaataaaagcaaattcagccctcaaaaagaggcgagccctgctgcaaagaccaaagagacacgttctgtagaagagatcgctcca

SEQ ID NO: 173490 - DNA, 582 bp, Homo sapiens
  Payload ID: 14083
  Gene Symbol: RAD18
  Gene Name: RAD18 E3 ubiquitin protein ligase
  ENST ID: ENST00000421052
  CDS Start-End: 86-466
aatgcggtagcgcggggaatttcgagtggtgttggagcgccggaggctagtgggtggctgacccccagcatcctcgggagcgaccatggactccctggccgagtctcggtggcctccgggcctggcagtcatgaagacaatagatgatttgctgcggtgtggaatttgcttcgagtatttcaacattgcaatgataatacctcagtgttcacataactactgctctctctgtataagaaaatttctgtcctataaaactcagtgtccaacttgctgtgtgactgtcacagagccggatctgaaaaataaccgcatattagatgaactggaatcatctgctgcagtttgctttagagtcaccagccaaatctcctgcttcttcctcttcaaagaatcttgctgtcaaagtatatactcctgtagcctccagacagtctttaaagcaggggagcaggttaatggataatttcttgatcagagaaatgagtggttctacatcagagttgttgataaaagaaaataaaagcaaattcagccctcaaaaagaggcgagccctgctgcaaagaccaaagagacacgtt

SEQ ID NO: 173491 - DNA, 1550 bp, Homo sapiens
  Payload ID: 14083
  Gene Symbol: RAD18
  Gene Name: RAD18 E3 ubiquitin protein ligase
  ENST ID: ENST00000415439
  CDS Start-End: 47-979
ccggaggctagtgggtggctgacccccagcatcctcgggagcgaccatggactccctggccgagtctcggtggcctccgggcctggcagtcatgaagacaatagatgatttgctgcggtgtggaatttgcttcgagtatttcaacattgcaatgataatacctcagtgttcacataactactgctctctctgtataagaaaatttctgtcctataaaactcagtgtccaacttgctgtgtgactgtcacagagccggatctgaaaaataaccgcatattagatgaactggtaaaaagcttgaattttgcacggaatcatctgctgcagtttgctttagagtcaccagccaaatctcctgcttcttcctcttcaaagaatcttgctgtcaaagtatatactcctgtagcctccagacagtctttaaagcaggggagcaggttaatggataatttcttgatcagagaaatgagtggttctacatcagagttgttgataaaagaaaataaaagcaaattcagccctcaaaaagaggcgagccctgctgcaaagaccaaagagacacgttctgtagaagagatcgctccagatccctcagaggctaagcgtcctgagccaccctcgacatccactttgaaacaagttactaaagtggattgtcctgtttgcggggttaacattccagaaagtcacattaataagcatttagacagctgtttatcacgcgaagagaagaaggaaagcctcagaagttctgttcacaaaaggaagccgctgcccaaaactgtatataatttgctctctgatcgtgatttaaagaaaaagctaaaagagcatggattatctattcaaggaaataaacaacagctcattaaaaggcaccaagaatttgtacacatgtacaatgcccaatgcgatgctttgcatcctaaatcaggtaatggtttttacaaaggaccaaacagaaaaggaaatagatgaaatccacagtaaatatcgtaaaaaacataagagtgaatttcagcttctggtggatcaggctagaaaaggatacaagaaaattgctggaatgtcacaaaaaacagtaacaataacaaaagaagatgaatctacagaaaagctatcttctgtatgcatgggacaggaagataatatgacctcagtaacaaaccacttttctcaatcaaagctggactccccagaggaattggaacctgacagagaagaggattcttctagctgtattgatattcaagaagttctttcttcatcagaatcagattcatgcaatagttccagttcagacatcataagagatcttttagaagaagaggaagcctgggaagcatcacataaaaacgatcttcaagacacagaaataagtccaagacagaatcgccgcacaagagccgctgaaagtgctgagattgaaccaagaaacaagcgtaataggaattaatgtgggcttttgctgacttttcaaatgcattgattagaataccgtacttttggttgccacagatagattttctatttataaatgcccaaggaa

SEQ ID NO: 173492 - DNA, 557 bp, Homo sapiens
  Payload ID: 14083
  Gene Symbol: RAD18
  Gene Name: RAD18 E3 ubiquitin protein ligase
  ENST ID: ENST00000427329
  CDS Start-End: 1-394
tgctggaatgtcacaaaaaacagtaacaataacaaaagaagatgaatctacagaaaagctatcttctgtatgcatgggacaggaagataatatgacctcagtaacaaaccacttttctcaatcaaagctggactccccagaggaattggaacctgacagagaagaggattcttctagctgtattgatattcaagaagttctttcttcatcagaatcagattcatgcaatagttccagttcagacatcataagagatcttttagaagaagaggaagcctgggaagcatcacataagctctacttctccaaaagacgttacatattccaaggatcctgcgtctcaacaaaccctttcttctgcaaaagaacagcctgcttttattccaagctctgagattccttataggaagctgtttctctccagttatgccatgttatgccttaacctgggccaacagtgcctacacacggagaatgcaatggttgaggccaattcattaacagggattgtttagccacatccgttgttaattgacaacatgtctatggaattagaa

SEQ ID NO: 173493 - DNA, 581 bp, Homo sapiens
  Payload ID: 14083
  Gene Symbol: RAD18
  Gene Name: RAD18 E3 ubiquitin protein ligase
  ENST ID: ENST00000413832
  CDS Start-End: 307-581
taaaaacttctgttcagagcaaggacggatagtcactgcgattagggtgggcgacccggaggggggtcatgagcctggaccttgacagatctggtgaggtaagtgcggcagaagcctggcgcatgcgcagtacaagcccttaagcggcgccccgcccacatactactacaacttccggcaggctccgcgcccgcctctggcgcgtcgcgggctgctgacgtaatgcggtagcgcggggaatttcgagtggtgttggagcgccggaggctagtgggtggctgacccccagcatcctcgggagcgaccatggactccctggccgagtctcggtggcctccgggcctggcagtcatgaagacaatagatgatttgctgcggtgtggaatttgcttcgagtatttcaacattgcaatgataatacctcagtgttcacataactactgctctctctgtataagaaaatttctgtcctataaaactcagtgtccaacttgctgtgtgactgtcacagagccggatctgaaaaataaccgcatattagatgaactggtaaaaagcttgaattttgcacggaatcatct

SEQ ID NO: 173494 - DNA, 3749 bp, Homo sapiens
  Payload ID: 14084
  Gene Symbol: RAD21
  Gene Name: RAD21 cohesin complex component
  Uniprot ID: O60216
  ENST ID: ENST00000297338
  CDS Start-End: 289-2184
aggcgcacaggtaccattttgaccgtaaacatcctgccgatttgaaccgaggatttgggcggcaggaagagccgcggcgtaacggcagccatcttgtttgtttgagtgaatcggaaaggaggcgccggctgtggcggcggcgggagctgctcggaagctacacctcgcaagggctcccccctttccccaccccctcccccgacccttttcccctccccgggccacccagcccgcccaactcccagcggagagcaaggttttcttctgttttcatagccagccagaacaatgttctacgcacattttgttctcagtaaaagagggcctctggccaaaatttggctagcggcccattgggataagaagctaaccaaagcccatgtgttcgagtgtaatttagagagcagcgtggagagtatcatctcaccaaaggtgaaaatggcattacggacatcaggacatctcttactgggagtagttcgaatctatcacaggaaagccaaataccttcttgcagactgtaatgaagcattcattaagataaagatggcttttcggccaggtgtggttgacctgcctgaggaaaatcgggaagcagcttataatgccattactttacctgaagaatttcatgactttgatcagccactgcctgacttagatgacatcgatgtggcccagcagttcagcttgaatcagagtagagtggaagagataaccatgagagaagaagttgggaacatcagtattttacaagaaaatgattttggtgattttggaatggatgatcgtgagataatgagagaaggcagtgcttttgaggatgacgacatgttagtaagcactactacttctaacctcctattagagtctgaacagagcaccagcaatctgaatgagaaaattaaccatttagaatatgaagatcaatataaggatgataattttggagaaggaaatgatggtggaatattagatgacaaacttattagtaataatgatggcggtatctttgatgatccccctgccctctctgaggcaggggtgatgttgccagagcagcctgcacatgacgatatggatgaggatgataatgtatcaatgggtgggcctgatagtcctgattcagtggatcccgttgaaccaatgccaaccatgactgatcaaacaacacttgttccaaatgaggaagaagcatttgcattggagcctattgatataactgttaaagaaacaaaagccaagaggaagaggaagctaattgttgacagtgtcaaagagttggatagcaagacaattagagcccaacttagtgattattcagatattgttactactttggatctggcaccgcccaccaagaaattgatgatgtggaaagagacaggaggagtagaaaaactgttttctttacctgctcagcctttgtggaataacagactactgaagctctttacacgctgtcttacaccgcttgtaccagaagaccttagaaaaaggaggaaaggaggagaggcagataatttggatgaattcctcaaagaatttgaaaatccagaggttcctagagaggaccagcaacagcagcatcagcagcgtgatgttatcgatgagcccattattgaagagccaagccgcctccaggagtcagtgatggaggccagcagaacaaacatagatgagtcagctatgcctccaccaccacctcagggagttaagcgaaaagctggacaaattgacccagagcctgtgatgcctcctcagcaggtagagcagatggaaataccacctgtagagcttcccccagaagaacctccaaatatctgtcagctaataccagagttagaacttctgccagaaaaagagaaggagaaagagaaggaaaaagaagatgatgaagaggaagaggatgaagatgcatcagggggcgatcaagatcaggaagaaagaagatggaacaaaaggactcagcagatgcttcatggtcttcagcgtgctcttgctaaaactggagctgaatctatcagtttgcttgagttatgtcgaaatacgaacagaaaacaagctgccgcaaagttctacagcttcttggttcttaaaaagcagcaagctattgagctgacacaggaagaaccgtacagtgacatcatcgcaacacctggaccaaggttccatattatataaggagctagaagcattatagctagtgtttgattcactagtgcttacaaattgcccccatgtgtaggggacacagaaccctttgagaaaacttagatttttgtctgtacaaagtctttgcctttttccttcttcatttttttccagtacattaaatttgtcaatttcatctttgagggaaactgattagatgggttgtgtttgtgttctgatggagaaaacagcaccccaaggactcagaagatgattttaacagttcagaacagatgtgtgcaatattggtgcatgtaataatgttgagtggcagtcaaaagtcatgatttttatcttagttcttcattactgcattgaaaaggaaaacctgtctgagaaaatgcctgacagtttaatttaaaactatggtgtaagtctttgacaagaaaaaaaaacaaacaaacacttctttccatcagtaacactggcaatcttcctgttaaccactctccttagggatggtatctgaaacaacaatggtcaccctcttgagattcgttttaagtgtaattccataatgagcagaggtgtacgcgaaattgtgttatgactgatagccttcagctacaaaaagataggactgacctggtttaaagtgttctattttgtaaatcattccatttgagtctttctgatgaacttggctatactgaaatctgttattttagtgaggctccaaaatgagcaaagctaggcctgattagagtagagtgactattaaaaaacataactttctaggagctataaatcaaagttttaaaaagatgtttggatatatttgagtattccgatcatgaaaacagaaattgccctgcctactacaaggacagactgatgggaaattatgcacctggtcaacttagcttttaagcagacgatgctgtaaaaactaacggcttctctgatatttattgtaagttttagtactgatctccttttccagtgctgcacactcctggtttggaactttaatagcgttgcaacgaaatcctatatccagtttcctgtaatttaattgaagaaaaatacatccaaataaagactttattattaacagaccagatagcatcagaaatcatgtgactgttatgattatcagaatgtcttaactttttagggcaaagttaacactgaaagttctagcttaagtgttgaaacttttgtgggaaaaaaaaatcacttttgaaactcagacttcagtgtatacccaataatttaaaattatgtgaaatgttttaaatttgtgaactcgtaattactgttttaatgattcagtttcttcagagtggtaattgtataaaattgctattgcagctttacattcaatatgatgtgcctgtaaaccaaggagttttccccgtttgtaaaaagacattgtagataattgaatgtttgattttagaaaggtcattagtttcttgttacacattttgttagtctggtttttgttgcttatcgggtttaatattgttcttgaaaatagttgatgctatgttatgtataacttttctaataaaagttgtgttataagctgt

SEQ ID NO: 173495 - DNA, 874 bp, Homo sapiens
  Payload ID: 14084
  Gene Symbol: RAD21
  Gene Name: RAD21 cohesin complex component
  ENST ID: ENST00000517485
  CDS Start-End: 199-874
actcctgggggcgggagggcgagggagaaggcagccctcgccgcgcccacgcgtgctgccaccctcccggcgcccaagcggcggcgccacccgcccagcccccttcgccccgggcccgccctcggcccggacccatgcagcttgggcccgcatcatcgcttgttcggttttcttctgttttcatagccagccagaacaatgttctacgcacattttgttctcagtaaaagagggcctctggccaaaatttggctagcggcccattgggataagaagctaaccaaagcccatgtgttcgagtgtaatttagagagcagcgtggagagtatcatctcaccaaaggtgaaaatggcattacggacatcaggacatctcttactgggagtagttcgaatctatcacaggaaagccaaataccttcttgcagactgtaatgaagcattcattaagataaagatggcttttcggccaggtgtggttgacctgcctgaggaaaatcgggaagcagcttataatgccattactttacctgaagaatttcatgactttgatcagccactgcctgacttagatgacatcgatgtggcccagcagttcagcttgaatcagagtagagtggaagagataaccatgagagaagaagttgggaacatcagtattttacaagaaaatgattttggtgattttggaatggatgatcgtgagataatgagagaaggcagtgcttttgaggatgacgacatgttagtaagcactactacttctaacctcctattagagtctgaacagagcaccagcaatctgaatgagaaaattaaccatttagaatatgaagatcaatataaggatgataattttggagaaggaaatgatg

SEQ ID NO: 173496 - DNA, 896 bp, Homo sapiens
  Payload ID: 14084
  Gene Symbol: RAD21
  Gene Name: RAD21 cohesin complex component
  ENST ID: ENST00000518055
  CDS Start-End: 200-730
tgagtaaatctttatggagctaaaattttatctggccttcttcattaaagaaagcattatgtatgtcttagtgtactagtttaaaaaataaatggttctataatactgttcaaaactgtatgacctatgttttctcttcatatgaccaattgcagatgagcccattattgaagagccaagccgcctccaggagtcagtgatggaggccagcagaacaaacatagatgagtcagctatgcctccaccaccacctcagggagttaagcgaaaagctggacaaattgacccagagcctgtgatgcctcctcagcaggtagagcagatggaaataccacctgtagagcttcccccagaagaacctccaaatatctgtcagctaataccagagttagaacttctgccagaaaaagagaaggagaaagagaaggaaaaagaagatgatgaagaggaagaggatgaagatgcatcagggggcgatcaagatcaggaagaaagaagatggaacaaaaggactcagcagatgcttcatggtcttcagcgtgctcttgctaaaactggagctgaatctatcagtttgcttgagttatgtcgaaatacgaacagaaaacaagctgccgcaaagttctacagcttcttggttcttaaaaagcagcaagctattgagctgacacaggaagaaccgtacagtgacatcatcgcaacacctggaccaaggttccatattatataaggagctagaagcattatagctagtgtttgattcactagtgcttacaaattgcccccatgtgtaggggacacagaaccctttgagaaaacttagatttttgtctgtacaaagtctttgcctttttccttcttcatttttttccagtacattaaatttgtcaatttca

SEQ ID NO: 173497 - DNA, 548 bp, Homo sapiens
  Payload ID: 14084
  Gene Symbol: RAD21
  Gene Name: RAD21 cohesin complex component
  ENST ID: ENST00000522699
  CDS Start-End: 188-548
aacaaatgattctgatccattctgagatctacaaaggctgttaccctgcaggtccatctcacgtcccccaggaggccggggaaaccctgggctgcggagggaggggaggaggtttgaacgagcccgctctggggaccgggccgcctactccgcgggttttcttctgttttcatagccagccagaacaatgttctacgcacattttgttctcagtaaaagagggcctctggccaaaatttggctagcggcccattgggataagaagctaaccaaagcccatgtgttcgagtgtaatttagagagcagcgtggagagtatcatctcaccaaaggtgaaaatggcattacggacatcaggacatctcttactgggagtagttcgaatctatcacaggaaagccaaataccttcttgcagactgtaatgaagcattcattaagataaagatggcttttcggccaggtgtggttgacctgcctgaggaaaatcgggaagcagcttataatgccattactttacctgaagaatttcatgactttgatcagccac

SEQ ID NO: 173498 - DNA, 2506 bp, Homo sapiens
  Payload ID: 14084
  Gene Symbol: RAD21
  Gene Name: RAD21 cohesin complex component
  ENST ID: ENST00000523986
  CDS Start-End: 1504-1911
ttgagtaaatctttatggagctaaaattttatctggccttcttcattaaagaaagcattatgtatgtcttagtgtactagtttaaaaaataaatggttctataatactgttcaaaactgtatgacctatgttttctcttcatatgaccaattgcagatgagcccattattgaagagccaagccgcctccaggagtcagtgatggaggccagcagaacaaacatagatgagtcagctatgcctccaccaccacctcagggagttaagcgaaaagctggacaaattgacccagagcctgtgatgcctgtaagtaagcaaatctatccattaagtcatttgaaggtattcatacagtcagtagcaagtggtatttagggaggccttttaaagtatcttggttttgacagaaaatggtaaggaatgagtccagaggaagaagagcaacaggatatagacagtccactcggagtgagagaatatgttctgggagtcggtgcagtctttcctgactctttttgaatagtattgctttagagtgctccagagtgagcatccttgactctgaagttggttctgatttattatttggcaaacattcctgcacaccttcagtactaggcagttttaggtcatcttattaagtaatcagaataaacttcaaatacctgagaaaatgtaaagcagtatctgtctgcttcattcaaactttgactaccattgagttcagctaggataggaaagctaagcaagtatgaaggaggaaatagtagggtttggtttagggctttccaatcttaagtccatagaataaatgaatttgtgcaaagggaggcttttagataaccttaggcttcttgttcagcctccatcaagaatactctgccaattttaagaactagttttctgtgccctctggtggtaagagttgtcaataagagcatttttctgtatgagctcaggaataggaacacagtaatgagtaggtgactttcataaccaccctccttctggtaattctttagtttcttttaaagactttggttttaatgttcttaactctttctgtaaagcctgagagaagatataggaagtggacccagaaaagcaatgtcctcactcctattatttgctgccgtgagacattcaagactctcagagagaaagcttatgatttataagttacaatataataaccttacagaagctttagtagttaaaaagcatttgactcctaaaaagtaagtatgaaaatgaaacatggtttaggataagcagtcagtttcttttgtaagctacttcaatgtagttttataaaaaatcaaaaaagatatatactgtaataaatttttccttgtggggaagtatagagatataatctcagtatttctttttgactagaaaacttcagccactgtgtattttcatatttaaaataagctactttaaaagcatatatcttaaattgtcttatttgtattgctttaagcctcagcaggtagagcagatggaaataccacctgtagagcttcccccagaagaacctccaaatatctgtcagctaataccagagttagaacttctgccagaaaaagagaaggagaaagagaaggaaaaagaagatgatgaagaggaagaggatgaagatgcatcagggggcgatcaagatcaggaagaaagaagatggaacaaaaggactcagcagatgcttcatggtcttcagcgtgctcttgctaaaactggagctgaatctatcagtttgcttgagttatgtcgaaatacgaacagaaaacaagctgccgcaaagttctacagcttcttggttcttaaaaagcagcaagctattgagctgacacaggaagaaccgtacagtgacatcatcgcaacacctggaccaaggttccatattatataaggagctagaagcattatagctagtgtttgattcactagtgcttacaaattgcccccatgtgtaggggacacagaaccctttgagaaaacttagatttttgtctgtacaaagtctttgcctttttccttcttcatttttttccagtacattaaatttgtcaatttcatctttgagggaaactgattagatgggttgtgtttgtgttctgatggagaaaacagcaccccaaggactcagaagatgattttaacagttcagaacagatgtgtgcaatattggtgcatgtaataatgttgagtggcagtcaaaagtcatgatttttatcttagttcttcattactgcattgaaaaggaaaacctgtctgagaaaatgcctgacagtttaatttaaaactatggtgtaagtctttgacaagaaaaaaaaacaaacaaacacttctttccatcagtaacactggcaatcttcctgttaaccactctccttagggatggtatctgaaacaacaatggtcaccctcttgagattcgttttaagtgtaattccataatgagcagaggtgtacgcgaaattgtgttatgactgatagccttcagc

SEQ ID NO: 173499 - DNA, 831 bp, Homo sapiens
  Payload ID: 14084
  Gene Symbol: RAD21
  Gene Name: RAD21 cohesin complex component
  ENST ID: ENST00000520992
  CDS Start-End: 148-831
tcgccccgggcccgccctcggcccggacccatgcagcttgggcccgcatcatcgcttgttcggtaacaaatgattctgatccattctgagatctacaaaggctgttaccctgcaggttttcttctgttttcatagccagccagaacaatgttctacgcacattttgttctcagtaaaagagggcctctggccaaaatttggctagcggcccattgggataagaagctaaccaaagcccatgtgttcgagtgtaatttagagagcagcgtggagagtatcatctcaccaaaggtgaaaatggcattacggacatcaggacatctcttactgggagtagttcgaatctatcacaggaaagccaaataccttcttgcagactgtaatgaagcattcattaagataaagatggcttttcggccaggtgtggttgacctgcctgaggaaaatcgggaagcagcttataatgccattactttacctgaagaatttcatgactttgatcagccactgcctgacttagatgacatcgatgtggcccagcagttcagcttgaatcagagtagagtggaagagataaccatgagagaagaagttgggaacatcagtattttacaagaaaatgattttggtgattttggaatggatgatcgtgagataatgagagaaggcagtgcttttgaggatgacgacatgttagtaagcactactacttctaacctcctattagagtctgaacagagcaccagcaatctgaatgagaaaattaaccatttagaatatgaagatcaatataaggatgataattttggagaaggaaatgatggtggaata

SEQ ID NO: 173500 - DNA, 1003 bp, Homo sapiens
  Payload ID: 14084
  Gene Symbol: RAD21
  Gene Name: RAD21 cohesin complex component
  ENST ID: ENST00000517749
  CDS Start-End: 521-730
attaagagtctgccagaacattagtcatctagaaaatcatgttgcaatatttatgtatgtatatttagttgaaataaacagtatatttagtggtacagttgatttatatcctgaagttctttaagaggggccagtaaccaaaacctccatgatcagcagcagtccacagaccacatagtgtgtgtagatagcatccttatagcgcaatatagaagcatactttcagccaaatgtttgcttgcacatagaggactttgccttgtaatttaagaaaaacagactcttcagtttgtactctaaatgctaagtgattgctcagcagcattaagtacagttttctattagttcaaaatacacaatctcaaggtaatttaggagcttttaggagatgtagaaatacttcatttttcattggacttgttttgtcagctttttgggggtcatttttattcaggatgaagatgcatcagggggcgatcaagatcaggaagaaagaagatggaacaaaaggactcagcagatgcttcatggtcttcagcgtgctcttgctaaaactggagctgaatctatcagtttgcttgagttatgtcgaaatacgaacagaaaacaagctgccgcaaagttctacagcttcttggttcttaaaaagcagcaagctattgagctgacacaggaagaaccgtacagtgacatcatcgcaacacctggaccaaggttccatattatataaggagctagaagcattatagctagtgtttgattcactagtgcttacaaattgcccccatgtgtaggggacacagaaccctttgagaaaacttagatttttgtctgtacaaagtctttgcctttttccttcttcatttttttccagtacattaaatttgtcaatttcatctttgagggaaactgattagatgggttgtgtttgtgttctgatggagaaaacagcaccccaaggactcagaagatgattttaacagttcagaacagatgtgtgcaa

SEQ ID NO: 173501 - DNA, 515 bp, Homo sapiens
  Payload ID: 14084
  Gene Symbol: RAD21
  Gene Name: RAD21 cohesin complex component
  ENST ID: ENST00000519837
  CDS Start-End: 144-515
aacaaatgattctgatccattctgagatctacaaaggctgttaccctgcaggtccatctcacgtcccccaggaggccggggaaaccctgggctgcggagggaggggaggaggttttcttctgttttcatagccagccagaacaatgttctacgcacattttgttctcagtaaaagagggcctctggccaaaatttggctagcggcccattgggataagaagctaaccaaagcccatgtgttcgagtgtaatttagagagcagcgtggagagtatcatctcaccaaaggtgaaaatggcattacggacatcaggacatctcttactgggagtagttcgaatctatcacaggaaagccaaataccttcttgcagactgtaatgaagcattcattaagataaagatggcttttcggccaggtgtggttgacctgcctgaggaaaatcgggaagcagcttataatgccattactttacctgaagaatttcatgactttgatcagccactgcctgactta

SEQ ID NO: 173502 - DNA, 492 bp, Homo sapiens
  Payload ID: 14085
  Gene Symbol: RAD21L1
  Gene Name: RAD21 cohesin complex component like 1
  ENST ID: ENST00000246108
  CDS Start-End: 297-492
ttgaaagtagggcgcagcctgagaggccggccggaccccgagtgctgtaggcgggctgggagatgggggccgccgccacccacattcccacacgcacccggcgccggcgcctcacgccgtgttagctcgcggcgccaagcccggagggtcccgcctgaggaagaaaggtcgtcgcccgcagcccagctggggctggaggcgcgacccggggtctcctcgcccgcacgcggaagaaaatgggcgctgtggcctcagtttccctcttttgttaaatacaagtaaggaacacaggcaacatgttctacacacatgtgcttatgagtaaacgagggccattggccaaaatatggcttgcagctcactgggagaagaaactcacaaaggcccatgtatttgaatgtaatctagagataaccattgaaaaaattctttcacccaaggtgaaaatagcacttcgaacttcaggacaccttcttttgggagttgttcgaa

SEQ ID NO: 173503 - DNA, 1707 bp, Homo sapiens
  Payload ID: 14085
  Gene Symbol: RAD21L1
  Gene Name: RAD21 cohesin complex component like 1
  Uniprot ID: Q9H4I0
  ENST ID: ENST00000402452
  CDS Start-End: 118-1683
cggcgccaagaacccggccaagctgacttggcgactcctcgcagcccctgctctggcacgccacacctcagacgaggctttgaaatttgttaaatacaagtaaggaacacaggcaacatgttctacacacatgtgcttatgagtaaacgagggccattggccaaaatatggcttgcagctcactgggagaagaaactcacaaaggcccatgtatttgaatgtaatctagagataaccattgaaaaaattctttcacccaaggtgaaaatagcacttcgaacttcaggacaccttcttttgggagttgttcgaatctataacaggaaggcaaaatatcttttggcagattgcagtgaagcatttcttaaaatgaagatgacattttgcccaggactggttgaccttccaaaagagaattttgaagcatcttacaatgctatcacattgccagaagaatttcatgattttgacacccaaaatatgaatgctattgatgtttcagaacactttactcagaaccaaagcagaccagaagaaatcactcttagagaaaattttgacaatgatctaattttccaagctgagagctttggggaggaatctgaaattctcagaagacatagcttctttgatgacaacatattactgaattccagtggtcctttaattgaacatagttctggaagcctcactggagaacgatctctattctatgacagtggagatgggtttggagatgaaggagctgcaggagaaatgattgacaatctattgcaagatgatcagaatatcctgttagaagacatgcatttgaacagagaaatttccctgccttctgagcctcccaatagtttagcagttgaaccagataactcagagtgtatatgtgtacctgaaaatgaaaaaatgaatgaaacaatattattatcaactgaagaggaaggatttacccttgatccaattgatatttcagacattgctgagaaaaggaaaggcaaaaagaggagattgctcatagatcctatcaaggagctcagtagcaaagttatacataaacagcttacttcctttgcggacacactcatggttttggaacttgcacctcctacccaaagattgatgatgtggaagaagaggggaggagtgcatacacttctgtcaactgctgcccaggatttgattcatgctgaactgaaaatgttgtttacaaaatgctttctgtcctctggctttaaacttggaagaaaaatgatacagaaggagtcagtaagggaagaagtgggaaaccaaaatatagtagagacatccatgatgcaagagccaaattaccagcaagagttaagtaaaccccaaacttggaaggatgtgattggtggatctcagcatagctctcatgaggataccaataaaaatattaactctgaggagtcattgagcaatgaagaaaatattgagacagagagatggaatggaagaatacttcagatgttaaatcgtttacgggtcgctgatcagggccaggcggctgcagcagcgactgcagaggcgctgcgccaagccgggccggagtggtgcgagccggcggggctgcggagggccagtggactcagcccccgggataccgcccatcccaccccttactcggacccacagcctcatggccatgtccctgccaggaagtagacggacctctgctggatcacgcag

SEQ ID NO: 173504 - DNA, 1808 bp, Homo sapiens
  Payload ID: 14085
  Gene Symbol: RAD21L1
  Gene Name: RAD21 cohesin complex component like 1
  Uniprot ID: Q9H4I0
  ENST ID: ENST00000409241
  CDS Start-End: 94-1764
acctcagacgaggctttgaaagtagggcgcagcctgagaggccggccggaccccgagtgcttttgttaaatacaagtaaggaacacaggcaacatgttctacacacatgtgcttatgagtaaacgagggccattggccaaaatatggcttgcagctcactgggagaagaaactcacaaaggcccatgtatttgaatgtaatctagagataaccattgaaaaaattctttcacccaaggtgaaaatagcacttcgaacttcaggacaccttcttttgggagttgttcgaatctataacaggaaggcaaaatatcttttggcagattgcagtgaagcatttcttaaaatgaagatgacattttgcccaggactggttgaccttccaaaagagaattttgaagcatcttacaatgctatcacattgccagaagaatttcatgattttgacacccaaaatatgaatgctattgatgtttcagaacactttactcagaaccaaagcagaccagaagaaatcactcttagagaaaattttgacaatgatctaattttccaagctgagagctttggggaggaatctgaaattctcagaagacatagcttctttgatgacaacatattactgaattccagtggtcctttaattgaacatagttctggaagcctcactggagaacgatctctattctatgacagtggagatgggtttggagatgaaggagctgcaggagaaatgattgacaatctattgcaagatgatcagaatatcctgttagaagacatgcatttgaacagagaaatttccctgccttctgagcctcccaatagtttagcagttgaaccagataactcagagtgtatatgtgtacctgaaaatgaaaaaatgaatgaaacaatattattatcaactgaagaggaaggatttacccttgatccaattgatatttcagacattgctgagaaaaggaaaggcaaaaagaggagattgctcatagatcctatcaaggagctcagtagcaaagttatacataaacagcttacttcctttgcggacacactcatggttttggaacttgcacctcctacccaaagattgatgatgtggaagaagaggggaggagtgcatacacttctgtcaactgctgcccaggatttgattcatgctgaactgaaaatgttgtttacaaaatgctttctgtcctctggctttaaacttggaagaaaaatgatacagaaggagtcagtaagggaagaagtgggaaaccaaaatatagtagagacatccatgatgcaagagccaaattaccagcaagagttaagtaaaccccaaacttggaaggatgtgattggtggatctcagcatagctctcatgaggataccaataaaaatattaactctgagcaggatattgttgaaatggtgtctttagctgctgaggaatcatctttaatgaatgacttatttgcacaagaaattgaatatagtccagttgaattggagtcattgagcaatgaagaaaatattgagacagagagatggaatggaagaatacttcagatgttaaatcgtttacgggaatctaacaagatgggaatgcagtcctttagtctgatgaagctctgtagaaatagtgaccgaaaacaagcagctgccaaattttatagctttcttgtcctaaagaaacagctggctattgagctgagccagagtgctccctatgcagatattatagctacgatgggaccaatgttttataacatatgaaggaaacccagacatacagatttatggcatcactggaatttctg

SEQ ID NO: 173505 - DNA, 1736 bp, Homo sapiens
  Payload ID: 14086
  Gene Symbol: RAD23A
  Gene Name: RAD23 homolog A, nucleotide excision repair protein
  Uniprot ID: P54725
  ENST ID: ENST00000316856
  CDS Start-End: 74-1162
cgctaagatggcggcggcgtgagttgcatgttgtgtgaggatcccggggccgccgcgtcgctcgggccccgccatggccgtcaccatcacgctcaaaacgctgcagcagcagaccttcaagatccgcatggagcctgacgagacggtgaaggtgctaaaggagaagatagaagctgagaagggtcgtgatgccttccccgtggctggacagaaactcatctatgccggcaagatcttgagtgacgatgtccctatcagggactatcgcatcgatgagaagaactttgtggtcgtcatggtgaccaagaccaaagccggccagggtacctcagcacccccagaggcctcacccacagctgccccagagtcctctacatccttcccgcctgcccccacctcaggcatgtcccatcccccacctgccgccagagaggacaagagcccatcagaggaatccgcccccacgacgtccccagagtctgtgtcaggctctgttccctcttcaggtagcagcgggcgagaggaagacgcggcctccacgctagtgacgggctctgagtatgagacgatgctgacggagatcatgtccatgggctatgagcgagagcgggtcgtggccgccctgagagccagctacaacaacccccaccgagccgtggagtatctgctcacgggaattcctgggagccccgagccggaacacggttctgtccaggagagccaggtatcggagcagccggccacggaagcaggagagaaccccctggagttcctgcgggaccagccccagttccagaacatgcggcaggtgattcagcagaaccctgcgctgctgcccgccctgctccagcagctgggccaggagaaccctcagcttttacagcaaatcagccggcaccaggagcagttcatccagatgctgaacgagccccctggggagctggcggacatctcagatgtggagggggaggtgggcgccataggagaggaggccccgcagatgaactacatccaggtgacgccgcaggagaaagaagctatagagaggttgaaggccctgggcttcccagagagcctggtcatccaggcctatttcgcgtgtgaaaaaaatgagaacttggctgccaacttcctcctgagtcagaactttgatgacgagtgatgccaggaagccaggccaccgaagcccccaccctacccttattccatgaaagttttataaaagaaaaaatatatatatattcatgtttatttaagaaatggaaaaaaaaatcaaaaatcttaaaaaaacaagcaaacagtccagcttcctgtcctcctaaagtggcccctgttcccatctcccgggccagacagctgtccccccgtcctcctccccagcccagcctgctcagagaagctggcaggactgggaggcgacagatgggcccctcttggcctctgtcccagctctctgcagccagacggaaaggcggctgcttgcctctccatcctccgaaaaacccctgaggacccccccccatcctcttctaggatgaggggaagctggagccccaactttgatcctccattggagtggcccaaatctttccatctagggcaagtcctgaaaggcccaaggccccctccccagtctggccttggcctccagcctggagaagggctaacatcagctcattgtcaaggccacccccaccccagaacagaaccgtgtctctgataaaggttttgaagtg

SEQ ID NO: 173506 - DNA, 894 bp, Homo sapiens
  Payload ID: 14086
  Gene Symbol: RAD23A
  Gene Name: RAD23 homolog A, nucleotide excision repair protein
  ENST ID: ENST00000586375
  CDS Start-End: 1-188
cgggctctgagtatgagacgatgctgacggagatcatgtccatgggctatgagcgagagcgggtcgtggccgccctgagagccagctacaacaacccccaccgagccgtggagtatctgctcacgcaggagagaaccccctggagttcctgcgggaccagccccagttccagaacatgcggcaggtgattcagcagaaccctgcgctgctgcccgccctgctccagcagctgggccaggagaaccctcagcttttacagcaaatcagccggcaccaggagcagttcatccagatgctgaacgagccccctggggagctggcggacatctcagatgtggagggggaggtgggcgccataggagaggaggccccgcagatgaactacatccaggtgacgccgcaggagaaagaagctatagagaggttgaaggccctgggcttcccagagagcctggtcatccaggcctatttcgcgtgtgaaaaaaatgagaacttggctgccaacttcctcctgagtcagaactttgatgacgagtgatgccaggaagccaggccaccgaagcccccaccctacccttattccatgaaagttttataaaagaaaaaatatatatatattcatgtttatttaagaaatggaaaaaaaaatcaaaaatcttaaaaaaacaagcaaacagtccagcttcctgtcctcctaaagtggcccctgttcccatctcccgggccagacagctgtccccccgtcctcctccccagcccagcctgctcagagaagctggcaggactgggaggcgacagatgggcccctcttggcctctgtcccagctctctgcagccagacggaaaggcggctgcttgcctctccatcctccgaaaaacccctgaggacccccc

SEQ ID NO: 173507 - DNA, 1350 bp, Homo sapiens
  Payload ID: 14086
  Gene Symbol: RAD23A
  Gene Name: RAD23 homolog A, nucleotide excision repair protein
  ENST ID: ENST00000591499
  CDS Start-End: 95-523
gcgcggcgcggcgcgcctgggcgctaagatggcggcggcgtgagttgcatgttgtgtgaggatcccggggccgccgcgtcgctcgggccccgccatggccgtcaccatcacgctcaaaacgctgcagcagcagaccttcaagatccgcatggagcctgacgagacggtgaaggtgctaaaggagaagatagaagctgagaagggtcgtgatgccttccccgtggctggacagaaactcatctatgccggcaagatcttgagtgacgatgtccctatcagggactatcgcatcgatgagaagaactttgtggtcgtcatggtgaccaagaccaaagccggccagggtacctcagcacccccagaggcctcacccacagctgccccagagtcctctacatccttcccgcctgcccccacctcaggcatgtcccatcccccacctgccgccagagaggacaagagcccatcagaggaatccgcccccacgacgtccccagagtctgtgtcaggtgacgggctctgagtatgagacgatgctgacggagatcatgtccatgggctatgagcgagagcgggtcgtggccgccctgagagccagctacaacaacccccaccgagccgtggagtatctgctcacgggaattcctgggagccccgagccggaacacggttctgtccaggagagccaggtatcggagcagccggccacggaagcagcaggagagaaccccctggagttcctgcgggaccagccccagttccagaacatgcggcaggtgattcagcagaaccctgcgctgctgcccgccctgctccagcagctgggccaggagaaccctcagcttttacagcaaatcagccggcaccaggagcagttcatccagatgctgaacgagccccctggggagctggcggacatctcagatgtggagggggaggtgggcgccataggagaggaggccccgcagatgaactacatccaggtgacgccgcaggagaaagaagctatagagaggttgaaggccctgggcttcccagagagcctggtcatccaggcctatttcgcgtgtgaaaaaaatgagaacttggctgccaacttcctcctgagtcagaactttgatgacgagtgatgccaggaagccaggccaccgaagcccccaccctacccttattccatgaaagttttataaaagaaaaaatatatatatattcatgtttatttaagaaatggaaaaaaaaatcaaaaatcttaaaaaaacaagcaaacagtccagcttcctgtcctcctaaagtggcccctgttcccatctcccgggccagacagctgtccccccgtcctcctccccagcc

SEQ ID NO: 173508 - DNA, 1691 bp, Homo sapiens
  Payload ID: 14086
  Gene Symbol: RAD23A
  Gene Name: RAD23 homolog A, nucleotide excision repair protein
  ENST ID: ENST00000593114
  CDS Start-End: 56-475
gtgagttgcatgttgtgtgaggatcccggggccgccgcgtcgctcgggccccgccatggccgtcaccatcacgctcaaaacgctgcagcagcagaccttcaagatccgcatggagcctgacgagacggtgaaggtgctaaaggagaagatagaagctgagaagggtcgtgatgccttccccgtggctggacagaaactcatctatgccggcaagatcttgagtgacgatgtccctatcagggactatcgcatcgatgagaagaactttgtggtcgtcatggtgaccaagaccaaagccggccagggtacctcagcacccccagaggcctcacccacagctgccccagagtcctctacatccttcccgcctgcccccacctcaggcatgtcccatcccccacctgccgccagagaggacaagagcccatcagaggaatccgcccccacgacgtccccagagtctgtgtcagggtagcagcgggcgagaggaagacgcggcctccacgctagtgacgggctctgagtatgagacgatgctgacggagatcatgtccatgggctatgagcgagagcgggtcgtggccgccctgagagccagctacaacaacccccaccgagccgtggagtatctgctcacgggaattcctgggagccccgagccggaacacggttctgtccaggagagccaggtatcggagcagccggccacggaagcaggagagaaccccctggagttcctgcgggaccagccccagttccagaacatgcggcaggtgattcagcagaaccctgcgctgctgcccgccctgctccagcagctgggccaggagaaccctcagcttttacagcaaatcagccggcaccaggagcagttcatccagatgctgaacgagccccctggggagctggcggacatctcagatgtggagggggaggtgggcgccataggagaggaggccccgcagatgaactacatccaggtgacgccgcaggagaaagaagctatagagaggttgaaggccctgggcttcccagagagcctggtcatccaggcctatttcgcgtgtgaaaaaaatgagaacttggctgccaacttcctcctgagtcagaactttgatgacgagtgatgccaggaagccaggccaccgaagcccccaccctacccttattccatgaaagttttataaaagaaaaaatatatatatattcatgtttatttaagaaatggaaaaaaaaatcaaaaatcttaaaaaaacaagcaaacagtccagcttcctgtcctcctaaagtggcccctgttcccatctcccgggccagacagctgtccccccgtcctcctccccagcccagcctgctcagagaagctggcaggactgggaggcgacagatgggcccctcttggcctctgtcccagctctctgcagccagacggaaaggcggctgcttgcctctccatcctccgaaaaacccctgaggacccccccccatcctcttctaggatgaggggaagctggagccccaactttgatcctccattggagtggcccaaatctttccatctagggcaagtcctgaaaggcccaaggccccctccccagtctggccttggcctccagcctggagaagggctaacatcagctcattgtcaaggccacccccaccccagaacagaaccgtgtctctgataaagg

SEQ ID NO: 173509 - DNA, 1746 bp, Homo sapiens
  Payload ID: 14086
  Gene Symbol: RAD23A
  Gene Name: RAD23 homolog A, nucleotide excision repair protein
  Uniprot ID: P54725
  ENST ID: ENST00000586534
  CDS Start-End: 62-1153
ggcggcgtgagttgcatgttgtgtgaggatcccggggccgccgcgtcgctcgggccccgccatggccgtcaccatcacgctcaaaacgctgcagcagcagaccttcaagatccgcatggagcctgacgagacggtgaaggtgctaaaggagaagatagaagctgagaagggtcgtgatgccttccccgtggctggacagaaactcatctatgccggcaagatcttgagtgacgatgtccctatcagggactatcgcatcgatgagaagaactttgtggtcgtcatggtgaccaagaccaaagccggccagggtacctcagcacccccagaggcctcacccacagctgccccagagtcctctacatccttcccgcctgcccccacctcaggcatgtcccatcccccacctgccgccagagaggacaagagcccatcagaggaatccgcccccacgacgtccccagagtctgtgtcaggctctgttccctcttcaggtagcagcgggcgagaggaagacgcggcctccacgctagtgacgggctctgagtatgagacgatgctgacggagatcatgtccatgggctatgagcgagagcgggtcgtggccgccctgagagccagctacaacaacccccaccgagccgtggagtatctgctcacgggaattcctgggagccccgagccggaacacggttctgtccaggagagccaggtatcggagcagccggccacggaagcagcaggagagaaccccctggagttcctgcgggaccagccccagttccagaacatgcggcaggtgattcagcagaaccctgcgctgctgcccgccctgctccagcagctgggccaggagaaccctcagcttttacagcaaatcagccggcaccaggagcagttcatccagatgctgaacgagccccctggggagctggcggacatctcagatgtggagggggaggtgggcgccataggagaggaggccccgcagatgaactacatccaggtgacgccgcaggagaaagaagctatagagaggttgaaggccctgggcttcccagagagcctggtcatccaggcctatttcgcgtgtgaaaaaaatgagaacttggctgccaacttcctcctgagtcagaactttgatgacgagtgatgccaggaagccaggccaccgaagcccccaccctacccttattccatgaaagttttataaaagaaaaaatatatatatattcatgtttatttaagaaatggaaaaaaaaatcaaaaatcttaaaaaaacaagcaaacagtccagcttcctgtcctcctaaagtggcccctgttcccatctcccgggccagacagctgtccccccgtcctcctccccagcccagcctgctcagagaagctggcaggactgggaggcgacagatgggcccctcttggcctctgtcccagctctctgcagccagacggaaaggcggctgcttgcctctccatcctccgaaaaacccctgaggacccccccccatcctcttctaggatgaggggaagctggagccccaactttgatcctccattggagtggcccaaatctttccatctagggcaagtcctgaaaggcccaaggccccctccccagtctggccttggcctccagcctggagaagggctaacatcagctcattgtcaaggccacccccaccccagaacagaaccgtgtctctgataaaggttttgaagtgaataaagttttaaaaacta

SEQ ID NO: 173510 - DNA, 999 bp, Homo sapiens
  Payload ID: 14086
  Gene Symbol: RAD23A
  Gene Name: RAD23 homolog A, nucleotide excision repair protein
  ENST ID: ENST00000590881
  CDS Start-End: 1-453
attcctgggagccccgagccggaacacggttctgtccaggagagccaggtatcggagcagccggccacggaagcaggagagaaccccctggagttcctgcgggaccagccccagttccagaacatgcggcaggtgattcagcagaaccctgcgctgctgcccgccctgctccagcagctgggccaggagaaccctcagcttttacagcaaatcagccggcaccaggagcagttcatccagatgctgaacgagccccctggggagctggcggacatctcagatgtggagggggaggtgggcgccataggagaggaggccccgcagatgaactacatccagttgaaggccctgggcttcccagagagcctggtcatccaggcctatttcgcgtgtgaaaaaaatgagaacttggctgccaacttcctcctgagtcagaactttgatgacgagtgatgccaggaagccaggccaccgaagcccccaccctacccttattccatgaaagttttataaaagaaaaaatatatatatattcatgtttatttaagaaatggaaaaaaaaatcaaaaatcttaaaaaaacaagcaaacagtccagcttcctgtcctcctaaagtggcccctgttcccatctcccgggccagacagctgtccccccgtcctcctccccagcccagcctgctcagagaagctggcaggactgggaggcgacagatgggcccctcttggcctctgtcccagctctctgcagccagacggaaaggcggctgcttgcctctccatcctccgaaaaacccctgaggacccccccccatcctcttctaggatgaggggaagctggagccccaactttgatcctccattggagtggcccaaatctttccatctagggcaagtcctgaaaggcccaaggccccctccccagtctggccttggcctccagcctggagaagggctaacatcagctcattgtcaaggccacccccaccccagaacagaa

SEQ ID NO: 173511 - DNA, 1526 bp, Homo sapiens
  Payload ID: 14086
  Gene Symbol: RAD23A
  Gene Name: RAD23 homolog A, nucleotide excision repair protein
  Uniprot ID: P54725
  ENST ID: ENST00000592268
  CDS Start-End: 58-984
gcgtgagttgcatgttgtgtgaggatcccggggccgccgcgtcgctcgggccccgccatggccgtcaccatcacgctcaaaacgctgcagcagcagaccttcaagatccgcatggagcctgacgagacggtgaaggtgctaaaggagaagatagaagctgagaagggtcgtgatgccttccccgtggctggacagaaactcatctatgccggcaagatcttgagtgacgatgtccctatcagggactatcgcatcgatgagaagaactttgtggtcgtcatggtgaccaagaccaaagccggccagggtacctcagcacccccagaggcctcacccacagctgccccagagtcctctacatccttcccgcctgcccccacctcaggcatgtcccatcccccacctgccgccagagaggacaagagcccatcagaggaatccgcccccacgacgtccccagagtctgtgtcaggctctgttccctcttcaggtagcagcgggcgagaggaagacgcggcctccacgctagtgacgggctctgagtatgagacgatgctgacggagatcatgtccatgggctatgagcgagagcgggtcgtggccgccctgagagccagctacaacaacccccaccgagccgtggagtatctgctcacgggaattcctgggagccccgagccggaacacggttctgtccaggagagccaggtatcggagcagccggccacggaagcagcaggagagaaccccctggagttcctgcgggaccagccccagttccagaacatgcggcaggtgattcagcagaaccctgcgctgctgcccgccctgctccagcagctgggccaggagaaccctcagcttttacagttgaaggccctgggcttcccagagagcctggtcatccaggcctatttcgcgtgtgaaaaaaatgagaacttggctgccaacttcctcctgagtcagaactttgatgacgagtgatgccaggaagccaggccaccgaagcccccaccctacccttattccatgaaagttttataaaagaaaaaatatatatatattcatgtttatttaagaaatggaaaaaaaaatcaaaaatcttaaaaaaacaagcaaacagtccagcttcctgtcctcctaaagtggcccctgttcccatctcccgggccagacagctgtccccccgtcctcctccccagcccagcctgctcagagaagctggcaggactgggaggcgacagatgggcccctcttggcctctgtcccagctctctgcagccagacggaaaggcggctgcttgcctctccatcctccgaaaaacccctgaggacccccccccatcctcttctaggatgaggggaagctggagccccaactttgatcctccattggagtggcccaaatctttccatctagggcaagtcctgaaaggcccaaggccccctccccagtctggccttggcctccagcctggagaagggctaacatcagctcattgtcaaggccacccccaccccagaac

SEQ ID NO: 173512 - DNA, 4119 bp, Homo sapiens
  Payload ID: 14087
  Gene Symbol: RAD23B
  Gene Name: RAD23 homolog B, nucleotide excision repair protein
  Uniprot ID: P54727
  ENST ID: ENST00000358015
  CDS Start-End: 352-1581
gagtcacgatgatggcggccaccatcctgtggtgagctagcggattccctgcttgtctcgccgaccccctcgcgccttctgcagactccgtggctggcgctcggcgcgtgaggaagcacggcggcccgagttcgcggggaaggccgcagtcgcggaggcagcggcgcggtccggggcacgggctgggggagaggccgctccgctgggcgaatgtgacaagcccccacccccaccgccttcctccccagagcgcgaggagcgcgggcgaccccggggccccgccaggccacagaccccgcccagcggccagcacccggcgcaggcccggcagccgagctgcgcggcggcaccatgcaggtcaccctgaagaccctccagcagcagaccttcaagatagacattgaccccgaggagacggtgaaagcactgaaagagaagattgaatctgaaaaggggaaagatgcctttccagtagcaggtcaaaaattaatttatgcaggcaaaatcctcaatgatgatactgctctcaaagaatataaaattgatgagaaaaactttgtggtggttatggtgaccaaacccaaagcagtgtccacaccagcaccagctacaactcagcagtcagctcctgccagcactacagcagttacttcctccaccaccacaactgtggctcaggctccaacccctgtccctgccttggcccccacttccacacctgcatccatcactccagcatcagcgacagcatcttctgaacctgcacctgctagtgcagctaaacaagagaagcctgcagaaaagccagcagagacaccagtggctactagcccaacagcaactgacagtacatcgggtgattcttctcggtcaaacctttttgaagatgcaacgagtgcacttgtgacgggtcagtcttacgagaatatggtaactgagatcatgtcaatgggctatgaacgagagcaagtaattgcagccctgagagccagtttcaacaaccctgacagagcagtggagtatcttttaatgggaatccctggagatagagaaagtcaggctgtggttgacccccctcaagcagctagtactggggctcctcagtcttcagcagtggctgcagctgcagcaactacgacagcaacaactacaacaacaagttctggaggacatccccttgaatttttacggaatcagcctcagtttcaacagatgagacaaattattcagcagaatccttccttgcttccagcgttactacagcagataggtcgagagaatcctcaattacttcagcaaattagccaacaccaggagcattttattcagatgttaaatgaaccagttcaagaagctggtggtcaaggaggaggaggtggaggtggcagtggaggaattgcagaagctggaagtggtcatatgaactacattcaagtaacacctcaggaaaaagaagctatagaaaggttaaaggcattaggatttcctgaaggacttgtgatacaagcgtattttgcttgtgagaagaatgagaatttggctgccaattttcttctacagcagaactttgatgaagattgaaagggacttttttatatctcacacttcacaccagtgcattacactaacttgttcactggattgtctgggatgacttgggctcatatccacaatacttggtataaggtagtagattgttgggggtggggagggagggatctaggatacagggcagggataaatacagtgcatgtctgcttcaattagcagatgccgcaactccacacagtgtgtaaaatatatacaaccaaaaatcagcttttgcaggtctttatttcttctgtaaaacagtaggtaacttttcctaggtttcactctttttagtgtactagatccagaaacttagtgtaatgccctgctttatatttctttgacttaacattggtttcagaaagaatcttagctacctagaatttacagtctctgtttcatggcaacactggataatggctttgtgaaatttaaaaaatttttgtagcgactgtaaacagaaatgccaaattgatggttaattgttgctgcttcaaaaataagtataaaattaatatgtaaggaagcccattctttcatgttaaatacttggggtgggaggggagaaagggaaccttttcttaaaatgaaaataattactgctattttaaaatttcttgatcattgaatgtgagacccttctaacatgatttgagaagctgtacaagtataggcagagttattttcctgtttacattttttttttgttttggggaaaaaattggtaggtgtctaattactgtttacttcattgttatattgcagtaaaagttttaaaacaaccattgcatgtttgcttttgatgtatccctttgtgaaattagcacttttggggccaatggagaaatgcagcattcactctccctgtcttttccccttccctcagcagaaacgtgtttatcagcaagtcgtgagtcaaactgctgccttttaaaaaacccacaaaatgctgattcagttcaaaattaatgcaaatgtttcaaaactgggtttctgatatttgtaaatgtgtttctttattagataagagtgtattaccattaaagtcattagtataatattgctttcaaaaagaaatggtagacaaaactataatccagcatcttttattgcattggaaagactggcaaagtcttttggatgggttgggagatgtggctggaaagtactttggaaaatatacaatcaagatatctcatggcatattaaaagaaaaatcttaatagcagtgttggcttttatttggattttttcatctcagttttttctgtggaatctccttcattggcattgttatttaatcataaacggggcagatgtctacttgttcagtttttcaaatctgttttcctgagtataaataagagtatttaaagaaataatttggattgcttttgttttttgtttccttttttttaaccatctgatactaagaagatgaatttgcacagatttctctgcataatttctcaatatctttagcacagtatggtgatgatgacttttaagcatttacatcacgtactcataacctattatgaaaataaatgaaactggctgggtatggtggctcatgcctataatcccagcactttgggaggccgaggtgggcagatcacttgaggccaggagattgagaccagcctgaccgtcatggcgaaaccccgtctatactaaaaatacaaaaaatagccaggcatggtggcgcacgcctgtggtcccagctacttgggaggctgaggcatgagaattgcttgaacccgggaagtgaaggttgccgtgagctgagatcacaccactgccataaacatgacaggcttttggactttgtattacctgtatgttttataatggatcatgcataatttctcaggagaataaaatgagaattcatatatacgttcatctttcaagtcagagcaatgagttgggaaaagaggtggcatttctgatcggataatggaatactctcatttattttatgacattctctgtctactcagatcatagtgaaaactggaaacaaaaaaaaaaaacagcctcttcttggaaagtgacagcagaaggtggcatggagcttgtgtccttggacaacaaatctggatatactaggattaattatcagaagacagctcaggccaagttttgatcgttccatacagtaccttgtttatctgcttcttaaagaatcagccgagacaccataaaagaaataggctttttgtgccttttgctgttaatgtttaatttacaaactgttttggtaaatctcttaatgtaagtagctatttgactttggaattttgcattcgaggtatactgtcatttcttgaaatctttttctcgtttagttgctctgtgggaaatgtgaggaagcctaagtttgtatttgtaaatttcttatgccatcctctagtcaaattttttttcattgtttaaaaatacggaagtgttccaatataattttttcctgtactggatggctaggattctagagaattgattataaaatattttcaatacatccaa

SEQ ID NO: 173513 - DNA, 811 bp, Homo sapiens
  Payload ID: 14087
  Gene Symbol: RAD23B
  Gene Name: RAD23 homolog B, nucleotide excision repair protein
  ENST ID: ENST00000457811
  CDS Start-End: 1-344
cgacagcatcttctgaacctgcacctgctagtgcagctaaacaagagaagcctgcagaaaagccagcagagacaccagtggctactagcccaacagcaactgacagtacatcgggtgattcttctcggtcaaacctttttgaagatgcaacgagtgcacttgtgacgggtcagtcttacgagaatatggtaactgagatcatgtcaatgggctatgaacgagagcaagtaattgcagccctgagagccagtttcaacaaccctgacagagcagtggagtatcttttaatgatcatagtgaaaactggaaacaaaaaaaaaaaacagcctcttcttggaaagtgacagcagaaggtggcatggagcttgtgtccttggacaacaaatctggatatactaggattaattatcagaagacagctcaggccaagttttgatcgttccatacagtaccttgtttatctgcttcttaaagaatcagccgagacaccataaaagaaataggctttttgtgccttttgctgttaatgtttaatttacaaactgttttggtaaatctcttaatgtaagtagctatttgactttggaattttgcattcgaggtatactgtcatttcttgaaatctttttctcgtttagttgctctgtgggaaatgtgaggaagcctaagtttgtatttgtaaatttcttatgccatcctctagtcaaattttttttcattgtttaaaaatacggaagtgttccaatataattttttcctgtactggatggctaggattctagagaattgattataaaatattttcaataca

SEQ ID NO: 173514 - DNA, 3835 bp, Homo sapiens
  Payload ID: 14087
  Gene Symbol: RAD23B
  Gene Name: RAD23 homolog B, nucleotide excision repair protein
  Uniprot ID: P54727
  ENST ID: ENST00000416373
  CDS Start-End: 286-1299
ggtgggggagggagacgtaggcgtcgccactacccctgtgtggacctggttagccgcttagttcccagagttggtaacccgagaagatgagccttaagaaaaaaaaaagtatcaggttccgtttgccgccgagaggtgaaagcactgaaagagaagattgaatctgaaaaggggaaagatgcctttccagtagcaggtcaaaaattaatttatgcaggcaaaatcctcaatgatgatactgctctcaaagaatataaaattgatgagaaaaactttgtggtggttatggtgaccaaacccaaagcagtgtccacaccagcaccagctacaactcagcagtcagctcctgccagcactacagcagttacttcctccaccaccacaactgtggctcaggctccaacccctgtccctgccttggcccccacttccacacctgcatccatcactccagcatcagcgacagcatcttctgaacctgcacctgctagtgcagctaaacaagagaagcctgcagaaaagccagcagagacaccagtggctactagcccaacagcaactgacagtacatcgggtgattcttctcggtcaaacctttttgaagatgcaacgagtgcacttgtgacgggtcagtcttacgagaatatggtaactgagatcatgtcaatgggctatgaacgagagcaagtaattgcagccctgagagccagtttcaacaaccctgacagagcagtggagtatcttttaatgggaatccctggagatagagaaagtcaggctgtggttgacccccctcaagcagctagtactggggctcctcagtcttcagcagtggctgcagctgcagcaactacgacagcaacaactacaacaacaagttctggaggacatccccttgaatttttacggaatcagcctcagtttcaacagatgagacaaattattcagcagaatccttccttgcttccagcgttactacagcagataggtcgagagaatcctcaattacttcagcaaattagccaacaccaggagcattttattcagatgttaaatgaaccagttcaagaagctggtggtcaaggaggaggaggtggaggtggcagtggaggaattgcagaagctggaagtggtcatatgaactacattcaagtaacacctcaggaaaaagaagctatagaaaggttaaaggcattaggatttcctgaaggacttgtgatacaagcgtattttgcttgtgagaagaatgagaatttggctgccaattttcttctacagcagaactttgatgaagattgaaagggacttttttatatctcacacttcacaccagtgcattacactaacttgttcactggattgtctgggatgacttgggctcatatccacaatacttggtataaggtagtagattgttgggggtggggagggagggatctaggatacagggcagggataaatacagtgcatgtctgcttcaattagcagatgccgcaactccacacagtgtgtaaaatatatacaaccaaaaatcagcttttgcaggtctttatttcttctgtaaaacagtaggtaacttttcctaggtttcactctttttagtgtactagatccagaaacttagtgtaatgccctgctttatatttctttgacttaacattggtttcagaaagaatcttagctacctagaatttacagtctctgtttcatggcaacactggataatggctttgtgaaatttaaaaaatttttgtagcgactgtaaacagaaatgccaaattgatggttaattgttgctgcttcaaaaataagtataaaattaatatgtaaggaagcccattctttcatgttaaatacttggggtgggaggggagaaagggaaccttttcttaaaatgaaaataattactgctattttaaaatttcttgatcattgaatgtgagacccttctaacatgatttgagaagctgtacaagtataggcagagttattttcctgtttacattttttttttgttttggggaaaaaattggtaggtgtctaattactgtttacttcattgttatattgcagtaaaagttttaaaacaaccattgcatgtttgcttttgatgtatccctttgtgaaattagcacttttggggccaatggagaaatgcagcattcactctccctgtcttttccccttccctcagcagaaacgtgtttatcagcaagtcgtgagtcaaactgctgccttttaaaaaacccacaaaatgctgattcagttcaaaattaatgcaaatgtttcaaaactgggtttctgatatttgtaaatgtgtttctttattagataagagtgtattaccattaaagtcattagtataatattgctttcaaaaagaaatggtagacaaaactataatccagcatcttttattgcattggaaagactggcaaagtcttttggatgggttgggagatgtggctggaaagtactttggaaaatatacaatcaagatatctcatggcatattaaaagaaaaatcttaatagcagtgttggcttttatttggattttttcatctcagttttttctgtggaatctccttcattggcattgttatttaatcataaacggggcagatgtctacttgttcagtttttcaaatctgttttcctgagtataaataagagtatttaaagaaataatttggattgcttttgttttttgtttccttttttttaaccatctgatactaagaagatgaatttgcacagatttctctgcataatttctcaatatctttagcacagtatggtgatgatgacttttaagcatttacatcacgtactcataacctattatgaaaataaatgaaactggctgggtatggtggctcatgcctataatcccagcactttgggaggccgaggtgggcagatcacttgaggccaggagattgagaccagcctgaccgtcatggcgaaaccccgtctatactaaaaatacaaaaaatagccaggcatggtggcgcacgcctgtggtcccagctacttgggaggctgaggcatgagaattgcttgaacccgggaagtgaaggttgccgtgagctgagatcacaccactgccataaacatgacaggcttttggactttgtattacctgtatgttttataatggatcatgcataatttctcaggagaataaaatgagaattcatatatacgttcatctttcaagtcagagcaatgagttgggaaaagaggtggcatttctgatcggataatggaatactctcatttattttatgacattctctgtctactcagatcatagtgaaaactggaaacaaaaaaaaaaaacagcctcttcttggaaagtgacagcagaaggtggcatggagcttgtgtccttggacaacaaatctggatatactaggattaattatcagaagacagctcaggccaagttttgatcgttccatacagtaccttgtttatctgcttcttaaagaatcagccgagacaccataaaagaaataggctttttgtgccttttgctgttaatgtttaatttacaaactgttttggtaaatctcttaatgtaagtagctatttgactttggaattttgcattcgaggtatactgtcatttcttgaaatctttttctcgtttagttgctctgtgggaaatgtgaggaagcctaagtttgtatttgtaaatttcttatgccatcctctagtcaaattttttttcattgtttaaaaatacggaagtgttccaatataattttttcctgtactggatggctaggattctagagaattgattataaaatattttcaatacatcc

SEQ ID NO: 173515 - DNA, 456 bp, Homo sapiens
  Payload ID: 14087
  Gene Symbol: RAD23B
  Gene Name: RAD23 homolog B, nucleotide excision repair protein
  ENST ID: ENST00000442587
  CDS Start-End: 217-456
ataatactaagtttaaaccagcagctttctgcccaactctatttttaaaagtagttgattctattttgggtggagatcaggggctttggtgttaagtagacctgagttccatttgtggttttgtaacttatttgctatgaccttgggcaaattacggttagtttcattctctgtataatagggataatacctgccttgcagagatgtgaagattagatggtgaaagcactgaaagagaagattgaatctgaaaaggggaaagatgcctttccagtagcaggtcaaaaattaatttatgcaggcaaaatcctcaatgatgatactgctctcaaagaatataaaattgatgagaaaaactttgtggtggttatggtgaccaaacccaaagcagtgtccacaccagcaccagctacaactcagcagtcagctcctgccagcactacagcagttacttcc

SEQ ID NO: 173516 - DNA, 716 bp, Homo sapiens
  Payload ID: 14087
  Gene Symbol: RAD23B
  Gene Name: RAD23 homolog B, nucleotide excision repair protein
  ENST ID: ENST00000419616
  CDS Start-End: 277-716
gccttccgccccgcccccaattctggggcggagtcctcggccgcgccggcgcaaagcgtcgccgcaccccacgcctgcgcgcttcgcccgcccggccccatccccccaggtttttcgcgtgggggagggggcacgtctcggcgagtcacgatgatggcggccaccatcctgtgagcgcgaggagcgcgggcgaccccggggccccgccaggccacagaccccgcccagcggccagcacccggcgcaggcccggcagccgagctgcgcggcggcaccatgcaggtcaccctgaagaccctccagcagcagaccttcaagatagacattgaccccgaggagacggtgaaagcactgaaagagaagattgaatctgaaaaggggaaagatgcctttccagtagcaggtcaaaaattaatttatgcaggcaaaatcctcaatgatgatactgctctcaaagaatataaaattgatgagaaaaactttgtggtggttatggtgaccaaacccaaagcagtgtccacaccagcaccagctacaactcagcagtcagctcctgccagcactacagcagttacttcctccaccaccacaactgtggctcaggctccaacccctgtccctgccttggcccccacttccacacctgcatccatcactccagcatcagcgacagcatcttctgaacctgcacctgctagtgcagctaaacaagagaa

SEQ ID NO: 173517 - DNA, 8306 bp, Homo sapiens
  Payload ID: 14088
  Gene Symbol: RAD50
  Gene Name: RAD50 homolog, double strand break repair protein
  Uniprot ID: Q92878
  ENST ID: ENST00000378823
  CDS Start-End: 388-4326
ccaggagagcggcgtggacgcgtgcgggcctagaggcccacgtgatccgcagggcggccgaggcaggaagctgtgagtgcgcggttgcggggtcgcattgtggctacggctttgcgtccccggcgggcagccccaggctggtccccgcctccgctctccccaccggcggggaaagcagctggtgtgggaggaaaggctccatcccccgccccctctctcccgctgttggctggcaggatcttttggcagtcctgtggcctcgctccccgcccggatcctcctgaccctgagattcgcgggtctcacgtcccgtgcacgccttgcttcggcctcagttaagcctttgtgggctccaggtccctggtgagattagaaacgtttgcaaacatgtcccggatcgaaaagatgagcattctgggcgtgcggagttttggaatagaggacaaagataagcaaattatcactttcttcagcccccttacaattttggttggacccaatggggcgggaaagacgaccatcattgaatgtctaaaatatatttgtactggagatttccctcctggaaccaaaggaaatacatttgtacacgatcccaaggttgctcaagaaacagatgtgagagcccagattcgtctgcaatttcgtgatgtcaatggagaacttatagctgtgcaaagatctatggtgtgtactcagaaaagcaaaaagacagaatttaaaactctggaaggagtcattactagaacaaagcatggtgaaaaggtcagtctgagctctaagtgtgcagaaattgaccgagaaatgatcagttctcttggggtttccaaggctgtgctaaataatgtcattttctgtcatcaagaagattctaattggcctttaagtgaaggaaaggctttgaagcaaaagtttgatgagattttttcagcaacaagatacattaaagccttagaaacacttcggcaggtacgtcagacacaaggtcagaaagtaaaagaatatcaaatggaactaaaatatctgaagcaatataaggaaaaagcttgtgagattcgtgatcagattacaagtaaggaagcccagttaacatcttcaaaggaaattgtcaaatcctatgagaatgaacttgatccattgaagaatcgtctaaaagaaattgaacataatctctctaaaataatgaaacttgacaatgaaattaaagccttggatagccgaaagaagcaaatggagaaagataatagtgaactggaagagaaaatggaaaaggtttttcaagggactgatgagcaactaaatgacttatatcacaatcaccagagaacagtaagggagaaagaaaggaaattggtagactgtcatcgtgaactggaaaaactaaataaagaatctaggcttctcaatcaggaaaaatcagaactgcttgttgaacagggtcgtctacagctgcaagcagatcgccatcaagaacatatccgagctagagattcattaattcagtctttggcaacacagctagaattggatggctttgagcgtggaccattcagtgaaagacagattaaaaattttcacaaacttgtgagagagagacaagaaggggaagcaaaaactgccaaccaactgatgaatgactttgcagaaaaagagactctgaaacaaaaacagatagatgagataagagataagaaaactggactgggaagaataattgagttaaaatcagaaatcctaagtaagaagcagaatgagctgaaaaatgtgaagtatgaattacagcagttggaaggatcttcagacaggattcttgaactggaccaggagctcataaaagctgaacgtgagttaagcaaggctgagaaaaacagcaatgtagaaaccttaaaaatggaagtaataagtctccaaaatgaaaaagcagacttagacaggaccctgcgtaaacttgaccaggagatggagcagttaaaccatcatacaacaacacgtacccaaatggagatgctgaccaaagacaaagctgacaaagatgaacaaatcagaaaaataaaatctaggcacagtgatgaattaacctcactgttgggatattttcccaacaaaaaacagcttgaagactggctacatagtaaatcaaaagaaattaatcagaccagggacagacttgccaaattgaacaaggaactagcttcatctgagcagaataaaaatcatataaataatgaactaaaaagaaaggaagagcagttgtccagttacgaagacaagctgtttgatgtttgtggtagccaggattttgaaagtgatttagacaggcttaaagaggaaattgaaaaatcatcaaaacagcgagccatgctggctggagccacagcagtttactcccagttcattactcagctaacagacgaaaaccagtcatgttgccccgtttgtcagagagtttttcagacagaggctgagttacaagaagtcatcagtgatttgcagtctaaactgcgacttgctccagataaactcaagtcaacagaatcagagctaaaaaaaaaggaaaagcggcgtgatgaaatgctgggacttgtgcccatgaggcaaagcataattgatttgaaggagaaggaaataccagaattaagaaacaaactgcagaatgtcaatagagacatacagcgcctaaagaacgacatagaagaacaagaaacactcttgggtacaataatgcctgaagaagaaagtgccaaagtatgcctgacagatgttacaattatggagaggttccagatggaacttaaagatgttgaaagaaaaattgcacaacaagcagctaagctacaaggaatagacttagatcgaactgtccaacaagtcaaccaggagaaacaagagaaacagcacaagttagacacagtttctagtaagattgaattgaatcgtaagcttatacaggaccagcaggaacagattcaacatctaaaaagtacaacaaatgagctaaaatctgagaaacttcagatatccactaatttgcaacgtcgtcagcaactggaggagcagactgtggaattatccactgaagttcagtctttgtacagagagataaaggatgctaaagagcaggtaagccctttggaaacaacattggaaaagttccagcaagaaaaagaagaattaatcaacaaaaaaaatacaagcaacaaaatagcacaggataaactgaatgatattaaagagaaggttaaaaatattcatggctatatgaaagacattgagaattatattcaagatgggaaagacgactataagaagcaaaaagaaactgaacttaataaagtaatagctcaactaagtgaatgcgagaaacacaaagaaaagataaatgaagatatgagactcatgagacaagatattgatacacagaagatacaagaaaggtggctacaagataaccttactttaagaaaaagaaatgaggaactaaaagaagttgaagaagaaagaaaacaacatttgaaggaaatgggtcaaatgcaggttttgcaaatgaaaagtgaacatcagaagttggaagagaacatagacaatataaaaagaaatcataatttggcattagggcgacagaaaggttatgaagaagaaattattcattttaagaaagaacttcgagaaccacaatttcgggatgctgaggaaaagtatagagaaatgatgattgttatgaggacaacagaacttgtgaacaaggatctggatatttattataagactcttgaccaagcaataatgaaatttcacagtatgaaaatggaagaaatcaataaaattatacgtgacctgtggcgaagtacctatcgtggacaagatattgaatacatagaaatacggtctgatgccgatgaaaatgtatcagcttctgataaaaggcggaattataactaccgagtggtgatgctgaagggagacacagccttggatatgcgaggacgatgcagtgctggacaaaaggtattagcctcactcatcattcgcctggccctggctgaaacgttctgcctcaactgtggcatcattgccttggatgagccaacaacaaatcttgaccgagaaaacattgaatctcttgcacatgctctggttgagataataaaaagtcgctcacagcagcgtaacttccagcttctggtaatcactcatgatgaagattttgtggagcttttaggacgttctgaatatgtggagaaattctacaggattaaaaagaacatcgatcagtgctcagagattgtgaaatgcagtgttagctccctgggattcaatgttcattaaaaatatccaagatttaaatgccatagaaatgtaggtcctcagaaagtgtataataagaaacttatttctcatatcaacttagtcaataagaaaatatattctttcaaaggaacattgtgtctaggattttggatgttgagaggttctaaaatcatgaaacttgtttcactgaaaattggacagattgcctgtttctgatttgctgctcttcatcccattccaggcagcctctgtcaggccttcagggttcagcagtacagccgagactcgactctgtgcctccctccccagtgcaaatgcatgcttcttctcaaagcactgttgagaaggagataattactgccttgaaaatttatggttttggtatttttttaaatcatagttaaatgttacctctgaatttacttccttgcatgtggtttgaaaaactgagtattaatatctgaggatgaccagaaatggtgagatgtatgtttggctctgcttttaactttataaatccagtgacctctctctctgggacttggtttccccaactaaaatttgaagtagttgaatggggtctcaaagtttgacaggaaccttaagtaatcatctaagtcagtacccaccaccttcttctcctacatatcccttccagatggtcatccagactcagagctctctctacagagaggaaattctccactgtgcacacccacctttggaaagctctgaccacttgaggcctgatctgcccatcgtgaagaagcctgtaacactcctctgcgtctatcctgtgtagcatactggcttcaccatcaatcctgattcctctctaagtgggcattgccatgtggaaggcaagccaggctcactcacagagtcaaggcctgctccctgtagggtccaaccagacctggaagaacaggcctctccatttgctcttcagatgccacttctaagaaaagcctaatcacagtttttcctggaattgccagctgacatcttgaatccttccattccacacagaatgcaaccaagtcacacgcttttgaattatgctttgtagagttttgtcattcagagtcagccaggaccataccgggtcttgattcagtcacatggcatggttttgtgccatctgtagctataatgagcatgtttgcctagacagcttttctcaactgggtccagaagagaattaagccctaaggtcctaaggcatctatctgtgctaggttaaatggttggcccccaaagatagacaggtcctgatttctagaacccgtgactgttactttatacagcaaaggaaactttgcagatgtgattaaagctaaggaccttaagacagagtatcctgggggtggtggtggggtgggggggggtcctaaatgtaatcacgagtaagattaagagcaaatcaattctagtcatatattaaacatccacaataaccaagatatttttatcccaagaatgcaagatttcagaaaatgaaaaatctgttgataaatccatcactataataaaaccgaaggtgaaaaaaattctgaaaaaattctagcagctatatttgataaaattcaacatctcctagctttagcaaactcacagttttgcaaataatattttcttaatgttatctgttgctaaatcaaaattaaacagtcatcttaactgcaaaataaaacatttctcagtaaatattaaagccagttaccttctatcaacatgttaatgaaagtgctagttgttgcagcaaagaataacaaaggcaatacacgatcaatataggcagtgaaacaaaagtatcatttgcaagttaaaacagacttcccaattttaaatctggtttccccctgaatatgtggcatccttggcagcacttctgagagtggctgctttcattccaagaagcccatgggtttggaggtgggataggtgcctttctggcttctcattgctgcttctagatcagtctccaaatatcccccttccccacattggaatgaatagccatcacagcatggatggaggttagaatgagccagactgcctgggctcaaatcctagcacaccactcactagctggggaccttgagcaagttatttgtcctgttttctgtttccttatatgtaaaagtgggtaaaatggtacatattttgtagggttgttatgaagattgaatgacattatttacaaactgcttagaactgcttgccacctactaaatactgtgtaagtgttcaagaaaaagctgtcttcatttcactcttgttgcagttatctttcattcccagcttggtcactccctcttatttgttgaagagtttagctcccggttcagtgtcaccccattactaataatcattgctgatttcaatatccaagtgatggtctaatacaactccttggcctctcagtcttttttattttttgaggtggagtcttgctctgtcacccaggctggagtgcaatggcaccatctcagctcactgcaacctctgcctccctgatacaagcaatcctcctgcctcagcctcccaagtagctaggattacaggcatgtaccaccacaccaggctaatttttgtattttagtagagacagggtttcgccttgttggccaggctggtcttgaacgtctggcctcaagtgatctgcctaccttggcctccctcagcccctttttgtttcctccagtgagaagatactcagttctatggtcttattctagagccccgtccttttaataacaataactgcacccctccaaaatctcagttttaagcatctcactctccaataaccccatggtgtctacaattttcctgtggtcctcaaccccagcaattctttgaccccactgagatttcaatccattgattctatggctttttcacaggttgtttccctgatgcctgtacttctctccttattcaacttaaattccatggctcatcattatgtcaccctccactgcattgtactcaaactgtcccgacaatccccagccctactggaatccagctctgcctcctccctgcaacacctgcacatcccgtttcctttgctgtttcctcctcatttccctggcccctcaatgtcacaggttttagtactcagagtctgcacctcttttcttctctgtgctcacttatttggtgatctcatccagtctcatagctttaaattatcttagtttgggttctcccagaagcagagcgtaaaacaatgcttcacgtgaaagtaatcagtaggaaattggggaaattgtgtatgaaagagaaagcagccaatgaaaagtttactattaagccagctacggtaagtgggcaattagagtttggtgccccagggagactctggggagtttggcaaaatatatacctcagaattatcccacctaaggggcaagagacctggagtatttatataacaacttgccagggttactgagtgaaggctattctagcacatgttagttactggcttgccatgtgtaccgacacagctgctttccacagtttaaaaagaaagtctgagcaacatagtgacatcccatctttacataaaatttttaaaaaattagcaaggcatggtggtgcacacctgtagtctcagctacttggctgagataggatccctggagtctgagggttcaaggctgcagtgagctgtgatttgtgccactgcaccccagcctgggtgggtggcagagtgagaccctgtctaaaaagacaaaaaaaaaaaaaaaaaaaaagcagcagcagctgaaagttggcaggagcacactggcagttcctaggatcataggatataggcagggcactgaccactcctacaaccaccatctatacactgataactcataaatgtttgtgtccaatccagatctctcctaaatgcttgactgatatattcagctgcctgtggataactgggcatctatctgcacttgaatatctaataaacgtctaaaacttaaaatgac

SEQ ID NO: 173518 - DNA, 923 bp, Homo sapiens
  Payload ID: 14088
  Gene Symbol: RAD50
  Gene Name: RAD50 homolog, double strand break repair protein
  ENST ID: ENST00000416135
  CDS Start-End: 624-923
tcactggtcttccccacttgcatcctttggcacatacatttatgtattaggttctgtaaattatttgcttgggattgtatgactggagaaacatttcctacatttttccaaggcaggcagaggcaaattataccactacagtaattccaaatttgtgtttcatttaaatgtcctccactattgtttcagtaatttttatgtatgtttctctaggcccttaaatgtgatatccctccattaagtttgtttccaagaaagcaatattctcagttacttctgagacaggtaacttctctttcccttatttttaaagatatctattgctgggagcactgatcggaatggattacctctacattcttcatatttgcagactgcttttagttttagttcccagacttttggtcttaaagacgcctttacactaaaaaattacgggggacctcaaagagcgtaccatcattgaatgtctaaaatatatttgtactggagatttccctcctggaaccaaaggaaatacatttgtacacgatcccaaggttgctcaagaaacagatgtgagagcccagattcgtctgcaatttcgtgatgtcaatggagaacttatagctgtgcaaagatctatggtgtgtactcagaaaagcaaaaagacagaatttaaaactctggaaggagtcattactagaacaaagcatggtgaaaaggtcagtctgagctctaagtgtgcagaaattgaccgagaaatgatcagttctcttggggtttccaaggctgtgctaaataatgtcattttctgtcatcaagaagattctaattggcctttaagtgaaggaaaggctttgaagcaaaagtttgatgagattttttcagcaacaagatacattaaagccttagaaacacttcggcaggtacgtcagacacaa

SEQ ID NO: 173519 - DNA, 2915 bp, Homo sapiens
  Payload ID: 14088
  Gene Symbol: RAD50
  Gene Name: RAD50 homolog, double strand break repair protein
  ENST ID: ENST00000423956
  CDS Start-End: 95-1750
tcgcgggtctcacgtcccgtgcacgccttgcttcggcctcagttaagcctttgtgggctccaggtccctggtgagattagaaacgtttgcaaacatgtcccggatcgaaaagatgagcattctgggcgtgcggagttttggaatagaggacaaagataagcaaattatcactttcttcagcccccttacaattttggttggacccaatggggcgggaaagacgaccatcattgaatgtctaaaatatatttgtactggagatttccctcctggaaccaaaggaaatacatttgtacacgatcccaaggttgctcaagaaacagatgtgagagcccagattcgtctgcaatttcgtgatgtcaatggagaacttatagctgtgcaaagatctatggtgtgtactcagaaaagcaaaaagacagaatttaaaactctggaaggagtcattactagaacaaagcatggtgaaaaggtcagtctgagctctaagtgtgcagaaattgaccgagaaatgatcagttctcttggggtttccaaggctgtgctaaataatgtcattttctgtcatcaagaagattctaattggcctttaagtgaaggaaaggctttgaagcaaaagtttgatgagattttttcagcaacaagatacattaaagccttagaaacacttcggcaggtacgtcagacacaaggtcagaaagtaaaagaatatcaaatggaactaaaatatctgaagcaatataaggaaaaagcttgtgagattcgtgatcagattacaagtaaggaagcccagttaacatcttcaaaggaaattgtcaaatcctatgagaatgaacttgatccattgaagaatcgtctaaaagaaattgaacataatctctctaaaataatgaaacttgacaatgaaattaaagccttggatagccgaaagaagcaaatggagaaagataatagtgaactggaagagaaaatggaaaaggtttttcaagggactgatgagcaactaaatgacttatatcacaatcaccagagaacagtaagggagaaagaaaggaaattggtagactgtcatcgtgaactggaaaaactaaataaagaatctaggcttctcaatcaggaaaaatcagaactgcttgttgaacagggtcgtctacagctgcaagcagatcgccatcaagaacatatccgagctagagattcattaattcagtctttggcaacacagctagaattggatggctttgagcgtggaccattcagtgaaagacagattaaaaattttcacaaacttgtgagagagagacaagaaggggaagcaaaaactgccaaccaactgatgaatgactttgcagaaaaagagactctgaaacaaaaacagatagatgagataagagataagaaaactggactgggaagaataattgagttaaaatcagaaatcctaagtaagaagcagaatgagctgaaaaatgtgaagtatgaattacagcagttggaaggatcttcagacaggattcttgaactggaccaggagctcataaaagctgaacgtgagttaagcaaggctgagaaaaacagcaatgtagaaaccttaaaaatggaagtaataagtctccaaaatgaaaaagcagacttagacaggaccctgcgtaaacttgaccaggagatggagcagttaaaccatcatacaacaacacgtacccaaatggagatgctgaccaaagacaaacaaggaactagcttcatctgagcagaataaaaatcatataaataatgaactaaaaagaaaggaagagcagttgtccagttacgaagacaagctgtttgatgtttgtggtagccaggattttgaaagtgatttagacaggcttaaagaggaaattgaaaaatcatcaaaacagcgagccatgctggctggagccacagcagtttactcccagttcattactcagctaacagacgaaaaccagtcatgttgccccgtttgtcagagagtttttcagacagaggctgagttacaagaagtcatcagtgatttgcagtctaaactgcgacttgctccagataaactcaagtcaacagaatcagagctaaaaaaaaaggaaaagcggcgtgatgaaatgctgggacttgtgcccatgaggcaaagcataattgatttgaaggagaaggaaataccagaattaagaaacaaactgcagaatgtcaatagagacatacagcgcctaaagaacgacatagaagaacaagaaacactcttgggtacaataatgcctgaagaagaaagtgccaaagtatgcctgacagatgttacaattatggagaggttccagatggaacttaaagatgttgaaagaaaaattgcacaacaagcagctaagctacaaggaatagacttagatcgaactgtccaacaagtcaaccaggagaaacaagagaaacagcacaagttagacacagtttctagtaagattgaattgaatcgtaagcttatacaggaccagcaggaacagattcaacatctaaaaagtacaacaaatgagctaaaatctgagaaacttcagatatccactaatttgcaacgtcgtcagcaactggaggagcagactgtggaattatccactgaagttcagtctttgtacagagagataaaggatgctaaagagcaggtaagccctttggaaacaacattggaaaagttccagcaagaaaaagaagaattaatcaacaaaaaaaatacaagcaacaaaatagcacaggataaactgaatgatattaaagagaaggttaaaaatattcatggctatatgaaagacattgagaattatattcaagatgggaaagacgactataagaagcaaaaagaaactgaacttaataaagtaatagctcaactaagtgaatgcgagaaacac

SEQ ID NO: 173520 - DNA, 1052 bp, Homo sapiens
  Payload ID: 14088
  Gene Symbol: RAD50
  Gene Name: RAD50 homolog, double strand break repair protein
  ENST ID: ENST00000434288
  CDS Start-End: 1-475
ggaagtaataagtctccaaaatgaaaaagcagacttagacaggaccctgcgtaaacttgaccaggagatggagcagttaaaccatcatacaacaacacgtacccaaatggagatgctgaccaaagacaaagctgacaaagatgaacaaatcagaaaaataaaatctaggcacagtgatgaattaacctcactgttgggatattttcccaacaaaaaacagcttgaagactggctacatagtaaatcaaaagaaattaatcagaccagggacagacttgccaaattgaagattgtactggtaaagccacattccatcacctcctgttacaattctttgaagaaatgctttaggaacttgatcccacttattgaggaagttctgctgttgtctgcagctgatctggaagcagtgattttgggcatccatcaagtagaacgtttactcaactttaatttttcagtcagaattgtgtaacctgaatcaattgaggtgtctatggtgttggctattgtttctgctgttaatcattgatcttcttcagttagggcatgaagaagatgattttttttcctcacaaattgatgtgaacagtctgtcactgtgggcttcatctttaatatcgtctcatcccttcttaaactgagttatccatttgtaaactgctgatttgtttggggcattgatctcataaacttgttgtaaagtatcaatgatttcaccattcttccacccacacttcaccataaatttgatacttgttcttgcttcagtttaattggggctcttttcaaactgatgtcttaaccttgttagtgccttaaactagatcctattcagacatgttataacaagttagtatgagtttgtttcagtgcaaaacattttgaacttcatgcatagttttttttataatacacattttccatgaacattttgaagacccctcatattttgcaaattaagtaaaatggtaacggatagtaatttaggcctcttgtcccttgaaaatttgtagacctatgaagattaaaatttaaaaattctattttca

SEQ ID NO: 173521 - DNA, 564 bp, Homo sapiens
  Payload ID: 14088
  Gene Symbol: RAD50
  Gene Name: RAD50 homolog, double strand break repair protein
  ENST ID: ENST00000455677
  CDS Start-End: 1-472
tatttattataagactcttgaccaagcaataatgaaatttcacagtatgaaaatggaagaaatcaataaaattatacgtgacctgtggcgaagtacctatcgtggacaagatattgaatacatagaaatacggtctgatgccgatgaaaatgtatcagcttctgataaaaggcggaattataactaccgagtggtgatgctgaagggagacacagccttggatatgcgaggacgatgcagtgctggacaaaaggtattagcctcactcatcattcgcctggccctggctgaaacgttctgcctcaactgtggcatcattgccttggatgagccaacaacaaatcttgaccgagaaaacattgaatctcttgcacatgctctggttgaatggtcatccagactcagagctctctctacagagaggaaattctccactgtgcacacccacctttggaaagctctgaccacttgaggcctgatctgcccatcgtgaagaagcctgtaacactcctctgcgtctatcctgtgtagcatactggcttcaccatcaatcctgattcctct

SEQ ID NO: 173522 - DNA, 2076 bp, Homo sapiens
  Payload ID: 14088
  Gene Symbol: RAD50
  Gene Name: RAD50 homolog, double strand break repair protein
  ENST ID: ENST00000453394
  CDS Start-End: 95-2076
tcgcgggtctcacgtcccgtgcacgccttgcttcggcctcagttaagcctttgtgggctccaggtccctggtgagattagaaacgtttgcaaacatgtcccggatcgaaaagatgagcattctgggcgtgcggagttttggaatagaggacaaagataagcaaattatcactttcttcagcccccttacaattttggttggacccaatggggcgggaaagacgaccatcattgaatgtctaaaatatatttgtactggagatttccctcctggaaccaaaggaaatacatttgtacacgatcccaaggttgctcaagaaacagatgtgagagcccagattcgtctgcaatttcgtgatgtcaatggagaacttatagctgtgcaaagatctatggtgtgtactcagaaaagcaaaaagacagaatttaaaactctggaaggagtcattactagaacaaagcatggtgaaaaggtcagtctgagctctaagtgtgcagaaattgaccgagaaatgatcagttctcttggggtttccaaggctgtgctaaataatgtcattttctgtcatcaagaagattctaattggcctttaagtgaaggaaaggctttgaagcaaaagtttgatgagattttttcagcaacaagatacattaaagccttagaaacacttcggcaggtacgtcagacacaaggtcagaaagtaaaagaatatcaaatggaactaaaatatctgaagcaatataaggaaaaagcttgtgagattcgtgatcagattacaagtaaggaagcccagttaacatcttcaaaggaaattgtcaaatcctatgagaatgaacttgatccattgaagaatcgtctaaaagaaattgaacataatctctctaaaataatgaaacttgacaatgaaattaaagccttggatagccgaaagaagcaaatggagaaagataatagtgaactggaagagaaaatggaaaaggtttttcaagggactgatgagcaactaaatgacttatatcacaatcaccagagaacagtaagggagaaagaaaggaaattggtagactgtcatcgtgaactggaaaaactaaataaagaatctaggcttctcaatcaggaaaaatcagaactgcttgttgaacagggtcgtctacagctgcaagcagatcgccatcaagaacatatccgagctagagattcattaattcagtctttggcaacacagctagaattggatggctttgagcgtggaccattcagtgaaagacagattaaaaattttcacaaacttgtgagagagagacaagaaggggaagcaaaaactgccaaccaactgatgaatgactttgcagaaaaagagactctgaaacaaaaacagatagatgagataagagataagaaaactggactgggaagaataattgagttaaaatcagaaatcctaagtaagaagcagaatgagctgaaaaatgtgaagtatgaattacagcagttggaaggatcttcagacaggattcttgaactggaccaggagctcataaaagctgctgacaaagatgaacaaatcagaaaaataaaatctaggcacagtgatgaattaacctcactgttgggatattttcccaacaaaaaacagcttgaagactggctacatagtaaatcaaaagaaattaatcagaccagggacagacttgccaaattgaacaaggaactagcttcatctgagcagaataaaaatcatataaataatgaactaaaaagaaaggaagagcagttgtccagttacgaagacaagctgtttgatgtttgtggtagccaggattttgaaagtgatttagacaggcttaaagaggaaattgaaaaatcatcaaaacagcgagccatgctggctggagccacagcagtttactcccagttcattactcagctaacagacgaaaaccagtcatgttgccccgtttgtcagagagtttttcagacagaggctgagttacaagaagtcatcagtgatttgcagtctaaactgcgacttgctccagataaactcaagtcaacagaatcagagctaaaaaaaaa

SEQ ID NO: 173523 - DNA, 4373 bp, Homo sapiens
  Payload ID: 14088
  Gene Symbol: RAD50
  Gene Name: RAD50 homolog, double strand break repair protein
  ENST ID: ENST00000533482
  CDS Start-End: 388-696
ccaggagagcggcgtggacgcgtgcgggcctagaggcccacgtgatccgcagggcggccgaggcaggaagctgtgagtgcgcggttgcggggtcgcattgtggctacggctttgcgtccccggcgggcagccccaggctggtccccgcctccgctctccccaccggcggggaaagcagctggtgtgggaggaaaggctccatcccccgccccctctctcccgctgttggctggcaggatcttttggcagtcctgtggcctcgctccccgcccggatcctcctgaccctgagattcgcgggtctcacgtcccgtgcacgccttgcttcggcctcagttaagcctttgtgggctccaggtccctggtgagattagaaacgtttgcaaacatgtcccggatcgaaaagatgagcattctgggcgtgcggagttttggaatagaggacaaagataagcaaattatcactttcttcagcccccttacaattttggttggacccaatggggcgggaaagacgaccatcattgaatgtctaaaatatatttgtactggagatttccctcctggaaccaaaggaaatacatttgtacacgatcccaaggttgctcaagaaacagatgtgagagcccagattcgtctgcaatttcgtgatgtcaatggagaacttatagctgtgcaaagatctatggcatggtgaaaaggtcagtctgagctctaagtgtgcagaaattgaccgagaaatgatcagttctcttggggtttccaaggctgtgctaaataatgtcattttctgtcatcaagaagattctaattggcctttaagtgaaggaaaggctttgaagcaaaagtttgatgagattttttcagcaacaagatacattaaagccttagaaacacttcggcaggtacgtcagacacaaggtcagaaagtaaaagaatatcaaatggaactaaaatatctgaagcaatataaggaaaaagcttgtgagattcgtgatcagattacaagtaaggaagcccagttaacatcttcaaaggaaattgtcaaatcctatgagaatgaacttgatccattgaagaatcgtctaaaagaaattgaacataatctctctaaaataatgaaacttgacaatgaaattaaagccttggatagccgaaagaagcaaatggagaaagataatagtgaactggaagagaaaatggaaaaggtttttcaagggactgatgagcaactaaatgacttatatcacaatcaccagagaacagtaagggagaaagaaaggaaattggtagactgtcatcgtgaactggaaaaactaaataaagaatctaggcttctcaatcaggaaaaatcagaactgcttgttgaacagggtcgtctacagctgcaagcagatcgccatcaagaacatatccgagctagagattcattaattcagtctttggcaacacagctagaattggatggctttgagcgtggaccattcagtgaaagacagattaaaaattttcacaaacttgtgagagagagacaagaaggggaagcaaaaactgccaaccaactgatgaatgactttgcagaaaaagagactctgaaacaaaaacagatagatgagataagagataagaaaactggactgggaagaataattgagttaaaatcagaaatcctaagtaagaagcagaatgagctgaaaaatgtgaagtatgaattacagcagttggaaggatcttcagacaggattcttgaactggaccaggagctcataaaagctgaacgtgagttaagcaaggctgagaaaaacagcaatgtagaaaccttaaaaatggaagtaataagtctccaaaatgaaaaagcagacttagacaggaccctgcgtaaacttgaccaggagatggagcagttaaaccatcatacaacaacacgtacccaaatggagatgctgaccaaagacaaagctgacaaagatgaacaaatcagaaaaataaaatctaggcacagtgatgaattaacctcactgttgggatattttcccaacaaaaaacagcttgaagactggctacatagtaaatcaaaagaaattaatcagaccagggacagacttgccaaattgaacaaggaactagcttcatctgagcagaataaaaatcatataaataatgaactaaaaagaaaggaagagcagttgtccagttacgaagacaagctgtttgatgtttgtggtagccaggattttgaaagtgatttagacaggcttaaagaggaaattgaaaaatcatcaaaacagcgagccatgctggctggagccacagcagtttactcccagttcattactcagctaacagacgaaaaccagtcatgttgccccgtttgtcagagagtttttcagacagaggctgagttacaagaagtcatcagtgatttgcagtctaaactgcgacttgctccagataaactcaagtcaacagaatcagagctaaaaaaaaaggaaaagcggcgtgatgaaatgctgggacttgtgcccatgaggcaaagcataattgatttgaaggagaaggaaataccagaattaagaaacaaactgcagaatgtcaatagagacatacagcgcctaaagaacgacatagaagaacaagaaacactcttgggtacaataatgcctgaagaagaaagtgccaaagtatgcctgacagatgttacaattatggagaggttccagatggaacttaaagatgttgaaagaaaaattgcacaacaagcagctaagctacaaggaatagacttagatcgaactgtccaacaagtcaaccaggagaaacaagagaaacagcacaagttagacacagtttctagtaagattgaattgaatcgtaagcttatacaggaccagcaggaacagattcaacatctaaaaagtacaacaaatgagctaaaatctgagaaacttcagatatccactaatttgcaacgtcgtcagcaactggaggagcagactgtggaattatccactgaagttcagtctttgtacagagagataaaggatgctaaagagcaggtaagccctttggaaacaacattggaaaagttccagcaagaaaaagaagaattaatcaacaaaaaaaatacaagcaacaaaatagcacaggataaactgaatgatattaaagagaaggttaaaaatattcatggctatatgaaagacattgagaattatattcaagatgggaaagacgactataagaagcaaaaagaaactgaacttaataaagtaatagctcaactaagtgaatgcgagaaacacaaagaaaagataaatgaagatatgagactcatgagacaagatattgatacacagaagatacaagaaaggtggctacaagataaccttactttaagaaaaagaaatgaggaactaaaagaagttgaagaagaaagaaaacaacatttgaaggaaatgggtcaaatgcaggttttgcaaatgaaaagtgaacatcagaagttggaagagaacatagacaatataaaaagaaatcataatttggcattagggcgacagaaaggttatgaagaagaaattattcattttaagaaagaacttcgagaaccacaatttcgggatgctgaggaaaagtatagagaaatgatgattgttatgaggacaacagaacttgtgaacaaggatctggatatttattataagactcttgaccaagcaataatgaaatttcacagtatgaaaatggaagaaatcaataaaattatacgtgacctgtggcgaagtacctatcgtggacaagatattgaatacatagaaatacggtctgatgccgatgaaaatgtatcagcttctgataaaaggcggaattataactaccgagtggtgatgctgaagggagacacagccttggatatgcgaggacgatgcagtgctggacaaaaggtattagcctcactcatcattcgcctggccctggctgaaacgttctgcctcaactgtggcatcattgccttggatgagccaacaacaaatcttgaccgagaaaacattgaatctcttgcacatgctctggttgagataataaaaagtcgctcacagcagcgtaacttccagcttctggtaatcactcatgatgaagattttgtggagcttttaggacgttctgaatatgtggagaaattctacaggattaaaaagaacatcgatcagtgctcagagattgtgaaatgcagtgttagctccctgggattcaatgttcattaaaaatatccaagatttaaatgccatagaaatgtaggtcctcagaaagtgtataataagaaacttatttctcatatcaacttagtcaataagaaaatatattctttcaaaggaa

SEQ ID NO: 173524 - DNA, 2976 bp, Homo sapiens
  Payload ID: 14089
  Gene Symbol: RINT1
  Gene Name: RAD50 interactor 1
  Uniprot ID: Q6NUQ1
  ENST ID: ENST00000257700
  CDS Start-End: 232-2610
ggccgttccgacctccggtcaggagggggaggaacagagcacggccggcggctgcacgggcagggcctctctgggctgagaggaagaaaccagtgagacatcgagaggaagtcgctgtggcactcagtcctacggcctccgaggctgggtagtgagtgtgtcgctggccttagccagactccacaggccacgctggctgcgaatggagccgaggactcgcgcggaggcgagatgctaccagccggcgagatcggcgcctctcctgcagccccgtgctgctctgaaagtggtgacgaaaggaagaacctcgaggagaaaagtgacataaatgttacagttcttattggaagtaaacaagtcagtgaaggtacagataatggtgatctcccttcttatgtgtctgcattcatagaaaaggaagttggaaatgaccttaaatctttaaagaaacttgataaactcatagaacagaggacagtaagtaaaatgcagttagaagaacaggtacttacaatttcatcagaaattcctaaaagaattcgaagtgccttaaaaaatgcagaagaatcaaagcaatttcttaatcagtttctggagcaggaaactcatctcttcagcgccattaacagccatttgctgactgcgcaaccttggatggacgatcttggaaccatgattagccagattgaagagatcgaacgtcatcttgcttaccttaaatggatttcacaaattgaagaactaagtgataacattcagcaatatctgatgaccaataatgtaccggaggcagcctccactctagtgtctatggcagaacttgacattaaacttcaggaatcatcttgtactcatcttcttggtttcatgagagccacagttaaattctggcataaaattctcaaggacaagcttacaagtgattttgaggaaattttagcacagcttcattggccattcatcgcaccccctcaatcacaaactgttggcttaagtcgacctgccagtgccccggagatatacagttacctggagacactgttttgtcagcttttgaaactacaaacctcagatgaattacttactgagccaaagcaactcccagaaaaatactctcttcctgcctccccttctgtcatcctgcccatccaggttatgctgactcctcttcagaagaggttcaggtatcacttcagagggaaccggcagactaatgtgttaagcaagccagaatggtacttggctcaagtacttatgtggattggaaaccatactgaatttctggatgagaagattcagccaatattagacaaagtaggctctttggtaaacgcaaggcttgaattttctcggggccttatgatgctggttcttgagaagttagccactgatattccttgtctgctatatgatgacaatctcttctgtcatttggtggatgaagtactcttgtttgaaagggagctacacagtgttcatggctatcctggcacttttgctagttgtatgcatattctatcagaggaaacctgttttcagagatggttgacggtggagagaaaatttgctcttcaaaaaatggactcaatgctttcctcagaagctgcctgggtatcgcaatataaggatatcactgacgtggatgaaatgaaagttccagattgtgcagaaacttttatgactctactcttggttataactgacaggtataaaaatcttcccacagcttcccgaaagcttcagttcctggagttacagaaggacttagtagatgattttaggatacgattaacacaagtgatgaaagaagagactagagcttcccttggctttcgatactgtgcaattcttaatgctgtgaactacatctcaacagtactagcagattgggctgacaatgttttctttctacaacttcaacaggctgcactggaggtgtttgcagagaataatactctgagtaaattgcagctaggacagctagcctctatggagagctctgtctttgatgacatgattaacctcttagaacgtttaaagcatgatatgttgacccgtcaagtagaccacgtttttagagaagttaaagatgctgcaaaattgtataaaaaagaaagatggttgtccttgccatctcagtcagagcaggcagtgatgtccctgtccagttcggcttgcccgttgctgctgacgttacgagaccatttacttcagttggagcagcagctttgtttctccttatttaaaattttctggcaaatgcttgtagagaagctggatgtatacatctaccaagaaataattcttgctaatcacttcaatgaaggaggagcagcccagctgcagtttgatatgactcggaatcttttccctttgttttctcactattgcaagagaccagaaaattattttaaacatataaaagaagcctgtattgttttgaatttgaacgtcggttctgcactactgctgaaagatgtactgcagtcagcttcagggcagcttcctgccacagcagcattaaatgaagttggaatttacaaactggctcaacaagatgttgagattctacttaatttgaggacaaattggcctaatactggaaaataatgtctttcagaaaaaggtttctttggtttttgtttctaagaaagaggaagccaattggatttcaagttatatgatgaaattctgaattaatgaaactggaaaactttatagaattacttattatcttggatttatggtgttattaaaatgctgaccatatttccttcatcctcttgttcctaaggaaacaaaaacagaaaacgaaacaatgaaaactcaattctatttacaagtataaatgctgagtatgtctgttgaagacgagcagagatattaaattataaccaactttcaatttcctgtgctaattaagggaaattctgttgtggataatcaaacatagccaataaatttttttaaaactcc

SEQ ID NO: 173525 - DNA, 578 bp, Homo sapiens
  Payload ID: 14089
  Gene Symbol: RINT1
  Gene Name: RAD50 interactor 1
  ENST ID: ENST00000482041
  CDS Start-End: 136-261
gacatcgagaggaagtcgctgtggcactcagtcctacggcctccgaggctgggtagtgagtgtgtcgctggccttagccagactccacaggccacgctggctgcgaatggagccgaggactcgcgcggaggcgagatgctaccagccggcgagatcggcgcctctcctgcagccccgtgctgctctgaaagtggtgacgaaaggaagaacctcgaggagaaaaagatgaggtcttgctctgctgtccaggctggaatgtagtagtgagatcatggctcactgcagcctccatctcccaggctgctcaagcaatcctcccacctcagcccacctgagactacaggtgacataaatgttacagttcttattggaagtaaacaagtcagtgaaggtacagataatggtgatctcccttcttatgtgtctgcattcatagaaaaggaagttggaaatgaccttaaatctttaaagaaacttgataaactcatagaacagaggacagtaagtaaaatgcagttagaagaacaggtacttacaatttcatcagaaattcctaaaagaattcgaagtgccttaaa

SEQ ID NO: 173526 - DNA, 563 bp, Homo sapiens
  Payload ID: 14089
  Gene Symbol: RINT1
  Gene Name: RAD50 interactor 1
  ENST ID: ENST00000493041
  CDS Start-End: 133-563
atcgagaggaagtcgctgtggcactcagtcctacggcctccgaggctgggtagtgagtgtgtcgctggccttagccagactccacaggccacgctggctgcgaatggagccgaggactcgcgcggaggcgagatgctaccagccggcgagatcggcgcctctcctgcagccccgtgctgctctgaaagtggtgacgaaaggaagaacctcgaggagaaaaaaaaggaagttggaaatgaccttaaatctttaaagaaacttgataaactcatagaacagaggacagtaagtaaaatgcagttagaagaacaggtacttacaatttcatcagaaattcctaaaagaattcgaagtgccttaaaaaatgcagaagaatcaaagcaatttcttaatcagtttctggagcaggaaactcatctcttcagcgccattaacagccatttgctgactgcgcaaccttggatggacgatcttggaaccatgattagccagattgaagagatcgaacgtcatcttgcttaccttaaatggatttcacaaattgaagaactaagtgataacat

SEQ ID NO: 173527 - DNA, 837 bp, Homo sapiens
  Payload ID: 14089
  Gene Symbol: RINT1
  Gene Name: RAD50 interactor 1
  ENST ID: ENST00000467392
  CDS Start-End: 148-312
agaaaccagtgagacatcgagaggaagtcgctgtggcactcagtcctacggcctccgaggctgggtagtgagtgtgtcgctggccttagccagactccacaggccacgctggctgcgaatggagccgaggactcgcgcggaggcgagatgctaccagccggcgagatcggcgcctctcctgcagccccgtgctgctctgaaagtggtgacgaaaggaagaacctcgaggagaaaagtgacataaatgttacagttcttattggaagtaaacaagtcagtgaaggtacttacaatttcatcagaaattcctaaaagaattcgaagtgccttaaaaaatgcagaagaatcaaagcaatttcttaatcagtttctggagcaggaaactcatctcttcagcgccattaacagccatttgctgactgcgcaaccttggatggacgatcttggaaccatgattagccagattgaagagatcgaacgtcatcttgcttaccttaaatggatttcacaaattgaagaactaagtgataacattcagcaatatctgatgaccaataatgtaccggaggcagcctccactctagtgtctatggcagaacttgacattaaacttcaggaatcatcttgtactcatcttcttggtttcatgagagccacagttaaattctggcataaaattctcaaggacaagcttacaagtgattttgaggaaattttagcacagcttcattggccattcatcgcaccccctcaatcacaaactgttggcttaagtcgacctgccagtgccccggagatatacagttacctggagacactgttttgtcagcttttgaa

SEQ ID NO: 173528 - DNA, 2627 bp, Homo sapiens
  Payload ID: 14089
  Gene Symbol: RINT1
  Gene Name: RAD50 interactor 1
  ENST ID: ENST00000497979
  CDS Start-End: 105-278
tcctacggcctccgaggctgggtagtgagtgtgtcgctggccttagccagactccacaggccacgctggctgcgaatggagccgaggactcgcgcggaggcgagatgctaccagccggcgagatcggcgcctctcctgcagccccgtgctgctctgaaagtggtgacgaaaggaagaacctcgaggagaaaagtgacataaatgttacagttcttattggaagtaaacaagtcagtgaagtttctggagcaggaaactcatctcttcagcgccattaacagccatttgctgactgcgcaaccttggatggacgatcttggaaccatgattagccagattgaagagatcgaacgtcatcttgcttaccttaaatggatttcacaaattgaagaactaagtgataacattcagcaatatctgatgaccaataatgtaccggaggcagcctccactctagtgtctatggcagaacttgacattaaacttcaggaatcatcttgtactcatcttcttggtttcatgagagccacagttaaattctggcataaaattctcaaggacaagcttacaagtgattttgaggaaattttagcacagcttcattggccattcatcgcaccccctcaatcacaaactgttggcttaagtcgacctgccagtgccccggagatatacagttacctggagacactgttttgtcagcttttgaaactacaaacctcagatgaattacttactgagccaaagcaactcccagaaaaatactctcttcctgcctccccttctgtcatcctgcccatccaggttatgctgactcctcttcagaagaggttcaggtatcacttcagagggaaccggcagactaatgtgttaagcaagccagaatggtacttggctcaagtacttatgtggattggaaaccatactgaatttctggatgagaagattcagccaatattagacaaagtaggctctttggtaaacgcaaggcttgaattttctcggggccttatgatgctggttcttgagaagttagccactgatattccttgtctgctatatgatgacaatctcttctgtcatttggtggatgaagtactcttgtttgaaagggagctacacagtgttcatggctatcctggcacttttgctagttgtatgcatattctatcagaggaaacctgttttcagagatggttgacggtggagagaaaatttgctcttcaaaaaatggactcaatgctttcctcagaagctgcctgggtatcgcaatataaggatatcactgacgtggatgaaatgaaagttccagattgtgcagaaacttttatgactctactcttggttataactgacaggtataaaaatcttcccacagcttcccgaaagcttcagttcctggagttacagaaggacttagtagatgattttaggatacgattaacacaagtgatgaaagaagagactagagcttcccttggctttcgatactgtgcaattcttaatgctgtgaactacatctcaacagtactagcagattgggctgacaatgttttctttctacaacttcaacaggctgcactggaggtgtttgcagagaataatactctgagtaaattgcagctaggacagctagcctctatggagagctctgtctttgatgacatgattaacctcttagaacgtttaaagcatgatatgttgacccgtcaagtagaccacgtttttagagaagttaaagatgctgcaaaattgtataaaaaagaaagatggttgtccttgccatctcagtcagagcaggcagtgatgtccctgtccagttcggcttgcccgttgctgctgacgttacgagaccatttacttcagttggagcagcagctttgtttctccttatttaaaattttctggcaaatgcttgtagagaagctggatgtatacatctaccaagaaataattcttgctaatcacttcaatgaaggaggagcagcccagctgcagtttgatatgactcggaatcttttccctttgttttctcactattgcaagagaccagaaaattattttaaacatataaaagaagcctgtattgttttgaatttgaacgtcggttctgcactactgctgaaagatgtactgcagtcagcttcagggcagcttcctgccacagcagcattaaatgaagttggaatttacaaactggctcaacaagatgttgagattctacttaatttgaggacaaattggcctaatactggaaaataatgtctttcagaaaaaggtttctttggtttttgtttctaagaaagaggaagccaattggatttcaagttatatgatgaaattctgaattaatgaaactggaaaactttatagaattacttattatcttggatttatggtgttattaaaatgctgaccatatttccttcatcctcttgttcctaaggaaacaaaaacagaaaacgaaacaatgaaaactcaattctatttacaagtataaatgctgagtatgtctgttgaagacgagcagagatattaaattataaccaactttcaatttcctgtgctaattaagggaaattctgttgtggataatcaaacatagccaataaatttttttaaaactc

SEQ ID NO: 173529 - DNA, 2163 bp, Homo sapiens
  Payload ID: 14090
  Gene Symbol: RAD51AP1
  Gene Name: RAD51 associated protein 1
  Uniprot ID: Q96B01
  ENST ID: ENST00000228843
  CDS Start-End: 51-1109
gaagccaacaagaatttgagaactgtaaataccaagccttgaaagggaccatggtgcggcctgtgagacataagaaaccagtcaattactcacagtttgaccactctgacagtgatgatgattttgtttctgcaactgtacctttaaacaagaaatccagaacagcaccaaaggagttaaaacaagataaaccaaaacctaacttgaacaatctccggaaagaagaaatcccagtacaagagaaaacccctaaaaaaagactccctgaaggtacttttagtattccagctagtgcagtgccttgtacaaagatggctttagatgacaagctctaccagagagacttagaagttgcactagctttatcagtgaaggaacttccaacagtcaccactaatgtgcagaactctcaagataaaagcattgaaaaacatggcagtagtaaaatagaaacaatgaataagtctcctcatatctctaattgcagtgtagccagtgattatttagatttggataagattactgtggaagatgatgttggtggtgttcaagggaaaagaaaagcagcatctaaagctgcagcacagcagaggaagattcttctggaaggcagtgatggtgatagtgctaatgacactgaaccagactttgcacctggtgaagattctgaggatgattctgatttttgtgagagtgaggataatgacgaagacttctctatgagaaaaagtaaagttaaagaaattaaaaagaaagaagtgaaggtaaaatccccagtagaaaagaaagagaagaaatctaaatccaaatgtaatgctttggtgacttcggtggactctgctccagctgccgtcaaatcagaatctcagtccttgccaaaaaaggtttctctgtcttcagataccactaggaaaccattagaaatacgcagtccttcagctgaaagcaagaaacctaaatgggtcccaccagcggcatctggaggtagcagaagtagcagcagcccactggtggtagtgtctgtgaagtctcccaatcagagtctccgccttggcttgtccagattagcacgagttaaacctttgcatccaaatgccactagcacctgagtgtggtacaggaggaatgtttggttgggagaatcacagctttacaagggtgtttatatttgatttgtgtttatatttgaggcaggtattgtaatataaaggaatccattaccatgtcctataaatgacctctagccattttatgattatgttctctgtaaaactcttcaagacttcaatgagaagtttgtttataagaattatcttctcatacctttccttgtgaagagcgtattctgtttttctatcagttcgacatgaagtccacatcacatgctgttcttttctagttacatgatgtgcctttctagctttgtctagtttatagcaccttaactttaactgttcagttttatctggcagaggaaaacattcttatttctttcagaagacatttctgaaatcttataagctacttaagctacgttgtcagttttatcgcaaagatgttttgtattttagccaaatctttttatagtacaaacttagaattattttacacactaaaatggttgcagttttatggcatatgtctccgatttagatggttattctctagaaaatagtatttaaagacattttatgaaatcttcattgtcaaaacctttaataaaagtggaaatattttgaaatgccctttttcttgataccactcatccacgtgttcctgattgtccacatttcatgataaaatgagagctccgcagagaatgttagcctttctgttgtaaatgtaatcttcaagtagtcactttttgttaagttctttagaaagtagttgtcaagtacttagtcatccctattatgatatgagatagtacagcttttcaggaagcttagatctgaatttactttgaaaaacaattgtaatgaatattttatatttacattgagaatttcaactagcttctgatcaatttttaataaaaaattttcaaatcatgttagctgttaaaaaatgtataataactcagtttttcttggtttatggaaatatctatattaatgtgaaaataattaatttagaattgtgattaaagtgagcatttgtcta

SEQ ID NO: 173530 - DNA, 2113 bp, Homo sapiens
  Payload ID: 14090
  Gene Symbol: RAD51AP1
  Gene Name: RAD51 associated protein 1
  Uniprot ID: Q96B01
  ENST ID: ENST00000352618
  CDS Start-End: 51-1058
gaagccaacaagaatttgagaactgtaaataccaagccttgaaagggaccatggtgcggcctgtgagacataagaaaccagtcaattactcacagtttgaccactctgacagtgatgatgattttgtttctgcaactgtacctttaaacaagaaatccagaacagcaccaaaggagttaaaacaagataaaccaaaacctaacttgaacaatctccggaaagaagaaatcccagtacaagagaaaacccctaaaaaaaggatggctttagatgacaagctctaccagagagacttagaagttgcactagctttatcagtgaaggaacttccaacagtcaccactaatgtgcagaactctcaagataaaagcattgaaaaacatggcagtagtaaaatagaaacaatgaataagtctcctcatatctctaattgcagtgtagccagtgattatttagatttggataagattactgtggaagatgatgttggtggtgttcaagggaaaagaaaagcagcatctaaagctgcagcacagcagaggaagattcttctggaaggcagtgatggtgatagtgctaatgacactgaaccagactttgcacctggtgaagattctgaggatgattctgatttttgtgagagtgaggataatgacgaagacttctctatgagaaaaagtaaagttaaagaaattaaaaagaaagaagtgaaggtaaaatccccagtagaaaagaaagagaagaaatctaaatccaaatgtaatgctttggtgacttcggtggactctgctccagctgccgtcaaatcagaatctcagtccttgccaaaaaaggtttctctgtcttcagataccactaggaaaccattagaaatacgcagtccttcagctgaaagcaagaaacctaaatgggtcccaccagcggcatctggaggtagcagaagtagcagcagcccactggtggtagtgtctgtgaagtctcccaatcagagtctccgccttggcttgtccagattagcacgagttaaacctttgcatccaaatgccactagcacctgagtgtggtacaggaggaatgtttggttgggagaatcacagctttacaagggtgtttatatttgatttgtgtttatatttgaggcaggtattgtaatataaaggaatccattaccatgtcctataaatgacctctagccattttatgattatgttctctgtaaaactcttcaagacttcaatgagaagtttgtttataagaattatcttctcatacctttccttgtgaagagcgtattctgtttttctatcagttcgacatgaagtccacatcacatgctgttcttttctagttacatgatgtgcctttctagctttgtctagtttatagcaccttaactttaactgttcagttttatctggcagaggaaaacattcttatttctttcagaagacatttctgaaatcttataagctacttaagctacgttgtcagttttatcgcaaagatgttttgtattttagccaaatctttttatagtacaaacttagaattattttacacactaaaatggttgcagttttatggcatatgtctccgatttagatggttattctctagaaaatagtatttaaagacattttatgaaatcttcattgtcaaaacctttaataaaagtggaaatattttgaaatgccctttttcttgataccactcatccacgtgttcctgattgtccacatttcatgataaaatgagagctccgcagagaatgttagcctttctgttgtaaatgtaatcttcaagtagtcactttttgttaagttctttagaaagtagttgtcaagtacttagtcatccctattatgatatgagatagtacagcttttcaggaagcttagatctgaatttactttgaaaaacaattgtaatgaatattttatatttacattgagaatttcaactagcttctgatcaatttttaataaaaaattttcaaatcatgttagctgttaaaaaatgtataataactcagtttttcttggtttatggaaatatctatattaatgtgaaaataattaatttagaattgtgattaaagtgagcatttgtctat

SEQ ID NO: 173531 - DNA, 2235 bp, Homo sapiens
  Payload ID: 14090
  Gene Symbol: RAD51AP1
  Gene Name: RAD51 associated protein 1
  ENST ID: ENST00000442992
  CDS Start-End: 51-263
gaagccaacaagaatttgagaactgtaaataccaagccttgaaagggaccatggtgcggcctgtgagacataagaaaccagtcaattactcacagtttgaccactctgacagtgatgatgattttgtttctgcaactgtacctttaaacaagaaatccagaacagcaccaaaggagttaaaacaagataaaccaaaacctaacttgaacaatctccggaaagaagaaatcccagtacaagagaaaacccctaaaaaaaggtgagagccatagaaagaaatgacaactgataactgatatatactgcaatatggatgaaccttggaaacatcattctgagtgaaagaagccagatatacagactccctgaaggtacttttagtattccagctagtgcagtgccttgtacaaagatggctttagatgacaagctctaccagagagacttagaagttgcactagctttatcagtgaaggaacttccaacagtcaccactaatgtgcagaactctcaagataaaagcattgaaaaacatggcagtagtaaaatagaaacaatgaataagtctcctcatatctctaattgcagtgtagccagtgattatttagatttggataagattactgtggaagatgatgttggtggtgttcaagggaaaagaaaagcagcatctaaagctgcagcacagcagaggaagattcttctggaaggcagtgatggtgatagtgctaatgacactgaaccagactttgcacctggtgaagattctgaggatgattctgatttttgtgagagtgaggataatgacgaagacttctctatgagaaaaagtaaagttaaagaaattaaaaagaaagaagtgaaggtaaaatccccagtagaaaagaaagagaagaaatctaaatccaaatgtaatgctttggtgacttcggtggactctgctccagctgccgtcaaatcagaatctcagtccttgccaaaaaaggtttctctgtcttcagataccactaggaaaccattagaaatacgcagtccttcagctgaaagcaagaaacctaaatgggtcccaccagcggcatctggaggtagcagaagtagcagcagcccactggtggtagtgtctgtgaagtctcccaatcagagtctccgccttggcttgtccagattagcacgagttaaacctttgcatccaaatgccactagcacctgagtgtggtacaggaggaatgtttggttgggagaatcacagctttacaagggtgtttatatttgatttgtgtttatatttgaggcaggtattgtaatataaaggaatccattaccatgtcctataaatgacctctagccattttatgattatgttctctgtaaaactcttcaagacttcaatgagaagtttgtttataagaattatcttctcatacctttccttgtgaagagcgtattctgtttttctatcagttcgacatgaagtccacatcacatgctgttcttttctagttacatgatgtgcctttctagctttgtctagtttatagcaccttaactttaactgttcagttttatctggcagaggaaaacattcttatttctttcagaagacatttctgaaatcttataagctacttaagctacgttgtcagttttatcgcaaagatgttttgtattttagccaaatctttttatagtacaaacttagaattattttacacactaaaatggttgcagttttatggcatatgtctccgatttagatggttattctctagaaaatagtatttaaagacattttatgaaatcttcattgtcaaaacctttaataaaagtggaaatattttgaaatgccctttttcttgataccactcatccacgtgttcctgattgtccacatttcatgataaaatgagagctccgcagagaatgttagcctttctgttgtaaatgtaatcttcaagtagtcactttttgttaagttctttagaaagtagttgtcaagtacttagtcatccctattatgatatgagatagtacagcttttcaggaagcttagatctgaatttactttgaaaaacaattgtaatgaatattttatatttacattgagaatttcaactagcttctgatcaatttttaataaaaaattttcaaatcatgttagctgttaaaaaatgtataataactcagtttttcttggtttatggaaatatctatattaatgtgaaaataattaattta

SEQ ID NO: 173532 - DNA, 841 bp, Homo sapiens
  Payload ID: 14090
  Gene Symbol: RAD51AP1
  Gene Name: RAD51 associated protein 1
  ENST ID: ENST00000536886
  CDS Start-End: 72-287
gcgggaattgaaaccgccgctgaagccaacaagaatttgagaactgtaaataccaagccttgaaagggaccatggtgcggcctgtgagacataagaaaccagtcaattactcacagtttgaccactctgacagtgatgatgattttgtttctgcaactgtacctttaaacaagaaatccagaacagcaccaaaggagttaaaacaagataaaccaaaacctaacttgaacaatctccggaaagaagaaatcccagtacaagagaaaacccctaaaaaaaggcattgaaaaacatggcagtagtaaaatagaaacaatgaataagtctcctcatatctctaattgcagtgtagccagtgattatttagatttggataagattactgtggaagatgatgttggtggtgttcaagggaaaagaaaagcagcatctaaagctgcagcacagcagaggaagattcttctggaaggcagtgatggtgatagtgctaatgacactgaaccagactttgcacctggtgaagattctgaggatgattctgatttttgtgagagtgaggataatgacgaagacttctctatgagaaaaagtaaagttaaagaaattaaaaagaaagaagtgaaggtaaaatccccagtagaaaagaaagagaagaaatctaaatccaaatgtaatgctttggtgacttcggtggactctgctccagctgccgtcaaatcagaatctcagtccttgccaaaaaaggtttctctgtcttcagataccactaggaaaccattagaaatacgcagtccttcagctgaaagcaagaaacctaaatgggtcccaccaggtatggcat

SEQ ID NO: 173533 - DNA, 1333 bp, Homo sapiens
  Payload ID: 14090
  Gene Symbol: RAD51AP1
  Gene Name: RAD51 associated protein 1
  ENST ID: ENST00000535558
  CDS Start-End: 51-266
gaagccaacaagaatttgagaactgtaaataccaagccttgaaagggaccatggtgcggcctgtgagacataagaaaccagtcaattactcacagtttgaccactctgacagtgatgatgattttgtttctgcaactgtacctttaaacaagaaatccagaacagcaccaaaggagttaaaacaagataaaccaaaacctaacttgaacaatctccggaaagaagaaatcccagtacaagagaaaacccctaaaaaaaggcattgaaaaacatggcagtagtaaaatagaaacaatgaataagtctcctcatatctctaattgcagtgtagccagtgattatttagatttggataagattactgtggaagatgatgttggtggtgttcaagggaaaagaaaagcagcatctaaagctgcagcacagcagaggaagattcttctggaaggcagtgatggtgatagtgctaatgacactgaaccagactttgcacctggtgaagattctgaggatgattctgatttttgtgagagtgaggataatgacgaagacttctctatgagaaaaagtaaagttaaagaaattaaaaagaaagaagtgaaggtaaaatccccagtagaaaagaaagagaagaaatctaaatccaaatgtaatgctttggtgacttcggtggactctgctccagctgccgtcaaatcagaatctcagtccttgccaaaaaaggtttctctgtcttcagataccactaggaaaccattagaaatacgcagtccttcagctgaaagcaagaaacctaaatgggtcccaccaggtatggcatatttatcatcaaggacaggagcttggaaaattatcactgcggcatctggaggtagcagaagtagcagcagcccactggtggtagtgtctgtgaagtctcccaatcagagtctccgccttggcttgtccagattagcacgagttaaacctttgcatccaaatgccactagcacctgagtgtggtacaggaggaatgtttggttgggagaatcacagctttacaagggtgtttatatttgatttgtgtttatatttgaggcaggtattgtaatataaaggaatccattaccatgtcctataaatgacctctagccattttatgattatgttctctgtaaaactcttcaagacttcaatgagaagtttgtttataagaattatcttctcatacctttccttgtgaagagcgtattctgtttttctatcagttcgacatgaagtccacatcacatgctgttcttttctagttacatgatgtgcctttctagctttgtctagtttatagcaccttaac

SEQ ID NO: 173534 - DNA, 566 bp, Homo sapiens
  Payload ID: 14090
  Gene Symbol: RAD51AP1
  Gene Name: RAD51 associated protein 1
  ENST ID: ENST00000544173
  CDS Start-End: 1-207
cataagaaaccagtcaattactcacagtttgaccactctgacagtgatgatgattttgtttctgcaactgtacctttaaacaagaaatccagaacagcaccaaaggagttaaaacaagataaaccaaaacctaacttgaacaatctccggaaagaagaaatcccagtacaagagaaaacccctaaaaaaagccatagaaagaaatgacaactgataactgatatatactgcaatatggatgaaccttggaaacatcattctgagtgaaagaagccagatatacaggatggctttagatgacaagctctaccagagagacttagaagttgcactagctttatcagtgaaggaacttccaacagtcaccactaatgtgcagaactctcaagataaaagcattgaaaaacatggcagtagtaaaatagaaacaatgaataagtctcctcatatctctaattgcagtgtagccagtgattatttagatttggataagattactgtggaagatgatgttggtggtgttcaagggaaaagaaaagcagcatctaaagctgcagcacagcaga

SEQ ID NO: 173535 - DNA, 1036 bp, Homo sapiens
  Payload ID: 14090
  Gene Symbol: RAD51AP1
  Gene Name: RAD51 associated protein 1
  ENST ID: ENST00000398012
  CDS Start-End: 58-270
cgccgctgaagccaacaagaatttgagaactgtaaataccaagccttgaaagggaccatggtgcggcctgtgagacataagaaaccagtcaattactcacagtttgaccactctgacagtgatgatgattttgtttctgcaactgtacctttaaacaagaaatccagaacagcaccaaaggagttaaaacaagataaaccaaaacctaacttgaacaatctccggaaagaagaaatcccagtacaagagaaaacccctaaaaaaaggtgagaggcattgaaaaacatggcagtagtaaaatagaaacaatgaataagtctcctcatatctctaattgcagtgtagccagtgattatttagatttggataagattactgtggaagatgatgttggtggtgttcaagggaaaagaaaagcagcatctaaagctgcagcacagcagaggaagattcttctggaaggcagtgatggtgatagtgctaatgacactgaaccagactttgcacctggtgaagattctgaggatgattctgatttttgtgagagtgaggataatgacgaagacttctctatgagaaaaagtaaagttaaagaaattaaaaagaaagaagtgaaggtaaaatccccagtagaaaagaaagagaagaaatctaaatccaaatgtaatgctttggtgacttcggtggactctgctccagctgccgtcaaatcagaatctcagtccttgccaaaaaaggtttctctgtcttcagataccactaggaaaccattagaaatacgcagtccttcagctgaaagcaagaaacctaaatgggtcccaccaggtatggcatatttatcatcaaggacaggagcttggaaaattatcactgcggcatctggaggtagcagaagtagcagcagcccactggtggtagtgtctgtgaagtctcccaatcagagtctccgccttggcttgtccagattagcacgagttaaacctttgcatccaaatgccactagcacctgagtgtggtacaggaggaatgtttggtt

SEQ ID NO: 173536 - DNA, 581 bp, Homo sapiens
  Payload ID: 14090
  Gene Symbol: RAD51AP1
  Gene Name: RAD51 associated protein 1
  ENST ID: ENST00000538817
  CDS Start-End: 34-258
gagaactgtaaataccaagccttgaaagggaccatggtgcggcctgtgagacataagaaaccagtcaattactcacagtttgaccactctgacagtgatgatgattttgtttctgcaactgtacctttaaacaagaaatccagaacagcaccaaaggagttaaaacaagataaaccaaaacctaacttgaacaatctccggaaagaagaaatcccagtacaagagaaaacccctaaaaaaagccatagaaagaaatgacaactgataactgatatatactgcaatatggatgaaccttggaaacatcattctgagtgaaagaagccagatatacagactccctgaaggtacttttagtattccagctagtgcagtgccttgtacaaagatggctttagatgacaagctctaccagagagacttagaagttgcactagctttatcagtgaaggaacttccaacagtcaccactaatgtgcagaactctcaagataaaagcattgaaaaacatggcagtagtaaaatagaaacaatgaataagtctcctcatatctctaattgcagtgtagccagtgattatt

SEQ ID NO: 173537 - DNA, 707 bp, Homo sapiens
  Payload ID: 14090
  Gene Symbol: RAD51AP1
  Gene Name: RAD51 associated protein 1
  ENST ID: ENST00000536346
  CDS Start-End: 143-355
gccgcaagcatggctggtgatgattggacgactggtaacagggggcggagggctccgaagtctggttttgggcgggaattgaaaccgccgctgaagccaacaagaatttgagaactgtaaataccaagccttgaaagggaccatggtgcggcctgtgagacataagaaaccagtcaattactcacagtttgaccactctgacagtgatgatgattttgtttctgcaactgtacctttaaacaagaaatccagaacagcaccaaaggagttaaaacaagataaaccaaaacctaacttgaacaatctccggaaagaagaaatcccagtacaagagaaaacccctaaaaaaaggtgagaggatggctttagatgacaagctctaccagagagacttagaagttgcactagctttatcagtgaaggaacttccaacagtcaccactaatgtgcagaactctcaagataaaagcattgaaaaacatggcagtagtaaaatagaaacaatgaataagtctcctcatatctctaattgcagtgtagccagtgattatttagatttggataagattactgtggaagatgatgttggtggtgttcaagggaaaagaaaagcagcatctaaagctgcagcacagcagaggaagattcttctggaaggcagtgatggtgatagtgctaatgacactgaaccagactttgcacctggt

SEQ ID NO: 173538 - DNA, 773 bp, Homo sapiens
  Payload ID: 14090
  Gene Symbol: RAD51AP1
  Gene Name: RAD51 associated protein 1
  ENST ID: ENST00000536117
  CDS Start-End: 1-773
acataagaaaccagtcaattactcacagtttgaccactctgacagtgatgatgattttgtttctgcaactgtacctttaaacaagaaatccagaacagcaccaaaggagttaaaacaagataaaccaaaacctaacttgaacaatctccggaaagaagaaatcccagtacaagagaaaacccctaaaaaaaggatggctttagatgacaagctctaccagagagacttagaagttgcactagctttatcagtgaaggaacttccaacagtcaccactaatgtgcagaactctcaagataaaagcattgaaaaacatggcagtagtaaaatagaaacaatgaataagtctcctcatatctctaattgcagtgtagccagtgattatttagatttggataagattactgtggaagatgatgttggtggtgttcaagggaaaagaaaagcagcatctaaagctgcagcacagcagaggaagattcttctggaaggcagtgatggtgatagtgctaatgacactgaaccagactttgcacctggtgaagattctgaggatgattctgatttttgtgagagtgaggataatgacgaagacttctctatgagaaaaagtaaagttaaagaaattaaaaagaaagaagtgaaggtaaaatccccagtagaaaagaaagagaagaaatctaaatccaaatgtaatgctttggataccactaggaaaccattagaaatacgcagtccttcagctgaaagcaagaaacctaaatgggtcccac

SEQ ID NO: 173539 - DNA, 567 bp, Homo sapiens
  Payload ID: 14090
  Gene Symbol: RAD51AP1
  Gene Name: RAD51 associated protein 1
  ENST ID: ENST00000544110
  CDS Start-End: 58-270
cgccgctgaagccaacaagaatttgagaactgtaaataccaagccttgaaagggaccatggtgcggcctgtgagacataagaaaccagtcaattactcacagtttgaccactctgacagtgatgatgattttgtttctgcaactgtacctttaaacaagaaatccagaacagcaccaaaggagttaaaacaagataaaccaaaacctaacttgaacaatctccggaaagaagaaatcccagtacaagagaaaacccctaaaaaaaggtgagaggcattgaaaaacatggcagtagtaaaatagaaacaatgaataagtctcctcatatctctaattgcagtgtagccagtgattatttagatttggataagattactgtggaagatgatgttggtggtgttcaagggaaaagaaaagcagcatctaaagctgcagcacagcagaggaagattcttctggaaggcagtgatggtgatagtgctaatgacactgaaccagactttgcacctggtgaagattctgaggatgattctgatttttgtgagagtgaggataatgacgaagact

SEQ ID NO: 173540 - DNA, 787 bp, Homo sapiens
  Payload ID: 14090
  Gene Symbol: RAD51AP1
  Gene Name: RAD51 associated protein 1
  ENST ID: ENST00000544927
  CDS Start-End: 11-718
gaaagggaccatggtgcggcctgtgagacataagaaaccagtcaattactcacagtttgaccactctgacagtgatgatgattttgtttctgcaactgtacctttaaacaagaaatccagaacagcaccaaaggagttaaaacaagataaaccaaaacctaacttgaacaatctccggaaagaagaaatcccagtacaagagaaaacccctaaaaaaaggatggctttagatgacaagctctaccagagagacttagaagttgcactagctttatcagtgaaggaacttccaacagtcaccactaatgtgcagaactctcaagataaaagcattgaaaaacatggcagtagtaaaatagaaacaatgaataagtctcctcatatctctaattgcagtgtagccagtgattatttagatttggataagattactgtggaagatgatgttggtggtgttcaagggaaaagaaaagcagcatctaaagctgcagcacagcagaggaagattcttctggaaggcagtgatggtgatagtgctaatgacactgaaccagactttgcacctggtgaagattctgaggatgattctgatttttgtgagagtgaggataatgacgaagacttctctatgagaaaaagtaaagttaaagaaattaaaaagaaagaagtgaagcggcatctggaggtagcagaagtagcagcagcccactggtggtagtgtctgtgaagtctcccaatcagagtctccgccttggcttgtccagattagcacgagttaaacctttgc

SEQ ID NO: 173541 - DNA, 3724 bp, Homo sapiens
  Payload ID: 14091
  Gene Symbol: RAD51AP2
  Gene Name: RAD51 associated protein 2
  Uniprot ID: Q09MP3
  ENST ID: ENST00000399080
  CDS Start-End: 25-3504
gacagatcctttccattcgctgtcatgtctctccctcagcccacgccgcggatggccgagctcagaaagcctacctcctctttaacgcctcctgaggacccggattcccaaccacctagtagcaagcggctctgtcttgaggagcctggaggtgtctttaaggcgggctggcgactgcctctggtgcctcgcttgtctgaggcggaaaaagtctgggagttgtcccctagacccttcaagggactccttgtttcaacgaatgctattttcgataactccacagactcgtgtgtggagaaatcagtcagtgggaagcagatatgtaatctgaaatgctcaaatctcaaattccaaatgagtagctgtttgcagtctcccccctcacaaagtcctgattctgatttgagggcttcaggaaggtctgaggcaggcctgcatgacagagaggctttcagtgtgcaccgcagtaatagctccaaagcaggggttagtcaacttctgcccagcacctctatacacgatatacatggaattagaaatgagaatcgaaaacaacagtttgtccaaggaagagacaatgttcacaaagaaaatccatttttagatgttaccttttacaaggaaactaaatcaccatttcatgaaattaagaacagatgtaaagctaacagtgttgtgccatcaaataaaagagaaaataacatttcatcatctgtactaaaaatatcaaaatctcaaaaccagcccagcttggaaattgccaaacctagctattttagagatagcggcacaataagtgtccctcagtttccaatggacttaaatagcaaaatgtcctctgtctatttaaaggaaatagcgaagaaaaagaatgacaaaaaagaggcatatgttagggatttcacaaacatttactggtcccaaaatagacctgatgttaagaagcaaaagttacagaatgataaaaaaactgtagaagcggaaaacattttttccaaatgttatgaaaatgactacccatcactcagtagccaaaatacttgtaagagaaaagacttgatcagttcaaactactgtaactgcagtagtatccagtgtaatgtaagagactctagaaagaatttcgctatactagaaaatgcaaattgggaggaagcagaatgtctggacagttacgtacttaccaggctggaaaaatctcaaaactgggactgtaacgttagacatattttgagaagaaatagaggaaattgttggattataaataattgcaagactaaatgtgaaaatatgaaaaaaactgaagaaaaatggaattggctattattattagaaatagaccttttaagcaaggaagattaccactgtgcaaaagtcatcaatgcatatgaagaacaatcaaagcttctcgtaagagaaatattaggtagtcagacagctttaataacgactgtttggctaaatggtaaaggagaaaatgataatactctacagttgagatacaatactacacaaaaagtctttcatgtgaacaacccttttgaaagtttcattatagaaattttttatttccataaaagtatttcaggaaataaaaaagataatagtattttaacctgctgtaacattttgaagtgtaaaaagcaaattggtataattggtattcaaaatctaataaccagaaacatgaatacaaatataaagaatggaattttaagcatatatttacaagatagtgtttcagaacctttagatattctattgaaaactaacatagcttttttgctcaataactttgactctttaacaagaattgaaaatgattttgaattagaagaggaatgcattttcaagtgcatgctttatttgaagtatccaaaaaatatagtggaaaatcatactgcatatctagtaaagattttaacttcttcaagactattagaagataatatgaaacctatgttaaagaaaaggaagttatttagaactgaacaagtttttgaaaagtctaagaaaaaactcattaattccttcagtatgacaactcaaaatacaggttttccgatttttgaaacatatgaaaaaattccccttttaatggactttgatgacatggatgaaatttctttaataagagaaattacttgtcagaatatgagttgtcctcaacaagttgtgaatgtggaaaattgggctcactataattctagtactgttaaagcacatggtaattcttgtcctcaatttatacagaacaaccgaggatacattaatgaaaatttttatgaagtaaatatgcacagccaagatttaaatatggaaagaaaacagggacataataagatcagtaactttgactgtgagcacatatttgaagatctctgcaatgttaggcaacaggccataccagcaagccacaacataatacataatgaagagacccataccacttctataactcaagtactaaatttttggaacttgctaagtgaaatagaagaaaaaaaatatgacttaattttgaaagaggaagtaaaagtcacagctgaaagtttaacaaatagttgccaagttcacaaagatactaagatagaaaaggaagagaaagatagtttttttccaatggatgacatgttttctgtacagtcagtttcattaataagtaaggaagtaaatgtggaagaaaataaatatgttaatcaaaattatgtaacaaatacaaatgaatatgagagtattttgccagaaagggagatagctaattcaaaggattttcacagaaagaatgactctgcattatatattaatcatcaatttgaaactggtctgagtgaagggaatgatgaatgttttcaggacttagctgctaaatatttatcaacagaagctctgacaatagtaaaagattttgagatgaagagaaaatttgacttagtacttgaagaacttcgtatgtttcatgaaattagtagggaaaatgaacttctaagcactgtggaaacaaacaatgggcaagaaaattactttggagaaaatgatgctgagaaggtaaaaatggagatagaaaaagatttgaaaatggttgtggtcaacaaaatacgtgcatcttcctcgttccatgatactatagcaggtcctaatatgggcaaaagtcaccaaagtttatttaaatggaaaactgtacccaataatggagaacaggaagttcctaatgagagttgttatccaagtagatcagaggaagaattactttactctacttctgagaaagattgtgaaacacctttacctaaaagacctgcttttctccctgatgaatgtaaagaagaatttaattatttattgagaggaggtagtcactttccacatggcatttcaagagtacgaccgcttaagacatgcagtaggccaatcaggattggtttgtcaagaaaagcaaggattaaacaacttcatccttatctgaaacaaatgtgttacggaaacttaaaagaaaatttttgactttcatatttcaaaacattttacaacatctagaaatgttttgttttctttggatatatgttcttccagcttgggggtttggggcttgctttattataaagtggagaagtttttttttttgagtgtataaattatggtattacctttcaaagttataaaatattttatggatttttatatgatataaaaatgtacacattaaagccgtttcattattgga

SEQ ID NO: 173542 - DNA, 922 bp, Homo sapiens
  Payload ID: 14092
  Gene Symbol: RAD51B
  Gene Name: RAD51 paralog B
  ENST ID: ENST00000390683
  CDS Start-End: 45-884
gtaaagggtggggaaacttgaaagttggatgctgcagacccggcatgggtagcaagaaactaaaacgagtgggtttatcacaagagctgtgtgaccgtctgagtagacatcagatccttacctgtcaggactttttatgtctttccccactggagcttatgaaggtgactggtctgagttatcgaggtgtccatgaacttctatgtatggtcagcagggcctgtgccccaaagatgcaaacggcttatgggataaaagcacaaaggtctgctgatttctcaccagcattcttatctactaccctttctgctttggacgaagccctgcatggtggtgtggcttgtggatccctcacagagattacaggtccaccaggttgtggaaaaactcagttttgtataatgatgagcattttggctacattacccaccaacatgggaggattagaaggagctgtggtgtacattgacacagagtctgcatttagtgctgaaagactggttgaaatagcagaatcccgttttcccagatattttaacactgaagaaaagttacttttgacaagtagtaaagttcatctttatcgggaactcacctgtgatgaagttctacaaaggattgaatctttggaagaagaaattatctcaaaaggaattaaacttgtgattcttgactctgttgcttctgtggtcagaaaggagtttgatgcacaacttcaaggcaatctcaaagaaagaaacaagttcttggcaagagaggcatcctccttgaagtatttggctgaggagttttcaatcccagtaagtttttctttttttctcttttttcttttcctttcttttgtttcttttatattacattcactgacttatggtatcaaataataaaattagaggaaaatgtaaaacagatgactttttaa

SEQ ID NO: 173543 - DNA, 1615 bp, Homo sapiens
  Payload ID: 14092
  Gene Symbol: RAD51B
  Gene Name: RAD51 paralog B
  ENST ID: ENST00000479335
  CDS Start-End: 78-404
gttgctttgcggcgttttccgcggggaaactgtgtaaagggtggggaaacttgaaagttggatgctgcagacccggcatgggtagcaagaaactaaaacgagtgggtttatcacaagagctgtgtgaccgtctgagtagacatcagatccttacctgtcaggactttttatgtctttccccactggagcttatgaaggtgactggtctgagttatcgaggtgtccatgaacttctatgtatggtcagcagggcctgtgccccaaagatgcaaacggcttatgggataaaagcacaaaggtctgctgatttctcaccagcattcttatctactaccctttctgctttggacgaagccctgcatggtggtgtggcttgtggatccctcacagaggatggtacataactagtgccaattcagatgcagaggggagaagttaattcattccatacaatggatgtcttgggcttaattctctcctgggaacccagattacaggtccaccaggttgtggaaaaactcagttttgtataatgatgagcattttggctacattacccaccaacatgggaggattagaaggagctgtggtgtacattgacacagagtctgcatttagtgctgaaagactggttgaaatagcagaatcccgttttcccagatattttaacactgaagaaaagttacttttgacaagtagtaaagttcatctttatcgggaactcacctgtgatgaagttctacaaaggattgaatctttggaagaagaaattatctcaaaaggaattaaacttgtgattcttgactctgttgcttctgtggtcagaaaggagtttgatgcacaacttcaaggcaatctcaaagaaagaaacaagttcttggcaagagaggcatcctccttgaagtatttggctgaggagttttcaatcccagttatcttgacgaatcagattacaacccatctgagtggagccctggcttctcaggcagacctggtgtctccagctgatgatttgtccctgtctgaaggcacttctggatccagctgtgtgatagccgcactaggaaatacctggagtcacagtgtgaatacccggctgatcctccagtaccttgattcagagagaagacagattcttattgccaagtcccctctggctcccttcacctcatttgtctacaccatcaaggaggaaggcctggttcttcaaggccaagagaagccatagggatactgtgacctttgtctagagttgatgggggtgtgatttgtgaaataaaacaggaccgtactgcttggaagaaggaaacggaagctgacataatggggattaattagttgattgctgttgagatggtaacagatttgctcctaaaccattgagctagcgatttcagacctagcagggaaggtgaagatgaagaagcctttgttcaggtctctagatgtgtagggctgagggctttgccgccatgggatgtcaacagccataataataatttgcacttatatagcacctttcaaccaggcacctcaaagcggtttaaccacattaattaattaaagcccacaatcctcctggggagaggaggaggatgactaacaagatttgtaa

SEQ ID NO: 173544 - DNA, 568 bp, Homo sapiens
  Payload ID: 14092
  Gene Symbol: RAD51B
  Gene Name: RAD51 paralog B
  ENST ID: ENST00000485181
  CDS Start-End: 169-568
cttggatccatgaagagttcctgtttcagttcgttccagaggatacttctttaccatctcaatgagatatacagcttctcctttgtatgcattaagagactcacagtaattcttttttagctctgtgaagataaatctttcatgagcctcatttacccctagcaaggcatgggtagcaagaaactaaaacgagtgggtttatcacaagagctgtgtgaccgtctgagtagacatcagatccttacctgtcaggactttttatgtctttccccactggagcttatgaaggtgactggtctgagttatcgaggtgtccatgaacttctatgtatggtcagcagggcctgtgccccaaagatgcaaacggcttatgggataaaagcacaaaggtctgctgatttctcaccagcattcttatctactaccctttctgctttggacgaagccctgcatggtggtgtggcttgtggatccctcacagagattacaggtccaccaggttgtggaaaaactcagttttgtataatgatgagcattttggctacattacccaccaacatgggaggat

SEQ ID NO: 173545 - DNA, 1536 bp, Homo sapiens
  Payload ID: 14092
  Gene Symbol: RAD51B
  Gene Name: RAD51 paralog B
  Uniprot ID: O15315
  ENST ID: ENST00000471583
  CDS Start-End: 49-1101
ctgtgtaaagggtggggaaacttgaaagttggatgctgcagacccggcatgggtagcaagaaactaaaacgagtgggtttatcacaagagctgtgtgaccgtctgagtagacatcagatccttacctgtcaggactttttatgtctttccccactggagcttatgaaggtgactggtctgagttatcgaggtgtccatgaacttctatgtatggtcagcagggcctgtgccccaaagatgcaaacggcttatgggataaaagcacaaaggtctgctgatttctcaccagcattcttatctactaccctttctgctttggacgaagccctgcatggtggtgtggcttgtggatccctcacagagattacaggtccaccaggttgtggaaaaactcagttttgtataatgatgagcattttggctacattacccaccaacatgggaggattagaaggagctgtggtgtacattgacacagagtctgcatttagtgctgaaagactggttgaaatagcagaatcccgttttcccagatattttaacactgaagaaaagttacttttgacaagtagtaaagttcatctttatcgggaactcacctgtgatgaagttctacaaaggattgaatctttggaagaagaaattatctcaaaaggaattaaacttgtgattcttgactctgttgcttctgtggtcagaaaggagtttgatgcacaacttcaaggcaatctcaaagaaagaaacaagttcttggcaagagaggcatcctccttgaagtatttggctgaggagttttcaatcccagttatcttgacgaatcagattacaacccatctgagtggagccctggcttctcaggcagacctggtgtctccagctgatgatttgtccctgtctgaaggcacttctggatccagctgtgtgatagccgcactaggaaatacctggagtcacagtgtgaatacccggctgatcctccagtaccttgattcagagagaagacagattcttattgccaagtcccctctggctcccttcacctcatttgtctacaccatcaaggaggaaggcctggttcttcaaggccaagagaagccatagggatactgtgacctttgtctagagttgatgggggtgtgatttgtgaaataaaacaggaccgtactgcttggaagaaggaaacggaagctgacataatggggattaattagttgattgctgttgagatggtaacagatttgctcctaaaccattgagctagcgatttcagacctagcagggaaggtgaagatgaagaagcctttgttcaggtctctagatgtgtagggctgagggctttgccgccatgggatgtcaacagccataataataatttgcacttatatagcacctttcaaccaggcacctcaaagcggtttaaccacattaattaattaaagcccacaatcctcctggggagaggaggaggatgactaacaagatttgtaattacaggagggaacatttccgaataaagtattgtctaccagataaaaa

SEQ ID NO: 173546 - DNA, 2596 bp, Homo sapiens
  Payload ID: 14092
  Gene Symbol: RAD51B
  Gene Name: RAD51 paralog B
  Uniprot ID: O15315
  ENST ID: ENST00000487270
  CDS Start-End: 49-1203
ctgtgtaaagggtggggaaacttgaaagttggatgctgcagacccggcatgggtagcaagaaactaaaacgagtgggtttatcacaagagctgtgtgaccgtctgagtagacatcagatccttacctgtcaggactttttatgtctttccccactggagcttatgaaggtgactggtctgagttatcgaggtgtccatgaacttctatgtatggtcagcagggcctgtgccccaaagatgcaaacggcttatgggataaaagcacaaaggtctgctgatttctcaccagcattcttatctactaccctttctgctttggacgaagccctgcatggtggtgtggcttgtggatccctcacagagattacaggtccaccaggttgtggaaaaactcagttttgtataatgatgagcattttggctacattacccaccaacatgggaggattagaaggagctgtggtgtacattgacacagagtctgcatttagtgctgaaagactggttgaaatagcagaatcccgttttcccagatattttaacactgaagaaaagttacttttgacaagtagtaaagttcatctttatcgggaactcacctgtgatgaagttctacaaaggattgaatctttggaagaagaaattatctcaaaaggaattaaacttgtgattcttgactctgttgcttctgtggtcagaaaggagtttgatgcacaacttcaaggcaatctcaaagaaagaaacaagttcttggcaagagaggcatcctccttgaagtatttggctgaggagttttcaatcccagttatcttgacgaatcagattacaacccatctgagtggagccctggcttctcaggcagacctggtgtctccagctgatgatttgtccctgtctgaaggcacttctggatccagctgtgtgatagccgcactaggaaatacctggagtcacagtgtgaatacccggctgatcctccagtaccttgattcagagagaagacagattcttattgccaagtcccctctggctcccttcacctcatttgtctacaccatcaaggaggaaggcctggttcttcaagagacaacattttgctctgtcacccaagctgaactgaactgggctccagaaatcctcccacctcagcctcctgagcagctaggactacagatgtgccaccatacccagctaattttttaattttttgtagaggtggggtctcattatgttgcccaagctgatctcaaactcctggcttcaagagatccacccacctcagcctcccaaagcgctaggattacaagtatgagactttgccattccaatgagaattttgtccttagcaatctcatccaatggccactggagatgtgtgtagggccacaagaatgagaaagggggcaatggagtgacaggtgacctgctcaggtgcccctccccagaccaaatgtcccaggcacacagcccatgccctccaccatggagtacattttctccctggcttgctgctgagctaaaggaccagggacgtggaaacaggaggtgaactaaggcaccccgccacccactgtggcagcttgaatttcttgaggctgagacaaactaggatccagtagcctagattttgccccagtttctccactgagtatttactcagtgctcctgagccgatgccttcccctctgcctagatgaaccacagcattttggtaaatgcctcagcatgttaggagcgctggaacgtttattctcttccctcccaattatccactctaatggagcagaacacttacatggaaaatcctaaacatggaagatgatttaaaaatgattcaccctggaatacatgcttccagttgcttctacaggtttaccttgctaaaggcatttcgcttcctttgctgttacaataagcttgcctgccttgaagaaaagaagaccagggccaaagggaaatcagtcaagggagcctgttttgtctgaaataatgcatccatgaacaaatgaattgagtataactgtctttttacatcagtgtttctgtggaattaagagaacatccaaggccactcctagcttgagtagattaaatttgtccttgtgtttggagcaagggttgtgaagtctgtctggcccatcaaatgaccaatggcttttaaggaaggactaagtgacttatgaccagaacaagggagcagcctgagtcagtctccccaatgtctacattgtgttatttatactagcaaaaaaatagacacaactaaatgttcgaccatatggtattggttaaattaacatctatacgatggaatactagatggtcattaaaattatgtgtcagaagaaggcttaatctcatgggaaagtgttcacaccatattattaaagagaaaaaacagattataaagcaatatgcatacaatgtagtagttctgtaagaaaaaagtattatgtgcattttaactggaaaaatatgtataaaaatgttaacagtgcaatctctgggcaataagattatacttgacttttatttcttttttggaattgtcttttttttttttttttcaagtttcctcccattaacatgcatgttc

SEQ ID NO: 173547 - DNA, 1673 bp, Homo sapiens
  Payload ID: 14092
  Gene Symbol: RAD51B
  Gene Name: RAD51 paralog B
  ENST ID: ENST00000487861
  CDS Start-End: 78-1355
gttgctttgcggcgttttccgcggggaaactgtgtaaagggtggggaaacttgaaagttggatgctgcagacccggcatgggtagcaagaaactaaaacgagtgggtttatcacaagagctgtgtgaccgtctgagtagacatcagatccttacctgtcaggactttttatgtctttccccactggagcttatgaaggtgactggtctgagttatcgaggtgtccatgaacttctatgtatggtcagcagggcctgtgccccaaagatgcaaacggcttatgggataaaagcacaaaggtctgctgatttctcaccagcattcttatctactaccctttctgctttggacgaagccctgcatggtggtgtggcttgtggatccctcacagagattacaggtccaccaggttgtggaaaaactcagttttgtataatgatgagcattttggctacattacccaccaacatgggaggattagaaggagctgtggtgtacattgacacagagtctgcatttagtgctgaaagactggttgaaatagcagaatcccgttttcccagatattttaacactgaagaaaagttacttttgacaagtagtaaagttcatctttatcgggaactcacctgtgatgaagttctacaaaggattgaatctttggaagaagaaattatctcaaaaggaattaaacttgtgattcttgactctgttgcttctgtggtcagaaaggagtttgatgcacaacttcaaggcaatctcaaagaaagaaacaagttcttggcaagagaggcatcctccttgaagtatttggctgaggagttttcaatcccagttatcttgacgaatcagattacaacccatctgagtggagccctggcttctcaggcagacctggtgtctccagctgatgatttgtccctgtctgaaggcacttctggatccagctgtgtgatagccgcactaggaaatacctggagtcacagtgtgaatacccggctgatcctccagtaccttgattcagagagaagacagattcttattgccaagtcccctctggctcccttcacctcatttgtctacaccatcaaggaggaaggcctggttcttcaagttgttagaactgtggccagagtcagccccaggtcagaatgctggtcagcagcagactcacatcccagccctaccttcctgatacctgatgtggtgctcagaaaaacaaggaatcccaggctgttacccagtgtctccatgtgccctccacagatgcactcaactgtcctctcttctgctcttcctcctacaaactgggcaactggaatcagaacagagactttggatgagcatccagtgtaacccagcctagtttttcaccacgacttccagatctacatttaacatccgacagcaactataattctactttctgaacctccagggaagttgcttccttgtccctttcagcaaaggatgtcatggttttacaatgtctccagtgaaaaagttcttcttctctacatcttcctcccactcctacaacccttgatccccacgtgagatctcatttcctccagctgggtcttctgcagagtgattagagcttctgccctccttgcagcatctctattgtaaaaggattgctgaagcttattaagccttgcagctcctaggagg

SEQ ID NO: 173548 - DNA, 1550 bp, Homo sapiens
  Payload ID: 14092
  Gene Symbol: RAD51B
  Gene Name: RAD51 paralog B
  Uniprot ID: O15315
  ENST ID: ENST00000488612
  CDS Start-End: 28-1128
ttgaaagttggatgctgcagacccggcatgggtagcaagaaactaaaacgagtgggtttatcacaagagctgtgtgaccgtctgagtagacatcagatccttacctgtcaggactttttatgtctttccccactggagcttatgaaggtgactggtctgagttatcgaggtgtccatgaacttctatgtatggtcagcagggcctgtgccccaaagatgcaaacggcttatgggataaaagcacaaaggtctgctgatttctcaccagcattcttatctactaccctttctgctttggacgaagccctgcatggtggtgtggcttgtggatccctcacagagattacaggtccaccaggttgtggaaaaactcagttttgtataatgatgagcattttggctacattacccaccaacatgggaggattagaaggagctgtggtgtacattgacacagagtctgcatttagtgctgaaagactggttgaaatagcagaatcccgttttcccagatattttaacactgaagaaaagttacttttgacaagtagtaaagttcatctttatcgggaactcacctgtgatgaagttctacaaaggattgaatctttggaagaagaaattatctcaaaaggaattaaacttgtgattcttgactctgttgcttctgtggtcagaaaggagtttgatgcacaacttcaaggcaatctcaaagaaagaaacaagttcttggcaagagaggcatcctccttgaagtatttggctgaggagttttcaatcccagttatcttgacgaatcagattacaacccatctgagtggagccctggcttctcaggcagacctggtgtctccagctgatgatttgtccctgtctgaaggcacttctggatccagctgtgtgatagccgcactaggaaatacctggagtcacagtgtgaatacccggctgatcctccagtaccttgattcagagagaagacagattcttattgccaagtcccctctggctcccttcacctcatttgtctacaccatcaaggaggaaggcctggttcttcaagaattttggcacatttgcatatctggtttctcaatccagaacagactaaaagaaaatgagtcctgagattgctacagatgagacccacccatcggagccaggctttgaaggaactgaccgcagtgtgcatgaggaagtacttcacggtgatgaccctcgccaccctctcaggaaaacacagtgacctctcccccaacatccccttcccactcccaggtcccccggcaaaggcagaagaaccaagcaagcctttccaccaaagcagccatgaaccccattctcatcctttccaagaactctctgctataccagataggggtttggggttctgttttccattttttaaaaaaatcatttcaagactcttgaacagtgtgtcggtttacactattctatcttcttaagccaccatatcaacatattcactctgcttcctttcttttcatttggcagatgccacacttttaatggcagcaataaaaggtgtt

SEQ ID NO: 173549 - DNA, 292 bp, Homo sapiens
  Payload ID: 14092
  Gene Symbol: RAD51B
  Gene Name: RAD51 paralog B
  ENST ID: ENST00000554575
  CDS Start-End: 1-108
gattcagagagaagacagattcttattgccaagtcccctctggctcccttcacctcatttgtctacaccatcaaggaggaaggcctggttcttcaagctggaaaatgaaaacattaaccttgattcaagactttgaaaactgtcgcaacccattggtgggtcatgaagtgaaattgatgaatcacaaccagcatttgaaaacagagagagagagaagacagaagaaagagtgaagaaaaaatatcagattatatcacacatattgtttcatttcataaaatatttcttgtgt

SEQ ID NO: 173550 - DNA, 249 bp, Homo sapiens
  Payload ID: 14092
  Gene Symbol: RAD51B
  Gene Name: RAD51 paralog B
  ENST ID: ENST00000553334
  CDS Start-End: 25-249
cttttctttgctggatctggaggcatgggtagcaagaaactaaaacgagtgggtttatcacaagagctgtgtgaccgtctgagtagacatcagatccttacctgtcaggactttttatgtctttccccactggagcttatgaaggtgactggtctgagttatcgaggtgtccatgaacttctatgtatggtcagcagggcctgtgccccaaagatgcaaacggcttatgggataaaagcacaaaggtct

SEQ ID NO: 173551 - DNA, 2591 bp, Homo sapiens
  Payload ID: 14093
  Gene Symbol: RAD51C
  Gene Name: RAD51 paralog C
  Uniprot ID: O43502
  ENST ID: ENST00000337432
  CDS Start-End: 72-1202
gacgtcacgccgcacgccccagcgagggcgtgcggagtttggctgctccggggttagcaggtgagcctgcgatgcgcgggaagacgttccgctttgaaatgcagcgggatttggtgagtttcccgctgtctccagcggtgcgggtgaagctggtgtctgcggggttccagactgctgaggaactcctagaggtgaaaccctccgagcttagcaaagaagttgggatatctaaagcagaagccttagaaactctgcaaattatcagaagagaatgtctcacaaataaaccaagatatgctggtacatctgagtcacacaagaagtgtacagcactggaacttcttgagcaggagcatacccagggcttcataatcaccttctgttcagcactagatgatattcttgggggtggagtgcccttaatgaaaacaacagaaatttgtggtgcaccaggtgttggaaaaacacaattatgtatgcagttggcagtagatgtgcagataccagaatgttttggaggagtggcaggtgaagcagtttttattgatacagagggaagttttatggttgatagagtggtagaccttgctactgcctgcattcagcaccttcagcttatagcagaaaaacacaagggagaggaacaccgaaaagctttggaggatttcactcttgataatattctttctcatatttattattttcgctgtcgtgactacacagagttactggcacaagtttatcttcttccagatttcctttcagaacactcaaaggttcgactagtgatagtggatggtattgcttttccatttcgtcatgacctagatgacctgtctcttcgtactcggttattaaatggcctagcccagcaaatgatcagccttgcaaataatcacagattagctgtaattttaaccaatcagatgacaacaaagattgatagaaatcaggccttgcttgttcctgcattaggggaaagttggggacatgctgctacaatacggctaatctttcattgggaccgaaagcaaaggttggcaacattgtacaagtcacccagccagaaggaatgcacagtactgtttcaaatcaaacctcagggatttagagatactgttgttacttctgcatgttcattgcaaacagaaggttccttgagcacccggaaacggtcacgagacccagaggaagaattataacccagaaacaaatctcaaagtgtacaaatttattgatgttgtgaaatcaatgtgtacaagtggacttgttaccttaaagtataaataaacacactatggcatgaatgaatccagatcatatgaagtgaatgggaaaaatacctaaatatgattctgtgaaagtttttctaaagcagtattctgcaattatattttaccctgttttcattttcagtaacattcagtagagatgattattatatttcacaaatgtggaaagctgatctcatgtggccagtctgaatttaccattcatactgttttcacccctttctttcccagttgcctataaaatcttaggaagaaacatatcatattcttattgtgtttttttttttttttttttttttggagatggattctcgctctgtagtccaggctggagtgcaatggcgcaatctctgctcactgcaacctccgcctcccaggttcaagcgattcatctgcctcagcctcccgagtagctggggttacaggcacctgccatcgtgcctggctaattttttgtatttttgtagagacagagttttaccatgttggccaagctggtcttgaactcctgacctcaggtgatctgcctgcccctgcctcccaaagtgctgggattacagtcgtgagccactgtgcccagccatgttctttttaaatgtaaatttgataattctttaaaattacccgcttttataattataaaagagaagccagcaccatgagtcagcatattattctgttcagttttataggtaagatacaaattttaggtgaccaaactgattttagtgacctcaatcctaaaatctaagccatttgtttagcttttaatgacattttataatgttaaagggaggactttggagctgttatctcatctagagattgtttggaacatatgtcttccagaataggttgataagctcacaatcatttattgctacgtttttgtttttgttttgagacaaggtctcactccgtcacccaggctggagtgcagtggcatgatcatagctcactgcagcctcgacctcccgggctcaagcaatcctctcacttcagcctcctgagtagctgggactacagggaggcactaccatgccctgctaatttttggatttttttgtagagacaaggtctcactatgttgcccaggctggtctcaaactcctggtctcaagcgatcctcttgccttgtcttcccaaagtgctgggattacagatgtgagccaccacacctggcctcatttctatattttgaaacacggtatgatccattctagaattctagttgttatgttgacatttttctttgaataatcttaactttgcttaaataaattaaagatttcaattctc

SEQ ID NO: 173552 - DNA, 567 bp, Homo sapiens
  Payload ID: 14093
  Gene Symbol: RAD51C
  Gene Name: RAD51 paralog C
  Uniprot ID: O43502
  ENST ID: ENST00000421782
  CDS Start-End: 17-424
agcaggtgagcctgcgatgcgcgggaagacgttccgctttgaaatgcagcgggatttggtgagtttcccgctgtctccagcggtgcgggtgaagctggtgtctgcggggttccagactgctgaggaactcctagaggtgaaaccctccgagcttagcaaagaagttgggatatctaaagcagaagccttagaaactctgcaaattatcagaagagaatgtctcacaaataaaccaagatatgctggtacatctgagtcacacaagaagtgtacagcactggaacttcttgagcaggagcatacccagggcttcataatcaccttctgttcagcactagatgatattcttgggggtggagtgcccttaatgaaaacaacagaaatttgtggtgcaccaggtgttggaaaaacacaattatggtaaaataaagtgttctccttttaagggtgggtttaataacatattatgaaagtagtattttgtactatcgtcaggaaaccaaataagatatatatgtgctcttaattttaagtgtgtatgtgcattaaacaaaaattagcttacta

SEQ ID NO: 173553 - DNA, 779 bp, Homo sapiens
  Payload ID: 14093
  Gene Symbol: RAD51C
  Gene Name: RAD51 paralog C
  ENST ID: ENST00000413590
  CDS Start-End: 1-772
agaaatttgtggtgcaccaggtgttggaaaaacacaattatgtatgcagttggcagtagatgtgcagataccagaatgttttggaggagtggcaggtgaagcagtttttattgatacagagggaagttttatggttgatagagtggtagaccttgctactgcctgcattcagcaccttcagcttatagcagaaaaacacaagggagaggaacaccgaaaagctttggaggatttcactcttgataatattctttctcatatttattattttcgctgtcgtgactacacagagttactggcacaagtttatcttcttccagatttcctttcagaacactcaaaggttcgactagtgatagtggatggtattgcttttccatttcgtcatgacctagatgacctgtctcttcgtactcggttattaaatggcctagcccagcaaatgatcagccttgcaaataatcacagattagctgtaattttaaccaatcagatgacaacaaagattgatagaaatcaggccttgcttgttcctgcattaggggaaagttggggacatgctgctacaatacggctaatctttcattgggaccgaaagcaaagcaggttggcaacattgtacaagtcacccagccagaaggaatgcacagtactgtttcaaatcaaacctcagggatttagagatactgttgttacttctgcatgttcattgcaaacagaaggttccttgagcacccggaaacggtcacgagacccagaggaagaattataacccagaa

SEQ ID NO: 173554 - DNA, 639 bp, Homo sapiens
  Payload ID: 14093
  Gene Symbol: RAD51C
  Gene Name: RAD51 paralog C
  ENST ID: ENST00000425173
  CDS Start-End: 1-639
ctcacaaataaaccaagatatgctggtacatctgagtcacacaagaagtgtacagcactggaacttcttgagcaggagcatacccagggcttcataatcaccttctgttcagcactagatgatattcttgggggtggagtgcccttaatgaaaacaacagaaatttgtggtgcaccaggtgttggaaaaacacaattatgtatgcagttggcagtagatgtgcagataccagaatgttttggaggagtggcaggtgaagcagtttttattgatacagagggaagttttatggttgatagagtggtagaccttgctactgcctgcattcagcaccttcagcttatagcagaaaaacacaagggagaggaacaccgaaaagctttggaggatttcactcttgataatattctttctcatatttattattttcgctgtcgtgactacacagagttactggcacaagtttatcttcttccagatttcctttcagaacactcaaaggcccactgcagtagcagaatcaccctactgctctgtggggtggccctgccccttcctctctctgcaagggccccaccctctgaaaccaaggacgacatagcattgccccctgggcttatggttcgactagtgatagtg

SEQ ID NO: 173555 - DNA, 1253 bp, Homo sapiens
  Payload ID: 14093
  Gene Symbol: RAD51C
  Gene Name: RAD51 paralog C
  ENST ID: ENST00000487525
  CDS Start-End: 39-443
ggagtttggctgctccggggttagcaggtgagcctgcgatgcgcgggaagacgttccgctttgaaatgcagcgggatttggtgagtttcccgctgtctccagcggtgcgggtgaagctggtgtctgcggggttccagactgctgaggaactcctagaggtgaaaccctccgagcttagcaaagaagttgggatatctaaagcagaagccttagaaactctgcaaattatcagaagagaatgtctcacaaataaaccaagatatgctggtacatctgagtcacacaagaagtgtacagcactggaacttcttgagcaggagcatacccagggcttcataatcaccttctgttcagcactagatgatattcttgggggtggagtgcccttaatgaaaacaacagaaatttgtggtgcaccaggtgttggaaaaacacaattatgaacaccgaaaagctttggaggatttcactcttgataatattctttctcatatttattattttcgctgtcgtgactacacagagttactggcacaagtttatcttcttccagatttcctttcagaacactcaaagccccaaacgtcttaaccggttccatcatcaactctaaaagtcccaggcttcatctaaatattatctaaatcagagattggtgagactcaagttataattcatcctgaagtgaaattcccttccagctgtgaacgtttgaaatcaggttcgactagtgatagtggatggtattgcttttccatttcgtcatgacctagatgacctgtctcttcgtactcggttattaaatggcctagcccagcaaatgatcagccttgcaaataatcacagattagctgtaattttaaccaatcagatgacaacaaagattgatagaaatcaggccttgcttgttcctgcattaggggaaagttggggacatgctgctacaatacggctaatctttcattgggaccgaaagcaaagcaggttggcaacattgtacaagtcacccagccagaaggaatgcacagtactgtttcaaatcaaacctcagggatttagagatactgttgttacttctgcatgttcattgcaaacagaaggttccttgagcacccggaaacggtcacgagacccagaggaagaattataacccagaaacaaatctcaaagtgtacaaatttattgatgttgtgaaatcaatgtgtacaagtggacttgttaccttaaagtataaataaacacactatggcatg

SEQ ID NO: 173556 - DNA, 2077 bp, Homo sapiens
  Payload ID: 14093
  Gene Symbol: RAD51C
  Gene Name: RAD51 paralog C
  ENST ID: ENST00000475762
  CDS Start-End: 43-201
gtgcggagtttggctgctccggggttagcaggtgagcctgcgatgcgcgggaagacgttccgctttgaaatgcagcgggatttggtgagtttcccgctgtctccagcggtgcgggtgaagctggtgtctgcggggttccagactgctgaggaactcctagaggtgaaaccctccgagcttagcaaaggtaacgactcctgatggcaagctgaggcacaccggccgccgtcagcgccgcctcagtcttcgttctctcgcctcggccttcagcccagtctccgttagattctgcttcctcccacgtccatgtttacagcgtgaaagagctcctcgactccacttacaagttgtctgaatggttaggagaactgtggtcgtgaaaacatttactaattgcttttcctctggcaatgcctgctgaatgctttgaggattgtctcatttaaccctcaacccgcttacgtagattattatattcagtatatggatgagagaactgatatcttggggagcttaggtaacttttcatgctaactgggttaggaaatactggagtcagaattggttgtctaatttttgctgttccaagatccaaggggtaagggttaaatttcagaaatgcaggattttgtgtaggactagagacactaagaatgagaaagagagtagaatccccggaatcttgaggaagcatagaaagaatattctcttacgtaattaactgaaacacccaaaacctcatattccagagcattgcagatgggaaccactgcatcctgagacatacaaatatgaggctggcggtggtcacttgttgtgcacatctctctatgacatgtctggacctgtgctattcactgaagaagatggaacagaattttaagttactgcccttactgatggaaaatacagaggtttcaattcgcctctaaagaataagtctcgtggacccagccttaactgtttaagtcataccgcgcgcagactgtgtcccccaagatttgatgggctcttttttcttcaacaagttggcttttcaaagaagaaataagttgggatatctaaagcagaagccttagaaactctgcaaattatcagaagagaatgtctcacaaataaaccaagatatgctggtacatctgagtcacacaagaagtgtacagcactggaacttcttgagcaggagcatacccagggcttcataatcaccttctgttcagcactagatgatattcttgggggtggagtgcccttaatgaaaacaacagaaatttgtggtgcaccaggtgttggaaaaacacaattatgtatgcagttggcagtagatgtgcagataccagaatgttttggaggagtggcaggtgaagcagtttttattgatacagagggaagttttatggttgatagagtggtagaccttgctactgcctgcattcagcaccttcagcttatagcagaaaaacacaagggagaggaacaccgaaaagctttggaggatttcactcttgataatattctttctcatatttattattttcgctgtcgtgactacacagagttactggcacaagtttatcttcttccagatttcctttcagaacactcaaaggttcgactagtgatagtggatggtattgcttttccatttcgtcatgacctagatgacctgtctcttcgtactcggttattaaatggcctagcccagcaaatgatcagccttgcaaataatcacagattagctgggaaagttggggacatgctgctacaatacggctaatctttcattgggaccgaaagcaaaggttggcaacattgtacaagtcacccagccagaaggaatgcacagtactgtttcaaatcaaacctcagggatttagagatactgttgttacttctgcatgttcattgcaaacagaaggttccttgagcacccggaaacggtcacgagacccagaggaagaattataacccagaaacaaatctcaaagtgtacaaatttattgatgttgtgaaatcaatgtgtacaagtggacttgttaccttaaagtataaataaacacactatggcatgaatgaa

SEQ ID NO: 173557 - DNA, 1098 bp, Homo sapiens
  Payload ID: 14093
  Gene Symbol: RAD51C
  Gene Name: RAD51 paralog C
  ENST ID: ENST00000482007
  CDS Start-End: 30-434
ctgctccggggttagcaggtgagcctgcgatgcgcgggaagacgttccgctttgaaatgcagcgggatttggtgagtttcccgctgtctccagcggtgcgggtgaagctggtgtctgcggggttccagactgctgaggaactcctagaggtgaaaccctccgagcttagcaaagaagttgggatatctaaagcagaagccttagaaactctgcaaattatcagaagagaatgtctcacaaataaaccaagatatgctggtacatctgagtcacacaagaagtgtacagcactggaacttcttgagcaggagcatacccagggcttcataatcaccttctgttcagcactagatgatattcttgggggtggagtgcccttaatgaaaacaacagaaatttgtggtgcaccaggtgttggaaaaacacaattatgaacaccgaaaagctttggaggatttcactcttgataatattctttctcatatttattattttcgctgtcgtgactacacagagttactggcacaagtttatcttcttccagatttcctttcagaacactcaaaggttcgactagtgatagtggatggtattgcttttccatttcgtcatgacctagatgacctgtctcttcgtactcggttattaaatggcctagcccagcaaatgatcagccttgcaaataatcacagattagctgtaattttaaccaatcagatgacaacaaagattgatagaaatcaggccttgcttgttcctgcattaggggaaagttggggacatgctgctacaatacggctaatctttcattgggaccgaaagcaaaggttggcaacattgtacaagtcacccagccagaaggaatgcacagtactgtttcaaatcaaacctcagggatttagagatactgttgttacttctgcatgttcattgcaaacagaaggttccttgagcacccggaaacggtcacgagacccagaggaagaattataacccagaaacaaatctcaaagtgtacaaatttattgatgttgtgaaatcaatgtgtacaagtggacttgttaccttaaagtataaataaacacactatggcatgaa

SEQ ID NO: 173558 - DNA, 1609 bp, Homo sapiens
  Payload ID: 14093
  Gene Symbol: RAD51C
  Gene Name: RAD51 paralog C
  ENST ID: ENST00000486827
  CDS Start-End: 39-197
ggagtttggctgctccggggttagcaggtgagcctgcgatgcgcgggaagacgttccgctttgaaatgcagcgggatttggtgagtttcccgctgtctccagcggtgcgggtgaagctggtgtctgcggggttccagactgctgaggaactcctagaggtgaaaccctccgagcttagcaaaggtaacgactcctgatggcaagctgaggcacaccggccgccgtcagcgccgcctcagtcttcgttctctcgcctcggccttcagcccagtctccgttagattctgcttcctcccacgtccatgtttacagcgtgaaagagctcctcgactccacttacaagttgtctgaatggttaggagaactgtggtcgtgaaaacatttactaattgcttttcctctggcaatgcctgctgaatgctttgaggattgtctcatttaaccctcaacccgcttacgtagattattatattcagtatatggatgagagaactgatatcttggggagcttaggtaacttttcatgctaactgggttaggaaatactggagtcagaattggttgtctaatttttgctgttccaagatccaaggggtaagggttaaatttcagaaatgcaggattttgtgtaggactagagacactaagaatgagaaagagagtagaatccccggaatcttgaggaagcatagaaagaatattctcttacgtaattaactgaaacacccaaaacctcatattccagagcattgcagatgggaaccactgcatcctgagacatacaaatatgaggctggcggtggtcacttgttgtgcacatctctctatgacatgtctggacctgtgctattcactgaagaagatggaacagaattttaagttactgcccttactgatggaaaatacagaggtttcaattcgcctctaaagaataagtctcgtggacccagccttaactgtttaagtcataccgcgcgcagactgtgtcccccaagatttgatgggctcttttttcttcaacaagttggcttttcaaagaagaaatgtgagaccctgaataataatgatcactaacaactattgactactttagatggtcttgatattctaccaagctttttacatgtatcgtctcattcccattttatagacgaaaaaaatctgagcaaaaaagaaaaagtgaagtaacttgcccaaagtcatgcaaagttgggatatctaaagcagaagccttagaaactctgcaaattatcagaagagaatgtctcacaaataaaccaagatatgctggtacatctgagtcacacaagaagtgtacagcactggaacttcttgagcaggagcatacccagggcttcataatcaccttctgttcagcactagatgatattcttgggggtggagtgcccttaatgaaaacaacagaaatttgtggtgcaccaggtgttggaaaaacacaattatggtaaaataaagtgttctccttttaagggtgggtttaataacatattatgaaagtagtattttgtactatcgtcaggaaaccaaataagatatatatgtgctcttaattttaagtgtgtatgtgcattaaacaaaaattagctta

SEQ ID NO: 173559 - DNA, 1319 bp, Homo sapiens
  Payload ID: 14093
  Gene Symbol: RAD51C
  Gene Name: RAD51 paralog C
  ENST ID: ENST00000583539
  CDS Start-End: 72-1112
gacgtcacgccgcacgccccagcgagggcgtgcggagtttggctgctccggggttagcaggtgagcctgcgatgcgcgggaagacgttccgctttgaaatgcagcgggatttggtgagtttcccgctgtctccagcggtgcgggtgaagctggtgtctgcggggttccagactgctgaggaactcctagaggtgaaaccctccgagcttagcaaagaagttgggatatctaaagcagaagccttagaaactctgcaaattatcagaagagaatgtctcacaaataaaccaagatatgctggtacatctgagtcacacaagaagtgtacagcactggaacttcttgagcaggagcatacccagggcttcataatcaccttctgttcagcactagatgatattcttgggggtggagtgcccttaatgaaaacaacagaaatttgtggtgcaccaggtgttggaaaaacacaattatgtatgcagttggcagtagatgtgcagataccagaatgttttggaggagtggcaggtgaagcagtttttattgatacagagggaagttttatggttgatagagtggtagaccttgctactgcctgcattcagcaccttcagcttatagcagaaaaacacaagggagaggaacaccgaaaagctttggaggatttcactcttgataatattctttctcatatttattattttcgctgtcgtgactacacagagttactggcacaagtttatcttcttccagatttcctttcagaacactcaaaggttcgactagtgatagtggatggtattgcttttccatttcgtcatgacctagatgacctgtctcttcgtactcggttattaaatggcctagcccagcaaatgatcagccttgcaaataatcacagattagctgtaattttaaccaatcagatgacaacaaagattgatagaaatcaggccttgcttgttcctgcattaggggaaagttggggacatgctgctacaatacggctaatctttcattgggaccgaaagcaaaggttggcaacattgtacaagtcacccagccagaaggaatgcacagtactgtttcaaatcaaagtcagtattatttgattagagtgggattttgatattgatgggcggtaattatctaaagagagaatttacaacttgcttctgtcaacttctgtaggcagcaagcatatttgaggacagcttttgatgcttagaacattgtccccaaaatagtagtatatacagaatattgtagtcacaaatggactgaaatttattcttaagagcagaggaaatacttatttt

SEQ ID NO: 173560 - DNA, 723 bp, Homo sapiens
  Payload ID: 14093
  Gene Symbol: RAD51C
  Gene Name: RAD51 paralog C
  ENST ID: ENST00000584617
  CDS Start-End: 1-143
gctttgaaatgcagcgggatttggtgagtttcccgctgtctccagcggtgcgggtgaagctggtgtctgcggggttccagactgctgaggaactcctagaggtgaaaccctccgagcttagcaaagtatgcagttggcagtagatgtgcagataccagaatgttttggaggagtggcaggtgaagcagtttttattgatacagagggaagttttatggttgatagagtggtagaccttgctactgcctgcattcagcaccttcagcttatagcagaaaaacacaagggagaggaacaccgaaaagctttggaggatttcactcttgataatattctttctcatatttattattttcgctgtcgtgactacacagagttactggcacaagtttatcttcttccagatttcctttcagaacactcaaaggttcgactagtgatagtggatggtattgcttttccatttcgtcatgacctagatgacctgtctcttcgtactcggttattaaatggcctagcccagcaaatgatcagccttgcaaataatcacagattagctgtaattttaaccaatcagatgacaacaaagattgatagaaatcaggccttgcttgttcctgcattaggggaaagttggggacatgctgctacaatacggctaatctttcattgggaccgaaagcaaaggttggcaacattgtacaagtcacccagccagaagga

SEQ ID NO: 173561 - DNA, 474 bp, Homo sapiens
  Payload ID: 14093
  Gene Symbol: RAD51C
  Gene Name: RAD51 paralog C
  ENST ID: ENST00000584804
  CDS Start-End: 1-324
gttcgactagtgatagtggatggtattgcttttccatttcgtcatgacctagatgacctgtctcttcgtactcggttattaaatggcctagcccagcaaatgatcagccttgcaaataatcacagattagctgtaattttaaccaatcagatgacaacaaagattgatagaaatcaggccttgcttgttcctgcattaggttggcaacattgtacaagtcacccagccagaaggaatgcacagtactgtttcaaatcaaacctcagggatttagagatactgttgttacttctgcatgttcattgcaaacagaaggttccttgagcacccggaaacggtcacgagacccagaggaagaattataacccagaaacaaatctcaaagtgtacaaatttattgatgttgtgaaatcaatgtgtacaagtggacttgttaccttaaagtataaataaacacactatggcatgaatgaa

SEQ ID NO: 173562 - DNA, 726 bp, Homo sapiens
  Payload ID: 14093
  Gene Symbol: RAD51C
  Gene Name: RAD51 paralog C
  ENST ID: ENST00000461271
  CDS Start-End: 320-726
gacgtcacgccgcacgccccagcgagggcgtgcggagtttggctgctccggggttagcaggtgagcctgcgatgcgcgggaagacgttccgctttgaaatgcagcgggatttgaagttgggatatctaaagcagaagccttagaaactctgcaaattatcagaagagaatgtctcacaaataaaccaagatatgctggtacatctgagtcacacaagaagtgtacagcactggaacttcttgagcaggagcatacccagggcttcataatcaccttctgttcagcactagatgatattcttgggggtggagtgcccttaatgaaaacaacagaaatttgtggtgcaccaggtgttggaaaaacacaattatgtatgcagttggcagtagatgtgcagataccagaatgttttggaggagtggcaggtgaagcagtttttattgatacagagggaagttttatggttgatagagtggtagaccttgctactgcctgcattcagcaccttcagcttatagcagaaaaacacaagggagaggaacaccgaaaagctttggaggatttcactcttgataatattctttctcatatttattattttcgctgtcgtgactacacagagttactggcacaagtttatcttcttccagatttcctttcagaacactcaaaggttcgactagtgatagtggatggtattgcttttccatttcgtcatgacctaga

SEQ ID NO: 173563 - DNA, 686 bp, Homo sapiens
  Payload ID: 14093
  Gene Symbol: RAD51C
  Gene Name: RAD51 paralog C
  ENST ID: ENST00000622327
  CDS Start-End: 1-396
gaacttcttgagcaggagcatacccagggcttcataatcaccttctgttcagcactagatgatattcttgggggtggagtgcccttaatgaaaacaacagaaatttgtggtgcaccaggtgttggaaaaacacaattatgtatgcagttggcagtagatgtgcagataccagaatgttttggaggagtggcaggtgaagcagtttttattgatacagagggaagttttatggttgatagagtggtagaccttgctactgcctgcattcagcaccttcagcttatagcagaaaaacacaagggagaggaatctggctctaccgcccgggctggagtgcagtggcgcaatcttggcttactgcgaccttcacctcccaggttcaagcgattctcctgactcagcctcctgagtagctgggagctgcgaatacaggcacgtgccaccatacctggctaatttttgtatttttagtagagacagagtttcatcatgttggccagactggtctcaaacttctgacctcaagtgatcctcctacgtcggcttccctaagtgctgggattatgagtgtgaacacctgtgcccagctccaaatctaaccaaacttttgagttactaatctctggactcccctgtgttgttacatgcactatgcacaattaataaactctttctcttgttaatcc

SEQ ID NO: 173564 - DNA, 1353 bp, Homo sapiens
  Payload ID: 14094
  Gene Symbol: RAD51D
  Gene Name: RAD51 paralog D
  Uniprot ID: O75771
  ENST ID: ENST00000335858
  CDS Start-End: 133-783
ctttctcctccggcagccagcgcgcctgtgtcctctctaggaaggggtaggggaggggcgtctggagaggaccccccgcgaatgcccacgtgacgtgcagtccccctggggctgttccggcctgcggggaacatgggcgtgctcagggtcggactgtgccctggccttaccgaggagatgatccagcttctcaggagccacaggatcaagacagtggtggacctggtttctgcagacctggaagaggtagctcagaaatgtggcttgtcttacaaggcagaagctctccggaggatccaggtggtgcatgcatttgacatcttccagatgctggatgtgctgcaggagctccgaggcactgtggcccagcaggtgactggttcttcaggaactgtgaaggtggtggttgtggactcggtcactgcggtggtttccccacttctgggaggtcagcagagggaaggcttggccttgatgatgcagctggcccgagagctgaagaccctggcccgggaccttggcatggcagtggtggtgaccaaccacataactcgagacagggacagcgggaggctcaaacctgccctcggacgctcctggagctttgtgcccagcactcggattctcctggacaccatcgagggagcaggagcatcaggcggccggcgcatggcgtgtctggccaaatcttcccgacagccaacaggtttccaggagatggtagacattgggacctgggggacctcagagcagagtgccacattacagggtgatcagacatgacctgtgctgttgtttgggaaacagggaagcattggggacccctcccaacttttcttcccagtaacgcctgctgtttactgccacctggcactggtgactacagacgttctcaggctggccagaagagacatcttgggttccttggcctcactctctgtaagcatataaaccacaggcgaaagaggatgctgcattgcgaggacccagaaattcatactggtgccacgtttccttcccttatttctaacgtgtatgtttctggtggaaaccaagttcaccctggctgggagcatctctgatgaggcatgctggcgactggatggataatcctgtgcatcaccattgtgtcctgtgctccctcctagcgcagtggccaagccgggaaagcctctaacttgcctttgctgctgctgccttttttttcttttgtctctgcctttccatttgttagatgggggcccactcttccttagctctgtctctgagttactgggtggaaataagcttataaatgaaatactcttcttcatctctgttttgctcttaaaaatataaaaaggcaattccccg

SEQ ID NO: 173565 - DNA, 9988 bp, Homo sapiens
  Payload ID: 14094
  Gene Symbol: RAD51D
  Gene Name: RAD51 paralog D
  Uniprot ID: O75771
  ENST ID: ENST00000345365
  CDS Start-End: 257-1243
ctggaacccggaagcggcagcgcggcgcgacccggcgggcgggctctgggcgcgggaatcccggcggatcccgggcgggcggatgacccccagccctacccttggtgccgcctcctcctctctcctttctcctccggcagccagcgcgcctgtgtcctctctaggaaggggtaggggaggggcgtctggagaggaccccccgcgaatgcccacgtgacgtgcagtccccctggggctgttccggcctgcggggaacatgggcgtgctcagggtcggactgtgccctggccttaccgaggagatgatccagcttctcaggagccacaggatcaagacagtggtggacctggtttctgcagacctggaagaggtagctcagaaatgtggcttgtcttacaaggccctggttgccctgaggcgggtgctgctggctcagttctcggctttccccgtgaatggcgctgatctctacgaggaactgaagacctccactgccatcctgtccactggcattggcagtcttgataaactgcttgatgctggtctctatactggagaagtgactgaaattgtaggaggcccaggtagcggcaaaactcaggtatgtctctgtatggcagcaaatgtggcccatggcctgcagcaaaacgtcctatatgtagattccaatggagggctgacagcttcccgcctcctccagctgcttcaggctaaaacccaggatgaggaggaacaggcagaagctctccggaggatccaggtggtgcatgcatttgacatcttccagatgctggatgtgctgcaggagctccgaggcactgtggcccagcaggtgactggttcttcaggaactgtgaaggtggtggttgtggactcggtcactgcggtggtttccccacttctgggaggtcagcagagggaaggcttggccttgatgatgcagctggcccgagagctgaagaccctggcccgggaccttggcatggcagtggtggtgaccaaccacataactcgagacagggacagcgggaggctcaaacctgccctcggacgctcctggagctttgtgcccagcactcggattctcctggacaccatcgagggagcaggagcatcaggcggccggcgcatggcgtgtctggccaaatcttcccgacagccaacaggtttccaggagatggtagacattgggacctgggggacctcagagcagagtgccacattacagggtgatcagacatgacctgtgctgttgtttgggaaacagggaagcattggggacccctcccaacttttcttcccagtaacgcctgctgtttactgccacctggcactggtgactacagacgttctcaggctggccagaagagacatcttgggttccttggcctcactctctgtaagcatataaaccacaggcgaaagaggatgctgcattgcgaggacccagaaattcatactggtgccacgtttccttcccttatttctaacgtgtatgtttctggtggaaaccaagttcaccctggctgggagcatctctgatgaggcatgctggcgactggatggataatcctgtgcatcaccattgtgtcctgtgctccctcctagcgcagtggccaagccgggaaagcctctaacttgcctttgctgctgctgccttttttttcttttgtctctgcctttccatttgttagatgggggcccactcttccttagctctgtctctgagttactgggtggaaataagcttataaatgaaatactcttcttcatctctgttttgctcttaaaaatataaaaaggcaattccccgagccctagagccacctgatttccccttagaaggctgtttttcagtttcccccagtgaggcccaaagaacagtttattcctcctttcctcttgctgatttggtttcagacctgcctgcatcaccatgactaggtgagaacgtgtgggctcgctgcagttccagggatataatttaacagaaagggagggtatgacctgctcctggtgaatccagccactcatttaatatgcatggtgccctgtggggcccctccacagtacagcataaccagaggtgctgaaccatggccttgcccataaacagacagaggagaatttgcacagtaaatagagccagctgggaaaattgatgctgacgtaaataatacatggcaaatctagtcctttatgcagaaattcattgctggtggctccaagatgcaatataattacacctctcttcctgccagctgtaccacagctagtgccctagtgtatgaaataatccctctgtctttcaccagcactgtggccatccgtctgagagccatgaccctggctgggaggggacgaagacaccagggaatggaaaataaaaggaaaagtacagaaatgatcaggattggttactggccacatcttttaaaggaaggtcatctttcttggttagagagcctgttgtgtaattaatcagttatgtcttggctgcaggaaaggagggtccgagttacactcagaaagtaatgacatttagaggtgatgaatgcaacagggatagaatcatggaggattgggaaggagtggcaaactggcaccagggtgttggattcaggacagggttggtaagcctaagcctgggggaatcctagcgcttgctttcacagaagacctcaggagaaattaatcttcagtatctttataccatgggtgattggcacattcctgcaaccacagtaagatgcaatacatgaagctggaaattgcaaattcttgccactcaaggtactatttgggcatcttcagcccacagcagacatgaccaatcgggcacaagcactcttttttgtggaagtcaaagtgtttttagaagtttttctcaatatagcactccagggggccactaccagtcagttggagttggtattcaaggtggagtctggttgccgtctctgccctgttcccattatgtagtgagttcaggtacttaatacctaactgaggaccctaggactgcagtttgagatcatctggggccaggcacagtggctcacacctataatggtagcactttgggagcctgaggcgggaggatcacttgagcccaggagtttaacagtttaaaatcagcctgggcaacatgatgagacatcgtttctacaaaaaaattttttaaattagctaggcattgtgatgtgcacctgtggtccctgctacttgggagcctgaggcaggagaatcgcttgaaccttggaggttgtggctgcagtgagccctgatcgcaccactacaccccagcctgggtaacagagcaagaccctgtctcaaggaaaaaaaaaatcatctggcccatcctgttacttaacagagaaggtacctgaggctcaaaaaggatgactgacagtcctagtggcagaatggaggtgggatctggaacccacaacttgattcctaggactcttttttttttaattcccacattggctgggtgtggtggctcacgcctgtaatcccagcactttgggaggctgaggtgggtggatcacctaaggtcaggagttccagaccagcctgaccaacatggtgaaaccccgtctgtactaaaaatacaaaaattagccaggcatggtggcccatttcctgtaatcccagctactcaggaggctgaggcagaatcgcttgaacctgggaggcggaggttgcagggagctgagatggcgccactgcactccagcctgagcgacagagtgagactccgtctcaaaaaaaaaaaaaaaatgcaaaaattagccaggcgtcgtggcgcatgtctgtaatcccagctcctcgagaggctgagtggggaggatcacttgagcccaggaggcagaggttgcaatgacctgcgatcatgccactgcactccagcctgggcaacagagactctgtttcaaaaagaaaaaaaaaatccccacattttatttaattttcagtccatacagttctattcctgctagggctgtaactccagctgaaggcaccacagctgtcacccaaggagtttctgtggccatgggaaggtgttgcattcactgctacttgagaccaccacgtgacattcctgcaggctgtgcccctcacagccagcttcatcctttggctcctcctagaccaggactttgtcttgcctgcctgctgccactgcactctgttccggccacaccacactgtgcagtcccctggtaggacttgggctaggctggctctcctgtccaagtgccttttgctccctttgcttatgtgtctgtctctgcccagctcccactgtgtctggtgcacacccaccctgacatccttttttatgcctcagctgtgatctagatagatgcttacagtaacttccctgtattagttattcacttgtactttctgttcacgtgtctgcctacaggctcccactttttgtcactttttctctttatacattatggaagctcagtaatgattaaatagatgaatgatgttttaaaaatatattttaaaaaagcaaaggactggctctatctcaggggttccttccataaagcgtcaactttcaatttcccctgcgggggtggtttgagacctgagggcactctctagttcttaggaaaaaaatatacatatacatatacatatatatatatatatacacacacacacacacacatatacacacatatatatacatatatatacacacatatatatatatacacacatatatatacacacatatatatacacatatgagccaggcgcagtggctcacgcctgtaatcccagcactttgggaggccaaagtgggcggatcacaaggtcaggagttcaagaccagcctggcctatatagtgaaaccctgtctctactaaaaatacaaaaattagctgggtgtgatggctcgcatctgtaatcccagctacttgggaggctgaggcatgagaatcgcttgaacctgggagatggaggttgcagtgagccgagattgtgccactgtactctagcctgggcaacagagtgagactccatctaaaaaatatatatatatgttcacacccacatcattgagtccccagagtgtcttcttacatatctttttacaggggactattgtatgcccttcgtctgacatcagatgaaattaatgttgagatcctactatgtgctagcacttgatggccttaattaaaaatcaggcatttgaattcccaaggactcaggcaaaggtccatgtatcattaaggctgcaagtaacaaaacctaggcttaaagaagtgtaaatactagggacacttatttatatttatttcttttatgtttcaagacagagtcttgctctggagtgcagtggcacaatcacggctcactgtaccctctacctcccaagctcaagtgatcctcccacttcagtctcccaagtagctgggactacaggtgtgtgccaccacacccatctaagttttgtattttttgtagagacggggtctctgtacgttgcccaggctggtcttgaactcctgggctcaggtgatctacccgccttgacctcccaaagtgctagggattacagtcatgagccaccatgcctggcagggacacttattatctctgataacaggaagtctgaggtttgttaatttagtggctcattgtcaaatggcgtagagcctttgcatccttctgctctgttcttttatgttggttttgtcttcaagcttgttccccttatgaaagcctggctgcagccattttgagcatcaatccagacgtgacaatatctacaggcaggagaaggatcgcctcctgtgtgtcctttaaagaacaaggtgttaacatgccaggaactgtggctcctgactgtaatcccagtaatttgggaagccaaagtaggaggatcgcctgaggccaggagttccagaccagcctgggcaacatagcaagaccctatctctataaaataaaataataaaaattaagaaaacaaggtgttaaaagacaaaattaaagcaaatatagttttgcagattgtaattgacttttatttgcaattctagaattgggctgccctcagaaccaggacaggttcagagaattccagagctgcaacatagtctgaaagcatttatggtcagaaaacagaaatgagatacaaagacaactaattggttacagctctgcctttgccttatttgaaaatggtttgaatagttggctgcctggaacccactgaagctgatgatgtgattggctgagcctcagcaatctgttacaaaagtatactcctaaattaggttttcagttagtttgcatactaaggctgcagtttgttaagggcccaagtaaagcctcctcaggtcaattttttttttctttttgagatggagtcttgctcttgctcaggctggagtgcagtggcgtgatctcagctcactgcacctctgcctcccgggttcaagtgattctcctgcctcagcctcctgagtagctgggactacgactacaggcgcctgccactatgtccggctaattttttgtatttttagtagagatggggtttcatcatgttggccatggctggtctcgaactcctgacctcagatgatctgcctgcctcagcctcccaaagaactgggattataggcatgacccactgtgactagccctcaggccaaatttagcttttgtttgtttgtttgagacggagtctctgtcacctaggctggagtgcagtggcatgatcttggctcactgcaacctctgcttcctgggttcaagcaattctgccgcagcctcccgagtagctgggattacaagcatgcgcccccatccccggctctttttgtatttttagtagagatggggtttcaccatgttggccagactggtctcaaactcctgacctcaggtgattcacctgcctctgcctcccaaagtgcctggattacaggcgtgagacaccacacccgaccccaaatttaatttaacaaaggactaactcagaactaacttccaaccaaagctgactcacctcaaatctcattggtgcagaattgcttcatacacccatgtgtaatacagtaactggcaagaaaaagggactgctgtgattgactcaaaccaactaggaaatagccctggagctgaggctggggacaggctttcctgaagcacatgctggagccactgaaagaaaaatgggagttctcctttctactagaaaggagagtgtgtggatgaactggatgctgggtgggcagcctctcactagtacttacggtagtaccaaagacgagttaatcaaggctctattatgtatccttaggcccttgatgcatgtctcattatgaccttaggacagccttgtggcagagggaatgattccatttaatagacagtaaatgggatctcagtgaggttaaggacataaagctaataagtggcagcacgggaatccagacacatgtctgcctgataccaaacccattttttcccatctgcacgctgccttctgctgtaaatatgtaaatgtttccacaaaattctttttcatactttgccctgatagcagcaggggctgcacatcccaacctcttttcagcttagctcaccataaaaagcgggatcagagatctacttctcagctctttctgatttcccccagggaagttacaaaagaatgacaaaaacttggagaaggcagatatcattagtattaaagagaactggaggtttagggggaaataaagctgaataaaaaacagcagggctggctgagcgtggtggctcacgcctgtcatctcagcgctctgggaggctgaggtgggtggatcatttgaaatcagaagttcgagaccagcttggccaacatggcgaaaccccatttctactaaaaatacaaaaattagccgggcgtggtggcgggtgcctgtagttccagctactcagaaggctgaggcaggagaatcgcttgaacccgggtggtggaagttgcagtgagccaagatcacactactgcactccagtctgggtgacggaacaagactccatctcaaaaaaacaaaacaaaacagggcctatgcatccctgagatgtgaagcagggggagataagggatttagatgtatatcctactaggtttttgctgtgttctgccatgcagttgtctgggcaggatttatttatattttaatttatttcaggggccatgctaatcatctttgtattgttccaattttagtgtatgtgctgctgaagcaagcactgggtaaggtttaaactgtctagttctgtgtgctggggtttggcattggagaaggctctgtgatgcatagaccttaaattagagttaggtatattattaatccaaagtgatcctgaatgctttctatcatttttttcttgtcctattgcactggctaaactgacttttagtactacacagaatagaagcaacaataacaatcatccttgtcttgttcctaactttagtggactatttacaatattttactgagttagatgccttaggttccacgtagctgctctttatgaaagacctcactgggttacccttcagtcttggaggagtctgggtattggccatgacatttgccatgaatgatggagttctctctgccaggtcctcatgccctggagctgtacggctgcacttcagctgctgcacatttgactttttgagtagcccttgaatctctgctcttccttggcctctctatagtttttggtataatagcctcagcttaagtttgagttttgtaggaaaacaatgggcctgtgctgacaaagatacaaagtcaaggaacaggattttttatatctcaactaacttggtcctagctttgacatttacttgccatataacaatggatgaataacagtctctttaagccttagtttcatccaccgtgaaatgggaaaaataatatctgtttcatagagttgttttaggatcatgtaacttatgtaaaacactgaatagttttccaggcatgatataggcactcaatctcatattatgaataagcttatgatgcatgggggatactgatgacagctttcttctgtccaggcaggcccagctacatggtggtatgaccagtgcagtcacacagccccatgcttagcagggctctgcacttagtttaatgctctgctgttgccatcttgaagttcttaatttttaaacaagcatcccatattttgcactgtttcttgcaaacagtgtagccagttctgtctccaggaatggatccagcactagtactggcccttctctttgggaaacatccttccattgatttcttagggagtaaatcccttgaagagtaacctcccatagaaaaattagggttagcaccctgtgtatgtttatctctaactgttccattctcagtaacctacacatcctctctcattaaaaaaacaaaacaaaacaaaaaacactttatattttacagaagctattagatccagagaggttggtaggggtgctggtgaaatggaatggtgatttgggattttggaatcaggaaaaagatctaagttcaaaaccctgctagtccctttctggccgagttacttggacaaggtaatgtctctgtcctactggtaaagtgtatgttgcaggggaattacattctttgttggtaaaatatatgcctcaggggaattaaacagataatttatgtaaagtgcctttcacagagagtctggcacatagtaggtggtcggtcactattaattcttccagctcttgccagaaataactaaaatcagggcactaggacttccaagccgtgctgctactaataaaagaaataatatgatttattttttcacaactgtttggggaaaggcctgtgcttcataaatatgcgttggaaagtacttagcaaatgagtagaaataataaaaatatgtccaagtaaacagctcctataaa

SEQ ID NO: 173566 - DNA, 2287 bp, Homo sapiens
  Payload ID: 14094
  Gene Symbol: RAD51D
  Gene Name: RAD51 paralog D
  Uniprot ID: O75771
  ENST ID: ENST00000394589
  CDS Start-End: 140-1126
cggtgtgtgtgttgcggcagaagccagcgcgcctgtgtcctctctaggaaggggtaggggaggggcgtctggagaggaccccccgcgaatgcccacgtgacgtgcagtccccctggggctgttccggcctgcggggaacatgggcgtgctcagggtcggactgtgccctggccttaccgaggagatgatccagcttctcaggagccacaggatcaagacagtggtggacctggtttctgcagacctggaagaggtagctcagaaatgtggcttgtcttacaaggccctggttgccctgaggcgggtgctgctggctcagttctcggctttccccgtgaatggcgctgatctctacgaggaactgaagacctccactgccatcctgtccactggcattggcagtcttgataaactgcttgatgctggtctctatactggagaagtgactgaaattgtaggaggcccaggtagcggcaaaactcaggtatgtctctgtatggcagcaaatgtggcccatggcctgcagcaaaacgtcctatatgtagattccaatggagggctgacagcttcccgcctcctccagctgcttcaggctaaaacccaggatgaggaggaacaggcagaagctctccggaggatccaggtggtgcatgcatttgacatcttccagatgctggatgtgctgcaggagctccgaggcactgtggcccagcaggtgactggttcttcaggaactgtgaaggtggtggttgtggactcggtcactgcggtggtttccccacttctgggaggtcagcagagggaaggcttggccttgatgatgcagctggcccgagagctgaagaccctggcccgggaccttggcatggcagtggtggtgaccaaccacataactcgagacagggacagcgggaggctcaaacctgccctcggacgctcctggagctttgtgcccagcactcggattctcctggacaccatcgagggagcaggagcatcaggcggccggcgcatggcgtgtctggccaaatcttcccgacagccaacaggtttccaggagatggtagacattgggacctgggggacctcagagcagagtgccacattacagggtgatcagacatgacctgtgctgttgtttgggaaacagggaagcattggggacccctcccaacttttcttcccagtaacgcctgctgtttactgccacctggcactggtgactacagacgttctcaggctggccagaagagacatcttgggttccttggcctcactctctgtaagcatataaaccacaggcgaaagaggatgctgcattgcgaggacccagaaattcatactggtgccacgtttccttcccttatttctaacgtgtatgtttctggtggaaaccaagttcaccctggctgggagcatctctgatgaggcatgctggcgactggatggataatcctgtgcatcaccattgtgtcctgtgctccctcctagcgcagtggccaagccgggaaagcctctaacttgcctttgctgctgctgccttttttttcttttgtctctgcctttccatttgttagatgggggcccactcttccttagctctgtctctgagttactgggtggaaataagcttataaatgaaatactcttcttcatctctgttttgctcttaaaaatataaaaaggcaattccccgagccctagagccacctgatttccccttagaaggctgtttttcagtttcccccagtgaggcccaaagaacagtttattcctcctttcctcttgctgatttggtttcagacctgcctgcatcaccatgactaggtgagaacgtgtgggctcgctgcagttccagggatataatttaacagaaagggagggtatgacctgctcctggtgaatccagccactcatttaatatgcatggtgccctgtggggcccctccacagtacagcataaccagaggtgctgaaccatggccttgcccataaacagacagaggagaatttgcacagtaaatagagccagctgggaaaattgatgctgacgtaaataatacatggcaaatctagtcctttatgcagaaattcattgctggtggctccaagatgcaatataattacacctctcttcctgccagctgtaccacagctagtgccctagtgtatgaaataatccctctgtctttcaccagcactgtggccatccgtctgagagccatgaccctggctgggaggggacgaagacaccagggaatggaaaataaaaggaaaagtacagaaa

SEQ ID NO: 173567 - DNA, 1064 bp, Homo sapiens
  Payload ID: 14094
  Gene Symbol: RAD51D
  Gene Name: RAD51 paralog D
  ENST ID: ENST00000460118
  CDS Start-End: 483-938
tttctcctccggcagccagcgcgcctgtgtcctctctaggaaggggtaggggaggggcgtctggagaggaccccccgcgaatgcccacgtgacgtgcagtccccctggggctgttccggcctgcggggaacatgggcgtgctcagggtcggactgtgccctggccttaccgaggagatgatccagcttctcaggagccacaggatcaagacagtggtggacctggtttctgcagacctggaagaggtagctcagaaatgtggcttgtcttacaagtcttgataaactgcttgatgctggtctctatactggagaagtgactgaaattgtaggaggcccaggtagcggcaaaactcagattccaatggagggctgacagcttcccgcctcctccagctgcttcaggctaaaacccaggatgaggaggaacaggcagaagctctccggaggatccaggtggtgcatgcatttgacatcttccagatgctggatgtgctgcaggagctccgaggcactgtggcccagcaggtgactggttcttcaggaactgtgaaggtggtggttgtggactcggtcactgcggtggtttccccacttctgggaggtcagcagagggaaggcttggccttgatgatgcagctggcccgagagctgaagaccctggcccgggaccttggcatggcagtggtggtgaccaaccacataactcgagacagggacagcgggaggctcaaacctgccctcggacgctcctggagctttgtgcccagcactcggattctcctggacaccatcgagggagcaggagcatcaggcggccggcgcatggcgtgtctggccaaatcttcccgacagccaacaggtttccaggagatggtagacattgggacctgggggacctcagagcagagtgccacattacagggtgatcagacatgacctgtgctgttgtttgggaaacagggaagcattggggacccctcccaacttttcttcccagtaacgcctgctgtttactgccacctggcactggtgactacagacgttctcaggctggccagaaga

SEQ ID NO: 173568 - DNA, 603 bp, Homo sapiens
  Payload ID: 14094
  Gene Symbol: RAD51D
  Gene Name: RAD51 paralog D
  ENST ID: ENST00000585343
  CDS Start-End: 1-260
ctgcagacctggaagaggtagctcagaaatgtggcttgtcttacaaggccctggttgccctgaggcgggtgctgctggctcagttctcggctttccccgtgaatggcgctgatctctacgaggaactgaagacctccactgccatcctgtccactggcattggcagacatggagggcgcactcaagtgggaacctgggaggactgcagctgcctcaggtccccgcagggagatcgtggagtggggtcaggaatgctctgaagaaggcaggacttgggcatggaggaacagatggactttcgctgaatgctttcgatgaacgaggcactgcggtcagcacttcacgtcttgataaactgcttgatgctggtctctatactggagaagtgactgaaattgtaggaggcccaggtagcggcaaaactcaggtatgtctctgtatggcagcaaatgtggcccatggcctgcagcaaaacgtcctatatgtagattccaatggagggctgacagcttcccgcctcctccagctgcttcaggctaaaacccaggatgaggaggaacaggcagaagctctccggaggatccaggtggtgcatgcatttga

SEQ ID NO: 173569 - DNA, 561 bp, Homo sapiens
  Payload ID: 14094
  Gene Symbol: RAD51D
  Gene Name: RAD51 paralog D
  ENST ID: ENST00000590631
  CDS Start-End: 488-561
acaggatcaagacaggtgaccgggtgtgcgcgtgccagggagccgcgcgggcctcgcacaacctgggcaggccccgagggctggcgcactgccctggcatacctgcagggcgcttcccctccattcctagagggccgcgcttctggagaggctcaggaagggtgggcgtggggagccaagctctaaaacagggtagagattcctactgtgtgcagggcaccgcgccggctcctgcagctttgttatttcacactggcctcctgagacggcctgccggggggtagaattgacaccccatttgacagatgaggaaaaaccaagtgtgggaggccccagtcctctctgccaatccgctatacgtgttttgttttcagtggtggacctggtttctgcagacctggaagaggtagctcagaaatgtggcttgtcttacaaggcagaagctctccggaggatccaggtggtgcatgcatttgacatcttccagatgctggatgtgctgcaggagctccgaggcactgtggcccagcaggtgactggttcttcaggaactgtgaaggt

SEQ ID NO: 173570 - DNA, 1409 bp, Homo sapiens
  Payload ID: 14094
  Gene Symbol: RAD51D
  Gene Name: RAD51 paralog D
  Uniprot ID: O75771
  ENST ID: ENST00000588594
  CDS Start-End: 107-256
tgtgtcctctctaggaaggggtaggggaggggcgtctggagaggaccccccgcgaatgcccacgtgacgtgcagtccccctggggctgttccggcctgcggggaacatgggcgtgctcagggtcggactgtgccctggccttaccgaggagatgatccagcttctcaggagccacaggatcaagacagtggtggacctggtttctgcagacctggaagaggtagctcagaaatgtggcttgtcttacaagtcttgataaactgcttgatgctggtctctatactggagaagtgactgaaattgtaggaggcccaggtagcggcaaaactcaggcagaagctctccggaggatccaggtggtgcatgcatttgacatcttccagatgctggatgtgctgcaggagctccgaggcactgtggcccagcaggtgactggttcttcaggaactgtgaaggtggtggttgtggactcggtcactgcggtggtttccccacttctgggaggtcagcagagggaaggcttggccttgatgatgcagctggcccgagagctgaagaccctggcccgggaccttggcatggcagtggtggtgaccaaccacataactcgagacagggacagcgggaggctcaaacctgccctcggacgctcctggagctttgtgcccagcactcggattctcctggacaccatcgagggagcaggagcatcaggcggccggcgcatggcgtgtctggccaaatcttcccgacagccaacaggtttccaggagatggtagacattgggacctgggggacctcagagcagagtgccacattacagggtgatcagacatgacctgtgctgttgtttgggaaacagggaagcattggggacccctcccaacttttcttcccagtaacgcctgctgtttactgccacctggcactggtgactacagacgttctcaggctggccagaagagacatcttgggttccttggcctcactctctgtaagcatataaaccacaggcgaaagaggatgctgcattgcgaggacccagaaattcatactggtgccacgtttccttcccttatttctaacgtgtatgtttctggtggaaaccaagttcaccctggctgggagcatctctgatgaggcatgctggcgactggatggataatcctgtgcatcaccattgtgtcctgtgctccctcctagcgcagtggccaagccgggaaagcctctaacttgcctttgctgctgctgccttttttttcttttgtctctgcctttccatttgttagatgggggcccactcttccttagctctgtctctgagttactgggtggaaataagcttataaatgaaatactcttcttcatctctgttttgctcttaaaaatataaaaaggcaattccccg

SEQ ID NO: 173571 - DNA, 1571 bp, Homo sapiens
  Payload ID: 14094
  Gene Symbol: RAD51D
  Gene Name: RAD51 paralog D
  Uniprot ID: O75771
  ENST ID: ENST00000586044
  CDS Start-End: 134-283
cctttctcctccggcagccagcgcgcctgtgtcctctctaggaaggggtaggggaggggcgtctggagaggaccccccgcgaatgcccacgtgacgtgcagtccccctggggctgttccggcctgcggggaacatgggcgtgctcagggtcggactgtgccctggccttaccgaggagatgatccagcttctcaggagccacaggatcaagacagtggtggacctggtttctgcagacctggaagaggtagctcagaaatgtggcttgtcttacaagtcttgataaactgcttgatgctggtctctatactggagaagtgactgaaattgtaggaggcccaggtagcggcaaaactcaggtatgtctctgtatggcagcaaatgtggcccatggcctgcagcaaaacgtcctatatgtagattccaatggagggctgacagcttcccgcctcctccagctgcttcaggctaaaacccaggatgaggaggaacaggcagaagctctccggaggatccaggtggtgcatgcatttgacatcttccagatgctggatgtgctgcaggagctccgaggcactgtggcccagcaggtgactggttcttcaggaactgtgaaggtggtggttgtggactcggtcactgcggtggtttccccacttctgggaggtcagcagagggaaggcttggccttgatgatgcagctggcccgagagctgaagaccctggcccgggaccttggcatggcagtggtggtgaccaaccacataactcgagacagggacagcgggaggctcaaacctgccctcggacgctcctggagctttgtgcccagcactcggattctcctggacaccatcgagggagcaggagcatcaggcggccggcgcatggcgtgtctggccaaatcttcccgacagccaacaggtttccaggagatggtagacattgggacctgggggacctcagagcagagtgccacattacagggtgatcagacatgacctgtgctgttgtttgggaaacagggaagcattggggacccctcccaacttttcttcccagtaacgcctgctgtttactgccacctggcactggtgactacagacgttctcaggctggccagaagagacatcttgggttccttggcctcactctctgtaagcatataaaccacaggcgaaagaggatgctgcattgcgaggacccagaaattcatactggtgccacgtttccttcccttatttctaacgtgtatgtttctggtggaaaccaagttcaccctggctgggagcatctctgatgaggcatgctggcgactggatggataatcctgtgcatcaccattgtgtcctgtgctccctcctagcgcagtggccaagccgggaaagcctctaacttgcctttgctgctgctgccttttttttcttttgtctctgcctttccatttgttagatgggggcccactcttccttagctctgtctctgagttactgggtggaaataagcttataaatgaaatactcttcttcatctctgttttgctcttaaaaatataaaaaggcaattccccg

SEQ ID NO: 173572 - DNA, 1194 bp, Homo sapiens
  Payload ID: 14094
  Gene Symbol: RAD51D
  Gene Name: RAD51 paralog D
  ENST ID: ENST00000586210
  CDS Start-End: 104-427
gtcctctctaggaaggggtaggggaggggcgtctggagaggaccccccgcgaatgcccacgtgacgtgcagtccccctggggctgttccggcctgcggggaacatgggcgtgctcagggtcggactgtgccctggccttaccgaggagatgatccagcttctcaggagccacaggatcaagacagtggtggacctggtttctgcagacctggaagaggtagctcagaaatgtggcttgtcttacaaggccctggttgccctgaggcgggtgctgctggctcagttctcggctttccccgtgaatggcgctgatctctacgaggaactgaagacctccactgccatcctgtccactggcattggcaggtatgtctctgtatggcagcaaatgtggcccatggcctgcagcaaaacgtcctatatgtagattccaatggagggctgacagcttcccgcctcctccagctgcttcaggctaaaacccaggatgaggaggaacaggcagaagctctccggaggatccaggtggtgcatgcatttgacatcttccagatgctggatgtgctgcaggagctccgaggcactgtggcccagcaggtgactggttcttcaggaactgtgaaggtggtggttgtggactcggtcactgcggtggtttccccacttctgggaggtcagcagagggaaggcttggccttgatgatgcagctggcccgagagctgaagaccctggcccgggaccttggcatggcagtggtggtgaccaaccacataactcgagacagggacagcgggaggctcaaacctgccctcggacgctcctggagctttgtgcccagcactcggattctcctggacaccatcgagggagcaggagcatcaggcggccggcgcatggcgtgtctggccaaatcttcccgacagccaacaggtttccaggagatggtagacattgggacctgggggacctcagagcagagtgccacattacagggtgatcagacatgacctgtgctgttgtttgggaaacagggaagcattggggacccctcccaacttttcttcccagtaacgcctgctgtttactgccacctggcactggtgactacagacgttctcaggctggccagaagagacatcttgggttccttggcctcactctctgtaagcatataaaccacaggcgaaagagga

SEQ ID NO: 173573 - DNA, 1528 bp, Homo sapiens
  Payload ID: 14094
  Gene Symbol: RAD51D
  Gene Name: RAD51 paralog D
  Uniprot ID: O75771
  ENST ID: ENST00000590016
  CDS Start-End: 201-1247
aatcccggcggatcccgggcgggcggatgacccccagccctacccttggtgccgcctcctcctctctcctttctcctccggcagccagcgcgcctgtgtcctctctaggaaggggtaggggaggggcgtctggagaggaccccccgcgaatgcccacgtgacgtgcagtccccctggggctgttccggcctgcggggaacatgggcgtgctcagggtcggactgtgccctggccttaccgaggagatgatccagcttctcaggagccacaggatcaagacagtggtggacctggtttctgcagacctggaagaggtagctcagaaatgtggcttgtcttacaagacatggagggcgcactcaagtgggaacctgggaggactgcagctgcctcaggtccccgcagggagatcgtggagtggggtcaggaatgctctgaagaaggcaggacttgggcatggaggaacagatggactttcgctgaatgctttcgatgaacgaggcactgcggtcagcacttcacgtcttgataaactgcttgatgctggtctctatactggagaagtgactgaaattgtaggaggcccaggtagcggcaaaactcaggtatgtctctgtatggcagcaaatgtggcccatggcctgcagcaaaacgtcctatatgtagattccaatggagggctgacagcttcccgcctcctccagctgcttcaggctaaaacccaggatgaggaggaacaggcagaagctctccggaggatccaggtggtgcatgcatttgacatcttccagatgctggatgtgctgcaggagctccgaggcactgtggcccagcaggtgactggttcttcaggaactgtgaaggtggtggttgtggactcggtcactgcggtggtttccccacttctgggaggtcagcagagggaaggcttggccttgatgatgcagctggcccgagagctgaagaccctggcccgggaccttggcatggcagtggtggtgaccaaccacataactcgagacagggacagcgggaggctcaaacctgccctcggacgctcctggagctttgtgcccagcactcggattctcctggacaccatcgagggagcaggagcatcaggcggccggcgcatggcgtgtctggccaaatcttcccgacagccaacaggtttccaggagatggtagacattgggacctgggggacctcagagcagagtgccacattacagggtgatcagacatgacctgtgctgttgtttgggaaacagggaagcattggggacccctcccaacttttcttcccagtaacgcctgctgtttactgccacctggcactggtgactacagacgttctcaggctggccagaagagacatcttgggttccttggcctcactctctgtaagcatataaaccacaggcgaaagaggatgctgcattgcgaggacccagaaattcatactggtgccacgtttccttcccttatttctaacgtgtatgtttctggtggaaaccaagttcaccct

SEQ ID NO: 173574 - DNA, 676 bp, Homo sapiens
  Payload ID: 14094
  Gene Symbol: RAD51D
  Gene Name: RAD51 paralog D
  ENST ID: ENST00000587405
  CDS Start-End: 254-676
tcatgagaggggtaaaaccaaggaacagactgcatgagcccttgggccccttccagctctaatactccatggtgatggcagccctgcccttctctgaagatctcaaaatgcctgacacctgtgtccttccgcactgccctgggaaggagaataaggatgtcttgataaactgcttgatgctggtctctatactggagaagtgactgaaattgtaggaggcccaggtagcggcaaaactcaggtatgtctctgtatggcagcaaatgtggcccatggcctgcagcaaaacgtcctatatgtagattccaatggagggctgacagcttcccgcctcctccagctgcttcaggctaaaacccaggatgaggaggaacaggcagaagctctccggaggatccaggtggtgcatgcatttgacatcttccagatgctggatgtgctgcaggagctccgaggcactgtggcccagcaggtgactggttcttcaggaactgtgaaggtggtggttgtggactcggtcactgcggtggtttccccacttctgggaggtcagcagagggaaggcttggccttgatgatgcagctggcccgagagctgaagaccctggcccgggaccttggcatggcagtggtggtgaccaaccacataactcgagacagggacagcgggaggctc

SEQ ID NO: 173575 - DNA, 1732 bp, Homo sapiens
  Payload ID: 14094
  Gene Symbol: RAD51D
  Gene Name: RAD51 paralog D
  Uniprot ID: O75771
  ENST ID: ENST00000587977
  CDS Start-End: 226-582
ccggcgggcgggctctgggcgcgggaatcccggcggatcccgggcgggcggatgacccccagccctacccttggtgccgcctcctcctctctcctttctcctccggcagccagcgcgcctgtgtcctctctaggaaggggtaggggaggggcgtctggagaggaccccccgcgaatgcccacgtgacgtgcagtccccctggggctgttccggcctgcggggaacatgggcgtgctcagggtcggactgtgccctggccttaccgaggagatgatccagcttctcaggagccacaggatcaagacagtggtggacctggtttctgcagacctggaagaggtagctcagaaatgtggcttgtcttacaaggccctggttgccctgaggcgggtgctgctggctcagttctcggctttccccgtgaatggcgctgatctctacgaggaactgaagacctccactgccatcctgtccactggcattggcagacatggagggcgcactcaagtgggaacctgggaggactgcagctgcctcaggtccccgcagggagatcgtggagtggggtcaggaatgctctgaagaaggcaggacttgggcatggaggaacagatggactttcgctgaatgctttcgatgaacgaggcactgcggtcagcacttcacggtatgtctctgtatggcagcaaatgtggcccatggcctgcagcaaaacgtcctatatgtagattccaatggagggctgacagcttcccgcctcctccagctgcttcaggctaaaacccaggatgaggaggaacaggcagaagctctccggaggatccaggtggtgcatgcatttgacatcttccagatgctggatgtgctgcaggagctccgaggcactgtggcccagcaggtgactggttcttcaggaactgtgaaggtggtggttgtggactcggtcactgcggtggtttccccacttctgggaggtcagcagagggaaggcttggccttgatgatgcagctggcccgagagctgaagaccctggcccgggaccttggcatggcagtggtggtgaccaaccacataactcgagacagggacagcgggaggctcaaacctgccctcggacgctcctggagctttgtgcccagcactcggattctcctggacaccatcgagggagcaggagcatcaggcggccggcgcatggcgtgtctggccaaatcttcccgacagccaacaggtttccaggagatggtagacattgggacctgggggacctcagagcagagtgccacattacagggtgatcagacatgacctgtgctgttgtttgggaaacagggaagcattggggacccctcccaacttttcttcccagtaacgcctgctgtttactgccacctggcactggtgactacagacgttctcaggctggccagaagagacatcttgggttccttggcctcactctctgtaagcatataaaccacaggcgaaagaggatgctgcattgcgaggacccagaaattcatactggtgccacgtttccttcccttatttctaacgtgtatgtttctggtggaaaccaagttcaccctggctgggagcatctctgatgaggcatgctggcgactggatggataatcctgtgcatcaccattgtgtcctgtgctccctcctagcgcagtggccaagccgggaaagcctctaacttgcctttgctgctgctgcctttttttt

SEQ ID NO: 173576 - DNA, 762 bp, Homo sapiens
  Payload ID: 14094
  Gene Symbol: RAD51D
  Gene Name: RAD51 paralog D
  ENST ID: ENST00000592577
  CDS Start-End: 15-762
tcccgggcgggcggatgacccccagccctacccttggtgccgcctcctcctctctcctttctcctccggcagccagcgcgcctgtgtcctctctaggaagggtggtggacctggtttctgcagacctggaagaggtagctcagaaatgtggcttgtcttacaaggccctggttgccctgaggcgggtgctgctggctcagttctcggctttccccgtgaatggcgctgatctctacgaggaactgaagacctccactgccatcctgtccactggcattggcagtcttgataaactgcttgatgctggtctctatactggagaagtgactgaaattgtaggaggcccaggtagcggcaaaactcaggtatgtctctgtatggcagcaaatgtggcccatggcctgcagcaaaacgtcctatatgtagattccaatggagggctgacagcttcccgcctcctccagctgcttcaggctaaaacccaggatgaggaggaacaggcagaagctctccggaggatccaggtggtgcatgcatttgacatcttccagatgctggatgtgctgcaggagctccgaggcactgtggcccagcaggtgactggttcttcaggaactgtgaaggtggtggttgtggactcggtcactgcggtggtttccccacttctgggaggtcagcagagggaaggcttggccttgatgatgcagctggcccgagagctgaagaccctggcccgggaccttggcatggcagtggtggtga

SEQ ID NO: 173577 - DNA, 289 bp, Homo sapiens
  Payload ID: 14094
  Gene Symbol: RAD51D
  Gene Name: RAD51 paralog D
  ENST ID: ENST00000586186
  CDS Start-End: 1-289
ctgcagacctggaagaggtagctcagaaatgtggcttgtcttacaaggccctggttgccctgaggcgggtgctgctggctcagttctcggctttccccgtgaatggcgctgatctctacgaggaactgaagacctccactgccatcctgtccactggcattggcagtcttgataaactgcttgatgctggtctctatactggagaagtgactgaaattgtaggaggcccaggtagcggcaaaactcaggcagaagctctccggaggatccaggtggtgcatgcatttga

SEQ ID NO: 173578 - DNA, 386 bp, Homo sapiens
  Payload ID: 14094
  Gene Symbol: RAD51D
  Gene Name: RAD51 paralog D
  ENST ID: ENST00000592850
  CDS Start-End: 1-260
ctgcagacctggaagaggtagctcagaaatgtggcttgtcttacaaggccctggttgccctgaggcgggtgctgctggctcagttctcggctttccccgtgaatggcgctgatctctacgaggaactgaagacctccactgccatcctgtccactggcattggcagacatggagggcgcactcaagtgggaacctgggaggactgcagctgcctcaggtccccgcagggagatcgtggagtggggtcaggaatgctctgaagaaggcaggacttgggcatggaggaacagatggactttcgctgaatgctttcgatgaacgaggcactgcggtcagcacttcacggcagaagctctccggaggatccaggtggtgcatgcatttga

SEQ ID NO: 173579 - DNA, 2214 bp, Homo sapiens
  Payload ID: 14094
  Gene Symbol: RAD51D
  Gene Name: RAD51 paralog D
  ENST ID: ENST00000588372
  CDS Start-End: 302-583
agctatgtggctggccagaccaagggccagtgtgactgtgaagcagcatcatgagaggggtaaaaccaaggaacagactgcatgagcccttgggccccttccagctctaatactccatggtgatggcagccctgcccttctctgaagatctcaaaatgcctgacacctgtgtccttccgcactgccctgggaaggagaataaggatgtcttgataaactgcttgatgctggtctctatactggagaagtgactgaaattgtaggaggcccaggtagcggcaaaactcaggtatgtctctgtatggcagcaaatgtggcccatggcctgcagcaaaacgtcctatatgtagattccaatggagggctgacagcttcccgcctcctccagctgcttcaggctaaaacccaggatgaggaggaacaggcagaagctctccggaggatccaggtggtgcatgcatttgacatcttccagatgctggatgtgctgcaggagctccgaggcactgtggcccagcaggatggaattcccgagcacctaaatcacatacctcattgtttacatgttcatcttccctgctgaacagtaaagccccctgagtggaaggatcatgtcatatttatgtctgcattccccactaggtgactggttcttcaggaactgtgaaggtggtggttgtggactcggtcactgcggtggtttccccacttctgggaggtcagcagagggaaggcttggccttgatgatgcagctggcccgagagctgaagaccctggcccgggaccttggcatggcagtggtggtgaccaaccacataactcgagacagggacagcgggaggctcaaacctgccctcggacgctcctggagctttgtgcccagcactcggattctcctggacaccatcgagggagcaggagcatcaggcggccggcgcatggcgtgtctggccaaatcttcccgacagccaacaggtttccaggagatggtagacattgggacctgggggacctcagagcagagtgccacattacagggtgatcagacatgacctgtgctgttgtttgggaaacagggaagcattggggacccctcccaacttttcttcccagtaacgcctgctgtttactgccacctggcactggtgactacagacgttctcaggctggccagaagagacatcttgggttccttggcctcactctctgtaagcatataaaccacaggcgaaagaggatgctgcattgcgaggacccagaaattcatactggtgccacgtttccttcccttatttctaacgtgtatgtttctggtggaaaccaagttcaccctggctgggagcatctctgatgaggcatgctggcgactggatggataatcctgtgcatcaccattgtgtcctgtgctccctcctagcgcagtggccaagccgggaaagcctctaacttgcctttgctgctgctgccttttttttcttttgtctctgcctttccatttgttagatgggggcccactcttccttagctctgtctctgagttactgggtggaaataagcttataaatgaaatactcttcttcatctctgttttgctcttaaaaatataaaaaggcaattccccgagccctagagccacctgatttccccttagaaggctgtttttcagtttcccccagtgaggcccaaagaacagtttattcctcctttcctcttgctgatttggtttcagacctgcctgcatcaccatgactaggtgagaacgtgtgggctcgctgcagttccagggatataatttaacagaaagggagggtatgacctgctcctggtgaatccagccactcatttaatatgcatggtgccctgtggggcccctccacagtacagcataaccagaggtgctgaaccatggccttgcccataaacagacagaggagaatttgcacagtaaatagagccagctgggaaaattgatgctgacgtaaataatacatggcaaatctagtcctttatgcagaaattcattgctggtggctccaagatgcaatataattacacctctcttcctgccagctgtaccacagctagtgccctagtgtatgaaataatccctctgtctttcaccagcactgtggccatccgtctgagagccatgaccctggctgggaggggacgaagacaccagggaatggaaaataaaaggaaaagtacagaaa

SEQ ID NO: 173580 - DNA, 2449 bp, Homo sapiens
  Payload ID: 14095
  Gene Symbol: RAD51
  Gene Name: RAD51 recombinase
  Uniprot ID: Q06609
  ENST ID: ENST00000267868
  CDS Start-End: 269-1288
gagggtttggcgggaattctgaaagccgctggcggaccgcgcgcagcggccagagaccgagccctaaggagagtgcggcgcttcccgaggcgtgcagctgggaactgcaactcatctgggttgtgcgcagaaggctggggcaagcgagtagagaagtggagcgtaagccaggggcgttgggggccgtgcgggtcgggcgcgtgccacgcccgcggggtgaagtcggagcgcggggcctgctggagagaggagcgctgcggaccgagtaatggcaatgcagatgcagcttgaagcaaatgcagatacttcagtggaagaagaaagctttggcccacaacccatttcacggttagagcagtgtggcataaatgccaacgatgtgaagaaattggaagaagctggattccatactgtggaggctgttgcctatgcgccaaagaaggagctaataaatattaagggaattagtgaagccaaagctgataaaattctggctgaggcagctaaattagttccaatgggtttcaccactgcaactgaattccaccaaaggcggtcagagatcatacagattactactggctccaaagagcttgacaaactacttcaaggtggaattgagactggatctatcacagaaatgtttggagaattccgaactgggaagacccagatctgtcatacgctagctgtcacctgccagcttcccattgaccggggtggaggtgaaggaaaggccatgtacattgacactgagggtacctttaggccagaacggctgctggcagtggctgagaggtatggtctctctggcagtgatgtcctggataatgtagcatatgctcgagcgttcaacacagaccaccagacccagctcctttatcaagcatcagccatgatggtagaatctaggtatgcactgcttattgtagacagtgccaccgccctttacagaacagactactcgggtcgaggtgagctttcagccaggcagatgcacttggccaggtttctgcggatgcttctgcgactcgctgatgagtttggtgtagcagtggtaatcactaatcaggtggtagctcaagtggatggagcagcgatgtttgctgctgatcccaaaaaacctattggaggaaatatcatcgcccatgcatcaacaaccagattgtatctgaggaaaggaagaggggaaaccagaatctgcaaaatctacgactctccctgtcttcctgaagctgaagctatgttcgccattaatgcagatggagtgggagatgccaaagactgaatcattgggtttttcctctgttaaaaaccttaagtgctgcagcctaatgagagtgcactgctccctggggttctctacaggcctcttcctgttgtgactgccaggataaagcttccgggaaaacagctattatatcagcttttctgatggtataaacaggagacaggtcagtagtcacaaactgatctaaaatgtttattccttctgtagtgtattaatctctgtgtgttttctttggttttggaggaggggtatgaagtatctttgacatggtgccttaggaatgacttgggtttaacaagctgtctactggacaatcttatgtttccaagagaactaaagctggagagacctgacccttctctcacttctaaattaatggtaaaataaaatgcctcagctatgtagcaaagggaatgggtctgcacagattctttttttctgtcagtaaaactctcaagcaggtttttaagttgtctgtctgaatgatcttgtgtaaggttttggttatggagtcttgtgccaaacctactaggccattagcccttcaccatctacctgcttggtctttcattgctaagactaactcaagataatcctagagtcttaaagcatttcaggccagtgtggtgtcttgcgcctgtactcccagcactttgggaggccgaggcaggtggatcgcttgagcccaggagttttaagtccagcttggccaaggtggtgaaatcccatctctacaaaaaatgcagaacttaatctggacacactgttacacgtgcctgtagtcccagctactcgatagcctgaggtgggagaatcacttaagcctggaaggtggaagttgcagtgagtcgagattgcactgctgcattccagccagggtgacagagtgagaccatgtttcaaacaagaaacatttcagagggtaagtaaacagatttgattgtgaggcttctaataaagtagttattagtagtgaatgtgctgtttatagcaattattgcagtgcaagctatttcaagacagggtttccataatctttttggcactgtataggggtgatcagtttctgttgcttcaagatttgaaaccagaaaggaaagtcccacttgcagatgattgtgcttaaaagctaatggaaaaataaaagaaagacatacc

SEQ ID NO: 173581 - DNA, 1588 bp, Homo sapiens
  Payload ID: 14095
  Gene Symbol: RAD51
  Gene Name: RAD51 recombinase
  Uniprot ID: Q06609
  ENST ID: ENST00000382643
  CDS Start-End: 151-1173
aattctgaaagccgctggcggaccgcgcgcagcggccagagaccgagccctaaggagagtgcggcgcttcccgaggcgtgcagctgggaactgcaactcatctgggttgtgcgcagaaggctggggcaagcgagtagagaagtggagctaatggcaatgcagatgcagcttgaagcaaatgcagatacttcagtggaagaagaaagctttggcccacaacccatttcacggttagagcagtgtggcataaatgccaacgatgtgaagaaattggaagaagctggattccatactgtggaggctgttgcctatgcgccaaagaaggagctaataaatattaagggaattagtgaagccaaagctgataaaattctgacggagtctcgctctgttgccaggctggagtgcaatagcgtgatcttggtctactgcaccctccgcctctcaggttcaagtgattctcctgcctcagcctcccgagtagttgggactacaggtggaattgagactggatctatcacagaaatgtttggagaattccgaactgggaagacccagatctgtcatacgctagctgtcacctgccagcttcccattgaccggggtggaggtgaaggaaaggccatgtacattgacactgagggtacctttaggccagaacggctgctggcagtggctgagaggtatggtctctctggcagtgatgtcctggataatgtagcatatgctcgagcgttcaacacagaccaccagacccagctcctttatcaagcatcagccatgatggtagaatctaggtatgcactgcttattgtagacagtgccaccgccctttacagaacagactactcgggtcgaggtgagctttcagccaggcagatgcacttggccaggtttctgcggatgcttctgcgactcgctgatgagtttggtgtagcagtggtaatcactaatcaggtggtagctcaagtggatggagcagcgatgtttgctgctgatcccaaaaaacctattggaggaaatatcatcgcccatgcatcaacaaccagattgtatctgaggaaaggaagaggggaaaccagaatctgcaaaatctacgactctccctgtcttcctgaagctgaagctatgttcgccattaatgcagatggagtgggagatgccaaagactgaatcattgggtttttcctctgttaaaaaccttaagtgctgcagcctaatgagagtgcactgctccctggggttctctacaggcctcttcctgttgtgactgccaggataaagcttccgggaaaacagctattatatcagcttttctgatggtataaacaggagacaggtcagtagtcacaaactgatctaaaatgtttattccttctgtagtgtattaatctctgtgtgttttctttggttttggaggaggggtatgaagtatctttgacatggtgccttaggaatgacttgggtttaacaagctgtctactggacaatcttatgtttccaagagaactaaagctggagagacctgacccttctctcacttctaaattaatggtaaaataaaatgcctcagctatgtagcaaaggg

SEQ ID NO: 173582 - DNA, 1611 bp, Homo sapiens
  Payload ID: 14095
  Gene Symbol: RAD51
  Gene Name: RAD51 recombinase
  Uniprot ID: Q06609
  ENST ID: ENST00000423169
  CDS Start-End: 300-1142
gttacgtcgacgcgggcgtgaccctgggcgagagggtttggcgggaattctgaaagccgctggcggaccgcgcgcagcggccagagaccgagccctaaggagagtgcggcgcttcccgaggcgtgcagctgggaactgcaactcatctgggttgtgcgcagaaggctggggcaagcgagtagagaagtggagcgtaagccaggggcgttgggggccgtgcgggtcgggcgcgtgccacgcccgcggggtgaagtcggagcgcggggcctgctggagagaggagcgctgcggaccgagtaatggcaatgcagatgcagcttgaagcaaatgcagatacttcagtggaagaagaaagctttggcccacaacccatttcacggttagagcagtgtggcataaatgccaacgatgtgaagaaattggaagaagctggattccatactgtggaggctgttgcctatgcgccaaagaaggagctaataaatattaagggaattagtgaagccaaagctgataaaattctggctgaggcagctaaattagttccaatgggtttcaccactgcaactgaattccaccaaaggcggtcagagatcatacagattactactggctccaaagagcttgacaaactacttcaaggtggaattgagactggatctatcacagaaatgtttggagaattccgaactgggaagacccagatctgtcatacgctagctgtcacctgccagcttcccattgaccggggtggaggtgaaggaaaggccatgtacattgacactgagggtacctttaggccagaacggctgctggcagtggctgagaggtatggtctctctggcagtgatgtcctggataatgtagcatatgctcgagcgttcaacacagaccaccagacccagctcctttatcaagcatcagccatgatggtagaatctaggtatgcactgcttattgtagacagtgccaccgccctttacagaacagactactcgggtcgaggtgagctttcagccaggcagatgcacttggccaggtttctgcggatgcttctgcgactcgctgatgagattgtatctgaggaaaggaagaggggaaaccagaatctgcaaaatctacgactctccctgtcttcctgaagctgaagctatgttcgccattaatgcagatggagtgggagatgccaaagactgaatcattgggtttttcctctgttaaaaaccttaagtgctgcagcctaatgagagtgcactgctccctggggttctctacaggcctcttcctgttgtgactgccaggataaagcttccgggaaaacagctattatatcagcttttctgatggtataaacaggagacaggtcagtagtcacaaactgatctaaaatgtttattccttctgtagtgtattaatctctgtgtgttttctttggttttggaggaggggtatgaagtatctttgacatggtgccttaggaatgacttgggtttaacaagctgtctactggacaatcttatgtttccaagagaactaaagctggagagacctgacccttctctcacttctaaattaatggtaaaataaaatgcctcagctatgtagcaaagg

SEQ ID NO: 173583 - DNA, 1545 bp, Homo sapiens
  Payload ID: 14095
  Gene Symbol: RAD51
  Gene Name: RAD51 recombinase
  ENST ID: ENST00000525066
  CDS Start-End: 242-697
gctggcggaccgcgcgcagcggccagagaccgagccctaaggagagtgcggcgcttcccgaggcgtgcagctgggaactgcaactcatctgggttgtgcgcagaaggctggggcaagcgagtagagaagtggagcgtaagccaggggcgttgggggccgtgcgggtcgggcgcgtgccacgcccgcggggtgaagtcggagcgcggggcctgctggagagaggagcgctgcggaccgagtaatggcaatgcagatgcagcttgaagcaaatgcagatacttcagtggaagaagaaagctttggcccacaacccatttcacggttagagcagtgtggcataaatgccaacgatgtgaagaaattggaagaagctggattccatactgtggaggctgttgcctatgcgccaaagaaggagctaataaatattaagggaattagtgaagccaaagctgataaaattctggctgaggcagctaaattagttccaatgggtttcaccactgcaactgaattccaccaaaggcggtcagagatcatacagattactactggctccaaagagcttgacaaactacttcaaggtggaattgagactggatctatcacagaaatgtttggagaattccgaactgggaagacccagatctgtcatacgctagctgtcacctgccaggtatggtctctctggcagtgatgtcctggataatgtagcatatgctcgagcgttcaacacagaccaccagacccagctcctttatcaagcatcagccatgatggtagaatctaggtatgcactgcttattgtagacagtgccaccgccctttacagaacagactactcgggtcgaggtgagctttcagccaggcagatgcacttggccaggtttctgcggatgcttctgcgactcgctgatgagtttggtgtagcagtggtaatcactaatcaggtggtagctcaagtggatggagcagcgatgtttgctgctgatcccaaaaaacctattggaggaaatatcatcgcccatgcatcaacaaccagattgtatctgaggaaaggaagaggggaaaccagaatctgcaaaatctacgactctccctgtcttcctgaagctgaagctatgttcgccattaatgcagatggagtgggagatgccaaagactgaatcattgggtttttcctctgttaaaaaccttaagtgctgcagcctaatgagagtgcactgctccctggggttctctacaggcctcttcctgttgtgactgccaggataaagcttccgggaaaacagctattatatcagcttttctgatggtataaacaggagacaggtcagtagtcacaaactgatctaaaatgtttattccttctgtagtgtattaatctctgtgtgttttctttggttttggaggaggggtatgaagtatctttgacatggtgccttaggaatgacttgggtttaacaagctgtctactggacaatcttatgtttccaagagaactaaagctggagagacctgacccttctctcacttctaaattaa

SEQ ID NO: 173584 - DNA, 625 bp, Homo sapiens
  Payload ID: 14095
  Gene Symbol: RAD51
  Gene Name: RAD51 recombinase
  ENST ID: ENST00000526763
  CDS Start-End: 401-625
gcggctcgtcctcgcccacctgcgtcctggccggtccagtgctcagcggcagttggggcctccgcgcgcagtgtgaaacccggacgtggcagggcgtgtccgcgcccgaccgaccctcagctgctggggcgaaaacacaagtggacctcagtctttagaactaggggagaaacattagagcctttataggcaacacctattttatgggttcgagcgagaagtccgagatcagagcggtgtagccacagctgtttaatatcacagccagggcttccggattcctgatctgtctttccattacaccgtgcttagaaagtaccaatctccgattgccaaaacagtgttttcatcatctaatgcggaaaaccattcacatgatgcctagagaatgatctgaataatggcaatgcagatgcagcttgaagcaaatgcagatacttcagtggaagaagaaagctttggcccacaacccatttcacggttagagcagtgtggcataaatgccaacgatgtgaagaaattggaagaagctggattccatactgtggaggctgttgcctatgcgccaaagaaggagctaataaatattaagggaattagtgaagccaaagctgataaaattctg

SEQ ID NO: 173585 - DNA, 566 bp, Homo sapiens
  Payload ID: 14095
  Gene Symbol: RAD51
  Gene Name: RAD51 recombinase
  ENST ID: ENST00000527860
  CDS Start-End: 50-566
cttgggagtcgtggtcttcgatctggtaaacagaagacggcaactcgtaatggcaatgcagatgcagcttgaagcaaatgcagatacttcagtggaagaagaaagctttggcccacaacccatttcacggttagagcagtgtggcataaatgccaacgatgtgaagaaattggaagaagctggattccatactgtggaggctgttgcctatgcgccaaagaaggagctaataaatattaagggaattagtgaagccaaagctgataaaattctggctgaggcagctaaattagttccaatgggtttcaccactgcaactgaattccaccaaaggcggtcagagatcatacagattactactggctccaaagagcttgacaaactacttcaaggtggaattgagactggatctatcacagaaatgtttggagaattccgaactgggaagacccagatctgtcatacgctagctgtcacctgccagcttcccattgaccggggtggaggtgaaggaaaggccatgtacattgacactgagggtacctttaggccagaacggctgctgg

SEQ ID NO: 173586 - DNA, 425 bp, Homo sapiens
  Payload ID: 14095
  Gene Symbol: RAD51
  Gene Name: RAD51 recombinase
  ENST ID: ENST00000533741
  CDS Start-End: 1-197
ttgcctatgcgccaaagaaggagctaataaatattaagggaattagtgaagccaaagctgataaaattctgacggagtctcgctctgttgccaggctggagtgcaatagcgtgatcttggtctactgcaccctccgcctctcaggttcaagtgattctcctgcctcagcctcccgagtagttgggactacaggctgaggcagctaaattagttccaatgggtttcaccactgcaactgaattccaccaaaggcggtcagagatcatacagattactactggctccaaagagcttgacaaactacttcaaggtggaattgagactggatctatcacagaaatgtttggagaattccgaactgggaagacccagatctgtcatacgctagctgtcacctgccagcttcccattgaccggggtggagg

SEQ ID NO: 173587 - DNA, 1515 bp, Homo sapiens
  Payload ID: 14095
  Gene Symbol: RAD51
  Gene Name: RAD51 recombinase
  Uniprot ID: Q06609
  ENST ID: ENST00000532743
  CDS Start-End: 255-1277
aattctgaaagccgctggcggaccgcgcgcagcggccagagaccgagccctaaggagagtgcggcgcttcccgaggcgtgcagctgggaactgcaactcatctgggttgtgcgcagaaggctggggcaagcgagtagagaagtggagcgtaagccaggggcgttgggggccgtgcgggtcgggcgcgtgccacgcccgcggggtgaagtcggagcgcggggcctgctggagagaggagcgctgcggaccgagtaatggcaatgcagatgcagcttgaagcaaatgcagatacttcagtggaagaagaaagctttggcccacaacccatttcacggttagagcagtgtggcataaatgccaacgatgtgaagaaattggaagaagctggattccatactgtggaggctgttgcctatgcgccaaagaaggagctaataaatattaagggaattagtgaagccaaagctgataaaattctgacggagtctcgctctgttgccaggctggagtgcaatagcgtgatcttggtctactgcaccctccgcctctcaggttcaagtgattctcctgcctcagcctcccgagtagttgggactacaggtggaattgagactggatctatcacagaaatgtttggagaattccgaactgggaagacccagatctgtcatacgctagctgtcacctgccagcttcccattgaccggggtggaggtgaaggaaaggccatgtacattgacactgagggtacctttaggccagaacggctgctggcagtggctgagaggtatggtctctctggcagtgatgtcctggataatgtagcatatgctcgagcgttcaacacagaccaccagacccagctcctttatcaagcatcagccatgatggtagaatctaggtatgcactgcttattgtagacagtgccaccgccctttacagaacagactactcgggtcgaggtgagctttcagccaggcagatgcacttggccaggtttctgcggatgcttctgcgactcgctgatgagtttggtgtagcagtggtaatcactaatcaggtggtagctcaagtggatggagcagcgatgtttgctgctgatcccaaaaaacctattggaggaaatatcatcgcccatgcatcaacaaccagattgtatctgaggaaaggaagaggggaaaccagaatctgcaaaatctacgactctccctgtcttcctgaagctgaagctatgttcgccattaatgcagatggagtgggagatgccaaagactgaatcattgggtttttcctctgttaaaaaccttaagtgctgcagcctaatgagagtgcactgctccctggggttctctacaggcctcttcctgttgtgactgccaggataaagcttccgggaaaacagctattatatcagcttttctgatggtataaacaggagacaggtcagtagtcacaaactgatctaaaatgtttattccttctgtagtgtattaatctctgtgtgttttctttgg

SEQ ID NO: 173588 - DNA, 658 bp, Homo sapiens
  Payload ID: 14095
  Gene Symbol: RAD51
  Gene Name: RAD51 recombinase
  ENST ID: ENST00000531277
  CDS Start-End: 3-305
taatggcaatgcagatgcagcttgaagcaaatgcagatacttcagtggaagaagaaagctttggcccacaacccatttcacggttagagcagtgtggcataaatgccaacgatgtgaagaaattggaagaagctggattccatactgtggaggctgttgcctatgcgccaaagaaggagctaataaatattaagggaattagtgaagccaaagctgataaaattctggtggaattgagactggatctatcacagaaatgtttggagaattccgaactgggaagacccagatctgtcatacgctagctgtcacctgccagcttcccattgaccggggtggaggtgaaggaaaggccatgtacattgacactgagggtacctttaggccagaacggctgctggcagtggctgagaggtatggtctctctggcagtgatgtcctggataatgtagcatatgctcgagcgttcaacacagaccaccagacccagctcctttatcaagcatcagccatgatggtagaatctaggtatgcactgcttattgtagacagtgccaccgccctttacagaacagactactcgggtcgaggtgagctttcagccaggcagatgcacttggccaggtttctgcggatgcttctgcgactcgctgatgag

SEQ ID NO: 173589 - DNA, 1397 bp, Homo sapiens
  Payload ID: 14095
  Gene Symbol: RAD51
  Gene Name: RAD51 recombinase
  Uniprot ID: Q06609
  ENST ID: ENST00000557850
  CDS Start-End: 257-985
ggaattctgaaagccgctggcggaccgcgcgcagcggccagagaccgagccctaaggagagtgcggcgcttcccgaggcgtgcagctgggaactgcaactcatctgggttgtgcgcagaaggctggggcaagcgagtagagaagtggagcgtaagccaggggcgttgggggccgtgcgggtcgggcgcgtgccacgcccgcggggtgaagtcggagcgcggggcctgctggagagaggagcgctgcggaccgagtaatggcaatgcagatgcagcttgaagcaaatgcagatacttcagtggaagaagaaagctttggcccacaacccatttcacggttagagcagtgtggcataaatgccaacgatgtgaagaaattggaagaagctggattccatactgtggaggctgttgcctatgcgccaaagaaggagctaataaatattaagggaattagtgaagccaaagctgataaaattctggcagtggctgagaggtatggtctctctggcagtgatgtcctggataatgtagcatatgctcgagcgttcaacacagaccaccagacccagctcctttatcaagcatcagccatgatggtagaatctaggtatgcactgcttattgtagacagtgccaccgccctttacagaacagactactcgggtcgaggtgagctttcagccaggcagatgcacttggccaggtttctgcggatgcttctgcgactcgctgatgagtttggtgtagcagtggtaatcactaatcaggtggtagctcaagtggatggagcagcgatgtttgctgctgatcccaaaaaacctattggaggaaatatcatcgcccatgcatcaacaaccagattgtatctgaggaaaggaagaggggaaaccagaatctgcaaaatctacgactctccctgtcttcctgaagctgaagctatgttcgccattaatgcagatggagtgggagatgccaaagactgaatcattgggtttttcctctgttaaaaaccttaagtgctgcagcctaatgagagtgcactgctccctggggttctctacaggcctcttcctgttgtgactgccaggataaagcttccgggaaaacagctattatatcagcttttctgatggtataaacaggagacaggtcagtagtcacaaactgatctaaaatgtttattccttctgtagtgtattaatctctgtgtgttttctttggttttggaggaggggtatgaagtatctttgacatggtgccttaggaatgacttgggtttaacaagctgtctactggacaatcttatgtttccaagagaactaaagctggagagacctgacccttctctcacttctaaattaatggtaaaataaaatgcctcagctatgtagcaaa

SEQ ID NO: 173590 - DNA, 787 bp, Homo sapiens
  Payload ID: 14096
  Gene Symbol:
  Gene Name: RAD51L3-RFFL
  ENST ID: ENST00000592181
  CDS Start-End: 176-787
acagaaggctctttagaagtggtggacctggtttctgcagacctggaagaggtagctcagaaatgtggcttgtcttacaagtcttgataaactgcttgatgctggtctctatactggagaagtgactgaaattgtaggaggcccaggtagcggcaaaactcaggtatgtctctgtatggcagcaaatgtggcccatggcctgcagcaaaacgtcctatatgtagattccaatggagggctgacagcttcccgcctcctccagctgcttcaggctaaaacccaggatgaggaggaacaggcagaagctctccggaggatccaggtggtgcatgcatttgacatcttccagatgctggatgtgctgcaggagctccgaggcactgtggcccagcaggtgactggttcttcaggaactgtgaaggtggtggttgtggactcggtcactgcggtggtttccccacttctgggaggtcagcagagggaaggcttggccttgatgatgcagctggcccgagagctgaagaccctggcccgggaccttggcatggcagtggtggtgaccaaccacataactcgagacagggacagcgggaggctcaaacctgccctcggacgctcctggagctttgtgcccagcactcggattctcctggacaccatcgagggagcaggagcatcaggcggccggcgcatggcgtgtctggccaaatcttcccgacagattttatcatgtgggcaacctgctgcaactggttctgcctggatggacagcctgaggaggtcccac

SEQ ID NO: 173591 - DNA, 1638 bp, Homo sapiens
  Payload ID: 14096
  Gene Symbol:
  Gene Name: RAD51L3-RFFL
  ENST ID: ENST00000593039
  CDS Start-End: 201-1019
atgtggctggccagaccaagggccagtgtgactgtgaagcagcatcatgagaggggtaaaaccaaggaacagactgcatgagcccttgggccccttccagctctaatactccatggtgatggcagccctgcccttctctgaagatctcaaaatgcctgacacctgtgtccttccgcactgccctgggaaggagaataaggatggcagaagctctccggaggatccaggtggtgcatgcatttgacatcttccagatgctggatgtgctgcaggagctccgaggcactgtggcccagcaggtgactggttcttcaggaactgtgaaggtggtggttgtggactcggtcactgcggtggtttccccacttctgggaggtcagcagagggaaggcttggccttgatgatgcagctggcccgagagctgaagaccctggcccgggaccttggcatggcagtggtggtgaccaaccacataactcgagacagggacagcgggaggctcaaacctgccctcggacgctcctggagctttgtgcccagcactcggattctcctggacaccatcgagggagcaggagcatcaggcggccggcgcatggcgtgtctggccaaatcttcccgacagtctattgactcagaggacagctttgtcccaggccgaagggcctctctgtctgacctgactgacctggaggacattgaaggcctgacagtgcggcagctgaaagagatcttggctcgcaactttgtcaactacaagggctgctgtgagaagtgggagctgatggagagagtgacccggctatacaaggatcagaaaggactccagcacctggggggagcagtaccatcaggcttggaggagaacctgtgtaagatctgcatggactcacccattgactgtgttcttctggagtgtggccacatggtaacctgtaccaagtgtggcaagcgcatgaatgaatgtcccatctgccggcagtatgtaatccgagctgtgcatgtcttccggtcctgagagcttgcatcggtttcttcagtgccttacagggaaatagcctggggtgtctgggctcagggttggccagcttgcagaggagcaagctagtagaaatattgcagggttcccaaaaccaggtcaagcaagatgccatgtcacccctgagcatgcctgtcttcccaggggtgtacctcttggctggcaaagcccaaggccagtgggaacttgtataaatcacatgggtatgttcttggttcagtgatcttggagtgatgatggtaactgatgaacagagaactttccagaacttgggtcctgtcttcctccctgaacctagacagtttcacccctcctcctgtacccaacccatccccaccccatatgggagatgcttgcccatgtgtttcatcaatcagaagtcctcctccccagcacattcggatttaaatttctggtctctccggctttctgtgctttaactatctttgctaaagtctcttgctacattgcctaaatccatttgtttctttggaccaaaaatgttagtttaccagaccgatagtggtccttaggacagattttagaccagtaaacttatctttggtgagaaatgaaatacaaatgctatagaaaaatt

SEQ ID NO: 173592 - DNA, 676 bp, Homo sapiens
  Payload ID: 14096
  Gene Symbol:
  Gene Name: RAD51L3-RFFL
  ENST ID: ENST00000591723
  CDS Start-End: 293-676
tcatgagaggggtaaaaccaaggaacagactgcatgagcccttgggccccttccagctctaatactccatggtgatggcagccctgcccttctctgaagatctcaaaatgcctgacacctgtgtccttccgcactgccctgggaaggagaataaggatgtcttgataaactgcttgatgctggtctctatactggagaagtgactgaaattgtaggaggcccaggtagcggcaaaactcaggcagaagctctccggaggatccaggtggtgcatgcatttgacatcttccagatgctggatgtgctgcaggagctccgaggcactgtggcccagcaggtgactggttcttcaggaactgtgaaggtggtggttgtggactcggtcactgcggtggtttccccacttctgggaggtcagcagagggaaggcttggccttgatgatgcagctggcccgagagctgaagaccctggcccgggaccttggcatggcagtggtggtgaccaaccacataactcgagacagggacagcgggaggctcaaacctgccctcggacgctcctggagctttgtgcccagcactcggattctcctggacaccatcgagggagcaggagcatcaggcggccggcgcatggcgtgtctggccaaatcttcccgacagtctattgactca

SEQ ID NO: 173593 - DNA, 2710 bp, Homo sapiens
  Payload ID: 14097
  Gene Symbol: RAD52
  Gene Name: RAD52 homolog, DNA repair protein
  Uniprot ID: P43351
  ENST ID: ENST00000358495
  CDS Start-End: 140-1396
ttcccagagacgctcgcgcacccttcccattctcctctgcgcggcctccatctaagatctcttccccttgtccatagcctagatcgagctccctgtgtgcaccgcgcgctgcccgaggcgcaggtcaaccagaatcaagatgtctgggactgaggaagcaattcttggaggacgtgacagccatcctgctgctggcggcggctcagtgttatgctttggacagtgccagtacacagcagaagagtaccaggccatccagaaggccctgaggcagaggctgggcccagaatacataagtagccgcatggctggcggaggccagaaggtgtgctacattgagggtcatcgggtaattaatctggccaatgagatgtttggttacaatggctgggcacactccatcacgcagcagaatgtggattttgttgacctcaacaatggcaagttctacgtgggagtctgtgcatttgtgagggtccagctgaaggatggttcatatcatgaagatgttggttatggtgttagtgagggcctcaagtccaaggctttatctttggagaaggcaaggaaggaggcggtgacagacgggctgaagcgagccctcaggagttttgggaatgcacttggaaactgtattctggacaaagactacctgagatcactaaataagcttccacgccagttgcctcttgaagtggatttaactaaagcgaagagacaagatcttgaaccgtctgtggaggaggcaagatacaacagctgccgaccgaacatggccctgggacacccacagctgcagcaggtgacctccccttccagacccagccatgctgtgataccggcggaccaggactgcagctcccgaagcctgagctcatccgccgtggagagcgaggccacgcaccagcggaagctccggcagaagcagctgcagcagcagttccgggagcggatggagaagcagcaggttcgagtctccacgccgtcagctgagaagagtgaggcagcgcctccggcccctcctgtgacgcacagcactcctgtaactgtctcagaaccactcctggagaaagacttccttgcaggagtgactcaagaattaatcaagactcttgaagacaactctgaaaagtgggctgtgactcccgatgcaggggatggtgtggtcaagccctcgtctagagcagacccagcccagacctctgacacattagccttgaacaaccagatggtgacccagaacaggactccacacagcgtttgccaccagaaaccacaagcaaaatctggatcttgggacctccaaacttatagcgctgaccaacgcacaacaggaaactgggaatctcataggaagagccaggacatgaagaaaaggaaatatgatccatcttaactgaggctcaggccacataattggactctgtcacaaagggactttggaaaactactttttggtcatgaaattgttcatcgctgctggagaatgaacgtcattgcgatttatcttgcttcattctgaaccttatcaagaggatctgactgagagcccactgcagttagagctgagcacttttgaaaagcttgtccatcactctagtagggagaggctctggacagatgaataccttttcttcggcttgtgaggcttcccactatttattactgaactattatgttaatgaagatggacattttaggaatcaccaatggctccttgccctcaagcaatataggccagacttggtcctaagcacctgcctcagcaattgtctacattcagttgttttgcataacgtctgccttctttcctttacggtccatgcctttaatgttgcccacattaagcactgtggatcacgacaggaaaaaggttggagcagtgcttttcactactttgtatcaatccaggctacaatcttcatttaatataaataatttatggatttatgacattacaatcctgcattgtttcaagactgacattttttcctaaggaaggaaataatcatctaagaccacgaaaaaaggctgttttttgtttttttttttttttttttttttgagacggggtctggctgtgttgccctgactggagttcagtggtgcaaacacagctctctccacaacctcttgggcccaagtgatactcccacctctgccttacaaaatacagggattactggtgtgagccactgtgtctggccagaaaaggcatttttgagaaagcaaatcgtataccttattaacaaaatagaatatatatatattgcttatctgaaatgcttgaaaccagaattgttttgcattttttgaatatttgtatacacataatgagaccttggggatgggacccaagtctgaacgtggaattcacctgtgtttcgtgtatatgcctcatacacataattttgtgcatgaaacagagtttttgtataagaagatacactgcagctgaagagggctgggtttttttttctcttagggtcgctgcataaactgttgtatgcctggtgctttgcgacttgtcacacgaggtcacgtgtggaattttccacttctggcatcacgtcagtgctcagaaattttctgatctcagagcatttcaattagggatgctcaaacgcaactgtttctacttccccatttcaggtgtgagatgtaacccaccttgaccataaattggcttttcatagtgctcagatgtttc

SEQ ID NO: 173594 - DNA, 530 bp, Homo sapiens
  Payload ID: 14097
  Gene Symbol: RAD52
  Gene Name: RAD52 homolog, DNA repair protein
  ENST ID: ENST00000397230
  CDS Start-End: 136-530
agaacctggggctgcggtggacctgatcctgaggtctcagcgtagagatgctgagtccagaggcctgttctagttcaccagtgcagtgaggggctcagtatccgggcctcccgagagaggtcaaccagaatcaagatgtctgggactgaggaagcaattcttggaggacgtgacagccatcctgctgctggcggcggctcagtgttatgctttggacagtgccagtacacagcagaagagtaccaggccatccagaaggccctgaggcagaggctgggcccagaatacataagtagccgcatggctggcggaggccagaaggtgtgctacattgagggtcatcgggtaattaatctggccaatgagatgtttggttacaatggctgggcacactccatcacgcagcagaatgtggattttgttgacctcaacaatggcaagttctacgtgggagtctgtgcatttgtgagggtccagctgaaggtgaggggatggagtagacctgctgcccggaaggatcagtgggtggt

SEQ ID NO: 173595 - DNA, 2366 bp, Homo sapiens
  Payload ID: 14097
  Gene Symbol: RAD52
  Gene Name: RAD52 homolog, DNA repair protein
  Uniprot ID: P43351
  ENST ID: ENST00000430095
  CDS Start-End: 264-1520
gttccctcccaggatcgacatgcacttggatcattgcagtttctgggcctgctgtcatctcccccttcagtacttcccacatatgactaccaactgttagacgatgtgctgctgccagaccagcctttcatttcttggacatccggctatttacccaggaaaagtcatcctttgactatttttcatgacctttctcatctgactcgtgatctgcccatcttgttactccctagcagtgtggtaagaggtcaaccagaatcaagatgtctgggactgaggaagcaattcttggaggacgtgacagccatcctgctgctggcggcggctcagtgttatgctttggacagtgccagtacacagcagaagagtaccaggccatccagaaggccctgaggcagaggctgggcccagaatacataagtagccgcatggctggcggaggccagaaggtgtgctacattgagggtcatcgggtaattaatctggccaatgagatgtttggttacaatggctgggcacactccatcacgcagcagaatgtggattttgttgacctcaacaatggcaagttctacgtgggagtctgtgcatttgtgagggtccagctgaaggatggttcatatcatgaagatgttggttatggtgttagtgagggcctcaagtccaaggctttatctttggagaaggcaaggaaggaggcggtgacagacgggctgaagcgagccctcaggagttttgggaatgcacttggaaactgtattctggacaaagactacctgagatcactaaataagcttccacgccagttgcctcttgaagtggatttaactaaagcgaagagacaagatcttgaaccgtctgtggaggaggcaagatacaacagctgccgaccgaacatggccctgggacacccacagctgcagcaggtgacctccccttccagacccagccatgctgtgataccggcggaccaggactgcagctcccgaagcctgagctcatccgccgtggagagcgaggccacgcaccagcggaagctccggcagaagcagctgcagcagcagttccgggagcggatggagaagcagcaggttcgagtctccacgccgtcagctgagaagagtgaggcagcgcctccggcccctcctgtgacgcacagcactcctgtaactgtctcagaaccactcctggagaaagacttccttgcaggagtgactcaagaattaatcaagactcttgaagacaactctgaaaagtgggctgtgactcccgatgcaggggatggtgtggtcaagccctcgtctagagcagacccagcccagacctctgacacattagccttgaacaaccagatggtgacccagaacaggactccacacagcgtttgccaccagaaaccacaagcaaaatctggatcttgggacctccaaacttatagcgctgaccaacgcacaacaggaaactgggaatctcataggaagagccaggacatgaagaaaaggaaatatgatccatcttaactgaggctcaggccacataattggactctgtcacaaagggactttggaaaactactttttggtcatgaaattgttcatcgctgctggagaatgaacgtcattgcgatttatcttgcttcattctgaaccttatcaagaggatctgactgagagcccactgcagttagagctgagcacttttgaaaagcttgtccatcactctagtagggagaggctctggacagatgaataccttttcttcggcttgtgaggcttcccactatttattactgaactattatgttaatgaagatggacattttaggaatcaccaatggctccttgccctcaagcaatataggccagacttggtcctaagcacctgcctcagcaattgtctacattcagttgttttgcataacgtctgccttctttcctttacggtccatgcctttaatgttgcccacattaagcactgtggatcacgacaggaaaaaggttggagcagtgcttttcactactttgtatcaatccaggctacaatcttcatttaatataaataatttatggatttatgacattacaatcctgcattgtttcaagactgacattttttcctaaggaaggaaataatcatctaagaccacgaaaaaaggctgttttttgtttttttttttttttttttttttgagacggggtctggctgtgttgccctgactggagttcagtggtgcaaacacagctctctccacaacctcttgggcccaagtgatactcccacctctgccttacaaaatacagggattactggtgtgagccactgtgtctggccagaaaaggcatttttgagaaagcaaatcgtatacc

SEQ ID NO: 173596 - DNA, 2499 bp, Homo sapiens
  Payload ID: 14097
  Gene Symbol: RAD52
  Gene Name: RAD52 homolog, DNA repair protein
  Uniprot ID: P43351
  ENST ID: ENST00000468231
  CDS Start-End: 135-554
gatcgagctccctgtgtgcaccgcgcgctgcccgaggcgccccagtgacagctggagtggacaaagtgaccaagggcctcaaggacacacaaggccaagaagatttgaagtgctgtaggtcaaccagaatcaagatgtctgggactgaggaagcaattcttggaggacgtgacagccatcctgctgctggcggcggctcagtgttatgctttggacagtgccagtacacagcagaagagtaccaggccatccagaaggccctgaggcagaggctgggcccagaatacataagtagccgcatggctggcggaggccagaaggtgtgctacattgagggtcatcgggtaattaatctggccaatgagatgtttggttacaatggctgggcacactccatcacgcagcagaatgtggattttgttgacctcaacaatggcaagttctacgtgggagtctgtgcatttgtgagggtccagctgaaggtgaggggatggagtagacctgctgcccggaaggatcagtgggtggtaggagaaggatggttcatatcatgaagatgttggttatggtgttagtgagggcctcaagtccaaggctttatctttggagaaggcaaggaaggaggcggtgacagacgggctgaagcgagccctcaggcttcccttgctgggagtaagtggtagaatcctgtactctctcttctccgtgcactcagtcatgtgtgccggaggccttcccactcctactgcgagtgcacagacagcaccctcctctccgtgctcctcagcagtcctccgctacgcacaggagttttgggaatgcacttggaaactgtattctggacaaagactacctgagatcactaaataagcttccacgccagttgcctcttgaagtggatttaactaaagcgaagagacaagatcttgaaccgtctgtggaggaggcaagatacaacagctgccgaccgaacatggccctgggacacccacagctgcagcaggtgacctccccttccagacccagccatgctgtgataccggcggaccaggactgcagctcccgaagcctgagctcatccgccgtggagagcgaggccacgcaccagcggaagctccggcagaagcagctgcagcagcagttccgggagcggatggagaagcagcaggttcgagtctccacgccgtcagctgagaagagtgaggcagcgcctccggcccctcctgtgacgcacagcactcctgtaactgtctcagaaccactcctggagaaagacttccttgcaggagtgactcaagaattaatcaagactcttgaagacaactctgaaaagtgggctgtgactcccgatgcaggggatggtgtggtcaagccctcgtctagagcagacccagcccagacctctgacacattagccttgaacaaccagatggtgacccagaacaggactccacacagcgtttgccaccagaaaccacaagcaaaatctggatcttgggacctccaaacttatagcgctgaccaacgcacaacaggaaactgggaatctcataggaagagccaggacatgaagaaaaggaaatatgatccatcttaactgaggctcaggccacataattggactctgtcacaaagggactttggaaaactactttttggtcatgaaattgttcatcgctgctggagaatgaacgtcattgcgatttatcttgcttcattctgaaccttatcaagaggatctgactgagagcccactgcagttagagctgagcacttttgaaaagcttgtccatcactctagtagggagaggctctggacagatgaataccttttcttcggcttgtgaggcttcccactatttattactgaactattatgttaatgaagatggacattttaggaatcaccaatggctccttgccctcaagcaatataggccagacttggtcctaagcacctgcctcagcaattgtctacattcagttgttttgcataacgtctgccttctttcctttacggtccatgcctttaatgttgcccacattaagcactgtggatcacgacaggaaaaaggttggagcagtgcttttcactactttgtatcaatccaggctacaatcttcatttaatataaataatttatggatttatgacattacaatcctgcattgtttcaagactgacattttttcctaaggaaggaaataatcatctaagaccacgaaaaaaggctgttttttgtttttttttttttttttttttttgagacggggtctggctgtgttgccctgactggagttcagtggtgcaaacacagctctctccacaacctcttgggcccaagtgatactcccacctctgccttacaaaatacagggattactggtgtgagccactgtgtctggccagaaaaggcatttttgagaaagcaaatcgtataccttattaacaaaatagaatatatatatattgcttatctgaaatgcttgaaaccagaa

SEQ ID NO: 173597 - DNA, 1531 bp, Homo sapiens
  Payload ID: 14097
  Gene Symbol: RAD52
  Gene Name: RAD52 homolog, DNA repair protein
  Uniprot ID: P43351
  ENST ID: ENST00000461568
  CDS Start-End: 79-498
tctcttccccttgtccatagcctagatcgagctccctgtgtgcaccgcgcgctgcccgagaggtcaaccagaatcaagatgtctgggactgaggaagcaattcttggaggacgtgacagccatcctgctgctggcggcggctcagtgttatgctttggacagtgccagtacacagcagaagagtaccaggccatccagaaggccctgaggcagaggctgggcccagaatacataagtagccgcatggctggcggaggccagaaggtgtgctacattgagggtcatcgggtaattaatctggccaatgagatgtttggttacaatggctgggcacactccatcacgcagcagaatgtggattttgttgacctcaacaatggcaagttctacgtgggagtctgtgcatttgtgagggtccagctgaaggtgaggggatggagtagacctgctgcccggaaggatcagtgggtggtaggagaaggatggttcatatcatgaagatgttggttatggtgttagtgagggcctcaagtccaaggctttatctttggagaaggcaaggaaggaggcggtgacagacgggctgaagcgagccctcaggcttcccttgctgggagtaagtggtagaatcctgtactctctcttctccgtgcactcagtcatgtgtgccggaggccttcccactcctactgcgagtgcacagacagcaccctcctctccgtgctcctcagcagtcctccgctacgcacaggagttttgggaatgcacttggaaactgtattctggacaaagactacctgagatcactaaataagcttccacgccagttgcctcttgaagtggatttaactaaagcgaagagacaagatcttgaaccgtctgtggaggaggcaagatacaacagctgccgaccgaacatggccctgggacacccacagctgcagcaggtgacctccccttccagacccagccatgctgtgataccggcggaccaggactgcagctcccgcagccgcggctgttgctcaggagcccgtcctcgccgccgccctctcatgcagaagcctgagctcatccgccgtggagagcgaggccacgcaccagcggaagctccggcagaagcagctgcagcagcagttccgggagcggatggagaagcagcaggttcgagtctccacgccgtcagctgagaagagtgaggcagcgcctccggcccctcctgtgacgcacagcactcctgtaactgtctcagaaccactcctggagaaagacttccttgcaggagtgactcaagaattaatcaagactcttgaagacaactctgaaaagtgggctgtgactcccgatgcaggggatggtgtggtcaagccctcgtctagagcagacccagcccagacctctgacacattagccttgaacaaccagatggtgacccagaacaggactccacacagcgtttgccaccagaaaccacaagcaaaatctggatcttgggacctccaaacttatagcgctgaccaacgcacaacag

SEQ ID NO: 173598 - DNA, 560 bp, Homo sapiens
  Payload ID: 14097
  Gene Symbol: RAD52
  Gene Name: RAD52 homolog, DNA repair protein
  Uniprot ID: P43351
  ENST ID: ENST00000541619
  CDS Start-End: 167-523
atctaagatctcttccccttgtccatagcctagatcgagctccctgtgtgcaccgcgcgctgcccgaggcgccccagtgacagctggagtggacaaagtgaccaagggcctcaaggacacacaaggccaagaagatttgaagtgctgtaggtcaaccagaatcaagatgtctgggactgaggaagcaattcttggaggacgtgacagccatcctgctgctggcggcggctcagtgttatgctttggacagtgccagtacacagcagaagagtaccaggccatccagaaggccctgaggcagaggctgggcccagaatacataagtagccgcatggctggcggaggccagaaggtgtgctacattgagggtcatcgggtaattaatctggccaatgagatgtttggttacaatggctgggcacactccatcacgcagcagaatgtgggtgagtatgctctccagcagtggggacttctgcactgtccagctcctgctgaaagtctgctgtgggtgaggaggtaaggtaggtggactcagctgccagcaggaggaatggttg

SEQ ID NO: 173599 - DNA, 1243 bp, Homo sapiens
  Payload ID: 14097
  Gene Symbol: RAD52
  Gene Name: RAD52 homolog, DNA repair protein
  ENST ID: ENST00000543912
  CDS Start-End: 83-382
tctcttccccttgtccatagcctagatcgagctccctgtgtgcaccgcgcgctgcccgaggcgcaggtcaaccagaatcaagatgtctgggactgaggaagcaattcttggaggacgtgacagccatcctgctgctggcggcggctcagtgttatgctttggacagtgccagtacacagcagaagagtaccaggccatccagaaggccctgaggcagaggctgggcccagaatacataagtagccgcatggctggcggaggccagaaggtgtgctacattgagggtcatcgggtaattaatctggccaatgagatgtttggttacaatggctgggcacactccatcacgcagcagaatgtgggcttcccttgctgggagtaagtggtagaatcctgtactctctcttctccgtgcactcagtcatgtgtgccggaggccttcccactcctactgcgagtgcacagacagcaccctcctctccgtgctcctcagcagtcctccgctacgcacaggagttttgggaatgcacttggaaactgtattctggacaaagactacctgagatcactaaataagcttccacgccagttgcctcttgaagtggatttaactaaagcgaagagacaagatcttgaaccgtctgtggaggaggcaagatacaacagctgccgaccgaacatggccctgggacacccacagctgcagcaggtgacctccccttccagacccagccatgctgtgataccggcggaccaggactgcagctcccgaagcctgagctcatccgccgtggagagcgaggccacgcaccagcggaagctccggcagaagcagctgcagcagcagttccgggagcggatggagaagcagcaggttcgagtctccacgccgtcagctgagaagagtgaggcagcgcctccggcccctcctgtgacgcacagcactcctgtaactgtctcagaaccactcctggagaaagacttccttgcaggagtgactcaagaattaatcaagactcttgaagacaactctgaaaagtgggctgtgactcccgatgcaggggatggtgtggtcaagccctcgtctagagcagacccagcccagacctctgacacattagccttgaacaaccagatggtgacccagaacaggactccacacagcgtttgccaccagaaaccacaagcaaaatctggatcttgggacctccaaacttatagcgctgaccaacgcacaacaggt

SEQ ID NO: 173600 - DNA, 681 bp, Homo sapiens
  Payload ID: 14097
  Gene Symbol: RAD52
  Gene Name: RAD52 homolog, DNA repair protein
  Uniprot ID: P43351
  ENST ID: ENST00000545564
  CDS Start-End: 1-681
atgtctgggactgaggaagcaattcttggaggacgtgacagccatcctgctgctggcggcggctcagtgttatgctttggacagtgccagtacacagcagaagagtaccaggccatccagaaggccctgaggcagaggctgggcccagaatacataagtagccgcatggctggcggaggccagaaggtgtgctacattgagggtcatcgggtaattaatctggccaatgagatgtttggttacaatggctgggcacactccatcacgcagcagaatgtggattttgttgacctcaacaatggcaagttctacgtgggagtctgtgcatttgtgagggtccagctgaaggatggttcatatcatgaagatgttggttatggtgttagtgagggcctcaagtccaaggctttatctttggagaaggcaaggaaggaggcggtgacagacgggctgaagcgagccctcaggcttcccttgctgggagtaagtggtagaatcctgtactctctcttctccgtgcactcagtcatgtgtgccggaggccttcccactcctactgcgagtgcacagacagcaccctcctctccgtgctcctcagcagtcctccgctacgcacaggagttttgggaatgcacttggaaactgtattctggacaaagactacctgagatcactaaataa

SEQ ID NO: 173601 - DNA, 1139 bp, Homo sapiens
  Payload ID: 14097
  Gene Symbol: RAD52
  Gene Name: RAD52 homolog, DNA repair protein
  ENST ID: ENST00000536177
  CDS Start-End: 85-990
gatctcttccccttgtccatagcctagatcgagctccctgtgtgcaccgcgcgctgcccgaggcgcaggtcaaccagaatcaagatgtctgggactgaggaagcaattcttggaggacgtgacagccatcctgctgctggcggcggctcagtgttatgctttggacagtgccagtacacagcagaagagtaccaggccatccagaaggccctgaggcagaggctgggcccagaatacataagtagccgcatggctggcggaggccagaaggtgtgctacattgagggtcatcgggtaattaatctggccaatgagatgtttggttacaatggctgggcacactccatcacgcagcagaatgtggattttgttgacctcaacaatggcaagttctacgtgggagtctgtgcatttgtgagggtccagctgaaggatggttcatatcatgaagatgttggttatggtgttagtgagggcctcaagtccaaggctttatctttggagaaggcaaggaaggaggcggtgacagacgggctgaagcgagccctcaggagttttgggaatgcacttggaaactgtattctggacaaagactacctgagatcactaaataagcttccacgccagttgcctcttgaagtggatttaactaaagcgaagagacaagatcttgaaccgtctgtggaggaggcaagatacaacagctgccgaccgaacatggccctgggacacccacagctgcagcaggtgacctccccttccagacccagccatgctgtgataccggcggaccaggactgcagctcccgcagccgcggctgttgctcaggagcccgtcctcgccgccgccctctcatgcagaagcctgagctcatccgccgtggagagcgaggccacgcaccagcggaagctccggcagaagcagctgcagcagcagttccgggagcggatggagaagcagcaggttcgagtctccacgccgtcagctgagaagagtgagggtgagcgaggggtgggagcagggccctgggaggcgtctgcaggaggaagtgtagccgcagggtcttctgattctctgcggtaaccctgggccggctccaaaccaggcctcgctgggacttctctcaagctacacgcag

SEQ ID NO: 173602 - DNA, 633 bp, Homo sapiens
  Payload ID: 14097
  Gene Symbol: RAD52
  Gene Name: RAD52 homolog, DNA repair protein
  ENST ID: ENST00000542785
  CDS Start-End: 245-633
gtgtgcaccgcgcgctgcccgaggcgcgtaagtgggggaggagagcggcttcccccggggtggttctagccgtgggtgtggagcgtgggaaggctcagcttccgggtcgagaacctggggctgcggtggacctgatcctgaggtctcagcgtagagatgctgagtccagaggcctgttctagttcaccagtgcagtgaggggctcagtatccgggcctcccgagagaggtcaaccagaatcaagatgtctgggactgaggaagcaattcttggaggacgtgacagccatcctgctgctggcggcggctcagtgttatgctttggacagtgccagtacacagcagaagagtaccaggccatccagaaggccctgaggcagaggctgggcccagaatacataagtagccgcatggctggcggaggccagaaggtgtgctacattgagggtcatcgggtaattaatctggccaatgagatgtttggttacaatggctgggcacactccatcacgcagcagaatgtggattttgttgacctcaacaatggcaagttctacgtgggagtctgtgcatttgtgagggtccagctgaaggatggttcatatcatgaagatgttggttatggtgttagtga

SEQ ID NO: 173603 - DNA, 463 bp, Homo sapiens
  Payload ID: 14097
  Gene Symbol: RAD52
  Gene Name: RAD52 homolog, DNA repair protein
  Uniprot ID: P43351
  ENST ID: ENST00000544742
  CDS Start-End: 63-419
atagcctagatcgagctccctgtgtgcaccgcgcgctgcccgagaggtcaaccagaatcaagatgtctgggactgaggaagcaattcttggaggacgtgacagccatcctgctgctggcggcggctcagtgttatgctttggacagtgccagtacacagcagaagagtaccaggccatccagaaggccctgaggcagaggctgggcccagaatacataagtagccgcatggctggcggaggccagaaggtgtgctacattgagggtcatcgggtaattaatctggccaatgagatgtttggttacaatggctgggcacactccatcacgcagcagaatgtgggtgagtatgctctccagcagtggggacttctgcactgtccagctcctgctgaaagtctgctgtgggtgaggaggtaaggtaggtggactcagctgccagcaggaggaatggttgtggccca

SEQ ID NO: 173604 - DNA, 1530 bp, Homo sapiens
  Payload ID: 14097
  Gene Symbol: RAD52
  Gene Name: RAD52 homolog, DNA repair protein
  ENST ID: ENST00000539046
  CDS Start-End: 79-441
tctcttccccttgtccatagcctagatcgagctccctgtgtgcaccgcgcgctgcccgagaggtcaaccagaatcaagatgtctgggactgaggaagcaattcttggaggacgtgacagccatcctgctgctggcggcggctcagtgttatgctttggacagtgccagtacacagcagaagagtaccaggccatccagaaggccctgaggcagaggctgggcccagaatacataagtagccgcatggctggcggaggccagaaggtgtgctacattgagggtcatcgggtaattaatctggccaatgagatgtttggttacaatggctgggcacactccatcacgcagcagaatgtggattttgttgacctcaacaatggcaagttctacgtgggagtctgtgcatttgtgagggtccagctgaaggtgaggatggagtagacctgctgcccggaaggatcagtgggtggtaggagaaggatggttcatatcatgaagatgttggttatggtgttagtgagggcctcaagtccaaggctttatctttggagaaggcaaggaaggaggcggtgacagacgggctgaagcgagccctcaggcttcccttgctgggagtaagtggtagaatcctgtactctctcttctccgtgcactcagtcatgtgtgccggaggccttcccactcctactgcgagtgcacagacagcaccctcctctccgtgctcctcagcagtcctccgctacgcacaggagttttgggaatgcacttggaaactgtattctggacaaagactacctgagatcactaaataagcttccacgccagttgcctcttgaagtggatttaactaaagcgaagagacaagatcttgaaccgtctgtggaggaggcaagatacaacagctgccgaccgaacatggccctgggacacccacagctgcagcaggtgacctccccttccagacccagccatgctgtgataccggcggaccaggactgcagctcccgcagccgcggctgttgctcaggagcccgtcctcgccgccgccctctcatgcagaagcctgagctcatccgccgtggagagcgaggccacgcaccagcggaagctccggcagaagcagctgcagcagcagttccgggagcggatggagaagcagcaggttcgagtctccacgccgtcagctgagaagagtgaggcagcgcctccggcccctcctgtgacgcacagcactcctgtaactgtctcagaaccactcctggagaaagacttccttgcaggagtgactcaagaattaatcaagactcttgaagacaactctgaaaagtgggctgtgactcccgatgcaggggatggtgtggtcaagccctcgtctagagcagacccagcccagacctctgacacattagccttgaacaaccagatggtgacccagaacaggactccacacagcgtttgccaccagaaaccacaagcaaaatctggatcttgggacctccaaacttatagcgctgaccaacgcacaacagg

SEQ ID NO: 173605 - DNA, 587 bp, Homo sapiens
  Payload ID: 14098
  Gene Symbol: RDM1
  Gene Name: RAD52 motif containing 1
  Uniprot ID: Q8NG50
  ENST ID: ENST00000615288
  CDS Start-End: 1-414
atggcggagttggtaccttttgcggttcccatcgagagtgacaaaaccttgctagtgtgggagctgagctccggacccacggccgaggctttgcatcattctctgttcacagcattttctcagtttggccttctgtattcagtccgggtcttcccaaatgctgcagtggcccatcctggtttctatgccgtcattaagttttattctgcaagggctgcccacagagcccaaaaggcatgcgaccggaagcagctttttcagaaatctccagtcaaggttcgtcttggcaccagacataaggcagttcaacatcaagcccttgccctgaacagttccaaatgccaagaactggcgaattactactttggtttcaatgggtgttccaaaaggatcatcaagaaagtggtaaaatagctgtggagtacagacccagtgaagacatcgtaggtgtcagatgcgaagaagaactacacggtttaattcaagtcccttgctctccctggaagcagtatggccaagaggaggaagggtatctctcggatttcagcttggaggaggaagagttcaggctgccagaacttgactag

SEQ ID NO: 173606 - DNA, 518 bp, Homo sapiens
  Payload ID: 14098
  Gene Symbol: RDM1
  Gene Name: RAD52 motif containing 1
  Uniprot ID: Q8NG50
  ENST ID: ENST00000618511
  CDS Start-End: 1-345
atgcatttacttgtcccacccccacagcattctctgttcacagcattttctcagtttggccttctgtattcagtccgggtcttcccaaatgctgcagtggcccatcctggtttctatgccgtcattaagttttattctgcaagggctgcccacagagcccaaaaggcatgcgaccggaagcagctttttcagaaatctccagtcaaggttcgtcttggcaccagacataaggcagttcaacatcaagcccttgccctgaacagttccaaatgccaagaactggcgaattactactttggtttcaatgggtgttccaaaaggatcatcaagaaagtggtaaaatagctgtggagtacagacccagtgaagacatcgtaggtgtcagatgcgaagaagaactacacggtttaattcaagtcccttgctctccctggaagcagtatggccaagaggaggaagggtatctctcggatttcagcttggaggaggaagagttcaggctgccagaacttgactag

SEQ ID NO: 173607 - DNA, 506 bp, Homo sapiens
  Payload ID: 14098
  Gene Symbol: RDM1
  Gene Name: RAD52 motif containing 1
  Uniprot ID: Q8NG50
  ENST ID: ENST00000619368
  CDS Start-End: 1-240
atggcggagttggtaccttttgcggttcccatcgagagtgacaaaaccttgctagtgtgggagctgagctccggacccacggccgaggctttgcatgttcgtcttggcaccagacataaggcagttcaacatcaagcccttgccctgaacagttccaaatgccaagaactggcgaattactactttggtttcaatgggtgttccaaaaggatcatcaaggaccattatcattccttatgaaaaggaagacagcccagaagcttgctattcagaaggctttgtcagatgcattccagaaactgttgattgttgttctagaaagtggtaaaatagctgtggagtacagacccagtgaagacatcgtaggtgtcagatgcgaagaagaactacacggtttaattcaagtcccttgctctccctggaagcagtatggccaagaggaggaagggtatctctcggatttcagcttggaggaggaagagttcaggctgccagaacttgactag

SEQ ID NO: 173608 - DNA, 501 bp, Homo sapiens
  Payload ID: 14098
  Gene Symbol: RDM1
  Gene Name: RAD52 motif containing 1
  Uniprot ID: Q8NG50
  ENST ID: ENST00000611538
  CDS Start-End: 1-501
atggcggagttggtaccttttgcggttcccatcgagagtgacaaaaccttgctagtgtgggagctgagctccggacccacggccgaggctttgcatcattctctgttcacagcattttctcagtttggccttctgtattcagtccgggtcttcccaaatgctgcagtggcccatcctggtttctatgccgtcattaagttttattctgcaagggctgcccacagagcccaaaaggcatgcgaccggaagcagctttttcagaaatctccagtcaaggttcgtcttggcaccagacataaggcagttcaacatcaagcccttgccctgaacagttccaaatgccaagaactggcgaattactactttggtttcaatgggtgttccaaaaggatcatcaaggtcccttgctctccctggaagcagtatggccaagaggaggaagggtatctctcggatttcagcttggaggaggaagagttcaggctgccagaacttgactag

SEQ ID NO: 173609 - DNA, 1032 bp, Homo sapiens
  Payload ID: 14098
  Gene Symbol: RDM1
  Gene Name: RAD52 motif containing 1
  Uniprot ID: Q8NG50
  ENST ID: ENST00000616596
  CDS Start-End: 1-756
atggcggagttggtaccttttgcggttcccatcgagagtgacaaaaccttgctagtgtgggagctgagctccggacccacggccgaggctttgcatcattctctgttcacagcattttctcagtttggccttctgtattcagtccgggtcttcccaaatgctgcagtggcccatcctggtttctatgccgtcattaagttttattctgcaagggctgcccacagagcccaaaaggcatgcgaccggaagcagctttttcagaaatctccagtcaaggttcgtcttggcaccagacataaggcagttcaacatcaagcccttgccctgaacagttccaaatgccaagaactggcgaattactactttggtttcaatgggtgttccaaaaggatcatcaagcttcaggagctttctgaccttgaagaaagggaaaatgaagatagcatggtgccacttccgaagcaaagcctgaagttcttctgtgctttagaagtggtgttgccatcctgtgattgcaggagtcctggcattggcttggtggaggagcctatggataaggtggaggaagaaagtggtaaaatagctgtggagtacagacccagtgaagacatcgtaggtgtcagatgcgaagaagaactacacggtttaattcaagtcccttgctctccctggaagcagtatggccaagaggaggaagggtatctctcggatttcagcttggaggaggaagagttcaggctgccagaacttgactagcatttctgaatatcccaaggcgaggtcatgtaacttccttgggaagctctgtcgtgcccctaccccacgccgccccaccactataggctgctggagtcctggaaccacctgggtcggccgcccaaatctttcctggcgaaggggagggaaggggtgttctggtggagtgggaagggaggcttgggtaggattgtgggataagatcgccctggtgacgaggagcggatctcgaacggaacttaataaaggttgcctagataaagatatggtaaataa

SEQ ID NO: 173610 - DNA, 1535 bp, Homo sapiens
  Payload ID: 14098
  Gene Symbol: RDM1
  Gene Name: RAD52 motif containing 1
  Uniprot ID: Q8NG50
  ENST ID: ENST00000619262
  CDS Start-End: 488-1273
tgctggggcgagggttagccgcgcaggtgcggtgaagggaggatggcggagttggtaccttttgcggttcccatcgagagtgacaaaaccttgctagtgtgggagctgagctccggacccacggccgaggctttgcatgtgagccggggccaggatggagggagggatggagaaagctgcccacccgctgactgggagttccggagtcctgcctcagaccctcacctgcctgagcctccgctgaaggactcttaattataaaggggatcccaactgacaactgacgacccccaacagatttttagagtcccggagaggtatctctccaccttcagaacgttttaccttccagtgcttcttaaagtttaggattttaagaggaaaacctgttgattaagtgggaagtgttttgaatcgcatccttcgcgaagagaggtttggggaatatgagggcatgtgcggttttgttttctgggcgtgagatttcatgcatttacttgtcccacccccacagcattctctgttcacagcattttctcagtttggccttctgtattcagtccgggtcttcccaaatgctgcagtggcccatcctggtttctatgccgtcattaagttttattctgcaagggctgcccacagagcccaaaaggcatgcgaccggaagcagctttttcagaaatctccagtcaaggttcgtcttggcaccagacataaggcagttcaacatcaagcccttgccctgaacagttccaaatgccaagaactggcgaattactactttggtttcaatgggtgttccaaaaggatcatcaagcttcaggagctttctgaccttgaagaaagggaaaatgaagatagcatggtgccacttccgaagcaaagcctgaagttcttctgtgctttagaagtggtgttgccatcctgtgattgcaggagtcctggcattggcttggtggaggagcctatggataaggtggaggaaggaccattatcattccttatgaaaaggaagacagcccagaagcttgctattcagaaggctttgtcagatgcattccagaaactgttgattgttgttctagaaagtggtaaaatagctgtggagtacagacccagtgaagacatcgtaggtgtcagatgcgaagaagaactacacggtttaattcaagtcccttgctctccctggaagcagtatggccaagaggaggaagggtatctctcggatttcagcttggaggaggaagagttcaggctgccagaacttgactagcatttctgaatatcccaaggcgaggtcatgtaacttccttgggaagctctgtcgtgcccctaccccacgccgccccaccactataggctgctggagtcctggaaccacctgggtcggccgcccaaatctttcctggcgaaggggagggaaggggtgttctggtggagtgggaagggaggcttgggtaggattgtgggataagatcgccctggtgacgaggagcggatctcgaacggaacttaataaaggttgcctagataaa

SEQ ID NO: 173611 - DNA, 432 bp, Homo sapiens
  Payload ID: 14098
  Gene Symbol: RDM1
  Gene Name: RAD52 motif containing 1
  Uniprot ID: Q8NG50
  ENST ID: ENST00000617591
  CDS Start-End: 1-432
atgcatttacttgtcccacccccacagcattctctgttcacagcattttctcagtttggccttctgtattcagtccgggtcttcccaaatgctgcagtggcccatcctggtttctatgccgtcattaagttttattctgcaagggctgcccacagagcccaaaaggcatgcgaccggaagcagctttttcagaaatctccagtcaaggttcgtcttggcaccagacataaggcagttcaacatcaagcccttgccctgaacagttccaaatgccaagaactggcgaattactactttggtttcaatgggtgttccaaaaggatcatcaaggtcccttgctctccctggaagcagtatggccaagaggaggaagggtatctctcggatttcagcttggaggaggaagagttcaggctgccagaacttgactag

SEQ ID NO: 173612 - DNA, 542 bp, Homo sapiens
  Payload ID: 14098
  Gene Symbol: RDM1
  Gene Name: RAD52 motif containing 1
  Uniprot ID: Q8NG50
  ENST ID: ENST00000615378
  CDS Start-End: 18-368
tctgggcgtgagatttcatgcatttacttgtcccacccccacagcattctctgttcacagcattttctcagtttggccttctgtattcagtccgggtcttcccaaatgctgcagtggcccatcctggtttctatgccgtcattaagttttattctgcaagggctgcccacagagcccaaaaggcatgcgaccggaagcagctttttcagaaatctccagtcaaggttcgtcttggcaccagacataaggcagttcaacatcaagcccttgccctgaacagttccaaatgccaagaactggcgaattactactttggtttcaatgggtgttccaaaaggatcatcaaggaccattatcattccttatgaaaaggaagacagcccagaagcttgctattcagaaggctttgtcagatgcattccagaaactgttgattgttgttctaggtaagactgtcttgatcatccttgaagtacttcagtttcagtaagcaaataaactcattttgaaaagttaattgaataaaaatattgatatctaaa

SEQ ID NO: 173613 - DNA, 1177 bp, Homo sapiens
  Payload ID: 14098
  Gene Symbol: RDM1
  Gene Name: RAD52 motif containing 1
  Uniprot ID: Q8NG50
  ENST ID: ENST00000618461
  CDS Start-End: 47-901
gcaatgctggggcgagggttagccgcgcaggtgcggtgaagggaggatggcggagttggtaccttttgcggttcccatcgagagtgacaaaaccttgctagtgtgggagctgagctccggacccacggccgaggctttgcatcattctctgttcacagcattttctcagtttggccttctgtattcagtccgggtcttcccaaatgctgcagtggcccatcctggtttctatgccgtcattaagttttattctgcaagggctgcccacagagcccaaaaggcatgcgaccggaagcagctttttcagaaatctccagtcaaggttcgtcttggcaccagacataaggcagttcaacatcaagcccttgccctgaacagttccaaatgccaagaactggcgaattactactttggtttcaatgggtgttccaaaaggatcatcaagcttcaggagctttctgaccttgaagaaagggaaaatgaagatagcatggtgccacttccgaagcaaagcctgaagttcttctgtgctttagaagtggtgttgccatcctgtgattgcaggagtcctggcattggcttggtggaggagcctatggataaggtggaggaaggaccattatcattccttatgaaaaggaagacagcccagaagcttgctattcagaaggctttgtcagatgcattccagaaactgttgattgttgttctagaaagtggtaaaatagctgtggagtacagacccagtgaagacatcgtaggtgtcagatgcgaagaagaactacacggtttaattcaagtcccttgctctccctggaagcagtatggccaagaggaggaagggtatctctcggatttcagcttggaggaggaagagttcaggctgccagaacttgactagcatttctgaatatcccaaggcgaggtcatgtaacttccttgggaagctctgtcgtgcccctaccccacgccgccccaccactataggctgctggagtcctggaaccacctgggtcggccgcccaaatctttcctggcgaaggggagggaaggggtgttctggtggagtgggaagggaggcttgggtaggattgtgggataagatcgccctggtgacgaggagcggatctcgaacggaacttaataaaggttgcctagataaagatatggtaaataa

SEQ ID NO: 173614 - DNA, 617 bp, Homo sapiens
  Payload ID: 14098
  Gene Symbol: RDM1
  Gene Name: RAD52 motif containing 1
  Uniprot ID: Q8NG50
  ENST ID: ENST00000615024
  CDS Start-End: 1-351
atgcatttacttgtcccacccccacagcattctctgttcacagcattttctcagtttggccttctgtattcagtccgggtcttcccaaatgctgcagtggcccatcctggtttctatgccgtcattaagttttattctgcaagggctgcccacagagcccaaaaggcatgcgaccggaagcagctttttcagaaatctccagtcaaggttcgtcttggcaccagacataaggcagttcaacatcaagcccttgccctgaacagttccaaatgccaagaactggcgaattactactttggtttcaatgggtgttccaaaaggatcatcaaggaccattatcattccttatgaaaaggaagacagcccagaagcttgctattcagaaggctttgtcagatgcattccagaaactgttgattgttgttctagaaagtggtaaaatagctgtggagtacagacccagtgaagacatcgtaggtgtcagatgcgaagaagaactacacggtttaattcaagtcccttgctctccctggaagcagtatggccaagaggaggaagggtatctctcggatttcagcttggaggaggaagagttcaggctgccagaacttgactag

SEQ ID NO: 173615 - DNA, 542 bp, Homo sapiens; identical to SEQ ID NO: 173612
  Payload ID: 14098
  Gene Symbol: RDM1
  Gene Name: RAD52 motif containing 1
  Uniprot ID: Q8NG50
  ENST ID: ENST00000613554
  CDS Start-End: 18-368

SEQ ID NO: 173616 - DNA, 779 bp, Homo sapiens
  Payload ID: 14098
  Gene Symbol: RDM1
  Gene Name: RAD52 motif containing 1
  Uniprot ID: Q8NG50
  ENST ID: ENST00000613308
  CDS Start-End: 14-724
cggtgaagggaggatggcggagttggtaccttttgcggttcccatcgagagtgacaaaaccttgctagtgtgggagctgagctccggacccacggccgaggctttgcatcattctctgttcacagcattttctcagtttggccttctgtattcagtccgggtcttcccaaatgctgcagtggcccatcctggtttctatgccgtcattaagttttattctgcaagggctgcccacagagcccaaaaggcatgcgaccggaagcagctttttcagaaatctccagtcaaggttcgtcttggcaccagacataaggcagttcaacatcaagcccttgccctgaacagttccaaatgccaagaactggcgaattactactttggtttcaatgggtgttccaaaaggatcatcaagcttcaggagctttctgaccttgaagaaagggaaaatgaagatagcatggtgccacttccgaagcaaagcctgaagttcttctgtgctttagaagtggtgttgccatcctgtgattgcaggagtcctggcattggcttggtggaggagcctatggataaggtggaggaaggaccattatcattccttatgaaaaggaagacagcccagaagcttgctattcagaaggctttgtcagatgcattccagaaactgttgattgttgttctaggtaagactgtcttgatcatccttgaagtacttcagtttcagtaagcaaataaactcattttgaaaagttaattgaataaaaatattgatatctaaagca

SEQ ID NO: 173617 - DNA, 686 bp, Homo sapiens
  Payload ID: 14098
  Gene Symbol: RDM1
  Gene Name: RAD52 motif containing 1
  Uniprot ID: Q8NG50
  ENST ID: ENST00000619193
  CDS Start-End: 1-420
atggcggagttggtaccttttgcggttcccatcgagagtgacaaaaccttgctagtgtgggagctgagctccggacccacggccgaggctttgcatcattctctgttcacagcattttctcagtttggccttctgtattcagtccgggtcttcccaaatgctgcagtggcccatcctggtttctatgccgtcattaagttttattctgcaagggctgcccacagagcccaaaaggcatgcgaccggaagcagctttttcagaaatctccagtcaaggttcgtcttggcaccagacataaggcagttcaacatcaagcccttgccctgaacagttccaaatgccaagaactggcgaattactactttggtttcaatgggtgttccaaaaggatcatcaaggaccattatcattccttatgaaaaggaagacagcccagaagcttgctattcagaaggctttgtcagatgcattccagaaactgttgattgttgttctagaaagtggtaaaatagctgtggagtacagacccagtgaagacatcgtaggtgtcagatgcgaagaagaactacacggtttaattcaagtcccttgctctccctggaagcagtatggccaagaggaggaagggtatctctcggatttcagcttggaggaggaagagttcaggctgccagaacttgactag

SEQ ID NO: 173618 - DNA, 501 bp, Homo sapiens; identical to SEQ ID NO: 173608
  Payload ID: 14098
  Gene Symbol: RDM1
  Gene Name: RAD52 motif containing 1
  Uniprot ID: Q8NG50
  ENST ID: ENST00000612980
  CDS Start-End: 1-501

SEQ ID NO: 173619 - DNA, 1177 bp, Homo sapiens; identical to SEQ ID NO: 173613
  Payload ID: 14098
  Gene Symbol: RDM1
  Gene Name: RAD52 motif containing 1
  Uniprot ID: Q8NG50
  ENST ID: ENST00000620284
  CDS Start-End: 47-901

SEQ ID NO: 173620 - DNA, 1032 bp, Homo sapiens; identical to SEQ ID NO: 173609
  Payload ID: 14098
  Gene Symbol: RDM1
  Gene Name: RAD52 motif containing 1
  Uniprot ID: Q8NG50
  ENST ID: ENST00000616735
  CDS Start-End: 1-756

SEQ ID NO: 173621 - DNA, 1491 bp, Homo sapiens
  Payload ID: 14098
  Gene Symbol: RDM1
  Gene Name: RAD52 motif containing 1
  ENST ID: ENST00000619876
  CDS Start-End: 472-1113
agccgcgcaggtgcggtgaagggaggatggcggagttggtaccttttgcggttcccatcgagagtgacaaaaccttgctagtgtgggagctgagctccggacccacggccgaggctttgcatgtgagccggggccaggatggagggagggatggagaaagctgcccacccgctgactgggagttccggagtcctgcctcagaccctcacctgcctgagcctccgctgaaggactcttaattataaaggggatcccaactgacaactgacgacccccaacagatttttagagtcccggagaggtatctctccaccttcagaacgttttaccttccagtgcttcttaaagtttaggattttaagaggaaaacctgttgattaagtgggaagtgttttgaatcgcatccttcgcgaagagaggtttggggaatatgagggcatgtgcggttttgttttctgggcgtgagatttcatgcatttacttgtcccacccccacagcattctctgttcacagcattttctcagtttggccttctgtattcagtccgggtcttcccaaatgctgcagtggcccatcctggtttctatgccgtcattaagttttattctgcaagggctgcccacagagcccaaaaggcatgcgaccggaagcagctttttcagaaatctccagtcaaggttcgtcttggcaccagacataaggcagttcaacatcaagcccttgccctgaacagttccaaatgccaagaactggcgaattactactttggtttcaatgggtgttccaaaaggatcatcaagcttcaggagctttctgaccttgaagaaagggaaaatgaagatagcatggtgccacttccgaagcaaagcctgaagttcttctgtgctttagaagtggtgttgccatcctgtgattgcaggagtcctggcattggcttggtggaggagcctatggataaggtggaggaaggaccattatcattccttatgaaaaggaagacagcccagaagcttgctattcagaaggctttgtcagatgcattccagaaactgttgattgttgttctaggtaagactgtcttgatcatccttgaagtacttcagtttcagtaagcaaataaactcattttgaaaagttaattgaataaaaatattgatatctaaagcactctatagtatgctttcatttgctaaattatttcacaccaacaggctcaaatttgttctgtgtgacatttgtgaaaaaaaatgacagcaaatattgtccccagtttacagatgtgaaaagacttgcctcagttcccacagaaaatgtttaagccaggtcttctttaattgcttacctatcatacagaatagtgattataagttttggacgcatggatttgagtcctaactctgtctcttagatttttaatgcaattaggccgggcgcggtggctcacgcctgtaatcccagcactttgggaggccgagatgggcggatcacga

SEQ ID NO: 173622 - DNA, 687 bp, Homo sapiens
  Payload ID: 14098
  Gene Symbol: RDM1
  Gene Name: RAD52 motif containing 1
  Uniprot ID: Q8NG50
  ENST ID: ENST00000619828
  CDS Start-End: 1-687
atgcatttacttgtcccacccccacagcattctctgttcacagcattttctcagtttggccttctgtattcagtccgggtcttcccaaatgctgcagtggcccatcctggtttctatgccgtcattaagttttattctgcaagggctgcccacagagcccaaaaggcatgcgaccggaagcagctttttcagaaatctccagtcaaggttcgtcttggcaccagacataaggcagttcaacatcaagcccttgccctgaacagttccaaatgccaagaactggcgaattactactttggtttcaatgggtgttccaaaaggatcatcaagcttcaggagctttctgaccttgaagaaagggaaaatgaagatagcatggtgccacttccgaagcaaagcctgaagttcttctgtgctttagaagtggtgttgccatcctgtgattgcaggagtcctggcattggcttggtggaggagcctatggataaggtggaggaagaaagtggtaaaatagctgtggagtacagacccagtgaagacatcgtaggtgtcagatgcgaagaagaactacacggtttaattcaagtcccttgctctccctggaagcagtatggccaagaggaggaagggtatctctcggatttcagcttggaggaggaagagttcaggctgccagaacttgactag

SEQ ID NO: 173623 - DNA, 686 bp, Homo sapiens; identical to SEQ ID NO: 173617
  Payload ID: 14098
  Gene Symbol: RDM1
  Gene Name: RAD52 motif containing 1
  Uniprot ID: Q8NG50
  ENST ID: ENST00000632131
  CDS Start-End: 1-420

SEQ ID NO: 173624 - DNA, 617 bp, Homo sapiens; identical to SEQ ID NO: 173614
  Payload ID: 14098
  Gene Symbol: RDM1
  Gene Name: RAD52 motif containing 1
  Uniprot ID: Q8NG50
  ENST ID: ENST00000634177
  CDS Start-End: 1-351

SEQ ID NO: 173625 - DNA, 506 bp, Homo sapiens; identical to SEQ ID NO: 173607
  Payload ID: 14098
  Gene Symbol: RDM1
  Gene Name: RAD52 motif containing 1
  Uniprot ID: Q8NG50
  ENST ID: ENST00000634031
  CDS Start-End: 1-240

SEQ ID NO: 173626 - DNA, 779 bp, Homo sapiens; identical to SEQ ID NO: 173616
  Payload ID: 14098
  Gene Symbol: RDM1
  Gene Name: RAD52 motif containing 1
  Uniprot ID: Q8NG50
  ENST ID: ENST00000632931
  CDS Start-End: 14-724

SEQ ID NO: 173627 - DNA, 518 bp, Homo sapiens; identical to SEQ ID NO: 173606
  Payload ID: 14098
  Gene Symbol: RDM1
  Gene Name: RAD52 motif containing 1
  Uniprot ID: Q8NG50
  ENST ID: ENST00000633612
  CDS Start-End: 1-345

SEQ ID NO: 173628 - DNA, 1491 bp, Homo sapiens; identical to SEQ ID NO: 173621
  Payload ID: 14098
  Gene Symbol: RDM1
  Gene Name: RAD52 motif containing 1
  ENST ID: ENST00000632708
  CDS Start-End: 472-1113

SEQ ID NO: 173629 - DNA, 587 bp, Homo sapiens; identical to SEQ ID NO: 173605
  Payload ID: 14098
  Gene Symbol: RDM1
  Gene Name: RAD52 motif containing 1
  Uniprot ID: Q8NG50
  ENST ID: ENST00000633984
  CDS Start-End: 1-414

SEQ ID NO: 173630 - DNA, 687 bp, Homo sapiens; identical to SEQ ID NO: 173622
  Payload ID: 14098
  Gene Symbol: RDM1
  Gene Name: RAD52 motif containing 1
  Uniprot ID: Q8NG50
  ENST ID: ENST00000633122
  CDS Start-End: 1-687

SEQ ID NO: 173631 - DNA, 432 bp, Homo sapiens; identical to SEQ ID NO: 173611
  Payload ID: 14098
  Gene Symbol: RDM1
  Gene Name: RAD52 motif containing 1
  Uniprot ID: Q8NG50
  ENST ID: ENST00000632922
  CDS Start-End: 1-432

SEQ ID NO: 173632 - DNA, 1535 bp, Homo sapiens; identical to SEQ ID NO: 173610
  Payload ID: 14098
  Gene Symbol: RDM1
  Gene Name: RAD52 motif containing 1
  Uniprot ID: Q8NG50
  ENST ID: ENST00000632857
  CDS Start-End: 488-1273

SEQ ID NO: 173633 - DNA, 3068 bp, Homo sapiens
  Payload ID: 14099
  Gene Symbol: RAD54B
  Gene Name: RAD54 homolog B (S. cerevisiae)
  Uniprot ID: Q9Y620
  ENST ID: ENST00000336148
  CDS Start-End: 126-2858
gattggcttcgccgaggcgggatccttgagcttctccggcggcgaggggatagctggttaccagaaggacttctttgcagggccagtggtttctgtcagattttcgccggtcacgactgctgaatatgagacgatctgcagcaccaagtcagttgcaggggaattccttcaaaaaaccaaaatttatacctccaggaagaagtaatccaggtctgaatgaagagattacaaaactgaatccagatataaaattatttgagggtgttgcaattaataacacctttctcccgtcacaaaatgatcttagaatatgcagtttaaatctgcctagtgaagaaagtactagagaaatcaataacagagataattgcagtggaaaatattgttttgaagcacctacactggcaacattagatccacctcatacagttcattcggctcctaaagaagtagcagtgtccaaggaacaagaagagaaatctgatagcctagttaaatatttcagtgttgtttggtgtaagccttcaaagaaaaaacataaaaagtgggaaggtgatgctgttcttattgtaaaaggaaagtcatttatattaaagaatttggaaggcaaagacattggaagaggcattggttataaattcaaagagcttgaaaagattgaagagggccaaacactgatgatttgtggaaaagaaatagaagtcatgggtgtaatctctccagatgacttcagcagtggcaggtgttttcagcttggaggaggaagtactgctatctcgcattcttctcaggttgccaggaaatgtttctctaaccctttcaaaagtgtttgtaaaccaagttcaaaggaaaatagacagaatgatttccaaaattgcaaaccacgccatgacccatatacgccaaattccctcgttatgccacgaccagataagaatcaccagtgggtattcaataagaactgtttccctcttgtggatgtagtgattgatccttaccttgtatatcatcttcgaccacatcagaaagaaggaatcatattcctttatgaatgtgtaatgggaatgagaatgaatggcagatgtggagctattcttgctgatgaaatgggtttagggaagacattgcaatgtatttcgctcatctggaccctgcagtgtcagggaccctatggaggcaagccagtaataaagaagacactaattgtcacacctggaagcttggtgaataattggaagaaagaatttcaaaaatggctaggaagtgaaaggatcaagatatttactgttgatcaggaccacaaagttgaagaattcatcaagtctatattttattctgttcttattatcagttatgaaatgttacttcgttccctggatcaaattaagaatataaaatttgatcttctaatctgtgacgaggggcatcgtttgaagaacagtgccattaagacaactacagccctcattagcctttcttgtgagaaaagaataattctaactggtactccaattcagaatgatctgcaagaattttttgcattaattgattttgtaaatccaggaatattaggctctttgtcatcttataggaaaatatatgaagaacccatcattttatcgagagaaccttctgcttctgaggaagaaaaggagttaggagaaagaagagcagctgaacttacttgcctcactggactctttatccttagaagaacccaagaaattataaataaatatctcccacctaaaatagagaatgttgtcttttgccgaccaggagcactacagattgagctttatcgaaagctgttaaattctcaggttgtcaggttctgccttcaagggttgttggaaaatagtccccatctaatatgtataggagctcttaaaaaactgtgcaatcacccctgccttttgttcaactctataaaggaaaaggaatgtagctcaacttgtgataaaaatgaagaaaagagtctatacaaaggcttgctaagtgtgtttcctgctgactacaaccctctcctgtttactgaaaaggagtcaggaaaactacaggtgttgtccaagctcttagcggttatccacgaacttcgacctactgaaaaggtggtgttggtatccaactatacacaaaccttgaacattttacaagaagtatgtaagcgtcatggatatgcttatacaagacttgatggacaaacaccaatctctcaaaggcagcagattgttgatggctttaacagtcaacactcttctttttttatttttttgttaagttcaaaagctggtggtgtaggacttaacctcattggaggatctcacttaattctctatgacattgattggaatccagccactgacattcaggcaatgtctagagtatggagagatggtcagaaatatcctgtacatatttacagactcctaactacaggtacaatagaagaaaagatctatcaaaggcagatcagtaagcaaggtctttgtggggcagttgtcgacctcaccaagacatctgaacatattcagttttcagtagaagaacttaaaaatttgttcacattacatgaaagttcagattgtgttactcatgatctgcttgactgtgagtgtacaggagaagaagttcatacaggtgattcgttggaaaaattcattgtctctagagattgtcagcttggtccacatcaccagaaatctaactccctgaaacctctttctatgtcccagctgaagcaatggaaacatttttctggagatcatttaaatcttacagatccttttcttgaaagaataacagaaaatgtgtcattcatttttcagaatataaccactcaagctactggcacatagtgaaagattacttctgacattccattgctcttcttttgaaaattagtatggtaattaaatgtactttttgaaaattaatagaattatttaaattacagtatatgttgcaaaatatatcacttttgatacaatagtcaaaattgagtggtttaatgttttgtaaatattaagtgtttaaatgaaaaataaagatgtgcttatatcattgta

SEQ ID NO: 173634 - DNA, 472 bp, Homo sapiens
  Payload ID: 14099
  Gene Symbol: RAD54B
  Gene Name: RAD54 homolog B (S. cerevisiae)
  ENST ID: ENST00000523839
  CDS Start-End: 96-472
tcctccaggcctctgaagaagaaattcagaacaaagaataatagcagttagagttcagtcctgtttcccctaatctgaggtcacgactgctgaatatgagacgatctgcagcaccaagtcagttgcaggggaattccttcaaaaaaccaaaatttatacctccaggaagaagtaatccaggtctgaatgaagagattacaaaactgaatccagatataaaattatttgagggtgttgcaattaataacacctttctcccgtcacaaaatgatcttagaatatgcagtttaaatctgcctagtgaagaaagtactagagaaatcaataacagagataattgcagtggaaaatattgttttgaagcacctacactggcaacattagatccacctcatacagttcattcggctcctaaagaagtagcagtgtccaaggaacaagaagagaaatctgatagcctagttaaatattt

SEQ ID NO: 173635 - DNA, 1879 bp, Homo sapiens
  Payload ID: 14099
  Gene Symbol: RAD54B
  Gene Name: RAD54 homolog B (S. cerevisiae)
  Uniprot ID: Q9Y620
  ENST ID: ENST00000297592
  CDS Start-End: 79-432
ggatagctggttaccagaaggacttctttgcagggccagtggtttctgtcagattttcgccggtcacgactgctgaatatgagacgatctgcagcaccaagtcagttgcaggggaattccttcaaaaaaccaaaatttatacctccaggaagaagtaatccaggtctgaatgaagagattacaaaactgaatccagatataaaattatttgagggtgttgcaattaataacacctttctcccgtcacaaaatgatcttagaatatgcagtttaaatctgcctagtgaagaaagtactagagaaatcaataacagagataattgcagtggaaaatattgttttgaagcacctacactggcaacattagatccacctcatacagtgcaaacttggatgaggaggcacaggctggtaccagttcactacaggtaatgttggatcaccatcctgttgctattacagtggaggtgaagcaagaagaagacattaaaccacctcctccactggttttaaattctcaacagagtgatactttagagcaaagagaagaacatgaattagtacatgttatggaaagatccttgtcgccttcactttcctctgttgatatgagaatgacatcgtctccatcttctattccaaggagagatgatttttttcggcatgagagtggtgaacactttaggtcactattagggtatgatcctcagatcctgcaaatgttgaaagaggagcatcagataattttagaaaatcaaaaaaattttggattgtatgttcaggagaagagggatggattgaaaagaaggcagcagctagaggaagagctactaagagcaaaaattgaagtggagaagctgaaagcaattcgcttacggcatgatctacctgaatataacagtctctaagtttttttttcaatcttgcaatttgataattttgattttggccaaattactttaatttgggaatatcctgaaacagaatacacgttcttgaaaaatgttgttaatctctattatggaaaaactttttagatataattttctaattattttcttttgagatattaaaatttactggttggttggcatggttatagtttttattgtcttcttttttttttccctaagtttaattgttgaccttacaaaagatattttattctgatcactaagatatacacaaatgcatatacaaacacatattctttcaaagttctgagtcttcaacatttttagttagaactttgaaagctataattagagatttttaagtcagtctaatttaggagctatactaacctaataccaagaagcttgtctgtatgacattggtttttatgcttttatcttttgaaggagtaaatcctaggattttagagatggaagatatttggagaacactttttttccatctctgcagtttaggggtaatgaaacaggtccagggagaactcaatgacttacttagggtaacaaagctatttatggcagagcagagaccagcacttagtttttctttgtgtaatttccatcccgctattcgatagaagtaaatatccactaaaacattctctagatttaaatattagaagcatttctttcattaaaattgcctttaaagattgttaggttgtgaaatcaggataattacatcaattacccccattctctctctatttttgttccagcaaaatagataaggtattccattgaagctattatatattttggctgtgtgatttaaagacatgtcttaattcattttgaatgtcctgttctggaaaaaatttctttcacagtaaaaatcagaatgaacaaaattaaaattttatgtattttataagtattgttattttagtattcatggaaataaa

SEQ ID NO: 173636 - DNA, 599 bp, Homo sapiens
  Payload ID: 14099
  Gene Symbol: RAD54B
  Gene Name: RAD54 homolog B (S. cerevisiae)
  ENST ID: ENST00000518998
  CDS Start-End: 71-229
ggttaccagaaggacttctttgcagggccagtggtttctgtcagattttcgccggtcacgactgctgaatatgagacgatctgcagcaccaagtcagttgcaggggaattccttcaaaaaaccaaaatttatacctccaggaagaagtaatccaggtctgaatgaagagattacaaaactgaatccagatataaaattatttgagttcattcggctcctaaagaagtagcagtgtccaaggaacaagaagagaaatctgatagcctagttaaatatttcagtgttgtttggtgtaagccttcaaagaaaaaacataaaaagtgggaaggtgatgctgttcttattgtaaaaggaaagtcatttatattaaagaatttggaaggcaaagacattggaagaggcattggttataaattcaaagagcttgaaaagattgaagagggccaaacactgatgatttgtggaaaagaaatagaagtcatgggtgtaatctctccagatgacttcagcagtggcaggtgttttcagcttggaggaggaagtactgctatctcgcattcttctcaggttgccaggaaatgtttctctaaccctttcaa

SEQ ID NO: 173637 - DNA, 1699 bp, Homo sapiens
  Payload ID: 14099
  Gene Symbol: RAD54B
  Gene Name: RAD54 homolog B (S. cerevisiae)
  ENST ID: ENST00000463267
  CDS Start-End: 99-464
gagcttctccggcggcgaggggatagctggttaccagaaggacttctttgcagggccagtggtttctgtcagattttcgccggtcacgactgctgaatatgagacgatctgcagcaccaagtcagttgcaggggaattccttcaaaaaaccaaaatttatacctccaggaagaagtaatccaggtctgaatgaagagattacaaaactgaatccagatataaaattatttgagggtgttgcaattaataacacctttctcccgtcacaaaatgatcttagaatatgcagtttaaatctgcctagtgaagaaagtactagagaaatcaataacagagataattgcagtggaaaatattgttttgaagcacctacactggcaacattagatccacctcatacagtgcaaacttggatgaggaggcacaggctggtaccagttcactacagttcattcggctcctaaagaagtagcagtgtccaaggaacaagaagagaaatctgatagcctagttaaatatttcagtgttgtttggtgtaagccttcaaagaaaaaacataaaaagtgggaaggtgatgctgttcttattgtaaaaggaaagtcatttatattaaagaatttggaaggcaaagacattggaagaggcattggttataaattcaaagagcttgaaaagattgaagagggccaaacactgatgatttgtggaaaagaaatagaagtcatgggtgtaatctctccagatgacttcagcagtggcaggtgttttcagcttggaggaggaagtactgctatctcgcattcttctcaggttgccaggaaatgtttctctaaccctttcaaaagtgtttgtaaaccaagttcaaaggaaaatagacagaatgatttccaaaattgcaaaccacgccatgacccatatacgccaaattccctcgttatgccacgaccagataagaatcaccagtgggtattcaataagaactgtttccctcttgtggatgtagtgattgatccttaccttgtatatcatcttcgaccacatcagaaagaaggaatcatattcctttatgaatgtgtaatgggaatgagaatgaatggcagatgtggagctattcttgctgatgaaatgggtttagggaagacattgcaatgtatttcgctcatctggaccctgcagtgtcagggaccctatggaggcaagccagtaataaagaagacactaattgtcacacctggaagcttggtgaataattggaagaaagaatttcaaaaatggctaggaagtgaaaggatcaagatatttactgttgatcagttatgaaatgttacttcgttccctggatcaaattaagaatataaaatttgatcttctaatctgtgacgaggggcatcgtttgaagaacagtgccattaagacaactacagccctcattagcctttcttgtgagaaaagaataattctaactggtactccaattcagaatgatctgcaagaattttttgcattaattgattttgtaaatccaggaatattaggctctttgtcatcttataggaaaatatatgaagaacccatcattttatcgagagaaccttctgcttctgaggaagaaaaggagttaggagaaagaagagcagctgaacttacttgcctcactggactctttatccttagaagaacccaagaaattataaataaa

SEQ ID NO: 173638 - DNA, 3089 bp, Homo sapiens
  Payload ID: 14099
  Gene Symbol: RAD54B
  Gene Name: RAD54 homolog B (S. cerevisiae)
  ENST ID: ENST00000611249
  CDS Start-End: 699-2879
gtttgtgaaaagagctgagcagagctgaaggctgcatggtggtttcagaaactgcctacttaatttgaaaagaacaatggtaggaaaggctagatcttccaattttaccttatccgaaaagcttgatttgctaaagcttgtgaagccatatgtgaaaattctcgaagaacacactaataaacattcagtaatagtagaaaagaatagatgttgggatatcatagcagttaactataatgcaattggagtagaccgccctcctcgaacagcacagggcctacgcaccctttataaaaggctcaaagaatatgccaaacaggagctattgcagcaaaaagagacccaatcagattttaaaagcaatatttctgagccaaccaagaaagttatggagatgattccccagatttccagtttttgcctggtaagagacaggaaccacatacaaagttcattcggctcctaaagaagtagcagtgtccaaggaacaagaagagaaatctgatagcctagttaaatatttcagtgttgtttggtgtaagccttcaaagaaaaaacataaaaagtgggaaggtgatgctgttcttattgtaaaaggaaagtcatttatattaaagaatttggaaggcaaagacattggaagaggcattggttataaattcaaagagcttgaaaagattgaagagggccaaacactgatgatttgtggaaaagaaatagaagtcatgggtgtaatctctccagatgacttcagcagtggcaggtgttttcagcttggaggaggaagtactgctatctcgcattcttctcaggttgccaggaaatgtttctctaaccctttcaaaagtgtttgtaaaccaagttcaaaggaaaatagacagaatgatttccaaaattgcaaaccacgccatgacccatatacgccaaattccctcgttatgccacgaccagataagaatcaccagtgggtattcaataagaactgtttccctcttgtggatgtagtgattgatccttaccttgtatatcatcttcgaccacatcagaaagaaggaatcatattcctttatgaatgtgtaatgggaatgagaatgaatggcagatgtggagctattcttgctgatgaaatgggtttagggaagacattgcaatgtatttcgctcatctggaccctgcagtgtcagggaccctatggaggcaagccagtaataaagaagacactaattgtcacacctggaagcttggtgaataattggaagaaagaatttcaaaaatggctaggaagtgaaaggatcaagatatttactgttgatcaggaccacaaagttgaagaattcatcaagtctatattttattctgttcttattatcagttatgaaatgttacttcgttccctggatcaaattaagaatataaaatttgatcttctaatctgtgacgaggggcatcgtttgaagaacagtgccattaagacaactacagccctcattagcctttcttgtgagaaaagaataattctaactggtactccaattcagaatgatctgcaagaattttttgcattaattgattttgtaaatccaggaatattaggctctttgtcatcttataggaaaatatatgaagaacccatcattttatcgagagaaccttctgcttctgaggaagaaaaggagttaggagaaagaagagcagctgaacttacttgcctcactggactctttatccttagaagaacccaagaaattataaataaatatctcccacctaaaatagagaatgttgtcttttgccgaccaggagcactacagattgagctttatcgaaagctgttaaattctcaggttgtcaggttctgccttcaagggttgttggaaaatagtccccatctaatatgtataggagctcttaaaaaactgtgcaatcacccctgccttttgttcaactctataaaggaaaaggaatgtagctcaacttgtgataaaaatgaagaaaagagtctatacaaaggcttgctaagtgtgtttcctgctgactacaaccctctcctgtttactgaaaaggagtcaggaaaactacaggtgttgtccaagctcttagcggttatccacgaacttcgacctactgaaaaggtggtgttggtatccaactatacacaaaccttgaacattttacaagaagtatgtaagcgtcatggatatgcttatacaagacttgatggacaaacaccaatctctcaaaggcagcagattgttgatggctttaacagtcaacactcttctttttttatttttttgttaagttcaaaagctggtggtgtaggacttaacctcattggaggatctcacttaattctctatgacattgattggaatccagccactgacattcaggcaatgtctagagtatggagagatggtcagaaatatcctgtacatatttacagactcctaactacaggtacaatagaagaaaagatctatcaaaggcagatcagtaagcaaggtctttgtggggcagttgtcgacctcaccaagacatctgaacatattcagttttcagtagaagaacttaaaaatttgttcacattacatgaaagttcagattgtgttactcatgatctgcttgactgtgagtgtacaggagaagaagttcatacaggtgattcgttggaaaaattcattgtctctagagattgtcagcttggtccacatcaccagaaatctaactccctgaaacctctttctatgtcccagctgaagcaatggaaacatttttctggagatcatttaaatcttacagatccttttcttgaaagaataacagaaaatgtgtcattcatttttcagaatataaccactcaagctactggcacatagtgaaagattacttctgacattccattgctcttcttttgaaaattagtatggtaattaaatgtactttttgaaaattaatagaattatttaaattacagtatatgttgcaaaatatatcacttttgatacaatagtcaaaattgagtggtttaatgttttgtaaatattaagtgtttaaatgaaaaataaagatgtgcttatatcattgta

SEQ ID NO: 173639 - DNA, 3108 bp, Homo sapiens
  Payload ID: 14100
  Gene Symbol: RAD54L
  Gene Name: RAD54-like (S. cerevisiae)
  Uniprot ID: Q92698
  ENST ID: ENST00000371975
  CDS Start-End: 675-2918
ggtcttggcgggtcggtgagtcttggcggctgttaacgcgcgctttgggaacaggaaggttgagagagaggtgctggggtctgcgtctatctctgtcgctcttttcagcccctcctggtattcccctcctaacctgggttttttacacgcccgcgtggcttcctgctcgacctccctgagtctgatcctggtttccacctccagccctgggaaatttcctttctccagactcgccctccccacccgggcctcggactttcaccccagcttctctctcctggccagtgattacccacccccaatcccaccccgccccgccgcgcaactacctcctcccttcacccggactgggaccatcatccccactccactccgcccagtctgggactccacctgcctcctccccaatcccacactaatctctgcttggtctcttcctctttggcctaatctctcgtctcggcttattggggacggccactctcacagtttggttccaaacaccagttcctggatggattcccgccatccatgccccctctttaattagccggtcctctcaataatgtagcagccccctctacagattagaccctggtcctacactcttagccgctgcctgcttttgacctttggctcatgggtacttgacgttttaaactcctaggcccaggatgaggaggagcttggctcccagccagctggccaagagaaaacctgaaggcaggtcctgtgatgatgaagactggcaacctggcctagtgactcctaggaaacggaaatccagcagtgagacccagatccaggagtgtttcctgtctccttttcggaaacctttgagtcagctaaccaatcaaccaccttgtctggacagcagtcagcatgaagcatttattcgaagcattttgtcaaagcctttcaaagtccccattccaaattatcaaggtcctctgggctctcgagcattgggcctgaaaagggctggggtccgccgggccctccatgaccccctggaaaaagatgccttggttctgtatgagcctcccccgctgagcgctcatgaccagctgaagcttgacaaggagaaactccctgtccatgtggttgttgaccctattctcagtaaggttttgcggcctcatcagagagagggagtgaaattcctgtgggagtgtgtcaccagtcggcgcatccctggcagccatggctgcatcatggctgatgagatgggcctaggaaagacgctgcagtgcatcacattgatgtggacacttttacgccagagtccagagtgcaagccagaaattgacaaggcagtggtggtgtcgccttccagcctggtgaagaactggtacaatgaggttgggaaatggctcggagggaggatccaacctctggccatcgatggaggatctaaggatgaaatagaccaaaagctggaaggattcatgaaccagcgtggagccagggtgtcttctcccatcctcatcatttcctatgagaccttccgccttcatgttggagtcctccagaaaggaagtgttggtctggtcatatgtgacgagggacacaggctcaagaactctgagaatcagacttaccaagccctggacagcttgaacaccagccggcgggtgctcatctccggaactcccatccagaatgatctgcttgagtatttcagcttggtacattttgttaattccggcatcctagggactgcccatgaattcaagaagcattttgaattgccaattttgaagggtcgagacgctgctgctagtgaggcagacaggcagctaggagaggagcggctgcgggagctcaccagcattgtgaatagatgcctgatacggaggacttctgatatcctttctaaatatctgcctgtgaagattgagcaggtcgtttgttgtaggctgacaccccttcagactgagttatacaagaggtttctgagacaagccaaaccggcagaagaattgcttgagggcaagatgagtgtgtcttccctttcttccatcacctcgctaaagaagctttgtaatcatccagctctaatctatgataagtgtgtggaagaggaggatggctttgtgggtgccttggacctcttccctcctggttacagctctaaggccctggagccccagctgtcaggtaagatgctggtcctggattatattctggcggtgacccgaagccgtagcagtgacaaagtagtgctggtgtcgaattacacccagactttggatctctttgagaagctgtgccgtgcccgaaggtacttatacgtccgcctggatggcacgatgtccattaagaagcgagccaaggttgtagaacgcttcaatagtccatcgagccctgactttgtcttcatgctgagcagcaaagctgggggctgtggcctcaatctcattggggctaaccggctggtcatgtttgaccctgactggaacccagccaatgatgaacaagccatggcccgggtctggcgagatggtcaaaagaagacttgctatatctaccgcctgctgtctgcagggaccattgaggagaagatcttccagcgtcagagccacaagaaggcactgagcagctgtgtggtggatgaggagcaggatgtagagcgccacttctctctgggcgagttgaaggagctgtttatcctggatgaagctagcctcagtgacacacatgacaggttgcactgccgacgttgtgtcaacagccgtcagatccggccaccccctgatggttctgactgcacttcagacctggcagggtggaaccactgcactgataagtgggggctccgggatgaggtactccaggctgcctgggatgctgcctccactgccatcaccttcgtcttccaccagcgttctcatgaggagcagcggggcctccgctgataaccagctggtctgggtgtagctcttagaggaaggagatagggaaaaggggctccttgctccacagggccctgttgaattttgttctctgggagaaaatcatcaagaagggctgcatgatgtttgcccaaaatttattttataagaaaaacttttttggttaaaaaaaagaataaaggtatgaaagggt

SEQ ID NO: 173640 - DNA, 2549 bp, Homo sapiens
  Payload ID: 14100
  Gene Symbol: RAD54L
  Gene Name: RAD54-like (S. cerevisiae)
  Uniprot ID: Q92698
  ENST ID: ENST00000442598
  CDS Start-End: 115-2358
gatacgacggcagcgcggcgggaggttcgattgacccggtcttggcgggtcgccgctgcctgcttttgacctttggctcatgggtacttgacgttttaaactcctaggcccaggatgaggaggagcttggctcccagccagctggccaagagaaaacctgaaggcaggtcctgtgatgatgaagactggcaacctggcctagtgactcctaggaaacggaaatccagcagtgagacccagatccaggagtgtttcctgtctccttttcggaaacctttgagtcagctaaccaatcaaccaccttgtctggacagcagtcagcatgaagcatttattcgaagcattttgtcaaagcctttcaaagtccccattccaaattatcaaggtcctctgggctctcgagcattgggcctgaaaagggctggggtccgccgggccctccatgaccccctggaaaaagatgccttggttctgtatgagcctcccccgctgagcgctcatgaccagctgaagcttgacaaggagaaactccctgtccatgtggttgttgaccctattctcagtaaggttttgcggcctcatcagagagagggagtgaaattcctgtgggagtgtgtcaccagtcggcgcatccctggcagccatggctgcatcatggctgatgagatgggcctaggaaagacgctgcagtgcatcacattgatgtggacacttttacgccagagtccagagtgcaagccagaaattgacaaggcagtggtggtgtcgccttccagcctggtgaagaactggtacaatgaggttgggaaatggctcggagggaggatccaacctctggccatcgatggaggatctaaggatgaaatagaccaaaagctggaaggattcatgaaccagcgtggagccagggtgtcttctcccatcctcatcatttcctatgagaccttccgccttcatgttggagtcctccagaaaggaagtgttggtctggtcatatgtgacgagggacacaggctcaagaactctgagaatcagacttaccaagccctggacagcttgaacaccagccggcgggtgctcatctccggaactcccatccagaatgatctgcttgagtatttcagcttggtacattttgttaattccggcatcctagggactgcccatgaattcaagaagcattttgaattgccaattttgaagggtcgagacgctgctgctagtgaggcagacaggcagctaggagaggagcggctgcgggagctcaccagcattgtgaatagatgcctgatacggaggacttctgatatcctttctaaatatctgcctgtgaagattgagcaggtcgtttgttgtaggctgacaccccttcagactgagttatacaagaggtttctgagacaagccaaaccggcagaagaattgcttgagggcaagatgagtgtgtcttccctttcttccatcacctcgctaaagaagctttgtaatcatccagctctaatctatgataagtgtgtggaagaggaggatggctttgtgggtgccttggacctcttccctcctggttacagctctaaggccctggagccccagctgtcaggtaagatgctggtcctggattatattctggcggtgacccgaagccgtagcagtgacaaagtagtgctggtgtcgaattacacccagactttggatctctttgagaagctgtgccgtgcccgaaggtacttatacgtccgcctggatggcacgatgtccattaagaagcgagccaaggttgtagaacgcttcaatagtccatcgagccctgactttgtcttcatgctgagcagcaaagctgggggctgtggcctcaatctcattggggctaaccggctggtcatgtttgaccctgactggaacccagccaatgatgaacaagccatggcccgggtctggcgagatggtcaaaagaagacttgctatatctaccgcctgctgtctgcagggaccattgaggagaagatcttccagcgtcagagccacaagaaggcactgagcagctgtgtggtggatgaggagcaggatgtagagcgccacttctctctgggcgagttgaaggagctgtttatcctggatgaagctagcctcagtgacacacatgacaggttgcactgccgacgttgtgtcaacagccgtcagatccggccaccccctgatggttctgactgcacttcagacctggcagggtggaaccactgcactgataagtgggggctccgggatgaggtactccaggctgcctgggatgctgcctccactgccatcaccttcgtcttccaccagcgttctcatgaggagcagcggggcctccgctgataaccagctggtctgggtgtagctcttagaggaaggagatagggaaaaggggctccttgctccacagggccctgttgaattttgttctctgggagaaaatcatcaagaagggctgcatgatgtttgcccaaaatttattttataagaaaaacttttttggttaaaaaaaagaataaaggtatgaaagggtt

SEQ ID NO: 173641 - DNA, 1121 bp, Homo sapiens
  Payload ID: 14100
  Gene Symbol: RAD54L
  Gene Name: RAD54-like (S. cerevisiae)
  ENST ID: ENST00000488942
  CDS Start-End: 1-964
atgcctgatacggaggacttctgatatcctttctaaatatctgcctgtgaagattgagcaggtcgtttgttgtaggctgacaccccttcagactgagttatacaagaggtttctgagacaagccaaaccggcagaagaattgcttgagggcaagatgagtgtgtcttccctttcttccatcacctcgctaaagaagctttgtaatcgtaagatgctggtcctggattatattctggcggtgacccgaagccgtagcagtgacaaagtagtgctggtgtcgaattacacccagactttggatctctttgagaagctgtgccgtgcccgaaggtacttatacgtccgcctggatggcacgatgtccattaagaagcgagccaaggttgtagaacgcttcaatagtccatcgagccctgactttgtcttcatgctgagcagcaaagctgggggctgtggcctcaatctcattggggctaaccggctggtcatgtttgaccctgactggaacccagccaatgatgaacaagccatggcccgggtctggcgagatggtcaaaagaagacttgctatatctaccgcctgctgtctgcagggaccattgaggagaagatcttccagcgtcagagccacaagaaggcactgagcagctgtgtggtggatgaggagcaggatgtagagcgccacttctctctgggcgagttgaaggagctgtttatcctggatgaagctagcctcagtgacacacatgacaggttgcactgccgacgttgtgtcaacagccgtcagatccggccaccccctgatggttctgactgcacttcagacctggcagggtggaaccactgcactgataagtgggggctccgggatgaggtactccaggctgcctgggatgctgcctccactgccatcaccttcgtcttccaccagcgttctcatgaggagcagcggggcctccgctgataaccagctggtctgggtgtagctcttagaggaaggagatagggaaaaggggctccttgctccacagggccctgttgaattttgttctctgggagaaaatcatcaagaagggctgcatgatgtttgcccaaaatttattttataagaaaaacttttt

SEQ ID NO: 173642 - DNA, 648 bp, Homo sapiens
  Payload ID: 14100
  Gene Symbol: RAD54L
  Gene Name: RAD54-like (S. cerevisiae)
  ENST ID: ENST00000469835
  CDS Start-End: 41-648
gcgcgctttgggaacaggaaggttgagagagaggcccaggatgaggaggagcttggctcccagccagctggccaagagaaaacctgaaggcaggtcctgtgatgatgaagactggcaacctggcctagtgactcctaggaaacggaaatccagcagtgagacccagatccaggagtgtttcctgtctccttttcggaaacctttgagtcagctaaccaatcaaccaccttgtctggacagcagtcagcatgaagcatttattcgaagcattttgtcaaagcctttcaaagtccccattccaaattatcaaggtcctctgggctctcgagcattgggcctgaaaagggctggggtccgccgggccctccatgaccccctggaaaaagatgccttggttctgtatgagcctcccccgctgagcgctcatgaccagctgaagcttgacaaggagaaactccctgtccatgtggttgttgaccctattctcagtaaggttttgcggcctcatcagagagagggagtgaaattcctgtgggagtgtgtcaccagtcggcgcatccctggcagccatggctgcatcatggctgatgagatgggcctaggaaagacgctgcagtgcatcacattgatgtggacacttttacgcca

SEQ ID NO: 173643 - DNA, 767 bp, Homo sapiens
  Payload ID: 14100
  Gene Symbol: RAD54L
  Gene Name: RAD54-like (S. cerevisiae)
  ENST ID: ENST00000472889
  CDS Start-End: 1-767
gtcctctgggctctcgagcattgggcctgaaaagggctggggtccgccgggccctccatgaccccctggaaaaagatgccttggttctgtatgagcctcccccgctgagcgctcatgaccagctgaagcttgacaaggagaaactccctgtccatgtggttgttgaccctattctcagtaaggttttgcggcctcatcagagagagggagtgaaattcctgtgggagtgtgtcaccagtcggcgcatccctggcagccatggctgcatcatggctgatgagatgggcctaggaaagacgctgcagtgcatcacattgatgtggacacttttacgccagagtccagagtgcaagccagaaattgacaaggcagtggtggtgtcgccttccagcctggtgaagaactggtacaatgaggttgggaaatggctcggagggaggatccaacctctggccatcgatggaggatctaaggatgaaatagaccaaaagctgggattcatgaaccagcgtggagccagggtgtcttctcccatcctcatcatttcctatgagaccttccgccttcatgttggagtcctccagaaaggaagtgttggtctggtcatatgtgacgagggacacaggctcaagaactctgagaatcagacttaccaagccctggacagcttgaacaccagccggcgggtgctcatctccggaactcccatccagaatgatctgcttgagtatttcagcttggtacattttgttaattccggcatccta

SEQ ID NO: 173644 - DNA, 775 bp, Homo sapiens
  Payload ID: 14100
  Gene Symbol: RAD54L
  Gene Name: RAD54-like (S. cerevisiae)
  ENST ID: ENST00000459678
  CDS Start-End: 1-337
tctgcctgtgaagattgagcaggtcgtttgttgtaggctgacaccccttcagactgagttatacaagaggtttctgagacaagccaaaccggcagaagaattgcttgagggcaagatgagtgtgtcttccctttcttccatcacctcgctaaagaagctttgtaatcatccagctctaatctatgataagtgtgtggaagaggaggatggctttgtgggtgccttggacctcttccctcctggttacagctctaaggccctggagccccagctgtcaggtacttatacgtccgcctggatggcacgatgtccattaagaagcgagccaaggttgtagaacgcttcaatagtccatcgagccctgactttgtcttcatgctgagcagcaaagctgggggctgtggcctcaatctcattggggctaaccggctggtcatgtttgaccctgactggaacccagccaatgatgaacaagccatggcccgggtctggcgagatggtcaaaagaagacttgctatatctaccgcctgctgtctgcagggaccattgaggagaagatcttccagcgtcagagccacaagaaggcactgagcagctgtgtggtggatgaggagcaggatgtagagcgccacttctctctgggcgagttgaaggagctgtttatcctggatgaagctagcctcagtgacacacatgacaggttgcactgccgacgttgtgtcaacagccgtcagatccggccaccccctgatggttctgactgcacttcagacc

SEQ ID NO: 173645 - DNA, 574 bp, Homo sapiens
  Payload ID: 14100
  Gene Symbol: RAD54L
  Gene Name: RAD54-like (S. cerevisiae)
  ENST ID: ENST00000476687
  CDS Start-End: 1-207
gttggagtcctccagaaaggaagtgttggtctggtcatatgtgacgagggacacaggctcaagaactctgagaatcagacttaccaagccctggacagcttgaacaccagccggcgggtgctcatctccggaactcccatccagaatgatctgcttgagtatttcagcttggtacattttgttaattccggcatcctagatgcctgatacggaggacttctgatatcctttctaaatatctgcctgtgaagattgagcaggtcgtttgttgtaggctgacaccccttcagactgagttatacaagaggtttctgagacaagccaaaccggcagaagaattgcttgagggcaagatgagtgtgtcttccctttcttccatcacctcgctaaagaagctttgtaatcatccagctctaatctatgataagtgtgtggaagaggaggatggctttgtgggtgccttggacctcttccctcctggttacagctctaaggccctggagccccagctgtcaggtaagatgctggtcctggattatattctggcggtgacccgaagccgtagcagtgacaa

SEQ ID NO: 173646 - DNA, 810 bp, Homo sapiens
  Payload ID: 14100
  Gene Symbol: RAD54L
  Gene Name: RAD54-like (S. cerevisiae)
  ENST ID: ENST00000493985
  CDS Start-End: 585-810
gacggcagcgcggcgggaggttcgattgacccggtcttggcgggtcgaggaggagcttggctcccagccagctggccaagagaaaacctgaaggcaggtcctgtgatgatgaagactggcaacctggcctagtgactcctaggaaacggaaatccagcagtgagacccagatccaggagtgtttcctgtctccttttcggaaacctttgagtcagctaaccaatcaaccaccttgtctggacagcagtcagcatgaagcatttattcgaagcattttgtcaaagcctttcaaagtccccattccaaattatcaaggtcctctgggctctcgagcattgggcctgaaaagggctggggtccgccgggccctccatgaccccctggaaaaagatgccttggttctgtatgagcctcccccgctgagcgctcatgaccagctgaagcttgacaaggagaaactccctgtccatgtggttgttgaccctattctcagtaaggttttgcggcctcatcagagagagggagtgaaattcctgtgggagtgtgtcaccagtcggcgcatccctggcagccatggctgcatcatggctgatgagatgggcctaggaaagacgctgcagtgcatcacattgatgtggacacttttacgccagagtccagagtgcaagccagaaattgacaaggcagtggtggtgtcgccttccagcctggtgaagaactggtacaatgaggttgggaaatggctcggagggaggatccaacctctggccatcgatggaggatctaaggatgaaatagaccaaaagctgg

SEQ ID NO: 173647 - DNA, 627 bp, Homo sapiens
  Payload ID: 14100
  Gene Symbol: RAD54L
  Gene Name: RAD54-like (S. cerevisiae)
  ENST ID: ENST00000493032
  CDS Start-End: 402-627
aggaggagcttggctcccagccagctggccaagagaaaacctgaaggcaggtcctgtgatgatgaagactggcaacctggcctagtgactcctaggaaacggaaatccagcagtgagacccagatccaggagtgtttcctgtctccttttcggaaacctttgagtcagctaaccaatcaaccaccttgtctggacagcagtcagcatgaagcatttattcgaagcattttgtcaaagcctttcaaagtccccattccaaattatcaagggagaaactccctgtccatgtggttgttgaccctattctcagtaaggttttgcggcctcatcagagagagggagtgaaattcctgtgggagtgtgtcaccagtcggcgcatccctggcagccatggctgcatcatggctgatgagatgggcctaggaaagacgctgcagtgcatcacattgatgtggacacttttacgccagagtccagagtgcaagccagaaattgacaaggcagtggtggtgtcgccttccagcctggtgaagaactggtacaatgaggttgggaaatggctcggagggaggatccaacctctggccatcgatggaggatctaaggatgaaatagaccaaaagctgg

SEQ ID NO: 173648 - DNA, 718 bp, Homo sapiens
  Payload ID: 14100
  Gene Symbol: RAD54L
  Gene Name: RAD54-like (S. cerevisiae)
  ENST ID: ENST00000463715
  CDS Start-End: 629-718
aatgggtgatacgacggcagcgcggcgggaggttcgattgacccggtcttggcgggtcgaggaggagcttggctcccagccagctggccaagagaaaacctgaaggcaggtcctgtgatgatgaagactggcaacctggcctagtgactcctaggaaacggaaatccagcagtgagacccagatccaggagtgtttcctgtctccttttcggaaacctttgagtcagctaaccaatcaaccaccttgtctggacagcagtcagcatgaagcatttattcgaagcattttgtcaaagcctttcaaagtccccattccaaattatcaaggtcctctgggctctcgagcattgggcctgaaaagggctggggtccgccgggccctccatgaccccctggaaaaagatgccttggttctgtatgagcctcccccgctgagcgctcatgaccagctgaagcttgacaaagtccagagtgcaagccagaaattgacaaggcagtggtggtgtcgccttccagcctggtgaagaactggtacaatgaggttgggaaatggctcggagggaggatccaacctctggccatcgatggaggatctaaggatgaaatagaccaaaagctggaaggattcatgaaccagcgtggagccagggtgtcttctcccatcctcatcatttcctatgagaccttccgccttcatgttggagtcctccagaaagga

SEQ ID NO: 173649 - DNA, 834 bp, Homo sapiens
  Payload ID: 14100
  Gene Symbol: RAD54L
  Gene Name: RAD54-like (S. cerevisiae)
  ENST ID: ENST00000473251
  CDS Start-End: 1-182
ttttacgccagagtccagagtgcaagccagaaattgacaaggcagtggtggtgtcgccttccagcctggtgaagaactggtacaatgaggttgggaaatggctcggagggaggatccaacctctggccatcgatggaggatctaaggatgaaatagaccaaaagctgggtacggagccctaacaaagatggctgcactctcctgcacagcctgctgctttcttacgtaaggattcatgaaccagcgtggagccagggtgtcttctcccatcctcatcatttcctatgagaccttccgccttcatgttggagtcctccagaaaggaagtgttggtctggtcatatgtgacgagggacacaggctcaagaactctgagaatcagacttaccaagccctggacagcttgaacaccagccggcgggtgctcatctccggaactcccatccagaatgatctgcttgagtatttcagcttggtacattttgttaattccggcatcctagggactgcccatgaattcaagaagcattttgaattgccaattttgaagggtcgagacgctgctgctagtgaggcagacaggcagctaggagaggagcggctgcgggagctcaccagcattgtgaatagatgcctgatacggaggacttctgatatcctttctaaatatctgcctgtgaagattgagcaggtcgtttgttgtaggctgacaccccttcagactgagttatacaagaggtttctgagacaagccaaaccggcagaagaattgcttgagggcaagatgagtgtgtcttccctttcttccatcacctcgctaaagaagctttgtaa

SEQ ID NO: 173650 - DNA, 9776 bp, Homo sapiens
  Payload ID: 14101
  Gene Symbol: RAD54L2
  Gene Name: RAD54-like 2 (S. cerevisiae)
  Uniprot ID: Q9Y4B4
  ENST ID: ENST00000409535
  CDS Start-End: 126-4529
tgtatgtaggctgggagtgtctgctgatcacttggagtgctgtcccttggaacaggaggagtaagattgagcacccctgcagtggaccatgagtcggtaatgcccactgaggacctctgggagccatgtcagacgaatctgcctcagggagcgatccagacctggacccggacgtggagctggaggatgcggaagaggaggaggaggaggaggaggtggcagtggaggagtgtgacagggatgatgaagaagacctgctggatgacccatccctggaaggcatgtgtggcactgagcatgcccagttgggagaagatgggcagcagccgccgcggtgcacttcaactacctcatctcagtctgagccttcagagcagcttaggcgccaccaaggcaagaacctagcctccgaggaccccaaaaagaagagagctcagaagccctcccacatgagaagaaacatacgaaagctactccgggaggatcaattggagcctgttaccaaagcagcacagcaagaagagttggaaagaaggaagcgcctggagcagcagaggaaagattatgcagcccctattcctactgttccgctggagttcctccctgaggaaattgctttaagggcaagtgacggtccccaactgcctcctcgggtcttggcccaggaagtcatttgtttggacagtagcagtggcagtgaggatgaaaaaagcagtcgagatgaggtgattgaactgagctctggagaggaggacactctgcacattgtggacagcagtgaatctgtcagtgaagatgatgaggaagaagagaagggtggcacccatgtcaatgatgtcttaaaccagcgtgacgcccttgggcgggtccttgtcaacctaaaccaccctccagaggaggaaaatgtcttccttgccccacagttggcacgggctgtgaaacctcatcagattggcgggatccggttcctttacgataacctagtggagtctctggagaggtttaagaccagcagtggctttggctgtattctggcccacagcatgggtctggggaaaactttgcaagtgatctctttcatcgacgtcctcttccgccacacgccagccaaaacagtccttgccattgtgccggttaatactcttcagaattggctggcagagttcaacatgtggcttccacctcctgaagccctcccggctgacaacaagcctgaagaagtccagcctcggttctttaaagttcacatcttgaatgatgagcacaagacgatggcatctcgtgctaaagtgatggctgattgggtgtcagagggtggcgtgctgctgatggggtacgagatgtacagactcctcactctgaagaaatcatttgccacaggtagaccgaagaaaaccaagaagcgttctcacccagtcatcattgatctagatgaggaagatcggcagcaggagtttcggagagagtttgagaaggctttatgccgccctggccctgatgtagtaatctgtgatgagggacaccgcatcaaaaactgccaggccagcacctcacaggctctgaagaatatccgctctcgccgccgggtggtgctgactgggtaccctctgcaaaacaacctcattgagtactggtgcatggtggactttgtgcgcccagacttccttggcacccggcaggagttcagcaacatgtttgaacgccctatcctgaatgggcaatgtattgacagcacacctcaggacgtccgcctcatgcggtaccggagccatgtcctgcacagtcttctggagggctttgtgcagaggagaggccacactgtgctgaagattcatctccctgccaaggaagaaaatgtgatccttgtgcggctctccaagatccagcgagatttgtatacacagttcatggatcgcttccgggactgtggtagcagcggttggctggggctgaacccccttaaggcattctgtgtgtgttgcaagatctggaatcaccctgatgtgctgtatgaagcccttcagaaggagagcttggccaatgagcaggacctagacgtggaagaacttggctctgcagggaccagtgcccgctgtccaccacagggaacaaaaggcaagggagaggatagcaccttggcttcctcgatgggagaggcaaccaatagcaagttcctacagggcgttggcttcaaccctttccaggagcgaggcaacaacattgtcacatatgaatgggccaaggaccttctgactaattaccagactggagtcctagaaaactctcccaagatggtactgcttttccacctgattgaggaaagtgtgaagcttggggacaagatccttgtgtttagccagagtctttccaccttggctctcatcgaggaattccttggaaaacgagaagtaccctgtccacctggtaccgaggggcaaggagcacagaagtgggttcgaaacatcagctacttccggctagatggtagcacccctgcctttgagagggagcggcttattaatcagttcaatgatcccagcaacctcaccacctggctgttccttctctctacaagggccggatgcttgggtgtgaatctgattggtgccaaccgagtggtggtgtttgatgcttcctggaacccttgccatgatgcccaggcagtatgtcgggtataccgttatggccagaaaaagccctgttacatctatcgccttgtggctgattacactctagaaaagaagatctatgaccgtcagatttccaagcagggcatgtcagatcgggtggtggatgatctaaatccaatgctgaacttcacacggaaagaggtggaaaacctactgcactttgttgagaaggagccagctccccaagtttccttgaacgtaaaggggatcaaggagtcagtcctgcaactggcctgtctgaagtaccctcacctcatcaccaaggagcctttcgagcatgagtcattgctcttgaaccgaaaggatcacaagctaaccaaggctgagaaaaaagcagcaaagaaaagctatgaggaagacaaacgcacatcagtcccctatacccgcccatcgtatgcgcagtattaccctgccagcgatcagagcctgaccagcatccccgccttcagccagagaaactggcagccaactttgaagggtgatgaaaagcctgtggccagtgttcgtcctgtgcagtccacccccatccccatgatgccccggcatgtcccattgggaggaagtgtaagctctgcctccagcacaaatccatccatgaactttcccatcaactacttgcagcgtgcaggagtccttgtgcagaaggtggtcaccacgacagatattgttattcctggactcaacagctccacagatgtacaggcaagaattaatgctggtgagagcatccacatcatccgtgggacaaaagggacgtacatccgtaccagtgatggacggatctttgctgtccgggcaactggcaaaccaaaggttcctgaagatggtcggatggctgcctcaggttcccagggaccttcttgcgagtccacaagcaacggcagacacagtgcctcatcacccaaagcccccgaccctgaggggctggccaggcccgtctctcctgacagcccagagatcatcagtgagcttcagcagtatgcagatgtggctgctgcccgggaatcccgtcagagctccccaagcaccaatgccgccctgcctggccccccggcccaacttatggacagcagtgctgttcccgggacagctctcggaactgagcctcgactagggggtcattgcctcaatagttccctcttggtgactggccagccctgtggtgacaggcacccagtgctggacttaaggggccacaagcgaaagttggccacaccacctgctgcccaggagtcatcccgccggcggtccaggaagggtcatctgccagcccccgtgcagccgtatgaacacgggtatccagtctctggcgggtttgccatgccacccgtctccttaaaccataacctcaccacccccttcacctcccaggctggggagaactccctgtttatgggcagtaccccctcctactaccagctgtccaatttgctggcagatgcccgcctggtgtttccagtgactactgaccctctggtgccagcaggccccgtcagttcctcttccacggctacctcagtcactgccagcaacccctccttcatgctcaacccttctgtgccagggatactacccagctattcactcccattctcacagccactcctgtccgagccgaggatgtttgcgccttttccttcccctgtcttgcccagcaacctttcgcggggcatgtctatctatccaggctacatgtccccacatgcaggctacccagctggtggcctcctacggtcccaggtgcctccatttgactctcatgaggttgccgaggttgggttcagctccaatgatgatgaggataaagacgatgatgtgatagaggtcactgggaaatagctagggagcccctccccacctcacttggggcccccagcaggttgcccaccaagctgaaaggcagtgatttagaccttttgagaataggacacttggcaggagggaaaaggaagaggacaaaggagggtggttggccaaagtggcagagctctgttgctgtttaacaaaagaggcaaaaaaaaaaaaaaaaaaaaaaaagtccaacacagcagcaatagcgggaaatcagggacccaaaacagggatggaggggcagtgcagcctcttttccttcctgccttgcttatgctgtctgcttgcttgctcgcccatctgagtgtagaagcgcacatcccatttctgtctttgggaacattctttcccaagagagctgccttactaggtgacttagcttggcctggggaggggagtgaaggaagggagaatgagtgagagaaggagggtgggtagggggagcagactgtgatcccatgtgaagtggggtctttttagggggtgggaaggaagctgaccaggtatgtgtgtttgtgagtgtgtgtgtgtatgtttattttgtatgtgtatgtatggaacagagcaggggtgaaggtgggaggggagggagggaagaactaagagggaaactgaaaaatgaatttatctttctttaaatggaagtcagtttggtggttcatggcacctagtgtgaacatcagggtgagcccagaagagccatggaaataacaagtttccttcgggatgggtgaagagaaggcccagctaactcaagtccctggtattcagagccacatttgtgtgagaatttggggaaattcatgagagaaaatgggcattaccaatctatgtctcttaaccccggtggctatctctgagcagctctccctttccagcttggaaggttgtctgtgtgcagaggctgggagggagaagcactgcagtacgtgaatgaaaggtcgcagagttgtggctggaaaatacatttttcaccagggtagaactgagcccccagctgcctatcctggtagtcttttctgttcctttccttcccctttagagagctccatgttaatttatttcttatgggcaattatttattacttggacttttcatgtgtcttgtttatttgggggtggggggaggttaggggtaaggagggtaggtgatagaaagggaagttttaagatatcccagaccctatagccactggtgaaaaacaatcctggatggatggtaaattgaccaggggaagagttaggtttgaccaaggtttggattaaacaactatatttttgagagatggcttttcaggaagatcagggaatcctgagactggatagttagtggagggtgggactcattccacagaaatcgaaagttgtgatcatggagtttgcaattgggaagtaagagaccccagatttggagctgtgtcctcctgggatgatgttagatgttggctctctatgctgaatagtgaagctgtggataggcggttgctgggttgagggactgttgatttcatgttcgaaaatatcttcaggtggtccatgtaggcctggtgtctgctgcctccatctttgaaggaacatggaggagccctttctctgtaggagccctaagtctgggttttatcttaaaagaacacaccagtcattctgggtctccccttattgccattgccaggggagggtcgtctagtccttaagcataaacactggctgtcttcctactggtgtccccgccccctctgtatcccccaccccaacactttgccagacagttctttatgatgaacaaactttggctttagagctttaccacttacccatggctccctccttactgggcaggtggtgtacctgcctcttcccagcccagaaggcagcttagtcaggtcatcccagtagtagctcctacagctcttctgaccagcccatttccatctttggagggccttagcagactctggggtattgtcctcagagaagagacaaggagatgatggatggggtgcatgtgtatatgtgtgtttgtctgctgtccaataacaccaaaagtggaacttaagaagctttgtgttttcataagcaccctgccagacacttaactcttctactcatggaagccttagatctacaatttagctatgcaaattattttaataatttaaaaatagcagttccaaccagtgctttctctttcagatgcatcccaagaatggatggtgaagggactcagttggagtgagctctcaggttgaggctggtgcagtaggagtgagctagactgaatctccaatttatgggacacactcagaacctgggttacactgatgcctctcaggccctggagcactgggatcccagagatgcatgtgtgcatgtgtatgtctgtgtgtgtgtgttgtcgggagaagggggtagtatttctgtgttcacttctaggaaatcactgtactagcctccaagaatccggaaaccttcccagccgggaactgaaaccattccctggagggatgggcttggcttttgaagttgacagaaagtaaatgggtattctgagaggcagcacatgcctactgtctatccagtgttccagggactgggtcttgcttctactcagcagaggccatcattctgggaggctgacctgactagagaaggctttcttttatatgtgcagtttctattgtgtagaggggttgggggtgggatcatgggaaattggagtgctaccaggtccatggtttttgctttttttttttttttttttttttttttttttttttaaagaaaataacctgaaaacacttctgacttttccactgtctctttatatgtgctgataggcaaatgtgcatgcacaccaaacataagcatgtttgtgagggaagcaggaagtatctcagagcctaagaaccatgttttatagtttctttgatcataaacacttggtggtgtcttccacccattatccaggcctgaggggggcagggtggctggtgataagagggagggcagaaaatcaggcctaggcgttttcccttaccattgtcttccatggaatgttttcaagggcctctcaagccccattcatctggtttagccaagttctcagcctggggaacacagtactacttaatgattgaggtttaccatttatagtgatgcttgatttccttttcttaatatatttgtagataaaaattgaacagggacaaagtagctatttaagaaaggaagtgaaccatgttgggtcatatcattttctttagattggatatctatgaagtccacacccctttgagttatgctttttaggcatctatctcatcatctcctgatttaaggataattctgtctggtccttggagctctcttccctaggaattagtgtgtggagtctctatatgcttgtgatccttggagctctcttccctaggaattagtgtgtggagtctctatatgcttgtgattcacaactaaatatgaaatttctcaattcaggagcaggaagcaaagtgctggggtacagttttgcagattggttgaaacacttagccaaacttaagtggcctgggtaggaccatcactcccaaagttgtcagcagagaagggccctctgtgtgagtctattcaaacctggcattgctctgaaattgagtcctcatcccatggggaaggtcttctgggggctttacattccttgttactagtgttctggatattaccttctgcttcccacttccttttttttttttttgagacagagtcttgctctgtcacccaggcttgagtgcaatggtgtgatcttggctccgtgcaacctccactcccggtttcaagcgatcctcctgcctcagcctcccaagtagctgggattacaggtgcacaccaccatgcccagctaatttgtatattttttagtagagacggggtttcaccacgttggccaggctggccttgaactcctgacctcaagtgatccaccctcctcggcctcccagtgatgggattacaggcgtgagccactgctcctggcccccacttccttttgatttctcagatcagtctttcccttctgagccatggccttctgtgcacccagctcagtggctcttcacccctaaaactaagtgaagtcatccttccccaaaaggacccctgggagatgttctggccctctgctgactactcccaggaatcagcacctcaaggactatttgagaatgttgtgctctctattggtcaccttgagactccgttcccctgctgccaactcttctcttctgccctgtgtattctgctgtgatccccttaacggcttttctgtgctactagcttagccctaggccttttatgaatacctgagtcttataacaatgaacttcttgagcaggcagtgtccaacttctttgctcttcagggacctgagtgtgcacctttcccttttgcaggtctatttgacatagtaatctagtgtgttggggaggggtagccaagcaggctgcagtgtctgcaatgcagagggcttggggaggtttgggtactctctgctgccactactgggatgatattcagaagagagaggacctcatactgtgactggacccaggaccctccctggaagagagctcagcccagctgtgtgtgtgtgtgtgtgtgagtgtgtgtgtgtgtgtttgtgtgctgtgctcatgtgcacctgggtgtaaaatgactgttatctggttgtgttactcagggtgggctggggactcaccagaagaatcccccccagcctgcccaagacaggtttttcccttgtaccatcttcagagaggtcaggggaagagggtccaggtgggttaaggggggtcgctatggataaccactaagaccagactgctgccaggaggagtgggggataatgaggtggccccagggtcctggcacctggctttggttttccgtcttctttcctcaggacgcccctgaggcctgggacctgtgcctggcttcgaggagcatctgtggctgggtgatccagctgctggtgtgatcatgggcttccctcctctcagcagggcaggcgctcctgccccagagactgggcaactggctgtttctatgacgtatttatttttacttgtgtttcatgtcacttttttaaaaaaaagcaaacagaacaattgtaagtcagtataactgcctatcagttttctttatttctctttttgtaaaataaaatttaaactcaagaaggca

SEQ ID NO: 173651 - DNA, 3926 bp, Homo sapiens
  Payload ID: 14101
  Gene Symbol: RAD54L2
  Gene Name: RAD54-like 2 (S. cerevisiae)
  ENST ID: ENST00000432863
  CDS Start-End: 1-3889
gttggaaagaaggaagcgcctggagcagcagaggaaagattatgcagcccctattcctactgttccgctggagttcctccctgaggtgattgaactgagctctggagaggaggacactctgcacattgtggacagcagtgaatctgtcagtgaagatgatgaggaagaagagaagggtggcacccatgtcaatgatgtcttaaaccagcgtgacgcccttgggcgggtccttgtcaacctaaaccaccctccagaggaggaaaatgtcttccttgccccacagttggcacgggctgtgaaacctcatcagattggcgggatccggttcctttacgataacctagtggagtctctggagaggtttaagaccagcagtggctttggctgtattctggcccacagcatgggtctggggaaaactttgcaagtgatctctttcatcgacgtcctcttccgccacacgccagccaaaacagtccttgccattgtgccggttaatactcttcagaattggctggcagagttcaacatgtggcttccacctcctgaagccctcccggctgacaacaagcctgaagaagtccagcctcggttctttaaagttcacatcttgaatgatgagcacaagacgatggcatctcgtgctaaagtgatggctgattgggtgtcagagggtggcgtgctgctgatggggtacgagatgtacagactcctcactctgaagaaatcatttgccacaggtagaccgaagaaaaccaagaagcgttctcacccagtcatcattgatctagatgaggaagatcggcagcaggagtttcggagagagtttgagaaggctttatgccgccctggccctgatgtagtaatctgtgatgagggacaccgcatcaaaaactgccaggccagcacctcacaggctctgaagaatatccgctctcgccgccgggtggtgctgactgggtaccctctgcaaaacaacctcattgagtactggtgcatggtggactttgtgcgcccagacttccttggcacccggcaggagttcagcaacatgtttgaacgccctatcctgaatgggcaatgtattgacagcacacctcaggacgtccgcctcatgcggtaccggagccatgtcctgcacagtcttctggagggctttgtgcagaggagaggccacactgtgctgaagattcatctccctgccaaggaagaaaatgtgatccttgtgcggctctccaagatccagcgagatttgtatacacagttcatggatcgcttccgggactgtggtagcagcggttggctggggctgaacccccttaaggcattctgtgtgtgttgcaagatctggaatcaccctgatgtgctgtatgaagcccttcagaaggagagcttggccaatgagcaggacctagacgtggaagaacttggctctgcagggaccagtgcccgctgtccaccacagggaacaaaaggcaagggagaggatagcaccttggcttcctcgatgggagaggcaaccaatagcaagttcctacagggcgttggcttcaaccctttccaggagcgaggcaacaacattgtcacatatgaatgggccaaggaccttctgactaattaccagactggagtcctagaaaactctcccaagatggtactgcttttccacctgattgaggaaagtgtgaagcttggggacaagatccttgtgtttagccagagtctttccaccttggctctcatcgaggaattccttggaaaacgagaagtaccctgtccacctggtaccgaggggcaaggagcacagaagtgggttcgaaacatcagctacttccggctagatggtagcacccctgcctttgagagggagcggcttattaatcagttcaatgatcccagcaacctcaccacctggctgttccttctctctacaagggccggatgcttgggtgtgaatctgattggtgccaaccgagtggtggtgtttgatgcttcctggaacccttgccatgatgcccaggcagtatgtcgggtataccgttatggccagaaaaagccctgttacatctatcgccttgtggctgattacactctagaaaagaagatctatgaccgtcagatttccaagcagggcatgtcagatcgggtggtggatgatctaaatccaatgctgaacttcacacggaaagaggtggaaaacctactgcactttgttgagaaggagccagctccccaagtttccttgaacgtaaaggggatcaaggagtcagtcctgcaactggcctgtctgaagtaccctcacctcatcaccaaggagcctttcgagcatgagtcattgctcttgaaccgaaaggatcacaagctaaccaaggctgagaaaaaagcagcaaagaaaagctatgaggaagacaaacgcacatcagtcccctatacccgcccatcgtatgcgcagtattaccctgccagcgatcagagcctgaccagcatccccgccttcagccagagaaactggcagccaactttgaagggtgatgaaaagcctgtggccagtgttcgtcctgtgcagtccacccccatccccatgatgccccggcatgtcccattgggaggaagtgtaagctctgcctccagcacaaatccatccatgaactttcccatcaactacttgcagcgtgcaggagtccttgtgcagaaggtggtcaccacgacagatattgttattcctggactcaacagctccacagatgtacaggcaagaattaatgctggtgagagcatccacatcatccgtgggacaaaagggacgtacatccgtaccagtgatggacggatctttgctgtccgggcaactggcaaaccaaaggttcctgaagatggtcggatggctgcctcaggttcccagggaccttcttgcgagtccacaagcaacggcagacacagtgcctcatcacccaaagcccccgaccctgaggggctggccaggcccgtctctcctgacagcccagagatcatcagtgagcttcagcagtatgcagatgtggctgctgcccgggaatcccgtcagagctccccaagcaccaatgccgccctgcctggccccccggcccaacttatggacagcagtgctgttcccgggacagctctcggaactgagcctcgactagggggtcattgcctcaatagttccctcttggtgactggccagccctgtggtgacaggcacccagtgctggacttaaggggccacaagcgaaagttggccacaccacctgctgcccaggagtcatcccgccggcggtccaggaagggtcatctgccagcccccgtgcagccgtatgaacacgggtatccagtctctggcgggtttgccatgccacccgtctccttaaaccataacctcaccacccccttcacctcccaggctggggagaactccctgtttatgggcagtaccccctcctactaccagctgtccaatttgctggcagatgcccgcctggtgtttccagtgactactgaccctctggtgccagcaggccccgtcagttcctcttccacggctacctcagtcactgccagcaacccctccttcatgctcaacccttctgtgccagggatactacccagctattcactcccattctcacagccactcctgtccgagccgaggatgtttgcgccttttccttcccctgtcttgcccagcaacctttcgcggggcatgtctatctatccaggctacatgtccccacatgcaggctacccagctggtggcctcctacggtcccaggtgcctccatttgactctcatgaggttgccgaggttgggttcagctccaatgatgatgaggataaagacgatgatgtgatagaggtcactgggaaatagctagggagcccctccccacctcacttggggcccccag

SEQ ID NO: 173652 - DNA, 2119 bp, Homo sapiens
  Payload ID: 14102
  Gene Symbol: RAD9A
  Gene Name: RAD9 checkpoint clamp component A
  Uniprot ID: Q99638
  ENST ID: ENST00000307980
  CDS Start-End: 94-1269
gggccggcaggggcggtgcgcgggaagggaccccggacccggaggtcgcggagagctgggcagtgttggccgctggcggagcgctggggcagcatgaagtgcctggtcacgggcggcaacgtgaaggtgctcggcaaggccgtccactccctgtcccgcatcggggacgagctctacctggaacccttggaggacgggctctccctccggacggtgaactcctcccgctctgcctatgcctgctttctctttgccccgctcttcttccagcaataccaggcagccacccctggtcaggacctgctgcgctgtaagatcctgatgaagtctttcctgtctgtcttccgctcactggcgatgctggagaagacggtggaaaaatgctgcatctccctgaatggccggagcagccgcctggtggtccagctgcattgcaagttcggggtgcggaagactcacaacctgtccttccaggactgtgagtccctgcaggccgtcttcgacccagcctcgtgcccccacatgctccgcgccccagcacgggttctgggggaggctgttctgcccttctctcctgcactggctgaagtgacgctgggcattggccgtggccgcagggtcatcctgcgcagctaccacgaggaggaggcagacagcactgccaaagccatggtgactgagatgtgccttggagaggaggatttccagcagctgcaggcccaggaaggggtggccatcactttctgcctcaaggaattccgggggctcctgagctttgcagagtcagcaaacttgaatcttagcattcattttgatgctccaggcaggcccgccatcttcaccatcaaggactctttgctggacggccactttgtcttggccacactctcagacaccgactcgcactcccaggacctgggctccccagagcgtcaccagccagtgcctcagctccaggctcacagcacaccccacccggacgactttgccaatgacgacattgactcttacatgatcgccatggaaaccactataggcaatgagggctcgcgggtgctgccctccatttccctttcacctggcccccagccccccaagagccccggtccccactccgaggaggaagatgaggctgagcccagtacagtgcctgggactcccccacccaagaagttccgctcactgttcttcggctccatcctggcccctgtacgctccccccagggccccagccctgtgctggcggaagacagtgagggtgaaggctgaaccaagaacctgaagcctgtacccagaggccttggactagacgaagccccagccagtggcagaactgggtctctcagccctggggatcagaaaggtgggcttgctggagctgagctgtttcactgcctctcgcaggccccagctggctgtcactgtaaagctgtcccacagcggtcgggcctgggccgttatctccccacaacccccagccaatcaggactttccagacttggccctgaactactgacgttcctacctcttatttctcattgagcctcaggctatactccagctggccaaggctggaaacctgtctccctcaggctcaccttcctaaggaaaatgtcatagtaggtgctgctggcccctggtgatccagcttctctgccaatcatgacctgttccttcctgaagtcctgggcatgcatctgggacccccgtggagctgacaagttttccttgctttcctgatactctttggcgctgacttggaattctaagagccttggacccgagtgtgtggctagggttgccctggctggggcccggtgccgagactcccaagcggctctgtgcagaagagctgccaggcagtgtcttagatgtgagacggaggccatggcgagaatccagctttgacctttattcaagagaccagatgggttgccccaggatccggctgccagccctgaggccaagcacggctggagacccacgacctggcctgccgttgccctgagctgcagcctcggccccaggatcctgctcacagtcaccgcaggtgcaggcaggaagcagccctgggggactggacgctgctattgattcattaaaaaaagaaaagaaaaat

SEQ ID NO: 173653 - DNA, 924 bp, Homo sapiens
  Payload ID: 14102
  Gene Symbol: RAD9A
  Gene Name: RAD9 checkpoint clamp component A
  ENST ID: ENST00000538013
  CDS Start-End: 88-237
gcaggggcggtgcgcgggaagggaccccggacccggaggtcgcggagagctgggcagtgttggccgctggcggagcgctggggcagcatgaagtgcctggtcacgggcggcaacgtgaaggctctccctccggacggtgaactcctcccgctctgcctatgcctgctttctctttgccccgctcttcttccagcaataccaggcagccacccctggtcaggacctgctgcgctgtaagatcctgatgaagtctttcctgtctgtcttccgctcactggcgatgctggagaagacggtggaaaaatgctgcatctccctgaatggccggagcagccgcctggtggtccagctgcattgcaagttcgacagcactgccaaagccatggtgactgagatgtgccttggagaggaggatttccagcagctgcaggcccaggaaggggtggccatcactttctgcctcaaggaattccgggggctcctgagctttgcagagtcagcaaacttgaatcttagcattcattttgatgctccaggcaggcccgccatcttcaccatcaaggactctttgctggacggccactttgtcttggccacactctcagacaccgactcgcactcccaggacctgggctccccagagcgtcaccagccagtgcctcagctccaggctcacagcacaccccacccggacgactttgccaatgacgacattgactcttacatgatcgccatggaaaccactataggcaatgagggctcgcgggtgctgccctccatttccctttcacctggcccccagccccccaagagccccggtccccactccgaggaggaagatgaggctgagcccagtacagtgcctgggactcccccacccaagaaggtagggactggaggtggaggcaggggtgggaggtaggg

SEQ ID NO: 173654 - DNA, 829 bp, Homo sapiens
  Payload ID: 14102
  Gene Symbol: RAD9A
  Gene Name: RAD9 checkpoint clamp component A
  ENST ID: ENST00000544620
  CDS Start-End: 88-829
gcaggggcggtgcgcgggaagggaccccggacccggaggtcgcggagagctgggcagtgttggccgctggcggagcgctggggcagcatgaagtgcctggtcacgggcggcaacgtgaaggtgctcggcaaggccgtccactccctgtcccgcatcggggacgagctctacctggaacccttggaggacgggctctccctccggacggtgaactcctcccgctctgcctatgcctgctttctctttgccccgctcttcttccagcaataccaggcagccacccctggtcaggacctgctgcgctgtaagatcctgatgaagacggtggaaaaatgctgcatctccctgaatggccggagcagccgcctggtggtccagctgcattgcaagttcggggtgcggaagactcacaacctgtccttccaggactgtgagtccctgcaggccgtcttcgacccagcctcgtgcccccacatgctccgcgccccagcacgggttctgggggaggctgttctgcccttctctcctgcactggctgaagtgacgctgggcattggccgtggccgcagggtcatcctgcgcagctaccacgaggaggaggcagacagcactgccaaagccatggtgactgagatgtgccttggagaggaggatttccagcagctgcaggcccaggaaggggtggccatcactttctgcctcaaggaattccgggggctcctgagctttgcagagtcagcaaacttgaatcttagcattcattttgatgctccaggcaggcccgccatcttcaccatcaaggactctttgctggacggccactttgtct

SEQ ID NO: 173655 - DNA, 578 bp, Homo sapiens
  Payload ID: 14102
  Gene Symbol: RAD9A
  Gene Name: RAD9 checkpoint clamp component A
  ENST ID: ENST00000542139
  CDS Start-End: 70-426
aagggaccccggacccggaggtcgcggagagctgggcagtgttggccgctggcggagcgctggggcagcatgaagtgcctggtcacgggcggcaacgtgaaggtgctcggcaaggccgtccactccctgtcccgcatcggggacgagctctacctggaacccttggaggacgggctctccctccggacggtgaactcctcccgctctgcctatgcctgctttctctttgccccgctcttcttccagcaataccaggcagccacccctggtcaggacctgctgcgctgtaagatcctgatgaagtctttcctgtctgtcttccgctcactggcgatgctggagaagacggtggaaaaatgctgcatctccctgaatggccggagcagccgcctggtggtccagctgcattgcaagttcggactgtgagtccctgcaggccgtcttcgacccagcctcgtgcccccacatgctccgcgccccagcacgggttctgggggaggctgttctgcccttctctcctgcactggctgaagtgacgctgggcattggccgtggccgcagggtcatcctgcgcagct

SEQ ID NO: 173656 - DNA, 912 bp, Homo sapiens
  Payload ID: 14102
  Gene Symbol: RAD9A
  Gene Name: RAD9 checkpoint clamp component A
  ENST ID: ENST00000621995
  CDS Start-End: 883-912
gacaacgccatccccagcacacatccacctggggcagccagaaagcactggtttgcaggaactgagggctgcagctctgaaacagggacccaggccagggtcctcaaggtcatagaaccccataaccccattaggtgtcaggggcagaaacaggactgtgtgaagattcacagcctccacctcccttgccttcacggagcttcggcatctacccttattccaggcggctgctcaggggcaccgttctacccctttctgcctggagaaactgccgtttttccttaaaggatcctcgaagccggaaggagcagccacctcccactcccggctgctgcaagcaagctgctttgacttctttctagagttggggattgctgctggagtccgagtctcaggcccagagtgggtgcgatggtcttgcttgcaccctgtatcccccggcagacgcccgggaactctactaagtgggtgaccccagagagctcgcccccacactccgactccgagtccagcactcggtccactgcacagggacctcgcgccccacagctgcgtcctctctgaccttcgcaatccggtgcgcggcccgcggaacgccccgatctccaggggcacggaaggccgaggcgtgccgggggagccaggagcagctggctggcgggcgccgcgggcctccccggtcacgtgacaccccggacaacgtgcgccgtcacgtgacggcagagcctgtgagcgtttttctcacgtgacggaggcgcctgcacgtggaccaatggggaggcgggggcggggccggcaggggcggtgcgcgggaagggaccccggacccggaggtcgcggagagctgggcagtgttggccgctggcggagcgctggggcagcatgaagtgcctggtcacgggcggcaacgtg

SEQ ID NO: 173657 - DNA, 2843 bp, Homo sapiens
  Payload ID: 14103
  Gene Symbol: RAD9B
  Gene Name: RAD9 checkpoint clamp component B
  ENST ID: ENST00000358071
  CDS Start-End: 217-480
agggcggatggcagccatgctgaagtgcgtgatgagcggcagtcagtatttgggaaagcagttcaagctctatcacgaattagtgacgagttctggctagacccatctaaaaaaggtcttgctctaagatgtgtgaattcttctcggtcagcatatggatgtgtcctgttctctcctgtgttttttcagcattatcaatggtcagctttagtgaaaatgagtgaaaatgaacttgacacaacactgcatttaaaatgcaaattgggaatgaagtcaattttgcccatctttagatgtctgaattcccttgaaagaaatatagagaagtgcagaatattcaccagatctgataaatgcaaagtagttattcaattcttctacagacatgcaacgtggatggaactagaggtcactatgttaagtgaaataagccaggcatggaaagtcaagtattgcatgttctcacaatgtggacgctaaaaagttgatctcatggaggtagagagtagaatggtagataccagaggctggtaatggtgtgtgggtattaaaagaactcataatatatgttttcaagaaagtcagcctttgcaagttatttttgacaagaatgtttgtactaatacgctaatgattcaaccaagattgcttgctgatgccattgttctttttacatcaagtcaagaggaagttactcttgctgttactccactgaatttttgcctcaagagttctaatgaggaatcaatggatttgagcaatgctgtacacagtgagatgtttgttggctcagatgagtttgacttctttcaaattggaatggacactgagataacattttgtttcaaagaattgaagggaatactgacattttcagaagctacacatgctcctatatccatttattttgatttccctgggaaacctctggctttgagtattgatgatatgttagtggaagctaactttattttggccacattagctgatgaacaaagtagagcatcttcaccacagtcactgtgtctttcacagaaacgaaaaaggtcagatctgattgaaaaaaaggctggcaaaaatgtaactggccaggccctggaatgtatttcaaaaaaagcagcaccaagaaggctttatcctaaggagactctcacaaacatatctgcattggaaaactgtggcagccctgcaatgaaaagagtggatggagatgtcagtgaagtatcagaaagcagtgtcagcaacacagaggaagtgccagggtctctgtgtctcagaaagttttcttgcatgttctttggagcagtttcttctgaccagcaagaacacttcaaccaccctttcgacagtctggcaagagcaagtgacagtgaagaggacatgaataatggcagtttctctatattctaatgcttaatgatggctgagctgggccccagcccagtgactggctcatttgcccctcaagcacgagtttgcatgtttagtgtctaaaagaggttgtccaggacttccttttaatggaggatgggcttttaaaccacatcatcttgtacaacaaccatatctagaaatagctgtttgtcaagtgtatgtaacttgctttaaatccattatgctacttgtgaggcagaagagttttctgtgaaggaaaaaagcccattagagttcttcaattcaatgcacgttcaccctagagcttttaacatctttgctagttttataaaggtatttaaactttattcaacagccatttagagtgccatcaagatggcttgaaatggaattttgtgatttgtagtcaggtatcttttgtatttgattgcaaacatttggattttagttttctcatgtaataccatggccttttttgtgcattgttttttatattttaagactttaagtagaataaaccctggaaaaaagatcaagagtaaaaatatatagtcactttcacttggcttttttagacggagtctcactttgtcactcaggctcaagtgcagtggtgcaatctctgctcactgcaacatctgcctcccaggtccaagcgattctcctgcctcagcctcccgtgcagctgggattgcaggtgcgtgccaccatgcctggctaatttctggtattttgtagagacagggtttcgccatgttggccagggtggtcttgaactcctggcctcaagtgatctgcccacctcggcctcccaaagtgctgggattacagacttgagccactgcgcccaacctggagtgtttttacatattgtaaaattttatttcctaacctcaaattgttctgattttcagatgtgattttttattttgcagtgtgctgcaggaaagaatttaatggaagtgatgccaaatatttctgtattatctgacatagaacagtatcctccactgccaagacagcctgagtttggagtggaataaggtggaagacaaatgtctctgttctttggccctttaagagttagctttttacctgcacaaatggactaaaaaatctggcacaaaacattgttatgtaatgtcttatgatgtgtgcctctccctcccccaaacctgtttacagtcaattataacctgacaaacgagacttttgtaacatattattgttacatctttctgaaaccttcaaaccgtaaggaagtgttaactggcaagcagttgtactttagactttgtgagaaattcataaaggtggctgagtggatttgcatgctttagaactgtgaatagagttctaactgaaaccagaattaatttggctcttgtagcttagtaatgagtcatagctacccacaataacctaataaaaactcaagttcatcccaa

SEQ ID NO: 173658 - DNA, 1846 bp, Homo sapiens
  Payload ID: 14103
  Gene Symbol: RAD9B
  Gene Name: RAD9 checkpoint clamp component B
  ENST ID: ENST00000392672
  CDS Start-End: 100-1389
gcagagacgagatcgcgaagctttgaaaagcgcgggcaacatccgggcacctgggccgtcgagctgaggcgcgccttccgagcctgctttttagggcggatggcagccatgctgaagtgcgtgatgagcggcagtcaggtgaaagtatttgggaaagcagttcaagctctatcacgaattagtgacgagttctggctagacccatctaaaaaaggtcttgctctaagatgtgtgaattcttctcggtcagcatatggatgtgtcctgttctctcctgtgttttttcagcattatcaatggtcagctttagtgaaaatgagtgaaaatgaacttgacacaacactgcatttaaaatgcaaattgggaatgaagtcaattttgcccatctttagatgtctgaattcccttgaaagaaatatagagaagtgcagaatattcaccagatctgataaatgcaaagtagttattcaattcttctacagacatggtattaaaagaactcataatatatgttttcaagaaagtcagcctttgcaagttatttttgacaagaatgtttgtactaatacgctaatgattcaaccaagattgcttgctgatgccattgttctttttacatcaagtcaagaggaagttactcttgctgttactccactgaatttttgcctcaagagttctaatgaggaatcaatggatttgagcaatgctgtacacagtgagatgtttgttggctcagatgagtttgacttctttcaaattggaatggacactgagataacattttgtttcaaagaattgaagggaatactgacattttcagaagctacacatgctcctatatccatttattttgatttccctgggaaacctctggctttgagtattgatgatatgttagtggaagctaactttattttggccacattagctgatgaacaaagtagagcatcttcaccacagtcactgtgtctttcacagaaacgaaaaaggtcagatctgattgaaaaaaaggctggcaaaaatgtaactggccaggccctggaatgtatttcaaaaaaagcagcaccaagaaggctttatcctaaggagactctcacaaacatatctgcattggaaaactgtggcagccctgcaatgaaaagagtggatggagatgtcagtgaagtatcagaaagcagtgtcagcaacacagaggaagtgccagggtctctgtgtctcagaaagttttcttgcatgttctttggagcagtttcttctgaccagcaagaacacttcaaccaccctttcgacagtctggcaagagcaagtgacagtgaagaggacatgaataatgtgtgctgcaggaaagaatttaatggaagtgatgccaaatatttctgtattatctgacatagaacagtatcctccactgccaagacagcctgagtttggagtggaataaggtggaagacaaatgtctctgttctttggccctttaagagttagctttttacctgcacaaatggactaaaaaatctggcacaaaacattgttatgtaatgtcttatgatgtgtgcctctccctcccccaaacctgtttacagtcaattataacctgacaaacgagacttttgtaacatattattgttacatctttctgaaaccttcaaaccgtaaggaagtgttaactggcaagcagttgtactttagactttgtgagaaattcataaaggtggctgagtggatttgcatgctttagaactgtgaatagagttctaactgaaaccagaattaatttggctcttgtagcttagtaatgagtcatagctacccacaataacctaataaaaactcaagttcatcccaa

SEQ ID NO: 173659 - DNA, 2732 bp, Homo sapiens
  Payload ID: 14103
  Gene Symbol: RAD9B
  Gene Name: RAD9 checkpoint clamp component B
  ENST ID: ENST00000409300
  CDS Start-End: 48-1301
gggccgtcgagctgaggcgcgccttccgagcctgctttttagggcggatggcagccatgctgaagtgcgtgatgagcggcagtcaggtgaaagtatttgggaaagcagttcaagctctatcacgaattagtgacgagttctggctagacccatctaaaaaaggtcttgctctaagatgtgtgaattcttctcggtcagcatatggatgtgtcctgttctctcctgtgttttttcagcattatcaatggtcagctttagtgaaaatgagtgaaaatgaacttgacacaacactgcatttaaaatgcaaattgggaatgaagtcaattttgcccatctttagatgtctgaattcccttgaaagaaatatagagaagtgcagaatattcaccagatctgataaatgcaaagtagttattcaattcttctacagacatggtattaaaagaactcataatatatgttttcaagaaagtcagcctttgcaagttatttttgacaagaatgtttgtactaatacgctaatgattcaaccaagattgcttgctgatgccattgttctttttacatcaagtcaagaggaagttactcttgctgttactccactgaatttttgcctcaagagttctaatgaggaatcaatggatttgagcaatgctgtacacagtgagatgtttgttggctcagatgagtttgacttctttcaaattggaatggacactgagataacattttgtttcaaagaattgaagggaatactgacattttcagaagctacacatgctcctatatccatttattttgatttccctgggaaacctctggctttgagtattgatgatatgttagtggaagctaactttattttggccacattagctgatgaacaaagtagagcatcttcaccacagtcactgtgtctttcacagaaacgaaaaaggtcagatctgattgaaaaaaaggctggcaaaaatgtaactggccaggccctggaatgtatttcaaaaaaagcagcaccaagaaggctttatcctaaggagactctcacaaacatatctgcattggaaaactgtggcagccctgcaatgaaaagagtggatggagatgtcagtgaagtatcagaaagcagtgtcagcaacacagaggaagtgccagggtctctgtgtctcagaaagttttcttgcatgttctttggagcagtttcttctgaccagcaagaacacttcaaccaccctttcgacagtctggcaagagcaagtgacagtgaagaggacatgaataatggcagtttctctatattctaatgcttaatgatggctgagctgggccccagcccagtgactggctcatttgcccctcaagcacgagtttgcatgtttagtgtctaaaagaggttgtccaggacttccttttaatggaggatgggcttttaaaccacatcatcttgtacaacaaccatatctagaaatagctgtttgtcaagtgtatgtaacttgctttaaatccattatgctacttgtgaggcagaagagttttctgtgaaggaaaaaagcccattagagttcttcaattcaatgcacgttcaccctagagcttttaacatctttgctagttttataaaggtatttaaactttattcaacagccatttagagtgccatcaagatggcttgaaatggaattttgtgatttgtagtcaggtatcttttgtatttgattgcaaacatttggattttagttttctcatgtaataccatggccttttttgtgcattgttttttatattttaagactttaagtagaataaaccctggaaaaaagatcaagagtaaaaatatatagtcactttcacttggcttttttagacggagtctcactttgtcactcaggctcaagtgcagtggtgcaatctctgctcactgcaacatctgcctcccaggtccaagcgattctcctgcctcagcctcccgtgcagctgggattgcaggtgcgtgccaccatgcctggctaatttctggtattttgtagagacagggtttcgccatgttggccagggtggtcttgaactcctggcctcaagtgatctgcccacctcggcctcccaaagtgctgggattacagacttgagccactgcgcccaacctggagtgtttttacatattgtaaaattttatttcctaacctcaaattgttctgattttcagatgtgattttttattttgcagtgtgctgcaggaaagaatttaatggaagtgatgccaaatatttctgtattatctgacatagaacagtatcctccactgccaagacagcctgagtttggagtggaataaggtggaagacaaatgtctctgttctttggccctttaagagttagctttttacctgcacaaatggactaaaaaatctggcacaaaacattgttatgtaatgtcttatgatgtgtgcctctccctcccccaaacctgtttacagtcaattataacctgacaaacgagacttttgtaacatattattgttacatctttctgaaaccttcaaaccgtaaggaagtgttaactggcaagcagttgtactttagactttgtgagaaattcataaaggtggctgagtggatttgcatgctttagaactgtgaatagagttctaactgaaaccagaattaatttggctcttgtagcttagtaatgagtcatagctacccacaataacctaataaaaactcaagttcatccc

SEQ ID NO: 173660 - DNA, 2727 bp, Homo sapiens
  Payload ID: 14103
  Gene Symbol: RAD9B
  Gene Name: RAD9 checkpoint clamp component B
  Uniprot ID: Q6WBX8
  ENST ID: ENST00000409425
  CDS Start-End: 257-1294
gggccgtcgagctgaggcgcgccttccgagcctgctttttagggcggatggcagccatgctgaagtgcgtgatgagcggcagtcagtatttgggaaagcagttcaagctctatcacgaattagtgacgagttctggctagacccatctaaaaaaggtcttgctctaagatgtgtgaattcttctcggtcagcatatggatgtgtcctgttctctcctgtgttttttcagcattatcaatggtcagctttagtgaaaatgagtgaaaatgaacttgacacaacactgcatttaaaatgcaaattgggaatgaagtcaattttgcccatctttagatgtctgaattcccttgaaagaaatatagagaagtgcagaatattcaccagatctgataaatgcaaagtagttattcaattcttctacagacatggtattaaaagaactcataatatatgttttcaagaaagtcagcctttgcaagttatttttgacaagaatgtttgtactaatacgctaatgattcaaccaagattgcttgctgatgccattgttctttttacatcaagtcaagaggaagttactcttgctgttactccactgaatttttgcctcaagagttctaatgaggaatcaatggatttgagcaatgctgtacacagtgagatgtttgttggctcagatgagtttgacttctttcaaattggaatggacactgagataacattttgtttcaaagaattgaagggaatactgacattttcagaagctacacatgctcctatatccatttattttgatttccctgggaaacctctggctttgagtattgatgatatgttagtggaagctaactttattttggccacattagctgatgaacaaagtagagcatcttcaccacagtcactgtgtctttcacagaaacgaaaaaggtcagatctgattgaaaaaaaggctggcaaaaatgtaactggccaggccctggaatgtatttcaaaaaaagcagcaccaagaaggctttatcctaaggagactctcacaaacatatctgcattggaaaactgtggcagccctgcaatgaaaagagtggatggagatgtcagtgaagtatcagaaagcagtgtcagcaacacagaggaagtgccagggtctctgtgtctcagaaagttttcttgcatgttctttggagcagtttcttctgaccagcaagaacacttcaaccaccctttcgacagtctggcaagagcaagtgacagtgaagaggacatgaataatggcagtttctctatattctaatgcttaatgatggctgagctgggccccagcccagtgactggctcatttgcccctcaagcacgagtttgcatgtttagtgtctaaaagaggttgtccaggacttccttttaatggaggatgggcttttaaaccacatcatcttgtacaacaaccatatctagaaatagctgtttgtcaagtgtatgtaacttgctttaaatccattatgctacttgtgaggcagaagagttttctgtgaaggaaaaaagcccattagagttcttcaattcaatgcacgttcaccctagagcttttaacatctttgctagttttataaaggtatttaaactttattcaacagccatttagagtgccatcaagatggcttgaaatggaattttgtgatttgtagtcaggtatcttttgtatttgattgcaaacatttggattttagttttctcatgtaataccatggccttttttgtgcattgttttttatattttaagactttaagtagaataaaccctggaaaaaagatcaagagtaaaaatatatagtcactttcacttggcttttttagacggagtctcactttgtcactcaggctcaagtgcagtggtgcaatctctgctcactgcaacatctgcctcccaggtccaagcgattctcctgcctcagcctcccgtgcagctgggattgcaggtgcgtgccaccatgcctggctaatttctggtattttgtagagacagggtttcgccatgttggccagggtggtcttgaactcctggcctcaagtgatctgcccacctcggcctcccaaagtgctgggattacagacttgagccactgcgcccaacctggagtgtttttacatattgtaaaattttatttcctaacctcaaattgttctgattttcagatgtgattttttattttgcagtgtgctgcaggaaagaatttaatggaagtgatgccaaatatttctgtattatctgacatagaacagtatcctccactgccaagacagcctgagtttggagtggaataaggtggaagacaaatgtctctgttctttggccctttaagagttagctttttacctgcacaaatggactaaaaaatctggcacaaaacattgttatgtaatgtcttatgatgtgtgcctctccctcccccaaacctgtttacagtcaattataacctgacaaacgagacttttgtaacatattattgttacatctttctgaaaccttcaaaccgtaaggaagtgttaactggcaagcagttgtactttagactttgtgagaaattcataaaggtggctgagtggatttgcatgctttagaactgtgaatagagttctaactgaaaccagaattaatttggctcttgtagcttagtaatgagtcatagctacccacaataacctaataaaaactcaagttcatcccaa

SEQ ID NO: 173661 - DNA, 1373 bp, Homo sapiens
  Payload ID: 14103
  Gene Symbol: RAD9B
  Gene Name: RAD9 checkpoint clamp component B
  ENST ID: ENST00000409778
  CDS Start-End: 25-1050
ttccgagcctgctttttagggcggatggcagccatgctgaagtgcgtgatgagcggcagtcaggtgaaagtatttgggaaagcagttcaagctctatcacgaattagtgacgagttctggctagacccatctaaaaaaggtcttgctctaagatgtgtgaattcttctcggtcagcatatggatgtgtcctgttctctcctgtgttttttcagcattatcaatggtcagctttagtgaaaatgagtgaaaatgaacttgacacaacactgcatttaaaatgcaaattgggaatgaagtcaattttgcccatctttagatgtctgaattcccttgaaagaaatatagagaagtgcagaatattcaccagatctgataaatgcaaagtagttattcaattcttctacagacatgatttgagcaatgctgtacacagtgagatgtttgttggctcagatgagtttgacttctttcaaattggaatggacactgagataacattttgtttcaaagaattgaagggaatactgacattttcagaagctacacatgctcctatatccatttattttgatttccctgggaaacctctggctttgagtattgatgatatgttagtggaagctaactttattttggccacattagctgatgaacaaagtagagcatcttcaccacagtcactgtgtctttcacagaaacgaaaaaggtcagatctgattgaaaaaaaggctggcaaaaatgtaactggccaggccctggaatgtatttcaaaaaaagcagcaccaagaaggctttatcctaaggagactctcacaaacatatctgcattggaaaactgtggcagccctgcaatgaaaagagtggatggagatgtcagtgaagtatcagaaagcagtgtcagcaacacagaggaagtgccagggtctctgtgtctcagaaagtgtgctgcaggaaagaatttaatggaagtgatgccaaatatttctgtattatctgacatagaacagtatcctccactgccaagacagcctgagtttggagtggaataaggtggaagacaaatgtctctgttctttggccctttaagagttagctttttacctgcacaaatggactaaaaaatctggcacaaaacattgttatgtaatgtcttatgatgtgtgcctctccctcccccaaacctgtttacagtcaattataacctgacaaacgagacttttgtaacatattattgttacatctttctgaaaccttcaaaccgtaaggaagtgttaactggcaagcagttgtactttagactttgtgagaaattcataaaggtggctgagtggatttgcatgctttagaactgtgaatagagttctaactgaaa

SEQ ID NO: 173662 - DNA, 2794 bp, Homo sapiens
  Payload ID: 14103
  Gene Symbol: RAD9B
  Gene Name: RAD9 checkpoint clamp component B
  Uniprot ID: Q6WBX8
  ENST ID: ENST00000409246
  CDS Start-End: 326-1363
aaagccgtttgggaacttgtggaggcggggtggtagagtgcagagacgagatcgcgaagctttgaaaagcgcgggcaacatccgggcacctgggccgtcgagctgaggcgcgccttccgagcctgctttttagggcggatggcagccatgctgaatatttgggaaagcagttcaagctctatcacgaattagtgacgagttctggctagacccatctaaaaaaggtcttgctctaagatgtgtgaattcttctcggtcagcatatggatgtgtcctgttctctcctgtgttttttcagcattatcaatggtcagctttagtgaaaatgagtgaaaatgaacttgacacaacactgcatttaaaatgcaaattgggaatgaagtcaattttgcccatctttagatgtctgaattcccttgaaagaaatatagagaagtgcagaatattcaccagatctgataaatgcaaagtagttattcaattcttctacagacatggtattaaaagaactcataatatatgttttcaagaaagtcagcctttgcaagttatttttgacaagaatgtttgtactaatacgctaatgattcaaccaagattgcttgctgatgccattgttctttttacatcaagtcaagaggaagttactcttgctgttactccactgaatttttgcctcaagagttctaatgaggaatcaatggatttgagcaatgctgtacacagtgagatgtttgttggctcagatgagtttgacttctttcaaattggaatggacactgagataacattttgtttcaaagaattgaagggaatactgacattttcagaagctacacatgctcctatatccatttattttgatttccctgggaaacctctggctttgagtattgatgatatgttagtggaagctaactttattttggccacattagctgatgaacaaagtagagcatcttcaccacagtcactgtgtctttcacagaaacgaaaaaggtcagatctgattgaaaaaaaggctggcaaaaatgtaactggccaggccctggaatgtatttcaaaaaaagcagcaccaagaaggctttatcctaaggagactctcacaaacatatctgcattggaaaactgtggcagccctgcaatgaaaagagtggatggagatgtcagtgaagtatcagaaagcagtgtcagcaacacagaggaagtgccagggtctctgtgtctcagaaagttttcttgcatgttctttggagcagtttcttctgaccagcaagaacacttcaaccaccctttcgacagtctggcaagagcaagtgacagtgaagaggacatgaataatggcagtttctctatattctaatgcttaatgatggctgagctgggccccagcccagtgactggctcatttgcccctcaagcacgagtttgcatgtttagtgtctaaaagaggttgtccaggacttccttttaatggaggatgggcttttaaaccacatcatcttgtacaacaaccatatctagaaatagctgtttgtcaagtgtatgtaacttgctttaaatccattatgctacttgtgaggcagaagagttttctgtgaaggaaaaaagcccattagagttcttcaattcaatgcacgttcaccctagagcttttaacatctttgctagttttataaaggtatttaaactttattcaacagccatttagagtgccatcaagatggcttgaaatggaattttgtgatttgtagtcaggtatcttttgtatttgattgcaaacatttggattttagttttctcatgtaataccatggccttttttgtgcattgttttttatattttaagactttaagtagaataaaccctggaaaaaagatcaagagtaaaaatatatagtcactttcacttggcttttttagacggagtctcactttgtcactcaggctcaagtgcagtggtgcaatctctgctcactgcaacatctgcctcccaggtccaagcgattctcctgcctcagcctcccgtgcagctgggattgcaggtgcgtgccaccatgcctggctaatttctggtattttgtagagacagggtttcgccatgttggccagggtggtcttgaactcctggcctcaagtgatctgcccacctcggcctcccaaagtgctgggattacagacttgagccactgcgcccaacctggagtgtttttacatattgtaaaattttatttcctaacctcaaattgttctgattttcagatgtgattttttattttgcagtgtgctgcaggaaagaatttaatggaagtgatgccaaatatttctgtattatctgacatagaacagtatcctccactgccaagacagcctgagtttggagtggaataaggtggaagacaaatgtctctgttctttggccctttaagagttagctttttacctgcacaaatggactaaaaaatctggcacaaaacattgttatgtaatgtcttatgatgtgtgcctctccctcccccaaacctgtttacagtcaattataacctgacaaacgagacttttgtaacatattattgttacatctttctgaaaccttcaaaccgtaaggaagtgttaactggcaagcagttgtactttagactttgtgagaaattcataaaggtggctgagtggatttgcatgctttagaactgtgaatagagttctaactgaaaccagaattaatttggctcttgtagcttagtaatgagtcatagctacccacaataacctaataaaaactcaagttcatccc

SEQ ID NO: 173663 - DNA, 1870 bp, Homo sapiens
  Payload ID: 14104
  Gene Symbol: RHNO1
  Gene Name: RAD9-HUS1-RAD1 interacting nuclear orphan 1
  Uniprot ID: Q9BSD3
  ENST ID: ENST00000489288
  CDS Start-End: 153-869
gtctcggcattccgggctcgaaggctgtgcggtctgccaggagctgcggccccgtccggcccgggctggcatgggttggaattggagcctatcccccaacccgaaggctaacagcatcatgtggttactaactgttcctcattcaccggttgatgcctcccagaaaaaaacgccgccagccttcccagaaagccccgctgctgttccaccaacaaccactggagggccccaaacacagctgtgcatctacacagcttcccatcactcacactcgacaggtgcccagcaagcccattgaccacagcaccatcacttcctgggtatcacctgattttgatacagcagcaggaagcttgttcccagcctaccagaaacaccaaaaccgggcgagacactcaagtcgaaaacctaccacctccaagtttccacatctaacttttgagagtccgcaatcttccagttcagagacattggggatccccttaatccgagagtgccccagtgaatcagaaaaggatgtttccagaagacccttagttccagtgctcagtccccaaagctgtgggaacatgtcagtgcaggcacttcagagcttaccttatgtgttcattccacctgatatccagaccccagagtcatcgtctgtgaaggaagaactcattccccaagatcagaaggaaaacagccttctaagctgcactcttcacactggcactcctaatagcccagagcctggacctgttctggttaaagacacccccgaggacaagtatggaataaaggtcacatggaggagacgacagcacctgcttgcttacctcagggagagagggaagctgagcagaagccaattccttgtgaaaagctgactgccatcagtaatctcaatagaaaagagatatgttttctggagtcataaaggaattcaattcctagggtttttgtttttgtttttgagatgtaatattgctctgttgcccaggctggagtgcagtggtatgatctcaccttactgcaaccaccacttcctgggttcaagcgattctcctgcctcagcctccccagtagctgggattacaggcaccagccaccatgcctggctaatttttttgtatttttagtagagatgtggtttctccatgttggccaggctggtctcaaaatcctgacctcaagtcatctgctggccttgacctcacaaagtgctggcccagccgagatttgttttctaagatactttgtgtcatgaacagttcagtttagtgtcatgaactattcacttcatatttttcttgtattaactgtttaaatttttaaaatatcttgtagtaactctttaaaatgtatgtaagtaaatggctgcagaaagtttttttagagaatcctgcttccatcagtaatacagcaatattaccccatccactaatggtctttgtttccttaaccactactcattaatccttaatcacctcattcaaactaattcattctgcatttttgagtaccaactcttgtcaggctcagtggcagcttctacgacctgatggatggaaaaaaatcaaactctgtgactctatggttgactgccacctctgcaaccttgactcatctgctgaaaaggcaagaagaagaaagggcagcaagccctgttttagggactacataagatgaggggagataagggggacatagatgagttctttaggattgcgtgtgttttgagtttttgtttctaactgaagaaatctgtcaatattaaatagggtgggaaaatggtttcttagaataactgttcaactgtgtgtaaataaggaaagttttcaatgagtattacttattgtaattaatgcagaaggacttccccagtcaa

SEQ ID NO: 173664 - DNA, 1655 bp, Homo sapiens
  Payload ID: 14104
  Gene Symbol: RHNO1
  Gene Name: RAD9-HUS1-RAD1 interacting nuclear orphan 1
  Uniprot ID: Q9BSD3
  ENST ID: ENST00000461997
  CDS Start-End: 169-843
aatcggcgccggccttgtctcggcattccgggctcgaaggctgtgcggtctgccaggagctgcggccccgtccggcccgggctggcatgggttggaattggagcctatcccccaacccgaaggctaacagcatcatgtggttactaactgttcctcattcaccggttgatgcctcccagaaaaaaacgccgccagccttcccagaaagccccgctgctgttccaccaacaaccactggagggccccaaacacagctgtgcatctacacagcttcccatcactcacactcgacaggtatcacctgattttgatacagcagcaggaagcttgttcccagcctaccagaaacaccaaaaccgggcgagacactcaagtcgaaaacctaccacctccaagtttccacatctaacttttgagagtccgcaatcttccagttcagagacattggggatccccttaatccgagagtgccccagtgaatcagaaaaggatgtttccagaagacccttagttccagtgctcagtccccaaagctgtgggaacatgtcagtgcaggcacttcagagcttaccttatgtgttcattccacctgatatccagaccccagagtcatcgtctgtgaaggaagaactcattccccaagatcagaaggaaaacagccttctaagctgcactcttcacactggcactcctaatagcccagagcctggacctgttctggttaaagacacccccgaggacaagtatggaataaaggtcacatggaggagacgacagcacctgcttgcttacctcagggagagagggaagctgagcagaagccaattccttgtgaaaagctgactgccatcagtaatctcaatagaaaagagatatgttttctggagtcataaaggaattcaattcctagggtttttgtttttgtttttgagatgtaatattgctctgttgcccaggctggagtgcagtggtatgatctcaccttactgcaaccaccacttcctgggttcaagcgattctcctgcctcagcctccccagtagctgggattacaggcaccagccaccatgcctggctaatttttttgtatttttagtagagatgtggtttctccatgttggccaggctggtctcaaaatcctgacctcaagtcatctgctggccttgacctcacaaagtgctggcccagccgagatttgttttctaagatactttgtgtcatgaacagttcagtttagtgtcatgaactattcacttcatatttttcttgtattaactgtttaaatttttaaaatatcttgtagtaactctttaaaatgtatgtaagtaaatggctgcagaaagtttttttagagaatcctgcttccatcagtaatacagcaatattaccccatccactaatggtctttgtttccttaaccactactcattaatccttaatcacctcattcaaactaattcattctgcatttttgagtaccaactcttgtcaggctcagtggcagcttctacgacctgatggatggaaaaaaatcaaactctgtgactctatggttgactgccacctctgcaaccttgactcatctgctgaaaaggcaagaagaagaaagggcagcaagccctgttttagggactacataagatgaggggagataa

SEQ ID NO: 173665 - DNA, 583 bp, Homo sapiens
  Payload ID: 14104
  Gene Symbol: RHNO1
  Gene Name: RAD9-HUS1-RAD1 interacting nuclear orphan 1
  ENST ID: ENST00000538636
  CDS Start-End: 189-583
aatcggcgccggccttgtctcggcattccgggctcgaaggctgtgcggtctgccaggagctgcggccccgtccggcccgggctgcttttgtttcttctctacaggcatgggttggaattggagcctatcccccaacccgaaggctaacagcatcatgtggttactaactgttcctcattcaccggttgatgcctcccagaaaaaaacgccgccagccttcccagaaagccccgctgctgttccaccaacaaccactggagggccccaaacacagctgtgcatctacacagcttcccatcactcacactcgacaggtgcccagcaagcccattgaccacagcaccatcacttcctgggtatcacctgattttgatacagcagcaggaagcttgttcccagcctaccagaaacaccaaaaccgggcgagacactcaagtcgaaaacctaccacctccaagtttccacatctaacttttgagagtccgcaatcttccagttcagagacattggggatccccttaatccgagagtgccccagtgaatcagaaaaggatgtttccagaagacccttagttccagtgct

SEQ ID NO: 173666 - DNA, 543 bp, Homo sapiens
  Payload ID: 14104
  Gene Symbol: RHNO1
  Gene Name: RAD9-HUS1-RAD1 interacting nuclear orphan 1
  ENST ID: ENST00000535978
  CDS Start-End: 145-324
attccgggctcgaaggctgtgcggtctgccaggagctgcggccccgtccggcccgggctggcatgggttggaattggagcctatcccccaacccgaaggctaacagcatcatgtggttactaactgttcctcattcaccggttgatgcctcccagaaaaaaacgccgccagccttcccagaaagccccgctgctgttccaccaacaaccactggagggccccaaacacagctgtgcatctacacagcttcccatcactcacactcgacaggtgcccagcaagcccattgaccacagcaccatcacttcctgggcattctgctaggtgctgggaatcaagaacaagaccactggtccctaccctcatgaagtttaaagataaataagttatatctagaccaggtgttgtggcttacgcctgtaatcccagcactttgggaggctgaggtatcacctgattttgatacagcagcaggaagcttgttcccagcctaccagaaacaccaaaaccgggcgagacactcaagtcgaaaacctaccacct

SEQ ID NO: 173667 - DNA, 517 bp, Homo sapiens
  Payload ID: 14104
  Gene Symbol: RHNO1
  Gene Name: RAD9-HUS1-RAD1 interacting nuclear orphan 1
  ENST ID: ENST00000366285
  CDS Start-End: 326-517
attccgggctcgaaggctgtgcggtctgccaggagctgcggccccgtccggcccgggctgcactttaggaggccgaggcgggtggatcacttgaggtcacgagttcgagaccagcctggcaacatagcgaaaccgcttctctactaaaaattagccgggcgtggtggtgcgtgcctgtagtcccagctactctggaggctgaggtggaaggatcacctgaggccgagaggtggaggctatggcatgggttggaattggagcctatcccccaacccgaaggctaacagcatcatgtggttactaactgttcctcattcaccggttgatgcctcccagaaaaaaacgccgccagccttcccagaaagccccgctgctgttccaccaacaaccactggagggccccaaacacagctgtgcatctacacagcttcccatcactcacactcgacaggtgcccagcaagcccattgaccacagcaccatcacttcctgggtatcacctgattttgatacagca

SEQ ID NO: 173668 - DNA, 580 bp, Homo sapiens
  Payload ID: 14104
  Gene Symbol: RHNO1
  Gene Name: RAD9-HUS1-RAD1 interacting nuclear orphan 1
  ENST ID: ENST00000538700
  CDS Start-End: 266-580
attccgggctcgaaggctgtgcggtctgccaggagctgcggccccgtccggcccgggctggtataggaggctgtgctccccaaagccttgaagtttatggtagaattggctggcagaggatcaggaagaactggggaatcatctgaattatttgctcccagcttttgtttcttctctacaggcatgggttggaattggagcctatcccccaacccgaaggctaacagcatcatgtggttactaactgttcctcattcaccggttgatgcctcccagaaaaaaacgccgccagccttcccagaaagccccgctgctgttccaccaacaaccactggagggccccaaacacagctgtgcatctacacagcttcccatcactcacactcgacaggtgcccagcaagcccattgaccacagcaccatcacttcctgggtatcacctgattttgatacagcagcaggaagcttgttcccagcctaccagaaacaccaaaaccgggcgagacactcaagtcgaaaacctaccacctccaagtttccacatctaacttttgagagtccgcaatcttccagttcagag

SEQ ID NO: 173669 - DNA, 2070 bp, Homo sapiens
  Payload ID: 14104
  Gene Symbol: RHNO1
  Gene Name: RAD9-HUS1-RAD1 interacting nuclear orphan 1
  Uniprot ID: Q9BSD3
  ENST ID: ENST00000618250
  CDS Start-End: 290-1006
aatcggcgccggccttgtctcggcattccgggctcgaaggctgtgcggtctgccaggagctgcggccccgtccggcccgggctggtataggaggctgtgctccccaaagccttgaagtttatggtagaattggctggcagaggatcaggaagaactggggaatcatctgaattatttgctcccagcttttgtttcttctctacaggcatgggttggaattggagcctatcccccaacccgaaggctaacagcatcatgtggttactaactgttcctcattcaccggttgatgcctcccagaaaaaaacgccgccagccttcccagaaagccccgctgctgttccaccaacaaccactggagggccccaaacacagctgtgcatctacacagcttcccatcactcacactcgacaggtgcccagcaagcccattgaccacagcaccatcacttcctgggtatcacctgattttgatacagcagcaggaagcttgttcccagcctaccagaaacaccaaaaccgggcgagacactcaagtcgaaaacctaccacctccaagtttccacatctaacttttgagagtccgcaatcttccagttcagagacattggggatccccttaatccgagagtgccccagtgaatcagaaaaggatgtttccagaagacccttagttccagtgctcagtccccaaagctgtgggaacatgtcagtgcaggcacttcagagcttaccttatgtgttcattccacctgatatccagaccccagagtcatcgtctgtgaaggaagaactcattccccaagatcagaaggaaaacagccttctaagctgcactcttcacactggcactcctaatagcccagagcctggacctgttctggttaaagacacccccgaggacaagtatggaataaaggtcacatggaggagacgacagcacctgcttgcttacctcagggagagagggaagctgagcagaagccaattccttgtgaaaagctgactgccatcagtaatctcaatagaaaagagatatgttttctggagtcataaaggaattcaattcctagggtttttgtttttgtttttgagatgtaatattgctctgttgcccaggctggagtgcagtggtatgatctcaccttactgcaaccaccacttcctgggttcaagcgattctcctgcctcagcctccccagtagctgggattacaggcaccagccaccatgcctggctaatttttttgtatttttagtagagatgtggtttctccatgttggccaggctggtctcaaaatcctgacctcaagtcatctgctggccttgacctcacaaagtgctggcccagccgagatttgttttctaagatactttgtgtcatgaacagttcagtttagtgtcatgaactattcacttcatatttttcttgtattaactgtttaaatttttaaaatatcttgtagtaactctttaaaatgtatgtaagtaaatggctgcagaaagtttttttagagaatcctgcttccatcagtaatacagcaatattaccccatccactaatggtctttgtttccttaaccactactcattaatccttaatcacctcattcaaactaattcattctgcatttttgagtaccaactcttgtcaggctcagtggcagcttctacgacctgatggatggaaaaaaatcaaactctgtgactctatggttgactgccacctctgcaaccttgactcatctgctgaaaaggcaagaagaagaaagggcagcaagccctgttttagggactacataagatgaggggagataagggggacatagatgagttctttaggattgcgtgtgttttgagtttttgtttctaactgaagaaatctgtcaatattaaatagggtgggaaaatggtttcttagaataactgttcaactgtgtgtaaataaggaaagttttcaatgagtattacttattgtaattaatgcagaaggacttccccagtcaaccgaatgtctcggccttttactcagacaagtagcatctcattaaacccattcatttagcattc

SEQ ID NO: 173670 - DNA, 2175 bp, Homo sapiens
  Payload ID: 14105
  Gene Symbol: RSPH3
  Gene Name: radial spoke 3 homolog (Chlamydomonas)
  Uniprot ID: Q86UC2
  ENST ID: ENST00000252655
  CDS Start-End: 191-1873
ggctgccaggggcgtgttatcgcgggggcagcctgggagcgctgctgcgccgcggcaggagaaacagccgaggacaccctggaagagcaggagcacgtgggcctgcgagaatggcgccaacaccagccctgcaaagccacattccaaagccgggccaaggacagccaccgttgccccgcaggcctcaaggatgacggtcaagccagccaaggccgcctccctagccaggaacctcgcaaagcgcaggcgcacctacctgggtggcgcggctgggcggagtcaagagccggaagtcccttgtgccgcagtccttcccgggaaacctggggaccggaactgcccggagttcccgcccccagacagaaccctgggttgctgggcaaccgatgcggcccccgcagctggtctctgtggtgctgggagcgagcccagtatagctcccacctcctgcgctggtaacctcccgtcccgcccgcctcccttgttgtcgcctctcctcgcgtcgcggaatccttgcccttggcactacttacatctctccgggtcccacaacaccttagcgcccacctgcttcaaagccaagctccaccgaaagcgaggcagtcagcccccggacatggcctcagcgctgactgatcgcacctctcgggccccgagcacctacacctacaccagccggccccgagcactgccctgccagcgcagccgttaccgggacagcctgacgcagccagatgaagaacctatgcattatggaaacataatgtatgacagaagggtaattcgaggtaacacttatgcactccagacagggccactgctcggacggcctgattctctagagctccagagacaacgggaggctaggaagagggctcttgccagaaaacaagcccaagagcagctcagaccacaaacacctgaacctgtggaaggcagaaagcatgtcgatgtgcaaacagaattataccttgaagaaattgctgatcgcataatagaagttgatatggaatgccaaacagatgcatttttggacagaccaccaacaccactctttattcctgccaaaactggcaaagatgtggccacccaaatactagaaggagagctctttgactttgatcttgaagttaaaccagtgttagaagttttggtggggaagacaattgagcagtctcttctggaagtaatggaagaagaagagctggctaacctgcgggccagtcagcgtgagtatgaagaactacggaatagtgaacgtgctgaagttcaacgacttgaagagcaagagaggcgacaccgagaagaaaaagaacggcgtaagaaacagcagtgggaaataatgcacaagcacaacgagacatcacaaaaaatcgccgcccgagcatttgcacagcgttacctggctgaccttctcccgtctgtttttggcagcctcagggatagtggctacttttatgatcccattgaaagagatattgagataggatttcttccatggctaatgaatgaagttgaaaaaaccatggaatatagcatggtgggaagaacagtgcttgacatgttgatccgtgaggtggttgaaaagaggctgtgtatgtatgagcatggggaagacacacatcagtctccagaacccgaggatgagcctggtggtcctggagcaatgacagagtcactggaggcctctgaattcctggagcagagcatgtcacagacacgggagctgcttttagatggaggctacctacaaagaacaacatatgacagaaggtcatcccaggaaaggaagtttatggaagagagagaactcttagggcaagatgaagaaacagcaatgaggaagtccttaggggaggaagaattgtcataggagggaagcttcaaagtcatgaaaccaatcaacagccaagtcagcaagcaatcaggtaatgatgtgcgagtcccctcaggttatagaaattatgttgtatttagtcagtatgtctttttgtgtaatggactgggccaatcaaatgtgataaaattaatttgagaatgaaacttaaattgaattcatttatttaatagaatattcaaaggctatattgtaattctaatgagaattatatttaattactagctttctattaccattatatgtaaccagcaaatatatttttccttagcccttct

SEQ ID NO: 173671 - DNA, 6561 bp, Homo sapiens
  Payload ID: 14105
  Gene Symbol: RSPH3
  Gene Name: radial spoke 3 homolog (Chlamydomonas)
  ENST ID: ENST00000367069
  CDS Start-End: 638-1894
acgtaacagagctgggagcctggctgccaggggcgtgttatcgcgggggcagcctgggagcgctgctgcgccgcggcaggagaaacagccgaggacaccctggaagagcaggagcacgtgggcctgcgagaatggcgccaacaccagccctgcaaagccacattccaaagccgggccaaggacagccaccgttgccccgcaggcctcaaggatgacggtcaagccagccaaggccgcctccctagccaggaacctcgcaaagcgcaggcgcacctacctgggtggcgcggctgggcggagtcaagagccggaagtcccttgtgccgcagtccttcccgggaaacctggggaccggaactgcccggagttcccgcccccagacagaaccctgggttgctgggcaaccgatgcggcccccgcagctggtctctgtggtgctgggagcgagcccagtatagctcccacctcctgcgctggtaacctcccgtcccgcccgcctcccttgttgtcgcctctcctcgcgtcgcggaatccttgcccttggcactacttacatctctccgggtcccacaacaccttagcgcccacctgcttcaaagccaagctccaccgaaagcgaggcagtcagcccccggacatggcctcagcgctgactgatcgcacctctcgggccccgagcacctacacctacaccagccggccccgagcactgccctgccagcgcagccgttaccgggacagcctgacgcagccagatgaagaacctatgcattatggaaacataatgtatgacagaagggtaattcgaggtaacacttatgcactccagacagggccactgctcggacggcctgattctctagagctccagagacaacgggaggctaggaagagggctcttgccagaaaacaagcccaagagcagctcagaccacaaacacctgaacctgtggaaggcagaaagcatgtcgatgtgcaaacagaattataccttgaagaaattgctgatcgcataatagaagttgatatggaatgccaaacagatgcatttttggacagaccaccaacaccactctttattcctgccaaaactggcaaagatgtggccacccaaatactagaaggagagctctttgactttgatcttgaagttaaaccagtgttagaagttttggtggggaagacaattgagcagtctcttctggaagtaatggaagaagaagagctggctaacctgcgggccagtcagcgtgagtatgaagaactacggaatagtgaacgtgctgaagttcaacgacttgaagagcaagagaggcgacaccgagaagaaaaagaacggcgtaagaaacagcagtgggaaataatgcacaagcacaacgagacatcacaaaaaatcgccgcccgagcatttgcacagcgttacctggctgaccttctcccgtctgtttttggcagcctcagggatagtggctacttttatgatcccattgaaagagatattgagataggatttcttccatggctaatgaatgaagttgaaaaaaccatggaatatagcatggtgggaagaacagtgcttgacatgttgatccgtgaggtggttgaaaagaggctgtgtatgtatgagcatggggaagacacacatcagtctccagaacccgaggatgagcctggtggtcctggagcaatgacagagtcactggaggcctctgaattcctggagcagagcatgtcacagacacgggagctgcttttagatggaggctacctacaaagaacaacatatgacagaaggtcatcccaggaaaggaagtttatggaagagagagaactcttagggcaagatgaagaaacagcaatgaggaagtccttaggggaggaagaattgtcataggagggaagcttcaaagtcatgaaaccaatcaacagccaagtcagcaagcaatcaggtaatgatgtgcgagtcccctcaggttatagaaattatgttgtatttagtcagtatgtctttttgtgtaatggactgggccaatcaaatgtgataaaattaatttgagaatgaaacttaaattgaattcatttatttaatagaatattcaaaggctatattgtaattctaatgagaattatatttaattactagctttctattaccattatatgtaaccagcaaatatatttttccttagcccttctaattttgcgggttagttttttttagtaagtatgatatttaatgttcaatatcagtgctgtcagccatatagcttttcttctctataggaaaactatttcacctactgtaagagtgaatgcctagccaggcgtggtggctcacacctgtaatcccagcactttgggaggctgaggctggcagatcccctgaggtcgggagtttgagaccagccagaccaacaaggagaaaccccatctctgctaaaaatacaaaattagccaggcatggtggcgcatgcctgtaatcctagctacttgggaggctgaggcaggagaatcacttgaacctggggcggaggttgcggtgagccaagtttgcaccattgcactccagcctgggcaacaagagcaaaactccgtctcaaaaaaaaaagaaaaaaaagagagagaatgcctaaacgttgtgctactgaaagccacagtgctcccttcctgcaaggaccatcttcaatattcaagtaaggcttaaggaattcagtggattagtatatgctctcatctattttttcacattcctactatgaaaaaatttcaggcaatgccaataaagcaaaagtccctgtttgccctcatacagtctcactcccctcctcaaaggtagatcactgttatcaggtatgagctatctaggccttttttgaggtattcctatacaaatgtatttgaaaatctagaaatatatagcttgattttctttatataaatataaacattatttacatattttatttttcacttaagagaatgtcttagatctttcaaggttagtggcatcaatctcttatcttgtcaaaatatggttaaggtattacatattatgactgtgctgtagcatagggaattaacatttgactttttaatctgaatgtgttagagaatttacctgcagtattaaaatcacaagttattttctctccaaagccttcctaatcgtaagcaataactgaagtcttcagagcctttagataaatagagcctatttttctttttacttatttttatttttattttttggagacaaggtctcactctgacacccaggctggagtgcagcagcaccatcacagctcactgcagccttgacctcccaggctcaggtgatcttctcacctcagccttccaagtagctgggactacaggtgtgcaccaccacgtctggctagttactgtattttttgtagagatgggctcttgctgtgttgcccaggctggtctccaactcctgggctcaagtgatctgcccaccttggcctcccaaagtgctaggactacaggcatgagccaccgcacctggctgagtctgtttttcgcaaaatacttacacatatataaacgtagtgatttaaaataacttataattattaacccatttaccttaatttcttttaagttaggtaccaagaatgtatccacatttaaaaaattttaaaagaatgcacccattttcccatatagtatttcactataacacttaggcctcatggcaaccttctgaagaatgcatgacaatatttgtattttttagtttctaatccttaattcggtcagccagcaaacattagctgagtgcctgctctgccttgggaatgagactgcagatacagcggtgaacagtcacgaatactacatgttttttacagcctagcagtggagctaaatgaagtaaatgatgtaaataaagaaaccaaagctcaggaatttaaagtgatttgcaatagatgacgagcctagtagggaataggactaaagctggaatccaaatctccttacttctaatctggtatactttcttctaataacttgctgtttttgtgaggtacaaagaataatttaaaataaattattgcactaatagcattttaaaaattggaatcacgcctcttatccatcatggggctggttccatcttgttaaacagtctttatgatcatcctaacatttataagatattaattttggcaagaagaccaaaaatttttaattagggctattgctgattattattgttattaccaattttaaaatatctacaactagcttttagaaaccttaaaattgggccaggcacggtggcttgcacctgtaatcccagcactttgggaggccgaggcaggcggatcacaaggtcaggagatcaagaccatcctggccaacatggtgaaaccccgtctctactaaaaatacaaaaattagtcaggcgtggtggcgggcacctgtagtcccagctactcaggaggccgaggcaggagaatcgcttgaacacgggaggcggaggttgcagtgagccgagatcgcgccactgcactccagcctggaagacagagtgagactccttctcaaaaaaaaaaaaccttaaaattgatttgaagttgattatctttcataatcttctaattctcctttagaatgatccagtccattaaacactttgcagatgccagacctatgctctataaatccataaattaattcaatttattgaaagaagtagatatctataaaccccacactgaactggttaagcttaattgcaatcctagtccatcctagagagaaatcaaaataattgagaggttagggcattgtcgctgtgagaaagcttagaggtaacacattatatgttatctggagagaagaatgttaaatggaaacaaagtttatgaagaatttcttcaagtacctgaaggactttctgggaaattacaagatagcattcttaggttccatatgtctagaagacttttcataactgtaagcaacttttgcaaatggtttgggaacataaaactcttccagcatagaagaaaatgggtactattaacattcagatggttatgggaccatcataacagtttgatgtgatatgcaaaatgctacatccccaactatgaccctcagtatgacttttaaaggaattataagctccaaatactttttggagtataaacagtacttgactttttcacacatttgctaatacccttctcataagttttatttctttctgatgtttcagctaacactgagttaacagaagctaaataataataaaatgaagaacagatagtaaatatattgaaattgtcattcctggccgggtgtggtggcttacgcctataatcccagcactttgggaggccaaggcaggcagatcacgaggtcaggagatcgaggccatcctggccaacatggtgaaaccctgtctccactaaaaatacaaaaattagctgggtatggtgacgcatgcctataatcccagctactcgggagactgaggcataagaatcacttgaacccaggaggtcgcgccgctgcactccagcccggtgacagagcaagactccgtctcaaaaaaaaaaaaaagaaagaaaaagaaattgtcattcttaacataaattcccatatcactaaaatagatcagagaggtagaatgaaattttctctagcataggcatcattacatttaagccatctgagggctatgagcgtggcctgcaaagtcactctgagcaacacaaggtggagtttgaaagcagattcaaagccagaccactgggcttgagtcctcacatgcaagcatgtagtcttcaccatggagaagggggtttgcctttctcaaagcttttttcttttaaattaagaaaaagaactgatttatcagtctagtgtttcattttaaaaacatatgaaagggtgggtaacttgcagaagaaagtatttggagcctataattccattaaaagttataatggcggtcatagttggggaagcagcattttgcatattatatcaaaatgttatggtaccataaccatccaaatgttaatggtaccaatttcttctatcctagaaacatttcattttatgttgttgaaacataacaactatatcagctagattttttttctatgctttacctgctatggaaaatttgacacattctgctttactcttttgtttataggtgaatcacagaatgtatttttatgtattctgtagttcaatagccatggctgtttacttcatttaatttatttagcataaagacattatgaaaaggcctaaacatgagcttcacttccccactaactaattagcatctgttatttcttaaccgtaatgcctaggcctaacctcaaccaaccttccacaatcttgttcacagtcagagacccaaaaaagagtgttataagtggggtgtcactattgtgaaagtagtgctaatggtgttgaattggtacctatgattcttcttttgaattagattgtatgtttcatgatctcaacttacattactaaaattcaataaactgatcatttagatga

SEQ ID NO: 173672 - DNA, 1904 bp, Homo sapiens
  Payload ID: 14105
  Gene Symbol: RSPH3
  Gene Name: radial spoke 3 homolog (Chlamydomonas)
  ENST ID: ENST00000449822
  CDS Start-End: 232-1200
gatgcggcccccgcagctggtctctgtggtgctgggagcgagcccagtatagctcccacctcctgcgctggtaacctcccgtcccgcccgcctcccttgttgtcgcctctcctcgcgtcgcggaatccttgcccttggcactacttacatctctccgggtcccacaacaccttagcgcccacctgcttcaaagccaagctccaccgaaagcgaggcagtcagcccccggacatggcctcagcgctgactgatcgcacctctcgggccccgagcacctacacctacaccagccggccccgagcactgccctgccagcgcagccgttaccgggacagcctgacgcagccagatgaagaacctatgcattatggaaacataatgtatgacagaagggtaattcgaggtaacacttatgcactccagacagggccactgctctttgactttgatcttgaagttaaaccagtgttagaagttttggtggggaagacaattgagcagtctcttctggaagtaatggaagaagaagagctggctaacctgcgggccagtcagcgtgagtatgaagaactacggaatagtgaacgtgctgaagttcaacgacttgaagagcaagagaggcgacaccgagaagaaaaagaacggcgtaagaaacagcagtgggaaataatgcacaagcacaacgagacatcacaaaaaatcgccgcccgagcatttgcacagcgttacctggctgaccttctcccgtctgtttttggcagcctcagggatagtggctacttttatgatcccattgaaagagatattgagataggatttcttccatggctaatgaatgaagttgaaaaaaccatggaatatagcatggtgggaagaacagtgcttgacatgttgatccgtgaggtggttgaaaagaggctgtgtatgtatgagcatggggaagacacacatcagtctccagaacccgaggatgagcctggtggtcctggagcaatgacagagtcactggaggcctctgaattcctggagcagagcatgtcacagacacgggagctgcttttagatggaggctacctacaaagaacaacatatgacagaaggtcatcccaggaaaggaagtttatggaagagagagaactcttagggcaagatgaagaaacagcaatgaggaagtccttaggggaggaagaattgtcataggagggaagcttcaaagtcatgaaaccaatcaacagccaagtcagcaagcaatcaggtaatgatgtgcgagtcccctcaggttatagaaattatgttgtatttagtcagtatgtctttttgtgtaatggactgggccaatcaaatgtgataaaattaatttgagaatgaaacttaaattgaattcatttatttaatagaatattcaaaggctatattgtaattctaatgagaattatatttaattactagctttctattaccattatatgtaaccagcaaatatatttttccttagcccttctaattttgcgggttagttttttttagtaagtatgatatttaatgttcaatatcagtgctgtcagccatatagcttttcttctctataggaaaactatttcacctactgtaagagtgaatgcctagccaggcgtggtggctcacacctgtaatcccagcactttgggaggctgaggctggcagatcccctgaggtcgggagtttgagaccagccagaccaacaaggagaaaccccatctctgctaaaaatacaaaattagccaggcatggtggcgcatgcctgtaatcctagctacttgggaggctgaggcaggagaatcacttgaacctggggcggaggttgcggtgagccaagtttgcaccattgcactccagcctgggcaacaagagcaaaactccgtctc

SEQ ID NO: 173673 - DNA, 1430 bp, Homo sapiens
  Payload ID: 14106
  Gene Symbol: RSPH1
  Gene Name: radial spoke head 1 homolog (Chlamydomonas)
  Uniprot ID: Q8WYR4
  ENST ID: ENST00000291536
  CDS Start-End: 169-1098
tggctcctcccgcttcgtccgcgtcgcctgtccccgctccccatcttccgggctgggagggaggcgggaccggccgcgtctccatggcgacgcgggacgcggcggtggaggcggttgctacccacctgctagaggcgctgcggctgtgatccaggctggggcgagaccatgtcggacctgggctcggaggagttggaggaggagggagagaatgatattggggaatatgaggggggtcggaatgaggcaggcgaaaggcacggacgtgggagggcacggctacccaacggggacacctacgaagggagctacgaattcggtaaaagacatggccaggggatctacaaatttaaaaatggtgctcgatatatcggagaatatgttagaaataaaaagcacggtcaaggcacttttatatatccagatggatccagatatgaaggagagtgggcaaatgacctgcggcacggccatggcgtatactactacatcaataatgacacctacactggagagtggtttgctcatcaaaggcatgggcaaggcacctatttatacgcggagacgggcagtaagtatgttggcacctgggtgaacggacagcaggagggcacggccgagctcattcacctgaaccacaggtaccagggcaagttcttgaacaaaaatcctgttggccctggaaagtatgtatttgatgttgggtgtgaacaacatggtgaatatcgtttaacagatatggaaagaggagaagaggaagaggaggaagaattagtaactgttgttccaaaatggaaagctacccaaatcactgaattggccctgtggacaccaactctccccaaaaagccgacctctacggatggacctggccaagacgctccaggagctgagagtgcaggagaacccggggaggaggcccaggctctgctggagggcttcgagggtgagatggacatgaggcctggagatgaagatgcagacgtcctccgggaagagagccgggagtatgaccaggaggagttccgctatgacatggatgagggaaacattaattctgaagaagaagaaactagacagtcagacctccaggactaagatgaagtgagccgagaggagatcgtatcataagaatgcttctgtcgttagccgggtgcagtgctgtgtgtatctagttccagctacttgagaggctgaggcaggaggattgcttgagtccagaaagtggcagttgcagtgagtggagatcgcgccactgctctccagcctgggtggcagagcgagaccctgtctcaaaaaataaacaaaaacaaaatgcttctgtcagttaacaatctttattagagggtttttagtctttctttctcagctgtatgttaagttgattgacaaatgcaaataaacgtctttattatcctttctttctgaaa

SEQ ID NO: 173674 - DNA, 937 bp, Homo sapiens
  Payload ID: 14106
  Gene Symbol: RSPH1
  Gene Name: radial spoke head 1 homolog (Chlamydomonas)
  Uniprot ID: Q8WYR4
  ENST ID: ENST00000398352
  CDS Start-End: 1-816
atgtcggacctgggctcggaggagttggaggaggagggagagaatgatattggggggatctacaaatttaaaaatggtgctcgatatatcggagaatatgttagaaataaaaagcacggtcaaggcacttttatatatccagatggatccagatatgaaggagagtgggcaaatgacctgcggcacggccatggcgtatactactacatcaataatgacacctacactggagagtggtttgctcatcaaaggcatgggcaaggcacctatttatacgcggagacgggcagtaagtatgttggcacctgggtgaacggacagcaggagggcacggccgagctcattcacctgaaccacaggtaccagggcaagttcttgaacaaaaatcctgttggccctggaaagtatgtatttgatgttgggtgtgaacaacatggtgaatatcgtttaacagatatggaaagaggagaagaggaagaggaggaagaattagtaactgttgttccaaaatggaaagctacccaaatcactgaattggccctgtggacaccaactctccccaaaaagccgacctctacggatggacctggccaagacgctccaggagctgagagtgcaggagaacccggggaggaggcccaggctctgctggagggcttcgagggtgagatggacatgaggcctggagatgaagatgcagacgtcctccgggaagagagccgggagtatgaccaggaggagttccgctatgacatggatgagggaaacattaattctgaagaagaagaaactagacagtcagacctccaggactaagatgaagtgagccgagaggagatcgtatcataagaatgcttctgtcgttagccgggtgcagtgctgtgtgtatctagttccagctacttgagaggctgaggcaggaggattgcttgagtcc

SEQ ID NO: 173675 - DNA, 2923 bp, Homo sapiens
  Payload ID: 14107
  Gene Symbol: RSPH10B
  Gene Name: radial spoke head 10 homolog B (Chlamydomonas)
  Uniprot ID: P0C881
  ENST ID: ENST00000337579
  CDS Start-End: 89-2701
cagataaaactcatcagtgctttgaaacaagcagctctgaaccaaagaaatcatttgattcaagtaaccattggatcttcccaaggcaatggtgaaagaaaagaaaaaagcagacaaaaaaggggagaagtctgcccgctctccctcatctctctctgataatctagacttttccaaacaagatggcaacaccactaggcaagagatgtccccagctggtgtcccattgctgggaatgcagctcaacgaagtgaaacccaaaaaagaccgccaaaacgttcagcagaacgaagatgccacccaatacgaagagtccattctgaccaaactcatagtggaaagctatgaaggggaaaaggttcgtgggctgtatgagggagaaggcttcgcagcctttcaaggcggttgtacctatcgtggtatgttttcagaaggactcatgcatggacaggggacttatatttgggccgatggattaaaatatgagggcgactttgtgaagaatgtcccgatgaaccacggcgtgtacacgtggccggacggcagcatgtatgaaggcgaagtggtcaacggcatgaggaacggattcgggatgttcaagtgcagcacccagcctgtgtcctacatcggccactggtgcaatggcaagcggcacgggaagggctccatttattacaatcaagagggtacgtgttggtacgagggagactgggtacaaaacatcaaaaagggctggggaataagatgttataaatctggaaatatatacgaaggccagtgggaagacaacatgcgccacggggaggggaggatgaggtggctgaccaccaacgaagagtacaccgggcggtgggagaggggcatccagaatggctttggaacacacacatggtttctaaagagaatccgcagttcccagtatcctttgagaaatgaatacataggggagtttgtaaatggatatcgtcacggacgtggcaagttttattatgccagtggagccatgtatgatggagaatgggtttccaataagaaacatggcatgggccgattaactttcaagaacgggcgtgtgtacgaaggcgcattctccaatgaccacatagctgggtttccggatcttgaagttgaattcatcagctgcctggacctgtcttcaggagttgccccaagactgtccaggagcgccgaactgatcagaaagcttgatggcagtgaaagtcattctgtgttgggatcgagcattgagctggatctaaatttgctcctggacatgtaccctgagacagtccaacctgaagaaaagaagcaggtggaatatgccgtcttaagaaatattacagaattaagaagaatttacagcttttacagcagcctgggatgcggccactctctggataatacctttctgatgacaaagcttcacttctggagatttctaaaagattgcaaatttcatcaccacaaactaactcttgctgatatggacaggatattaagtgccaataatgacataccagttgaagaaatccattctccatttacaacaatacttttgagaacatttttgaattacctcctgcatttggcgtaccacatttatcatgaagaattccaaaagagaagcccatccctcttcttgtgttttacaaaactgatgaccgagaacattcgtccaaatgccttccagataaaaggcaatttattccgtgagcaacagcggacgctctactctatgagttacatgaataagtgctgggagatttatctcgcttactgcagacccagtgcagcgcctccccacgagcctacgatgaagatgagacacttcctctggatgctgaaagactttaaaatgataaataaagaattaacagcagctacatttatggaggtcatagcagaggataatcgtttcatatatgatggaattgacagcaactttgaacctgagctggttttcctggaattctttgaagctctcttaagctttgcattcatctgtgttactgaccaaatgactaaatcctatacaaatgttccagctgatgatgtgtctggaaataaacatgaaactatttatacaatactaaatcaggacgcccagaacaagagtcccagcgcggtcatgagccacgaatcggatgctgctcactctgacagtgccaggtcatcttccagcaagttagaactctcgcctgatgttaacaaaataaggaaatcagagcccaagatcaagaagtctgtaagtcatgaaagagtctccaaaatgaattttaaattgactggaaaagggatcacctttttctcatctgagagcaagaaatatgagagacccaaggatgatcgagaggaagagttcaacacgtgggtcaataatatgtacgtcttctttgtgaacacgctctttcatgcgtataaacgtgaagaagctatcaaggagaaaataagggcagacaggttacgtagcacagcacaggcccagcagcggaagatggaagatgacgaactggaagcaaggctgaacatcttcatcttgagagaggaagaggccaagagacatgactatgaggtggacatcacagtgctcaaggagccggcagacgtgtcatcctctcacctcatactggaccctcccaaggaggatgtgaccgtgtccccatccagcaagaccatcaccagcaagaagaagaaaaagtagagagacacgaggacacacacacaggcttaggatggcacgtgctgtaagatttcctgagcattacagttcttagcactgaactcgtcacagtgttttaacataccccttggcccactgcatctcaggtttcctacatggctggattacgggagttcgagaccagcctgggcaacatagtgagacccccccatctctgcaaaattaaaacatcagccgaccgtg

SEQ ID NO: 173676 - DNA, 3106 bp, Homo sapiens
  Payload ID: 14107
  Gene Symbol: RSPH10B
  Gene Name: radial spoke head 10 homolog B (Chlamydomonas)
  Uniprot ID: P0C881
  ENST ID: ENST00000404406
  CDS Start-End: 272-2884
gggacgccgagagcccggcaacacctcagcccgagcccggcgaggtctctgggctcctggagcgagagaggtggcatctcactacgtggcctaggctgatctccctctcctggactcacatgatcctcccaccttggcccttcaacgtgctgagatcgcaggtgtgagccaccacacccggccctgataaaactcatcagtgctttgaaacaagcagctctgaaccaaagaaatcatttgattcaagtaaccattggatcttcccaaggcaatggtgaaagaaaagaaaaaagcagacaaaaaaggggagaagtctgcccgctctccctcatctctctctgataatctagacttttccaaacaagatggcaacaccactaggcaagagatgtccccagctggtgtcccattgctgggaatgcagctcaacgaagtgaaacccaaaaaagaccgccaaaacgttcagcagaacgaagatgccacccaatacgaagagtccattctgaccaaactcatagtggaaagctatgaaggggaaaaggttcgtgggctgtatgagggagaaggcttcgcagcctttcaaggcggttgtacctatcgtggtatgttttcagaaggactcatgcatggacaggggacttatatttgggccgatggattaaaatatgagggcgactttgtgaagaatgtcccgatgaaccacggcgtgtacacgtggccggacggcagcatgtatgaaggcgaagtggtcaacggcatgaggaacggattcgggatgttcaagtgcagcacccagcctgtgtcctacatcggccactggtgcaatggcaagcggcacgggaagggctccatttattacaatcaagagggtacgtgttggtacgagggagactgggtacaaaacatcaaaaagggctggggaataagatgttataaatctggaaatatatacgaaggccagtgggaagacaacatgcgccacggggaggggaggatgaggtggctgaccaccaacgaagagtacaccgggcggtgggagaggggcatccagaatggctttggaacacacacatggtttctaaagagaatccgcagttcccagtatcctttgagaaatgaatacataggggagtttgtaaatggatatcgtcacggacgtggcaagttttattatgccagtggagccatgtatgatggagaatgggtttccaataagaaacatggcatgggccgattaactttcaagaacgggcgtgtgtacgaaggcgcattctccaatgaccacatagctgggtttccggatcttgaagttgaattcatcagctgcctggacctgtcttcaggagttgccccaagactgtccaggagcgccgaactgatcagaaagcttgatggcagtgaaagtcattctgtgttgggatcgagcattgagctggatctaaatttgctcctggacatgtaccctgagacagtccaacctgaagaaaagaagcaggtggaatatgccgtcttaagaaatattacagaattaagaagaatttacagcttttacagcagcctgggatgcggccactctctggataatacctttctgatgacaaagcttcacttctggagatttctaaaagattgcaaatttcatcaccacaaactaactcttgctgatatggacaggatattaagtgccaataatgacataccagttgaagaaatccattctccatttacaacaatacttttgagaacatttttgaattacctcctgcatttggcgtaccacatttatcatgaagaattccaaaagagaagcccatccctcttcttgtgttttacaaaactgatgaccgagaacattcgtccaaatgccttccagataaaaggcaatttattccgtgagcaacagcggacgctctactctatgagttacatgaataagtgctgggagatttatctcgcttactgcagacccagtgcagcgcctccccacgagcctacgatgaagatgagacacttcctctggatgctgaaagactttaaaatgataaataaagaattaacagcagctacatttatggaggtcatagcagaggataatcgtttcatatatgatggaattgacagcaactttgaacctgagctggttttcctggaattctttgaagctctcttaagctttgcattcatctgtgttactgaccaaatgactaaatcctatacaaatgttccagctgatgatgtgtctggaaataaacatgaaactatttatacaatactaaatcaggacgcccagaacaagagtcccagcgcggtcatgagccacgaatcggatgctgctcactctgacagtgccaggtcatcttccagcaagttagaactctcgcctgatgttaacaaaataaggaaatcagagcccaagatcaagaagtctgtaagtcatgaaagagtctccaaaatgaattttaaattgactggaaaagggatcacctttttctcatctgagagcaagaaatatgagagacccaaggatgatcgagaggaagagttcaacacgtgggtcaataatatgtacgtcttctttgtgaacacgctctttcatgcgtataaacgtgaagaagctatcaaggagaaaataagggcagacaggttacgtagcacagcacaggcccagcagcggaagatggaagatgacgaactggaagcaaggctgaacatcttcatcttgagagaggaagaggccaagagacatgactatgaggtggacatcacagtgctcaaggagccggcagacgtgtcatcctctcacctcatactggaccctcccaaggaggatgtgaccgtgtccccatccagcaagaccatcaccagcaagaagaagaaaaagtagagagacacgaggacacacacacaggcttaggatggcacgtgctgtaagatttcctgagcattacagttcttagcactgaactcgtcacagtgttttaacataccccttggcccactgcatctcaggtttcctacatggctggattacgggagttcgagaccagcctgggcaacatagtgagacccccccatctctgcaaaattaaaacatcagccgaccgtg

SEQ ID NO: 173677 - DNA, 3222 bp, Homo sapiens
  Payload ID: 14107
  Gene Symbol: RSPH10B
  Gene Name: radial spoke head 10 homolog B (Chlamydomonas)
  Uniprot ID: P0C881
  ENST ID: ENST00000405415
  CDS Start-End: 388-3000
gggacgccgagagcccggcaacacctcagcccgagcccggcgaggtctctgggctcctggagcgagagaggtggcatctcactacgtggcctaggctgatctccctctcctggactcacatgatcctcccaccttggcccttcaacgtgctgagatcgcaggtgtgagccaccacacccggccctggtaactaatttttcagactttgtcaggagaatgataatgacattgtgttgtaaaactgaaattttaactacaaatgaaaaccccaagtgtttggagacgtaatttttatttttcagataaaactcatcagtgctttgaaacaagcagctctgaaccaaagaaatcatttgattcaagtaaccattggatcttcccaaggcaatggtgaaagaaaagaaaaaagcagacaaaaaaggggagaagtctgcccgctctccctcatctctctctgataatctagacttttccaaacaagatggcaacaccactaggcaagagatgtccccagctggtgtcccattgctgggaatgcagctcaacgaagtgaaacccaaaaaagaccgccaaaacgttcagcagaacgaagatgccacccaatacgaagagtccattctgaccaaactcatagtggaaagctatgaaggggaaaaggttcgtgggctgtatgagggagaaggcttcgcagcctttcaaggcggttgtacctatcgtggtatgttttcagaaggactcatgcatggacaggggacttatatttgggccgatggattaaaatatgagggcgactttgtgaagaatgtcccgatgaaccacggcgtgtacacgtggccggacggcagcatgtatgaaggcgaagtggtcaacggcatgaggaacggattcgggatgttcaagtgcagcacccagcctgtgtcctacatcggccactggtgcaatggcaagcggcacgggaagggctccatttattacaatcaagagggtacgtgttggtacgagggagactgggtacaaaacatcaaaaagggctggggaataagatgttataaatctggaaatatatacgaaggccagtgggaagacaacatgcgccacggggaggggaggatgaggtggctgaccaccaacgaagagtacaccgggcggtgggagaggggcatccagaatggctttggaacacacacatggtttctaaagagaatccgcagttcccagtatcctttgagaaatgaatacataggggagtttgtaaatggatatcgtcacggacgtggcaagttttattatgccagtggagccatgtatgatggagaatgggtttccaataagaaacatggcatgggccgattaactttcaagaacgggcgtgtgtacgaaggcgcattctccaatgaccacatagctgggtttccggatcttgaagttgaattcatcagctgcctggacctgtcttcaggagttgccccaagactgtccaggagcgccgaactgatcagaaagcttgatggcagtgaaagtcattctgtgttgggatcgagcattgagctggatctaaatttgctcctggacatgtaccctgagacagtccaacctgaagaaaagaagcaggtggaatatgccgtcttaagaaatattacagaattaagaagaatttacagcttttacagcagcctgggatgcggccactctctggataatacctttctgatgacaaagcttcacttctggagatttctaaaagattgcaaatttcatcaccacaaactaactcttgctgatatggacaggatattaagtgccaataatgacataccagttgaagaaatccattctccatttacaacaatacttttgagaacatttttgaattacctcctgcatttggcgtaccacatttatcatgaagaattccaaaagagaagcccatccctcttcttgtgttttacaaaactgatgaccgagaacattcgtccaaatgccttccagataaaaggcaatttattccgtgagcaacagcggacgctctactctatgagttacatgaataagtgctgggagatttatctcgcttactgcagacccagtgcagcgcctccccacgagcctacgatgaagatgagacacttcctctggatgctgaaagactttaaaatgataaataaagaattaacagcagctacatttatggaggtcatagcagaggataatcgtttcatatatgatggaattgacagcaactttgaacctgagctggttttcctggaattctttgaagctctcttaagctttgcattcatctgtgttactgaccaaatgactaaatcctatacaaatgttccagctgatgatgtgtctggaaataaacatgaaactatttatacaatactaaatcaggacgcccagaacaagagtcccagcgcggtcatgagccacgaatcggatgctgctcactctgacagtgccaggtcatcttccagcaagttagaactctcgcctgatgttaacaaaataaggaaatcagagcccaagatcaagaagtctgtaagtcatgaaagagtctccaaaatgaattttaaattgactggaaaagggatcacctttttctcatctgagagcaagaaatatgagagacccaaggatgatcgagaggaagagttcaacacgtgggtcaataatatgtacgtcttctttgtgaacacgctctttcatgcgtataaacgtgaagaagctatcaaggagaaaataagggcagacaggttacgtagcacagcacaggcccagcagcggaagatggaagatgacgaactggaagcaaggctgaacatcttcatcttgagagaggaagaggccaagagacatgactatgaggtggacatcacagtgctcaaggagccggcagacgtgtcatcctctcacctcatactggaccctcccaaggaggatgtgaccgtgtccccatccagcaagaccatcaccagcaagaagaagaaaaagtagagagacacgaggacacacacacaggcttaggatggcacgtgctgtaagatttcctgagcattacagttcttagcactgaactcgtcacagtgttttaacataccccttggcccactgcatctcaggtttcctacatggctggattacgggagttcgagaccagcctgggcaacatagtgagacccccccatctctgcaaaattaaaacatcagccgaccgtg

SEQ ID NO: 173678 - DNA, 448 bp, Homo sapiens
  Payload ID: 14107
  Gene Symbol: RSPH10B
  Gene Name: radial spoke head 10 homolog B (Chlamydomonas)
  ENST ID: ENST00000455618
  CDS Start-End: 436-448
ggctcctggagcgaggtgagcgccccaggccgcggtcctgcgtacgccgggacagccatggcgactgggtcctgctccttcccggccggactgacgcggcctcccaggacccgagcacgtgcgtgatgggcgaggagggcctaggccgggcagaccagtgcagggagccgattcttcccggctcaccgtagacacaggagagagatggcctctccttaagcccaggagaacagaggaaacattaggaaacgcactgagaaacgaaattggcttgatttgtagttcacttatttgtagatcactgacagaagaccgaaaagctcgtagtaaaggcccctctaaatttagagataaaactcatcagtgctttgaaacaagcagctctgaaccaaagaaatcatttgattcaagtaaccattggatcttcccaaggcaatggtgaaagaaa

SEQ ID NO: 173679 - DNA, 646 bp, Homo sapiens
  Payload ID: 14107
  Gene Symbol: RSPH10B
  Gene Name: radial spoke head 10 homolog B (Chlamydomonas)
  ENST ID: ENST00000542644
  CDS Start-End: 607-646
gggacgccgagagcccggcaacacctcagcccgagcccggcgaggtctctgggctcctggagcgaggtgagcgccccaggccgcggtcctgcgtacgccgggacagccatggcgactgggtcctgctccttcccggccggactgacgcggcctcccaggacccgagcacgtgcgtgatgggcgaggagggcctaggccgggcagaccagtgcagggagccgattcttcccggctcaccgtagacacaggagagagatggcctctccttaagcccaggagaacagaggaaacattaggaaacgcactgagaaacgaaattggcttgatttgtagttcacttatttgtagatcactgacagaagaccgaaaagctcgtagtaaaggcccctctaaatttagagagaggtggcatctcactacgtggcctaggctgatctccctctcctggactcacatgatcctcccaccttggcccttcaacgtgctgagatcgcaggtgtgagccaccacacccggccctgataaaactcatcagtgctttgaaacaagcagctctgaaccaaagaaatcatttgattcaagtaaccattggatcttcccaaggcaatggtgaaagaaaagaaaaaagcagacaaaaaaggggaga

SEQ ID NO: 173680 - DNA, 2881 bp, Homo sapiens
  Payload ID: 14107
  Gene Symbol: RSPH10B
  Gene Name: radial spoke head 10 homolog B (Chlamydomonas)
  ENST ID: ENST00000539903
  CDS Start-End: 135-977
ttcagggctccatttattacaatcaagagggtacgtgttggtacgagggagactgggtacaaaacatcaaaaagggctggggaataagatgttataaatctggaaatatatacgaaggccagtgggaagacaacatgcgccacggggaggggaggatgaggtggctgaccaccaacgaagagtacaccgggcggtgggagaggggcatccagaatggctttggaacacacacatggtttctaaagagaatccgcagttcccagtatcctttgagaaatgaatacataggggagtttgtaaatggatatcgtcacggacgtggcaagttttattatgccagtggagccatgtatgatggagaatgggtttccaataagaaacatggcatgggccgattaactttcaagaacgggcgtgtgtacgaaggcgcattctccaatgaccacatagctgggtttccggatcttgaagttgaattcatcagctgcctggacctgtcttcaggagttgccccaagactgtccaggagcgccgaactgatcagaaagcttgatggcagtgaaagtcattctgtgttgggatcgagcattgagctggatctaaatttgctcctggacatgtaccctgagacagtccaacctgaagaaaagaagcaggtggaatatgccgtcttaagaaatattacagaattaagaagaatttacagcttttacagcagcctgggatgcggccactctctggataatacctttctgatgacaaagcttcacttctggagatttctaaaagattgcaaatttcatcaccacaaactaactcttgctgatatggacaggatattaagtgccaataatgacataccagttgaagaaatccattctccatttacaacaatacttttgagaacatttttgaattacctcctgcatttggcgtaccacatttatcatgaagaattccagcaatttattccgtgagcaacagcggacgctctactctatgagttacatgaataagtgctgggagatttatctcgcttactgcagacccagtgcagcgcctccccacgagcctacgatgaagatgagacacttcctctggatgctgaaagtaaccacctaagttcgatattggctttctatttacaggcactttgattttaattaaagaaaggcaggatattccagctgtgatatgcaaataatcaggactttaaaatgataaataaagaattaacagcagctacatttatggaggtcatagcagaggataatcgtttcatatatgatggaattgacagcaactttgaacctgagctggttttcctggaattctttgaagctctcttaagctttgcattcatctgtgttactgaccaaatgactaaatcctatacaaatgttccagctgatgatgtgtctggaaataaacatgaaactatttatacaatactaaatcaggacgcccagaacaagagtcccagcgcggtcatgagccacgaatcggatgctgctcactctgacagtgccaggtcatcttccagcaagttagaactctcgcctgatgttaacaaaataaggaaatcagagcccaagatcaagaagtctgtaagtcatgaaagagtctccaaaatgaattttaaattgactggaaaagggatcacctttttctcatctgagagcaagaaatatgagagacccaaggatgatcgagaggaagagttcaacacgtgggtcaataatatgtacgtcttctttgtgaacacgctctttcatgcgtataaacgtgaagaagctatcaaggagaaaataagggcagacaggttacgtagcacagcacaggcccagcagcggaagatggaagatgacgaactggaagcaaggctgaacatcttcatcttgagagaggaagaggccaagagacatgactatgaggtggacatcacagtgctcaaggagccggcagacgtgtcatcctctcacctcatactggaccctcccaaggaggatgtgaccgtgtccccatccagcaagaccatcaccagcaagaagaagaaaaagtagagagacacgaggacacacacacaggcttaggatggcacgtgctgtaagatttcctgagcattacagttcttagcactgaactcgtcacagtgttttaacataccccttggcccactgcatctcaggtttcctacatggctggattacgggagttcgagaccagcctgggcaacatagtgagacccccccatctctgcaaaattaaaacatcagccgaccgtggtggtgtgtacatgtggttctagcttcttgggaggctgaggtgggaggattgcttgagctcaggaggttgaggctgcagtgagccattgcattccagcctgggtcacggagctggtggccagtgtaatctataaataggcagcaggagagagactcaacaccaaaccagaattttaaaaacttttaacaatttattagtcttattttccagtaaaatattcacataatgtcaaaagaatgaaatgatagcgatatagccaactacctttaattaattccacataaatatttaaaatctaaaaacctcagatcagcagaccgagtcgaaatgtgattcttcaaagcaagtattgctttacccttgtcctgaatgcagtccgtcatatgaccactaacttgcatgtgaccaaatgtttgcagagtgttttttagatatgctctcggtgagccgtcatccgtcaatccaagaagaagatgttgttgaactgcgttgcacaaagtttcttgacctcttctgcaacaaggacacaacagtgaggaaggaagaggcagtcacttaaaaggttacatgatatataattaaattcttcttgggt

SEQ ID NO: 173681 - DNA, 2923 bp, Homo sapiens
  Payload ID: 14108
  Gene Symbol: RSPH10B2
  Gene Name: radial spoke head 10 homolog B2 (Chlamydomonas)
  Uniprot ID: B2RC85
  ENST ID: ENST00000297186
  CDS Start-End: 89-2701
cagataaaactcatcagtgctttgaaacaagcagctctgaaccaaagaaatcatttgattcaagtaaccattggatcttcccaaggcaatggtgaaagaaaagaaaaaagcagacaaaaaaggggagaagtctgcccgctctccctcatctctctctgataatctagacttttccaaacaagatggcaacaccactaggcaagagatgtccccagctggtgtcccattgctgggaatgcagctcaacgaagtgaaacccaaaaaagaccgccaaaacgttcagcagaacgaagatgccagccaatacgaagagtccattctgaccaaactcatagtggaaagctatgaaggggaaaaggttcgtgggctgtatgagggagaaggcttcgcagcctttcaaggcggttgtacctatcgtggtatgttttcagaaggactcatgcatggacaggggacttatatttgggccgatggattaaaatatgagggcgactttgtgaagaatgtcccgatgaaccacggcgtgtacacgtggccggacggcagcatgtatgaaggcgaagtggtcaacggcatgaggaacggattcgggatgttcaagtgcagcacccagcctgtgtcctacatcggccactggtgcaatggcaagcggcacgggaagggctccatttattacaatcaagagggtacgtgttggtacgagggagactgggtacaaaacatcaaaaagggctggggaataagatgttataaatctggaaatatatacgaaggccagtgggaagacaacatgcgccacggggaggggaggatgaggtggctgaccaccaacgaagagtacaccgggcggtgggagaggggcatccagaatggctttggaacacacacatggtttctaaagagaatccgcagttcccagtatcctttgagaaatgaatacataggggagtttgtaaatggatatcgtcacggacgtggcaagttttattatgccagtggagccatgtatgatggagaatgggtttccaataagaaacatggcatgggccgattaactttcaagaacgggcgtgtgtacgaaggcgcattctccaatgaccacatagctgggtttccggatcttgaagttgaattcatcagctgcctggacctgtcttcaggagttgccccaagactgtccaggagcgccgaactgatcagaaagcttgatggcagtgaaagtcattctgtgttgggatcgagcattgagctggatctaaatttgctcctggacatgtaccctgagacagtccaacctgaagaaaagaagcaggtggaatatgccgtcttaagaaatattacagaattaagaagaatttacagcttttacagcagcctgggatgcggccactctctggataatacctttctgatgacaaagcttcacttctggagatttctaaaagattgcaaatttcatcaccacaaactaactcttgctgatatggacaggatattaagtgccaataatgacataccagttgaagaaatccattctccatttacaacaatacttttgagaacatttttgaattacctcctgcatttggcgtaccacatttatcatgaagaattccaaaagagaagcccatccctcttcttgtgttttacaaaactgatgaccgagaacattcgtccaaatgcctgccagataaaaggcaatttattccgtgagcaacagcggacgctctactctatgagttacatgaataagtgctgggagatttatctcgcttactgcagacccagtgcagcgcctccccacgagcctacgatgaagatgagacacttcctctggatgctgaaagactttaaaatgataaataaagaattaacagcagctacatttatggaggtcatagcagaggataatcgtttcatatatgatggaattgacagcaactttgaacctgagctggttttcctggaattctttgaagctctcttaagctttgcattcatctgtgttactgaccaaatgactaaatcctatacaaatgttccagctgatgatgtgtctggaaataaacatgaaactatttatacaatactaaatcaggacgcccagaacaagagtcccagcgcggtcatgagccacgaatcggatgctgctcactctgacagtgccaggtcatcttccagcaagttagaactctcgcctgatgttaacaaaataaggaaatcagagcccaagatcaagaagtctgtaagtcatgaaagagtctccaaaatgaattttaaattgactggaaaagggatcacctttttctcatctgagagcaagaaatatgagagacccaaggatgatcgagaggaagagttcaacacgtgggtcaataatacgtacgtcttctttgtgaacacgctctttcatgcgtataaacgtgaagaagctatcaaggagaaaataagggcagacaggttacgtagcacagcacaggcccagcagcggaagatggaagatgacgaactggaagcaaggctgaacatctttatcttgagagaggaagaggccaagagacatgactatgaggtggacatcacagtgctcaaggagccggcagacgtgtcatcctctcacctcatactggaccctcccaaggaggatgtgaccgtgtccccatccagcaagaccatcaccagcaagaagaagaaaaagtagagagacacgaggacacacacacaggcttaggatggcacgtgctgtaagatttcctgagcattacagttcttagcactgaactcgtcacagtgttttaacataccccttggcccactgcatctcaggtttcctacatggctggattacgggagttcgagaccagcctgggcaacatagtgagacccccccatctctgcaaaattaaaacatcagccgaccgtg

SEQ ID NO: 173682 - DNA, 3220 bp, Homo sapiens
  Payload ID: 14108
  Gene Symbol: RSPH10B2
  Gene Name: radial spoke head 10 homolog B2 (Chlamydomonas)
  Uniprot ID: B2RC85
  ENST ID: ENST00000403107
  CDS Start-End: 388-3000
gggacgccgagagcccggcaacacctcagcccgagcccggcgaggtctctgggctcctggagcgagagaggtggcatctcactacgtggcctaggctgatctccctctcctggactcacatgatcctcccaccttggcccttcaacgtgctgagatcgcaggtgtgagccaccacacccggccctggtaactaatttttcagactttgtcaggagaatgataatgacattgtgttgtaaaactgaaattttaactacaaatgaaaaccccaagtgtttggagacgtaatttttatttttcagataaaactcatcagtgctttgaaacaagcagctctgaaccaaagaaatcatttgattcaagtaaccattggatcttcccaaggcaatggtgaaagaaaagaaaaaagcagacaaaaaaggggagaagtctgcccgctctccctcatctctctctgataatctagacttttccaaacaagatggcaacaccactaggcaagagatgtccccagctggtgtcccattgctgggaatgcagctcaacgaagtgaaacccaaaaaagaccgccaaaacgttcagcagaacgaagatgccagccaatacgaagagtccattctgaccaaactcatagtggaaagctatgaaggggaaaaggttcgtgggctgtatgagggagaaggcttcgcagcctttcaaggcggttgtacctatcgtggtatgttttcagaaggactcatgcatggacaggggacttatatttgggccgatggattaaaatatgagggcgactttgtgaagaatgtcccgatgaaccacggcgtgtacacgtggccggacggcagcatgtatgaaggcgaagtggtcaacggcatgaggaacggattcgggatgttcaagtgcagcacccagcctgtgtcctacatcggccactggtgcaatggcaagcggcacgggaagggctccatttattacaatcaagagggtacgtgttggtacgagggagactgggtacaaaacatcaaaaagggctggggaataagatgttataaatctggaaatatatacgaaggccagtgggaagacaacatgcgccacggggaggggaggatgaggtggctgaccaccaacgaagagtacaccgggcggtgggagaggggcatccagaatggctttggaacacacacatggtttctaaagagaatccgcagttcccagtatcctttgagaaatgaatacataggggagtttgtaaatggatatcgtcacggacgtggcaagttttattatgccagtggagccatgtatgatggagaatgggtttccaataagaaacatggcatgggccgattaactttcaagaacgggcgtgtgtacgaaggcgcattctccaatgaccacatagctgggtttccggatcttgaagttgaattcatcagctgcctggacctgtcttcaggagttgccccaagactgtccaggagcgccgaactgatcagaaagcttgatggcagtgaaagtcattctgtgttgggatcgagcattgagctggatctaaatttgctcctggacatgtaccctgagacagtccaacctgaagaaaagaagcaggtggaatatgccgtcttaagaaatattacagaattaagaagaatttacagcttttacagcagcctgggatgcggccactctctggataatacctttctgatgacaaagcttcacttctggagatttctaaaagattgcaaatttcatcaccacaaactaactcttgctgatatggacaggatattaagtgccaataatgacataccagttgaagaaatccattctccatttacaacaatacttttgagaacatttttgaattacctcctgcatttggcgtaccacatttatcatgaagaattccaaaagagaagcccatccctcttcttgtgttttacaaaactgatgaccgagaacattcgtccaaatgcctgccagataaaaggcaatttattccgtgagcaacagcggacgctctactctatgagttacatgaataagtgctgggagatttatctcgcttactgcagacccagtgcagcgcctccccacgagcctacgatgaagatgagacacttcctctggatgctgaaagactttaaaatgataaataaagaattaacagcagctacatttatggaggtcatagcagaggataatcgtttcatatatgatggaattgacagcaactttgaacctgagctggttttcctggaattctttgaagctctcttaagctttgcattcatctgtgttactgaccaaatgactaaatcctatacaaatgttccagctgatgatgtgtctggaaataaacatgaaactatttatacaatactaaatcaggacgcccagaacaagagtcccagcgcggtcatgagccacgaatcggatgctgctcactctgacagtgccaggtcatcttccagcaagttagaactctcgcctgatgttaacaaaataaggaaatcagagcccaagatcaagaagtctgtaagtcatgaaagagtctccaaaatgaattttaaattgactggaaaagggatcacctttttctcatctgagagcaagaaatatgagagacccaaggatgatcgagaggaagagttcaacacgtgggtcaataatacgtacgtcttctttgtgaacacgctctttcatgcgtataaacgtgaagaagctatcaaggagaaaataagggcagacaggttacgtagcacagcacaggcccagcagcggaagatggaagatgacgaactggaagcaaggctgaacatctttatcttgagagaggaagaggccaagagacatgactatgaggtggacatcacagtgctcaaggagccggcagacgtgtcatcctctcacctcatactggaccctcccaaggaggatgtgaccgtgtccccatccagcaagaccatcaccagcaagaagaagaaaaagtagagagacacgaggacacacacacaggcttaggatggcacgtgctgtaagatttcctgagcattacagttcttagcactgaactcgtcacagtgttttaacataccccttggcccactgcatctcaggtttcctacatggctggattacgggagttcgagaccagcctgggcaacatagtgagacccccccatctctgcaaaattaaaacatcagccgaccg

SEQ ID NO: 173683 - DNA, 3106 bp, Homo sapiens
  Payload ID: 14108
  Gene Symbol: RSPH10B2
  Gene Name: radial spoke head 10 homolog B2 (Chlamydomonas)
  Uniprot ID: B2RC85
  ENST ID: ENST00000404077
  CDS Start-End: 272-2884
gggacgccgagagcccggcaacacctcagcccgagcccggcgaggtctctgggctcctggagcgagagaggtggcatctcactacgtggcctaggctgatctccctctcctggactcacatgatcctcccaccttggcccttcaacgtgctgagatcgcaggtgtgagccaccacacccggccctgataaaactcatcagtgctttgaaacaagcagctctgaaccaaagaaatcatttgattcaagtaaccattggatcttcccaaggcaatggtgaaagaaaagaaaaaagcagacaaaaaaggggagaagtctgcccgctctccctcatctctctctgataatctagacttttccaaacaagatggcaacaccactaggcaagagatgtccccagctggtgtcccattgctgggaatgcagctcaacgaagtgaaacccaaaaaagaccgccaaaacgttcagcagaacgaagatgccagccaatacgaagagtccattctgaccaaactcatagtggaaagctatgaaggggaaaaggttcgtgggctgtatgagggagaaggcttcgcagcctttcaaggcggttgtacctatcgtggtatgttttcagaaggactcatgcatggacaggggacttatatttgggccgatggattaaaatatgagggcgactttgtgaagaatgtcccgatgaaccacggcgtgtacacgtggccggacggcagcatgtatgaaggcgaagtggtcaacggcatgaggaacggattcgggatgttcaagtgcagcacccagcctgtgtcctacatcggccactggtgcaatggcaagcggcacgggaagggctccatttattacaatcaagagggtacgtgttggtacgagggagactgggtacaaaacatcaaaaagggctggggaataagatgttataaatctggaaatatatacgaaggccagtgggaagacaacatgcgccacggggaggggaggatgaggtggctgaccaccaacgaagagtacaccgggcggtgggagaggggcatccagaatggctttggaacacacacatggtttctaaagagaatccgcagttcccagtatcctttgagaaatgaatacataggggagtttgtaaatggatatcgtcacggacgtggcaagttttattatgccagtggagccatgtatgatggagaatgggtttccaataagaaacatggcatgggccgattaactttcaagaacgggcgtgtgtacgaaggcgcattctccaatgaccacatagctgggtttccggatcttgaagttgaattcatcagctgcctggacctgtcttcaggagttgccccaagactgtccaggagcgccgaactgatcagaaagcttgatggcagtgaaagtcattctgtgttgggatcgagcattgagctggatctaaatttgctcctggacatgtaccctgagacagtccaacctgaagaaaagaagcaggtggaatatgccgtcttaagaaatattacagaattaagaagaatttacagcttttacagcagcctgggatgcggccactctctggataatacctttctgatgacaaagcttcacttctggagatttctaaaagattgcaaatttcatcaccacaaactaactcttgctgatatggacaggatattaagtgccaataatgacataccagttgaagaaatccattctccatttacaacaatacttttgagaacatttttgaattacctcctgcatttggcgtaccacatttatcatgaagaattccaaaagagaagcccatccctcttcttgtgttttacaaaactgatgaccgagaacattcgtccaaatgcctgccagataaaaggcaatttattccgtgagcaacagcggacgctctactctatgagttacatgaataagtgctgggagatttatctcgcttactgcagacccagtgcagcgcctccccacgagcctacgatgaagatgagacacttcctctggatgctgaaagactttaaaatgataaataaagaattaacagcagctacatttatggaggtcatagcagaggataatcgtttcatatatgatggaattgacagcaactttgaacctgagctggttttcctggaattctttgaagctctcttaagctttgcattcatctgtgttactgaccaaatgactaaatcctatacaaatgttccagctgatgatgtgtctggaaataaacatgaaactatttatacaatactaaatcaggacgcccagaacaagagtcccagcgcggtcatgagccacgaatcggatgctgctcactctgacagtgccaggtcatcttccagcaagttagaactctcgcctgatgttaacaaaataaggaaatcagagcccaagatcaagaagtctgtaagtcatgaaagagtctccaaaatgaattttaaattgactggaaaagggatcacctttttctcatctgagagcaagaaatatgagagacccaaggatgatcgagaggaagagttcaacacgtgggtcaataatacgtacgtcttctttgtgaacacgctctttcatgcgtataaacgtgaagaagctatcaaggagaaaataagggcagacaggttacgtagcacagcacaggcccagcagcggaagatggaagatgacgaactggaagcaaggctgaacatctttatcttgagagaggaagaggccaagagacatgactatgaggtggacatcacagtgctcaaggagccggcagacgtgtcatcctctcacctcatactggaccctcccaaggaggatgtgaccgtgtccccatccagcaagaccatcaccagcaagaagaagaaaaagtagagagacacgaggacacacacacaggcttaggatggcacgtgctgtaagatttcctgagcattacagttcttagcactgaactcgtcacagtgttttaacataccccttggcccactgcatctcaggtttcctacatggctggattacgggagttcgagaccagcctgggcaacatagtgagacccccccatctctgcaaaattaaaacatcagccgaccgtg

SEQ ID NO: 173684 - DNA, 596 bp, Homo sapiens
  Payload ID: 14108
  Gene Symbol: RSPH10B2
  Gene Name: radial spoke head 10 homolog B2 (Chlamydomonas)
  ENST ID: ENST00000418406
  CDS Start-End: 420-596
gagagcccggcaacacctcagcccgagcccggcgaggtctctgggctcctggagcgaggtgagcgccccaggccgcggtcctgcctacgccgggacagccatggcgactgggtcctgctccttcccggccggactgacgcggcctcccaggacccgagcacatcactgacagaagaccgaaaagctcgtagtaaaggcccctctaaatttagagagaggtggcatctcactacgtggcctaggctgatctccctctcctggactcacatgatcctcccaccttggcccttcaacgtgctgagatcgcaggtgtgagccaccacacccggccctgataaaactcatcagtgctttgaaacaagcagctctgaaccaaagaaatcatttgattcaagtaaccattggatcttcccaaggcaatggtgaaagaaaagaaaaaagcagacaaaaaaggggagaagtctgcccgctctccctcatctctctctgataatctagacttttccaaacaagatggcaacaccactaggcaagagatgtccccagctggtgtcccattgctgggaatgcagctcaacgaagtgaaacccaaaaaa

SEQ ID NO: 173685 - DNA, 627 bp, Homo sapiens
  Payload ID: 14108
  Gene Symbol: RSPH10B2
  Gene Name: radial spoke head 10 homolog B2 (Chlamydomonas)
  ENST ID: ENST00000435395
  CDS Start-End: 599-627
gagagcccggcaacacctcagcccgagcccggcgaggtctctgggctcctggagcgaggtgagcgccccaggccgcggtcctgcctacgccgggacagccatggcgactgggtcctgctccttcccggccggactgacgcggcctcccaggacccgagcacgtgcgtgatgggcgaggagggcctaggccgggcagaccagtgcagggagccgattcttctcggctcaccgtagacacaggagagagatggcctctccttaagcccaggagaacagaggaaacattaggaaacgcactgagaaacgaaattggcttgatttgtagttcacttatttgtagatcactgacagaagaccgaaaagctcgtagtaaaggcccctctaaatttagagagaggtggcatctcactacgtggcctaggctgatctccctctcctggactcacatgatcctcccaccttggcccttcaacgtgctgagatcgcaggtgtgagccaccacacccggccctgataaaactcatcagtgctttgaaacaagcagctctgaaccaaagaaatcatttgattcaagtaaccattggatcttcccaaggcaatggtgaaagaaaagaaaaaagcagacaa

SEQ ID NO: 173686 - DNA, 2880 bp, Homo sapiens
  Payload ID: 14108
  Gene Symbol: RSPH10B2
  Gene Name: radial spoke head 10 homolog B2 (Chlamydomonas)
  ENST ID: ENST00000485920
  CDS Start-End: 1-972
ggctccatttattacaatcaagagggtacgtgttggtacgagggagactgggtacaaaacatcaaaaagggctggggaataagatgttataaatctggaaatatatacgaaggccagtgggaagacaacatgcgccacggggaggggaggatgaggtggctgaccaccaacgaagagtacaccgggcggtgggagaggggcatccagaatggctttggaacacacacatggtttctaaagagaatccgcagttcccagtatcctttgagaaatgaatacataggggagtttgtaaatggatatcgtcacggacgtggcaagttttattatgccagtggagccatgtatgatggagaatgggtttccaataagaaacatggcatgggccgattaactttcaagaacgggcgtgtgtacgaaggcgcattctccaatgaccacatagctgggtttccggatcttgaagttgaattcatcagctgcctggacctgtcttcaggagttgccccaagactgtccaggagcgccgaactgatcagaaagcttgatggcagtgaaagtcattctgtgttgggatcgagcattgagctggatctaaatttgctcctggacatgtaccctgagacagtccaacctgaagaaaagaagcaggtggaatatgccgtcttaagaaatattacagaattaagaagaatttacagcttttacagcagcctgggatgcggccactctctggataatacctttctgatgacaaagcttcacttctggagatttctaaaagattgcaaatttcatcaccacaaactaactcttgctgatatggacaggatattaagtgccaataatgacataccagttgaagaaatccattctccatttacaacaatacttttgagaacatttttgaattacctcctgcatttggcgtaccacatttatcatgaagaattccagcaatttattccgtgagcaacagcggacgctctactctatgagttacatgaataagtgctgggagatttatctcgcttactgcagacccagtgcagcgcctccccacgagcctacgatgaagatgagacacttcctctggatgctgaaagtaaccacctaagttcgatattggctttctatttacaggcactttgattttaattaaagaaaggcaggatattccagctgtgatatgcaaattatcaggactttaaaatgataaataaagaattaacagcagctacatttatggaggtcatagcagaggataatcgtttcatatatgatggaattgacagcaactttgaacctgagctggttttcctggaattctttgaagctctcttaagctttgcattcatctgtgttactgaccaaatgactaaatcctatacaaatgttccagctgatgatgtgtctggaaataaacatgaaactatttatacaatactaaatcaggacgcccagaacaagagtcccagcgcggtcatgagccacgaatcggatgctgctcactctgacagtgccaggtcatcttccagcaagttagaactctcgcctgatgttaacaaaataaggaaatcagagcccaagatcaagaagtctgtaagtcatgaaagagtctccaaaatgaattttaaattgactggaaaagggatcacctttttctcatctgagagcaagaaatatgagagacccaaggatgatcgagaggaagagttcaacacgtgggtcaataatacgtacgtcttctttgtgaacacgctctttcatgcgtataaacgtgaagaagctatcaaggagaaaataagggcagacaggttacgtagcacagcacaggcccagcagcggaagatggaagatgacgaactggaagcaaggctgaacatctttatcttgagagaggaagaggccaagagacatgactatgaggtggacatcacagtgctcaaggagccggcagacgtgtcatcctctcacctcatactggaccctcccaaggaggatgtgaccgtgtccccatccagcaagaccatcaccagcaagaagaagaaaaagtagagagacacgaggacacacacacaggcttaggatggcacgtgctgtaagatttcctgagcattacagttcttagcactgaactcgtcacagtgttttaacataccccttggcccactgcatctcaggtttcctacatggctggattacgggagttcgagaccagcctgggcaacatagtgagacccccccatctctgcaaaattaaaacatcagccgaccgtggtggtgtgtacatgtggttctagcttcttgggaggctgaggtgggaggattgcttgagctcaggaggttgaggctgcagtgagccattgcattccagcctgggtcacggagctggtggccagtgtaatctataaataggcagcaggagagagactcaacaccaaaccagaattttaaaaacttttaacaatttattagtcttattttccagtaaaatattcaaataatgtcaaaagaatgaaatgatagcgatatagccaactacctttaattaattccacataaatatttaaaatctaaaaacctcagatcagcagaccgagtcgaaatctgattcttcaaagcaagtattgctttacccttgtcctgaatgcagtccgtcatatgaccactaacttgcatgtgaccaaatgtttgcagagtgttttttagatatgctctcggtgagccgtcatccgtcaatccaagaagaagatgttgttgaactgcgttgcacaaagtttcttgacctcttctgcaacaaggacacaacagtgaggaaggaagaggcagtcacttaaaaggttacataatatataattaaattcttcttgggtaaaa

SEQ ID NO: 173687 - DNA, 1291 bp, Homo sapiens
  Payload ID: 14109
  Gene Symbol: RSPH14
  Gene Name: radial spoke head 14 homolog (Chlamydomonas)
  Uniprot ID: Q9UHP6
  ENST ID: ENST00000216036
  CDS Start-End: 198-1244
gtttgcgcctgcgcagtgggtgctgattatgtcgaccgcggcgccgcggacgctgctggagtcgcctggcaacgatgtcgcctggcaactgaataggttggccagtggcgcgggctactggaagcagaaagggctgcggaggcagtgagtggtttctgcagagcttcatttggaaaggcctctgtagttggggaaagatggcccattcccagaactccttggagcttcccattaacatcaatgccacccagattaccactgcctatggccatcgggccctgcccaagctgaaggaggagctgcagtcagaggacctccagacgaggcagaaagccctcatggccttgtgtgacctcatgcatgaccccgagtgtatctacaaggccatgaacataggctgtatggagaacctgaaagctttgctgaaggatagcaacagtatggtgcgcataaagaccaccgaggtgctccacatcacggcaagccatagcgtgggcagatacgcctttctagagcacgacatcgtccttgccctgtccttcctgctgaatgaccccagcccagtctgccgggggaacctgtacaaggcatacatgcagctggtccaggtgcctagaggggcccaagagatcatcagcaaaggtctgatttcctcactggtatggaagctgcaggtggaggtggaggaggaggagttccaggagttcatcctggacacactggtcctctgcctgcaggaggatgccaccgaggccctgggcagcaatgtggtgcttgtcctgaagcagaagctcctcagcgccaaccagaacatccgcagcaaggccgcccgtgcgctccttaatgtcagcatatctcgagagggcaagaaacaggtgtgtcattttgacgtcatccccatcctggtccatctgctgaaagacccagtggagcatgtgaagtctaacgctgccggtgccctgatgttcgccacagtgatcactgaagggaagtatgcggccctggaggcacaagccatcggcctgctcctggagctgctgcactcccccatgaccatagcgcgcctgaatgccaccaaggcccttaccatgctggcagaggcccccgagggccgcaaggccctgcagacgcacgtgcccactttccgtgccatggaggtggagacttacgaaaagcctcaagtggccgaagccttacagcgggcagcccggatcgccatcagtgtcatcgagttcaaaccctgagcccttcattcacctctgtgagtgaataaatgtgctaagtctcttta

SEQ ID NO: 173688 - DNA, 519 bp, Homo sapiens
  Payload ID: 14109
  Gene Symbol: RSPH14
  Gene Name: radial spoke head 14 homolog (Chlamydomonas)
  ENST ID: ENST00000406876
  CDS Start-End: 93-419
tgctgtctgaatatcatatgcctggcttctagagctcacgtgagtggtttctgcagagcttcatttggaaaggcctctgtagttggggaaagatggcccattcccagaactccttggagcttcccattaacatcaatgccacccagattaccactgcctatggccatcgggccctgcccaagctgaaggaggagctgcagtcagaggacctccagacgaggcagaaagccctcatggccttgtgtgacctcatgcatgaccccgagtgtatctacaaggccatgaacataggctgtatggagaacctgaaagctttgctgaaggatagcaacagtatggtgcgcataaagaccaccgaggtgctccacatcacggcaagccatagcgtgggcagaagtagtgacaggaagggggaatgaggatagcagccctgggcttggcatcttgtcaccttgaggagttaatttgcatgacatcccacggacaagagagcttcctggcagcctgttccctgccctc

SEQ ID NO: 173689 - DNA, 509 bp, Homo sapiens
  Payload ID: 14109
  Gene Symbol: RSPH14
  Gene Name: radial spoke head 14 homolog (Chlamydomonas)
  ENST ID: ENST00000452757
  CDS Start-End: 1-204
cagacgaggcagaaagccctcatggccttgtgtgacctcatgcatgaccccgagtgtatctacaaggccatgaacataggctgtatggagaacctgaaagctttgctgaaggatagcaacagtatggtgcgcataaagaccaccgaggtgctccacatcacggcaagccatagcgtgggcagtagtgacaggaagggggaatgaggatagcagccctgggcttggcatcttgtcaccttgaggagttaatttgcatgacatcccacggacaagagagcttcctggcagcctgttccctgccctcttgcttgcctctggtgaggaggcacacaggcaaacacaactgactatcaaagcatgagagacatggagtgggtgactagacacggaccaaggaagcccccgtggtcagggaagacccctgcaacttgtgtgtccaacggtgactttctttttccagacgattcaaaacacaccataagtgaaaataaataaataaataaaataaa

SEQ ID NO: 173690 - DNA, 695 bp, Homo sapiens
  Payload ID: 14109
  Gene Symbol: RSPH14
  Gene Name: radial spoke head 14 homolog (Chlamydomonas)
  ENST ID: ENST00000439064
  CDS Start-End: 1-202
gaaggatagcaacagtatggtgcgcataaagaccaccgaggtgctccacatcacggcaagccatagcgtgggcagatacgcctttctagagcacgacatcgtccttgccctgtccttcctgctgaatgaccccagcccagtctgccgggggaacctgtacaaggcatacatgcagctggtccaggtgcctagaggaacctgaggaataagcgagggtctagtcccctcattcttggagtgtggagacaggggacttgctgctctcaaccagtcctcttacaatgattgtgacctatttaaagcattcagagaagtacagagatggtgataaggaacattggataccaccagccagctttgccaaatctttacattctatatccatattttatacttgcttgaaatttttatttgaagaaatcataggtacagtccaagcaccctgtgaacctccccccacccagagcactcttcctcctgcctttccttgagctactaataatctggtgactatgtccccaaaatgcatatctttatattttaccacagatataattacatatggacgatatataatcttgttttgcatgttttaaaactatgtaagtggatcttgctgtatgtatccctctgttacttccaaaaccttaaaaaacctaaataacattagagatttatagaaattttgagatgaa

SEQ ID NO: 173691 - DNA, 323 bp, Homo sapiens
  Payload ID: 14109
  Gene Symbol: RSPH14
  Gene Name: radial spoke head 14 homolog (Chlamydomonas)
  ENST ID: ENST00000421213
  CDS Start-End: 1-222
cgggggaacctgtacaaggcatacatgcagctggtccaggtgcctagagcagaaaaccccaccattaacaagaggacactgcagaggcttatgtacaacacgtgtcccgcgaggctggcgcaggactgccactcactccaaaatttctttggagcagagagacagatcgtccagataacaacttttacactcagcaagccagacacaaaaaagaccacctgaaaaaaaatatgttttgaaaatctgcatttaaaaaagaatactcaactgcatttgaaattttctggatttttttctgcgaaacaccacgagatttggccaaa

SEQ ID NO: 173692 - DNA, 2825 bp, Homo sapiens
  Payload ID: 14110
  Gene Symbol: RSPH4A
  Gene Name: radial spoke head 4 homolog A (Chlamydomonas)
  Uniprot ID: Q5TD94
  ENST ID: ENST00000229554
  CDS Start-End: 138-2288
aggacgcagcaactcacagagcaaccaggacccagaaatcgcttaagagaccgcggcaaagtaacttaactgagttgccttcttccatattttcacgcccctttcatccagaacattttttttcttgaactgcttccatggaggactcaacctccccgaagcaagaaaaagaaaaccaagaagaactaggggaaacaaggcggccatgggaaggaaagacagcagcttctccccaatattctgagcctgagtcgtctgagcccttggaggcgaagcaggggccagaaactggacgccagtcccgaagcagccgtccttggagcccgcagtctagagccaagacgcctctgggtggccccgcgggaccagaaacatcatcacctgctcctgtctctccgcgggagccctcttcctctccttctcccctggctccggccagacaagacctcgcggcaccacctcagtcggacaggaccacgagtgtgattcctgaagctgggacaccttatcctgatcctttggaacaatcatctgataaaagagaatcaactcctcatcacacaagccagtcagaaggaaacacctttcaacagtctcagcaacccaaaccccacctgtgtggacgaagggacgtgagctataacaacgctaaacagaaagagctgagatttgacgtttttcaggaggaagactcaaacagtgactatgatttacagcagccggcgcctgggggctctgaagtggcccccagcatgcttgagatcaccattcagaatgctaaggcttacctgctgaagactagcagcaattcgggctttaatctatatgatcatctttctaatatgttgaccaagatattaaatgagcgtcctgaaaatgctgttgacatctttgaaaatattagccaagatgtgaagatggcacattttagtaaaaaatttgatgcactacaaaatgagaatgagttgcttccaacatatgaaatagcagaaaagcaaaaggctctttttctccagggacatttggaaggagttgaccaagaattggaagatgaaatagcagaaaacgctcttccaaatgtaatggagtcagctttttattttgaacaagctggagttggtttgggcacagatgagacataccgcatatttcttgccctcaagcagcttactgatacccacccaatccaaagatgccgcttctggggaaagatcttgggtctggaaatgaattatattgtagctgaagtggaatttcgtgagggggaagatgaagaggaagtggaagaggaagatgtagctgaagagagggacaatggagaaagtgaagctcatgaagatgaggaagatgaattaccaaagtccttttacaaggccccacaggctataccaaaagaagaaagtagaacaggtgccaacaaatatgtctattttgtttgcaatgaaccaggaagaccatgggtgaagttaccaccagttatacctgcacaaattgttattgcaagaaaaatcaagaaatttttcactgggcgattggatgctcccatcataagctacccacctttcccaggaaatgagagtaattatttacgagcacaaattgcccgaatttcagcaggaacccacgtcagtcctctaggattttatcagtttggtgaagaggaaggagaggaggaggaagaggcagaaggtgggcgaaatagctttgaggaaaaccctgattttgaaggcatccaagtgattgatctagtagaatccctatccaattgggttcatcatgtacagcatattctctctcagggtcgctgtaattggttcaactccatacaaaaaaatgaggaagaagaagaggaagaagatgaagaaaaagacgattctgactacatagaacaggaagtggggcttcctcttttgacaccaatctctgaagatttagagattcagaatatacccccctggacaacacggttatcctcaaatctcattccacaatatgctattgcagtccttcaatccaacctttggcctggagcatatgccttctccaatggcaaaaagtttgaaaatttctacataggctggggtcataagtatagtccagacaattatacacccccagttccaccaccagtttatcaagaataccccagtggaccagaaattacagaaatggatgatcctagtgtggaggaggagcaggctttcagggctgcacaagaagcagttctactcgcagctgagaatgaagaatctgaggaagatgaagatgaggaagatgattatgactaataaacataaaattagcctggttttatgtgacactgatacacacacaccccttatatgggactaattttacacttttctgtgttatgtgtgtatatacatacacatgtaagaaattattcaactgcaaaatctcaatcttgaaaatcaagcttgaaatttcataggtagaaatattagcatttttattgaaagatactcacaggattttccagaggctaaataacatgcaattgcataattgttctgagggttatggataatggaatatgtgtttgtacattcctgtttttaaaagggctcaggtttcacatggtccaggtgaggtaaaacaattaaaataaataaataaatggtctcaggtttaatttgtaatacgacaaacactggaagatataacccacaggaaattcttggaaacatcaatactttttaaagagtgtcaaggggtatgaagacaaaaaatattgatagtcactagagtaatgtattcttaacctttgtaagaactgatctcagcatgtattcttaaacctttgt

SEQ ID NO: 173693 - DNA, 1410 bp, Homo sapiens
  Payload ID: 14110
  Gene Symbol: RSPH4A
  Gene Name: radial spoke head 4 homolog A (Chlamydomonas)
  Uniprot ID: Q5TD94
  ENST ID: ENST00000368580
  CDS Start-End: 1-1410
atggaggactcaacctccccgaagcaagaaaaagaaaaccaagaagaactaggggaaacaaggcggccatgggaaggaaagacagcagcttctccccaatattctgagcctgagtcgtctgagcccttggaggcgaagcaggggccagaaactggacgccagtcccgaagcagccgtccttggagcccgcagtctagagccaagacgcctctgggtggccccgcgggaccagaaacatcatcacctgctcctgtctctccgcgggagccctcttcctctccttctcccctggctccggccagacaagacctcgcggcaccacctcagtcggacaggaccacgagtgtgattcctgaagctgggacaccttatcctgatcctttggaacaatcatctgataaaagagaatcaactcctcatcacacaagccagtcagaaggaaacacctttcaacagtctcagcaacccaaaccccacctgtgtggacgaagggacgtgagctataacaacgctaaacagaaagagctgagatttgacgtttttcaggaggaagactcaaacagtgactatgatttacagcagccggcgcctgggggctctgaagtggcccccagcatgcttgagatcaccattcagaatgctaaggcttacctgctgaagactagcagcaattcgggctttaatctatatgatcatctttctaatatgttgaccaagatattaaatgagcgtcctgaaaatgctgttgacatctttgaaaatattagccaagatgtgaagatggcacattttagtaaaaaatttgatgcactacaaaatgagaatgagttgcttccaacatatgaaatagcagaaaagcaaaaggctctttttctccagggacatttggaaggagttgaccaagaattggaagatgaaataggtcgctgtaattggttcaactccatacaaaaaaatgaggaagaagaagaggaagaagatgaagaaaaagacgattctgactacatagaacaggaagtggggcttcctcttttgacaccaatctctgaagatttagagattcagaatatacccccctggacaacacggttatcctcaaatctcattccacaatatgctattgcagtccttcaatccaacctttggcctggagcatatgccttctccaatggcaaaaagtttgaaaatttctacataggctggggtcataagtatagtccagacaattatacacccccagttccaccaccagtttatcaagaataccccagtggaccagaaattacagaaatggatgatcctagtgtggaggaggagcaggctttcagggctgcacaagaagcagttctactcgcagctgagaatgaagaatctgaggaagatgaagatgaggaagatgattatgactaa

SEQ ID NO: 173694 - DNA, 2704 bp, Homo sapiens
  Payload ID: 14110
  Gene Symbol: RSPH4A
  Gene Name: radial spoke head 4 homolog A (Chlamydomonas)
  Uniprot ID: Q5TD94
  ENST ID: ENST00000368581
  CDS Start-End: 146-1948
atggagataggacgcagcaactcacagagcaaccaggacccagaaatcgcttaagagaccgcggcaaagtaacttaactgagttgccttcttccatattttcacgcccctttcatccagaacattttttttcttgaactgcttccatggaggactcaacctccccgaagcaagaaaaagaaaaccaagaagaactaggggaaacaaggcggccatgggaaggaaagacagcagcttctccccaatattctgagcctgagtcgtctgagcccttggaggcgaagcaggggccagaaactggacgccagtcccgaagcagccgtccttggagcccgcagtctagagccaagacgcctctgggtggccccgcgggaccagaaacatcatcacctgctcctgtctctccgcgggagccctcttcctctccttctcccctggctccggccagacaagacctcgcggcaccacctcagtcggacaggaccacgagtgtgattcctgaagctgggacaccttatcctgatcctttggaacaatcatctgataaaagagaatcaactcctcatcacacaagccagtcagaaggaaacacctttcaacagtctcagcaacccaaaccccacctgtgtggacgaagggacgtgagctataacaacgctaaacagaaagagctgagatttgacgtttttcaggaggaagactcaaacagtgactatgatttacagcagccggcgcctgggggctctgaagtggcccccagcatgcttgagatcaccattcagaatgctaaggcttacctgctgaagactagcagcaattcgggctttaatctatatgatcatctttctaatatgttgaccaagatattaaatgagcgtcctgaaaatgctgttgacatctttgaaaatattagccaagatgtgaagatggcacattttagtaaaaaatttgatgcactacaaaatgagaatgagttgcttccaacatatgaaatagcagaaaagcaaaaggctctttttctccagggacatttggaaggagttgaccaagaattggaagatgaaatagcagaaaacgctcttccaaatgtaatggagtcagctttttattttgaacaagctggagttggtttgggcacagatgagacataccgcatatttcttgccctcaagcagcttactgatacccacccaatccaaagatgccgcttctggggaaagatcttgggtctggaaatgaattatattgtagctgaagtggaatttcgtgagggggaagatgaagaggaagtggaagaggaagatgtagctgaagagagggacaatggagaaagtgaagctcatgaagatgaggaagatgaattaccaaagtccttttacaaggccccacaggctataccaaaagaagaaagtagaacaggtgccaacaaatatgtctattttgtttgcaatgaaccaggaagaccatgggtgaagttaccaccagttatacctgcacaaattgttattgcaagaaaaatcaagaaatttttcactgggcgattggatgctcccatcataagctacccacctttcccaggaaatgagagtaattatttacgagcacaaattgcccgaatttcagcaggaacccacgtcagtcctctaggattttatcagtttggtgaagaggaaggagaggaggaggaagaggcagaaggtgggcgaaatagctttgaggaaaaccctgattttgaaggcatccaagtgattgatctagtagaatccctatccaattgggttcatcatgtacagcatattctctctcagagattcagaatatacccccctggacaacacggttatcctcaaatctcattccacaatatgctattgcagtccttcaatccaacctttggcctggagcatatgccttctccaatggcaaaaagtttgaaaatttctacataggctggggtcataagtatagtccagacaattatacacccccagttccaccaccagtttatcaagaataccccagtggaccagaaattacagaaatggatgatcctagtgtggaggaggagcaggctttcagggctgcacaagaagcagttctactcgcagctgagaatgaagaatctgaggaagatgaagatgaggaagatgattatgactaataaacataaaattagcctggttttatgtgacactgatacacacacaccccttatatgggactaattttacacttttctgtgttatgtgtgtatatacatacacatgtaagaaattattcaactgcaaaatctcaatcttgaaaatcaagcttgaaatttcataggtagaaatattagcatttttattgaaagatactcacaggattttccagaggctaaataacatgcaattgcataattgttctgagggttatggataatggaatatgtgtttgtacattcctgtttttaaaagggctcaggtttcacatggtccaggtgaggtaaaacaattaaaataaataaataaatggtctcaggtttaatttgtaatacgacaaacactggaagatataacccacaggaaattcttggaaacatcaatactttttaaagagtgtcaaggggtatgaagacaaaaaatattgatagtcactagagtaatgtattcttaacctttgtaagaactgatctcagcatgtattcttaaacctttgtaattacc

SEQ ID NO: 173695 - DNA, 2456 bp, Homo sapiens
  Payload ID: 14111
  Gene Symbol: RSPH6A
  Gene Name: radial spoke head 6 homolog A (Chlamydomonas)
  Uniprot ID: Q9H0K4
  ENST ID: ENST00000221538
  CDS Start-End: 144-2297
caccctggcccgctccccgcgccctccacgggtaacggccccctctctcggtgctcagaaaccggcggtgtcgacaggtggctctcgcttggcctccttgtctgcaagcctttctcctagagatctgtgcctcctggcgaaccatgggagacctgccgccctaccctgagcgccctgcccagcagcctccgggccggaggacttctcaggcctcccagaggcggcacagtcgggaccaagctcaggccctggcagcggaccccgaggagaggcagcagatacctccagacgcccagcgaaacgcccctggttggtcacagaggggcagcctgtcccaacaggagaacttgctgatgccccaggtcttccaggctgaggaagcccggctgggtggcatggagtacccatctgtgaacacgggctttccctcagagttccagcctcagccttactctgatgaaagcaggatgcaggtcgccgagctcaccaccagcctaatgctgcagcggctccagcagggccaaagcagcctgttccagcaactggaccccaccttccaggagcccccagtcaaccccttgggccagttcaacctctaccagacagaccagttctctgaaggtgcccagcacgggccttacataagggatgaccctgcccttcagttcttgccctctgagctgggcttcccacactacagtgcccaggtgcctgagcccgagcctctggagctggccgtgcagaacgccaaggcctacctgctgcagaccagcatcaattgcgacctcagcctgtacgagcacctggtgaatctgctgaccaagatcctgaaccagcggcctgaggaccccttgtctgtcctggagtctctgaaccgcaccacgcagtgggagtggttccaccccaagctggacacgctgcgggacgaccccgagatgcagcccacctacaagatggcggagaaacagaaggcgctgttcacccggagtggaggcggcactgaaggcgaacaggagatggaggaggaggtgggggagacaccagtgcccaacatcatggagactgccttctacttcgagcaggccggcgtcggcctgagctcggacgagagcttccgcattttcctggccatgaaacagctggtggagcagcagcccatccacacctgtcgcttctggggcaagatcctgggaatcaaacgcagctacctggtggccgaggtggaattccgggagggcgaggaggaggcagaggaggaggaggtggaggagatgacggaaggtggcgaggtcatggaggcgcacggcgaggaggagggcgaggaggacgaggagaaggccgtggacatcgtccctaagtccgtatggaagccgccgcccgtgatccccaaggaggagagccgctcaggcgccaacaagtacctgtactttgtgtgcaacgagccgggcctgccatggacgcggctgccccacgtcactccagcccagatcgtgaacgcccgaaagatcaagaagttcttcacaggctacctggacacgccagtcgtcagctacccacccttcccgggcaacgaggccaactacctgcgggcccagatagcccgcatctcggccgccacgcaggtcagcccgctgggcttctaccagtttagtgaggaggagggcgacgaggaggaggaaggtggtgctgggcgcgactcctacgaggagaacccggacttcgagggcatccccgtgctggagctggtcgactccatggccaactgggtgcatcacacacagcacatcctgccgcagggccgctgcacttgggtgaaccctttgcagaagacagaggaggaggaggacctgggggaggaggaagagaaggcagatgaggggccagaggaggtggagcaggaggttggccccccactgctaacgccactttcagaagatgcagaaatcatgcacctggcaccctggaccacccgcctgtcctgcagcctctgcccgcagtactcagtggccgttgtgcgctccaacctctggcccggggcctatgcctatgccagtggcaaaaagtttgagaacatctacatcggctggggtcacaagtacagccccgagagcttcaacccggccctgccagcccccattcaacaagagtaccccagtggcccagagatcatggagatgagtgaccccacagtggaagaggagcaggctctgaaagcagcccaggaacaagccctgggagccacagaggaggaggaggagggcgaggaggaggaggagggcgaggagacagatgactgaggcccaccctctagccactttccccaagcaggtagatagcaaatttccccttagaggtagttagcatggattatattttcactatgtgcttcctgtccccagagggcagggatagaaaaggaaggcaactgcttcaaataaaattcctccacggcatta

SEQ ID NO: 173696 - DNA, 1751 bp, Homo sapiens
  Payload ID: 14111
  Gene Symbol: RSPH6A
  Gene Name: radial spoke head 6 homolog A (Chlamydomonas)
  ENST ID: ENST00000600188
  CDS Start-End: 234-1595
agcaccaggcacagggccaggcacatgggagccagctcagtgagctgagtgagtgaggtccctctcctcccactcctcctgcgggaggcaggtacgagcacctggtgaatctgctgaccaagatcctgaaccagcggcctgaggaccccttgtctgtcctggagtctctgaaccgcaccacgcagtgggagtggttccaccccaagctggacacgctgcgggacgaccccgagatgcagcccacctacaagatggcggagaaacagaaggcgctgttcacccggagtggaggcggcactgaaggcgaacaggagatggaggaggaggtgggggagacaccagtgcccaacatcatggagactgccttctacttcgagcaggccggcgtcggcctgagctcggacgagagcttccgcattttcctggccatgaaacagctggtggagcagcagcccatccacacctgtcgcttctggggcaagatcctgggaatcaaacgcagctacctggtggccgaggtggaattccgggagggcgaggaggaggcagaggaggaggaggtggaggagatgacggaaggtggcgaggtcatggaggcgcacggcgaggaggagggcgaggaggacgaggagaaggccgtggacatcgtccctaagtccgtatggaagccgccgcccgtgatccccaaggaggagagccgctcaggcgccaacaagtacctgtactttgtgtgcaacgagccgggcctgccatggacgcggctgccccacgtcactccagcccagatcgtgaacgcccgaaagatcaagaagttcttcacaggctacctggacacgccagtcgtcagctacccacccttcccgggcaacgaggccaactacctgcgggcccagatagcccgcatctcggccgccacgcaggtcagcccgctgggcttctaccagtttagtgaggaggagggcgacgaggaggaggaaggtggtgctgggcgcgactcctacgaggagaacccggacttcgagggcatccccgtgctggagctggtcgactccatggccaactgggtgcatcacacacagcacatcctgccgcagggccgctgcacttgggtgaaccctttgcagaagacagaggaggaggaggacctgggggaggaggaagagaaggcagatgaggggccagaggaggtggagcaggaggttggccccccactgctaacgccactttcagaagatgcagaaatcatgcacctggcaccctggaccacccgcctgtcctgcagcctctgcccgcagtactcagtggccgttgtgcgctccaacctctggcccggggcctatgcctatgccagtggcaaaaagtttgagaacatctacatcggctggggtcacaagtacagccccgagagcttcaacccggccctgccagcccccattcaacaagagtaccccagtggcccagagatcatggagatgagtgaccccacagtggaagaggagcaggctctgaaagcagcccaggaacaagccctgggagccacagaggaggaggaggagggcgaggaggaggaggagggcgaggagacagatgactgaggcccaccctctagccactttccccaagcaggtagatagcaaatttccccttagaggtagttagcatggattatattttcactatgtgcttcctgtccccagagggcagggatagaaaaggaaggcaactgcttcaaataaaattcctccacggca

SEQ ID NO: 173697 - DNA, 2306 bp, Homo sapiens
  Payload ID: 14111
  Gene Symbol: RSPH6A
  Gene Name: radial spoke head 6 homolog A (Chlamydomonas)
  ENST ID: ENST00000597055
  CDS Start-End: 53-2083
gcctccttgtctgcaagcctttctcctagagatctgtgcctcctggcgaaccatgggagacctgccgccctaccctgagcgccctgcccagcagcctccgggccggaggacttctcaggcctcccagaggcggcacagtcgggaccaagctcaggccctggcagcggaccccgaggagaggcagcagatacctccagacgcccagcgaaacgcccctggttggtcacagaggggcagcctgtcccaacaggagaacttgctgatgccccaggtcttccaggctgaggaagcccggctgggtggcatggagtacccatctgtgaacacgggctttccctcagagttccagcctcagccttactctgatgaaagcaggatgcaggtcgccgagctcaccaccagcctaatgctgcagcggctccagcagggccaaagcagcctgttccagcaactggaccccaccttccaggagcccccagtcaaccccttgggccagttcaacctctaccagacagaccagttctctgaaggtgcccagcacgggccttacataagggatgaccctgcccttcagttcttgccctctgagctgggcttcccacactacagtgcccaggtgcctgagcccgagcctctggagctggccgtgcagaacgccaaggcctacctgctgcagaccagcatcaattgcgacctcagcctgtacgagcacctggtgaatctgctgaccaagatcctgaaccagcggcctgaggaccccttgtctgtcctggagtctctgaaccgcaccacgcagtgggagtggttccaccccaagctggacacgctgcgggacgaccccgagatgcagcccacctacaagatggcggagaaacagaaggcgctgttcacccggagtggaggcggcactgaaggcgaacaggagatggaggaggaggtgggggagacaccagtgcccaacatcatggagactgccttctacttcgagcaggccggcgtcggcctgagctcggacgagagcttccgcattttcctggccatgaaacagctggtggagcagcagcccatccacacctgtcgcttctggggcaagatcctgggaatcaaacgcagctacctggtggccgaggtggaattccgggagggcgaggaggaggcagaggaggaggaggtggaggagatgacggaaggtggcgaggtcatggaggcgcacggcgaggaggagggcgaggaggacgaggagaaggccgtggacatcgtccctaagtccgtatggaagccgccgcccgtgatccccaaggaggagagccgctcaggcgccaacaagtacctgtactttgtgtgcaacgagccgggcctgccatggacgcggctgccccacgtcactccagcccagatcgtgaacgcccgaaagatcaagaagttcttcacaggctacctggacacgccagtcgtcagctacccacccttcccgggcaacgaggccaactacctgcgggcccagatagcccgcatctcggccgccacgcaggtcagcccgctgggcttctaccagtttagtgaggaggagggcgacgaggaggaggaaggtggtgctgggcgcgactcctacgaggagaacccggacttcgagggcatccccgtgctggagctggtcgactccatggccaactgggtgcatcacacacagcacatcctgccgcagggccgctgcacttgggtgaaccctttgcagaagacagaggaggaggaggacctgggggaggaggaagagaaggcagatgaggggccagaggaggtggagcaggaggttggccccccactgctaacgccactttcagaagatgcagaaatcatgcacctggcaccctggaccacccgcctgtcctgcagcctctgcccgcagtactcagtggccgttgtgcgctccaacctctggcccggggcctatgcctatgccagtggcaatttgagaacatctacatcggctggggtcacaagtacagccccgagagcttcaacccggccctgccagcccccattcaacaagagtaccccagtggcccagagatcatggagatgagtgaccccacagtggaagaggagcaggctctgaaagcagcccaggaacaagccctgggagccacagaggaggaggaggagggcgaggaggaggaggagggcgaggagacagatgactgaggcccaccctctagccactttccccaagcaggtagatagcaaatttccccttagaggtagttagcatggattatattttcactatgtgcttcctgtccccagag

SEQ ID NO: 173698 - DNA, 2534 bp, Homo sapiens
  Payload ID: 14112
  Gene Symbol: RSPH9
  Gene Name: radial spoke head 9 homolog (Chlamydomonas)
  Uniprot ID: Q9H1X1
  ENST ID: ENST00000372163
  CDS Start-End: 54-884
ggaggcggcttctcctagcaactcgacgggcgttgagcggagccgctgacctgatggacgccgacagcctcctgctgtctctggagctggcgtccggcagtgggcagggcctcagcccggaccgtcgggcctcgctgctcacgtctcttatgctggttaagcgcgactaccgctatgatcgggttctcttctggggccgcatccttggcctcgtcgccgattactacatcgcgcagggcctgagtgaggaccagctcgcaccgcgcaagacgctctatagcctgaactgcacagagtggagcctcttgccccctgccacagaggagatggtggcgcagtcgtctgtggtgaagggccgcttcatgggggacccatcatacgaatatgaacacactgagctgcagaaggtgaatgaaggtgaaaaagtctttgaagaagaaatagtggtccagatcaaggaagagacccgcttggtgtctgtcattgaccagattgacaaggctgtggccatcatcccccgaggcgccctcttcaagaccccttttggacccacccatgtcaatcggacctttgaaggactgtccttgtctgaggccaagaagctcagctcctacttccatttcagggagcctgttgagctaaagaataagaccttgcttgagaaggctgacctggacccctccctggatttcatggactccttggagcatgacattcccaaagggtcctggagcatccagatggagaggggcaatgccctggtggtgctgcgcagcctgctctggccgggcctcaccttctaccatgctccccgcaccaagaactatggctacgtctacgtgggcactggcgagaagaacatggacttgcccttcatgctatagaatgggagccagcctggatgtttttaaacagagtctaaacatgattttcttaagcttcagtgaacttggcctgcctgttctgtcctatcttcttaactccacctccgtctggttccagattctgaaaggcccactgagccagggagctcatttctaaaccaagtggcagaggggttggaatgtgctaatgaaagagattctagacaacgatgggtggaaatggctgtgggagaaggtgacaaccagggcccctttgaggaacgcagtttcttggattcacacgagagcggcaagtgtgtcaggcagcccaccttggctccctgcagctctcccacagtaaggagctcacagctgtcatgaagaggatgggacctgtttggcccatgaattcaattgactcattggccccatcacaagagatcagtgactcaatgctcagcacccagctggcaatgtgcccaggaccccctgcacttcccaagcagtgagcgcacacccaatgggtaagcccatgaacccagtttatgacactgcgttgggcaaaactcctgtccccagcactgagcatggcctaagccccatagcagctggcaagggacccaactgccctgcctgcctctagctcccagcattgctactgtgcaggccaagggtactgaagttagtcccactgtcccctgtccatgcatgttggagggaccaggccatcgtggtggggtgggacaggagtatagttgtggccaagggcttgtgagtgggcctcctactccccagcacaggtgcaggaggaactctggaagcactgctctctgtcagtgatacagcttccaaggtgttcttgagtagcagacattgtccctcagaaggggtgaccccacgggcatgcgcaccctgttccagcgggggccttttttgtagatgggcttgacggagccaggagcccagcgcgtcaggtacctgtggagggagaacaaagaggtgcctgtgagggctgggggcccaagctggacgtgggagagtggagcactacctcctcaggccaggccacggttgggcaagcaaatcctttcaccagtttccctttcctgaagtgcagggattttcctgggagtaactgctgagcgtcctgtaaacagatgggctgggctcttgctgccgcaagcctgtgtggccaggttcaggcagcccagggccacaagctcccttgatctttgtaaatgtcaatgttggtgtgtgtttgctgaggaaaaggtggcgaagaggctgcctgaagagcagatcattcctctctggcctcagccatggggcgagaagagctgatgtaaggctctggaggaacccattgctcttccccatttggctcactcagctaccccaaccttcagggaactccccagggtactataactggtataagacccctgcccctcacccaacctgtgatgggaatcaaggggtaagggcccgtgggcgcagccctagcctaggaaggttcctgtaaataggaggggggtggggaaagatggctgccgcccatggacctttggcctcctttggggatggccagggccctgatagttcccagaaaagtggctcatgccggctaggattgggttttactctgtccagaataaaacttggatcctgtcc

SEQ ID NO: 173699 - DNA, 2586 bp, Homo sapiens
  Payload ID: 14112
  Gene Symbol: RSPH9
  Gene Name: radial spoke head 9 homolog (Chlamydomonas)
  Uniprot ID: Q9H1X1
  ENST ID: ENST00000372165
  CDS Start-End: 54-974
ggaggcggcttctcctagcaactcgacgggcgttgagcggagccgctgacctgatggacgccgacagcctcctgctgtctctggagctggcgtccggcagtgggcagggcctcagcccggaccgtcgggcctcgctgctcacgtctcttatgctggttaagcgcgactaccgctatgatcgggttctcttctggggccgcatccttggcctcgtcgccgattactacatcgcgcagggcctgagtgaggaccagctcgcaccgcgcaagacgctctatagcctgaactgcacagagtggagcctcttgccccctgccacagaggagatggtggcgcagtcgtctgtggtgaagggccgcttcatgggggacccatcatacgaatatgaacacactgagctgcagaaggtgaatgaaggtgaaaaagtctttgaagaagaaatagtgattgacaaggctgtggccatcatcccccgaggcgccctcttcaagaccccttttggacccacccatgtcaatcggacctttgaaggactgtccttgtctgaggccaagaagctcagctcctacttccatttcagggagcctgttgagctaaagaataagaccttgcttgagaaggctgacctggacccctccctggatttcatggactccttggagcatgacattcccaaagggtctgaggcagttgttcagggtgacttcacgtggcttctgagcaggtgtggttttggttggccctgttcctgggactcctgctctgtgtccatgagggtcctggagcatccagatggagaggggcaatgccctggtggtgctgcgcagcctgctctggccgggcctcaccttctaccatgctccccgcaccaagaactatggctacgtctacgtgggcactggcgagaagaacatggacttgcccttcatgctatagaatgggagccagcctggatgtttttaaacagagtctaaacatgattttcttaagcttcagtgaacttggcctgcctgttctgtcctatcttcttaactccacctccgtctggttccagattctgaaaggcccactgagccagggagctcatttctaaaccaagtggcagaggggttggaatgtgctaatgaaagagattctagacaacgatgggtggaaatggctgtgggagaaggtgacaaccagggcccctttgaggaacgcagtttcttggattcacacgagagcggcaagtgtgtcaggcagcccaccttggctccctgcagctctcccacagtaaggagctcacagctgtcatgaagaggatgggacctgtttggcccatgaattcaattgactcattggccccatcacaagagatcagtgactcaatgctcagcacccagctggcaatgtgcccaggaccccctgcacttcccaagcagtgagcgcacacccaatgggtaagcccatgaacccagtttatgacactgcgttgggcaaaactcctgtccccagcactgagcatggcctaagccccatagcagctggcaagggacccaactgccctgcctgcctctagctcccagcattgctactgtgcaggccaagggtactgaagttagtcccactgtcccctgtccatgcatgttggagggaccaggccatcgtggtggggtgggacaggagtatagttgtggccaagggcttgtgagtgggcctcctactccccagcacaggtgcaggaggaactctggaagcactgctctctgtcagtgatacagcttccaaggtgttcttgagtagcagacattgtccctcagaaggggtgaccccacgggcatgcgcaccctgttccagcgggggccttttttgtagatgggcttgacggagccaggagcccagcgcgtcaggtacctgtggagggagaacaaagaggtgcctgtgagggctgggggcccaagctggacgtgggagagtggagcactacctcctcaggccaggccacggttgggcaagcaaatcctttcaccagtttccctttcctgaagtgcagggattttcctgggagtaactgctgagcgtcctgtaaacagatgggctgggctcttgctgccgcaagcctgtgtggccaggttcaggcagcccagggccacaagctcccttgatctttgtaaatgtcaatgttggtgtgtgtttgctgaggaaaaggtggcgaagaggctgcctgaagagcagatcattcctctctggcctcagccatggggcgagaagagctgatgtaaggctctggaggaacccattgctcttccccatttggctcactcagctaccccaaccttcagggaactccccagggtactataactggtataagacccctgcccctcacccaacctgtgatgggaatcaaggggtaagggcccgtgggcgcagccctagcctaggaaggttcctgtaaataggaggggggtggggaaagatggctgccgcccatggacctttggcctcctttggggatggccagggccctgatagttcccagaaaagtggctcatgccggctaggattgggttttactctgtccagaataaaacttggatcctgtcc

SEQ ID NO: 173700 - DNA, 2528 bp, Homo sapiens
  Payload ID: 14113
  Gene Symbol: RSAD1
  Gene Name: radical S-adenosyl methionine domain containing 1
  Uniprot ID: Q9HA92
  ENST ID: ENST00000258955
  CDS Start-End: 86-1414
ctcttccttccgccggctgcgcactcacagtgatccctgcgcgcgtctcctgctcgggtcagtgcgccgcgctgcgctgggcgccatggcgctccccggagcccgggctcgcggctgggcggcagcagccagagcggcccagaggcgccgccgcgtggagaacgcaggagggtccccgagtcctgagcctgcgggccggcgcgcggcgctttacgtacactggccttactgcgagaagcgctgcagttactgcaacttcaacaagtacatccctcgccgcctggaggaggctgccatgcagaagtgtctggtgaccgaagctcagacgctgctgcggctcagcggggtgcaacgggtggagtctgtgttctttggtggggggacccccagtctagccagtccccacacggtggctgctgtcctggaggctgtggcacaggcagcccacctgcctgcagacttggaagtcacattggaggctaatcctacttcagctccgggctccagactggcagagttcggggcagcaggggttaacaggttgtctataggcctccagtccctagatgacactgagctccggctgttgggacggacgcactcggcctgcgatgctctgcggacgctggcagaggcccggcgcctctttcccgggcgcgtgtctgtagacttgatgctggggctgccggcacagcaggtggggccgtggcttgggcagctgcaggaactgctgcaccactgtgatgaccacctctccctctaccagctgtccctggagcggggcaccgcactcttcgcccaggtgcagcggggtgcccttccagcccctgacccggagctcgcagctgagatgtaccagaggggccgggctgtccttcgggaggctggcttccaccagtatgaggtctccaactttgcccggaatggggcgctcagtacccacaattggacttactggcagtgtggtcagtaccttggcgttgggcctggggcccatggacgatttatgccccagggggctggaggccacacccgggaggctcggatccagacactggagcctgacaactggatgaaggaggtgatgctgtttggccatggcacccggaagcgtgtccccctgggcaggctggagctgctggaggaagttttggccctggggctacgcaccgatgtggggatcactcaccagcactggcagcagtttgagccccagctgaccctgtgggatgtgtttggagcgaacaaggaggtgcaggagctgctggagcggggcctactgcagctggatcacaggggtcttcggtgttcctgggagggtctggctgtgctggactctctcttgctgaccctcctgcctcagctccaagaagcctggcagcagagaaccccctcccctgtgccaggaggatgacaaaaatgttcctgtgttccagggtaatgccaggtgggttttgagagctgggtcggtactgcagacatctcttctccgttgtcgggtgccgtctctgctccttgtggttattgctcagccctggcatccccaggggaatggcagcagtgaggtagatgggaggacatttctggtcagggaactggcatcccattcagcatctcaggactcacaggccaacatgtgttccatggctgggaattgcctaccacccacatcagcttctgtttacctttttggcatcaaataatgaacagtgtttggaaatctttctacaggcaattacctccccaagagaagccttccttattttggagtaaggtcctaagatagctggatgaatcaggaaaaccatgtcccctctaggtattattaatataagcaggaagggatctactataggaatgaagtatttataaaccactgaaagggatagagaagtgaacattggagaaagccagtagcaactgtgagaaatcagcaacttgcaggaggcacagaaaactcctgctgatggtctcagcttccagcagcacaaaagcagatgatgtactggaaaatgctcagaagatgctacaaaacctcatgcctactgtctgccactgctggagaaggaatcatggtttctagaagtgcctctcattagtggactttaaagcaaatcctggctggcaggaaattctgaggaatatagctcttaggcttccagcctctaccatgcaggagagaacacagaaggactgatgtatgttggtggatccatgtatgtgtccagcacagcggcctgctggactctgagaactgggaaagatcagagcaagccttgcctcttatcttcgggaaaccagaatatgtttggggtggtaggagccacacagactcttctgagccccctcactcacttccttccccctgtgcctttcctttgagagtgaaggtgggtggagttgaccagagaaaggggagagaattcgggaaagacccaaagtgtttgtaattcttctttgtccttttacctacagaaatggtcacatggttctatttaaatagcctaataaacacatctggagcctgt

SEQ ID NO: 173701 - DNA, 930 bp, Homo sapiens
  Payload ID: 14113
  Gene Symbol: RSAD1
  Gene Name: radical S-adenosyl methionine domain containing 1
  ENST ID: ENST00000506211
  CDS Start-End: 1-588
gatgacactgagctccggctgttgggacggacgcactcggcctgcgatgctctgcggacgctggcagaggcccggcgcctctttcccgggcgcgtgtctgtagacttgatgctggggctgccggcacagcaggtggggccgtggcttgggcagctgcaggaactgctgcaccactgtgatgaccacctctccctctaccagctgtccctggagcggggcaccgcactcttcgcccaggtgcagcggggtgcccttccagcccctgacccggagctcgcagctgagatgtaccagaggggccgggctgtccttcgggaggctggcttccaccagtatgaggtctccaactttgcccggaatggggcgctcagtacccacaattggacttactggcagtgtggtcagtaccttggcgttgggcctggggcccatggacgatttatgccccagggggctggaggccacacccgggaggctcggatccagacactggagcctgacaactggatgaaggaggctggaggaagttttggccctggggctacgcaccgatgtggggatcactcaccagcactggcagcagtttgagccccagctgaccctgtgggatgtgtttggagcgaacaaggaggtgcaggagctgctggagcggggcctactgcagctggatcacaggggtcttcggtgttcctgggagggtctggctgtgctggactctctcttgctgaccctcctgcctcagctccaagaagcctggcagcagagaaccccctcccctgtgccaggaggatgacaaaaatgttcctgtgttccagggtaatgccaggtgggttttgagagctgggtcggtactgcagacatctcttctccgttgtcgggtgccgtctctgctccttgtggttattgctcagccctggcatccccagggga

SEQ ID NO: 173702 - DNA, 1029 bp, Homo sapiens
  Payload ID: 14113
  Gene Symbol: RSAD1
  Gene Name: radical S-adenosyl methionine domain containing 1
  Uniprot ID: Q9HA92
  ENST ID: ENST00000515221
  CDS Start-End: 26-613
agtgcgccgcgctgcgctgggcgccatggcgctccccggagcccgggctcgcggctgggcggcagcagccagagcggcccagaggcgccgccgcgtggagaacgcaggagggtccccgagtcctgagcctgcgggccggcgcgcggcgctttacgtacactccctagatgacactgagctccggctgttgggacggacgcactcggcctgcgatgctctgcggacgctggcagaggcccggcgcctctttcccgggcgcgtgtctgtagacttgatgctggggctgccggcacagcaggtggggccgtggcttgggcagctgcaggaactgctgcaccactgtgatgaccacctctccctctaccagctgtccctggagcggggcaccgcactcttcgcccaggtgcagcggggtgcccttccagcccctgacccggagctcgcagctgagatgtaccagaggggccgggctgtccttcgggaggctggcttccaccagtatgaggtctccaactttgcccggaatgggcccatggacgatttatgccccagggggctggaggccacacccgggaggctcggatccagacactggagcctgacaactggatgaaggaggtgatgctgtttggccatggcacccggaagcgtgtccccctgggcaggctggagctcactggcagcagtttgagccccagctgaccctgtgggatgtgtttggagcgaacaaggaggtgcaggagctgctggagcggggcctactgcagctggatcacaggtgtgttggggggtgccgggcagagggggctgaggcataccagggagccctgactacagctctccacagacccaggagaagtgagaaagactgactggggtcttcggtgttcctgggagggtctggctgtgctggactctctcttgctgaccctcctgcctcagctccaagaagcctggcagcagagaaccccctcccctgtgccaggaggatgacaaaaatgttcctgtgttccagggtaatgccaggtg

SEQ ID NO: 173703 - DNA, 1064 bp, Homo sapiens
  Payload ID: 14113
  Gene Symbol: RSAD1
  Gene Name: radical S-adenosyl methionine domain containing 1
  ENST ID: ENST00000504284
  CDS Start-End: 1-258
cgggctcgcggctgggcggcagcagccagagcggcccagaggcgccgccgcgtggagaacgcaggagggtccccgagtcctgagcctgcgggccggcgcgcggcgctttacgtacactggccttactgcgagaagcgctgcagttactgcaacttcaacaagtacatccctcgccgcctggaggaggctgccatgcagaagtgtctggtgaccgaagctcagacgctgctgcggctcagcggggtgcaacgtccctagatgacactgagctccggctgttgggacggacgcactcggcctgcgatgctctgcggacgctggcagaggcccggcgcctctttcccgggcgcgtgtctgtagacttgatgctggggctgccggcacagcaggtggggccgtggcttgggcagctgcaggaactgctgcaccactgtgatgaccacctctccctctaccagctgtccctggagcggggcaccgcactcttcgcccaggtgcagcggggtgcccttccagcccctgacccggagctcgcagctgagatgtaccagaggggccgggctgtccttcgggaggctggcttccaccagtatgaggtctccaactttgcccggaatggggcgctcagtacccacaattggacttactggcagtgtggtcagtaccttggcgttgggcctggggcccatggacgatttatgccccagggggctggaggccacacccgggaggctcggatccagacactggagcctgacaactggatgaaggaggtgatgctgtttggccatggcacccggaagcgtgtccccctgggcaggctggagctgctggaggaagttttggccctggggctacgcaccgatgtggggatcactcaccagcactggcagcagtttgagccccagctgaccctgtgggatgtgtttggagcgaacaaggaggtgcaggagctgctggagcggggcctactgcagctggatcacaggggtcttcggtgttcctgggagggtctggctgtgctggactctctcttgctgaccctcctgcctcagctccaagaa

SEQ ID NO: 173704 - DNA, 554 bp, Homo sapiens
  Payload ID: 14113
  Gene Symbol: RSAD1
  Gene Name: radical S-adenosyl methionine domain containing 1
  ENST ID: ENST00000510554
  CDS Start-End: 457-554
gtgtgtggccgcagccctggccgtgaccgtggccgtccaaaacccaggtggcggtttgtcactctatgaacccgcctgccgtgtttccgtgcccccgtacgaggtctgggatgggaccctgtgctttggcagggaaatgacttggtccagaaacctgaagtctctgctactcaccggctcggtgactctgaccaaatggttcaaatttcataacaattttcctcttagcaagacaaaattttcttaagagcagtgttctgactcggtagctgggaaaatggctcataggaaaattgtatgaaaattatatgatcccagaaagagcttgggttgaattccttcctgacgtctgctggttggaagaggcagcgtaacaaaggatggccttactgcgagaagcgctgcagttactgcaacttcaacaagtacatccctcgccgcctggaggaggctgccatgcagaagtgtctggtgaccgaagctcagacgctgctgcggctcagcggggtgcaacgggtggagtctgtgttctttggtggggggacccccagtct

SEQ ID NO: 173705 - DNA, 3519 bp, Homo sapiens
  Payload ID: 14114
  Gene Symbol: RSAD2
  Gene Name: radical S-adenosyl methionine domain containing 2
  Uniprot ID: Q8WXG1
  ENST ID: ENST00000382040
  CDS Start-End: 137-1222
aactcagctgagtgttagtcaaagaaggtgtgtcctgctccccaatgacaggttgctcagagactgctgatttccatccctatataaagagagtccctggcatacagagactgctctgctccaggcatctgccacaatgtgggtgcttacacctgctgcttttgctgggaagctcttgagtgtgttcaggcaacctctgagctctctgtggaggagcctggtcccgctgttctgctggctgagggcaaccttctggctgctagctaccaagaggagaaagcagcagctggtcctgagagggccagatgagaccaaagaggaggaagaggaccctcctctgcccaccaccccaaccagcgtcaactatcacttcactcgccagtgcaactacaaatgcggcttctgtttccacacagccaaaacatcctttgtgctgccccttgaggaagcaaagagaggattgcttttgcttaaggaagctggtatggagaagatcaacttttcaggtggagagccatttcttcaagaccggggagaatacctgggcaagttggtgaggttctgcaaagtagagttgcggctgcccagcgtgagcatcgtgagcaatggaagcctgatccgggagaggtggttccagaattatggtgagtatttggacattctcgctatctcctgtgacagctttgacgaggaagtcaatgtccttattggccgtggccaaggaaagaagaaccatgtggaaaaccttcaaaagctgaggaggtggtgtagggattatagagtcgctttcaagataaattctgtcattaatcgtttcaacgtggaagaggacatgacggaacagatcaaagcactaaaccctgtccgctggaaagtgttccagtgcctcttaattgagggtgagaattgtggagaagatgctctaagagaagcagaaagatttgttattggtgatgaagaatttgaaagattcttggagcgccacaaagaagtgtcctgcttggtgcctgaatctaaccagaagatgaaagactcctaccttattctggatgaatatatgcgctttctgaactgtagaaagggacggaaggacccttccaagtccatcctggatgttggtgtagaagaagctataaaattcagtggatttgatgaaaagatgtttctgaagcgaggaggaaaatacatatggagtaaggctgatctgaagctggattggtagagcggaaagtggaacgagacttcaacacaccagtgggaaaactcctagagtaactgccattgtctgcaatactatcccgttggtatttcccagtggctgaaaacctgattttctgctgcacgtggcatctgattacctgtggtcactgaacacacgaataacttggatagcaaatcctgagacaatggaaaaccattaactttacttcattggcttataaccttgttgttattgaaacagcacttctgtttttgagtttgttttagctaaaaagaaggaatacacacaggaataatgaccccaaaaatgcttagataaggcccctatacacaggacctgacatttagctcaatgatgcgtttgtaagaaataagctctagtgatatctgtgggggcaaaatttaatttggatttgattttttaaaacaatgtttactgcgatttctatatttccattttgaaactatttcttgttccaggtttgttcatttgacagagtcagtattttttgccaaatatccagataaccagttttcacatctgagacattacaaagtatctgcctcaattatttctgctggttataatgcttttttttttttgcctttatgccattgcagtcttgtactttttactgtgatgtacagaaatagtcaacagatgtttccaagaacatatgatatgataatcctaccaattttcaagaagtctctagaaagagataacacatggaaagacggtgtggtgcagcccagcccacggtggctgttccatgaatgctggctacctatgtgtgtggtacctgttgtgtccctttctcttcaaagatcctgagcaaaacaaagatacgctttccatttgatgatggagttgacatggaggcagtgcttgcattgctttgttcgcctatcatctggccacatgaggctgtcaagcaaaagaataggagtgtagttgagtagctggttggccctacatctctgagaagtgacggcacactgggttggcataagatatcctaaaatcacgctggaaccttgggcaaggaagaatgtgagcaagagtagagagagtgcctggatttcatgtcagtgaagccaagtcaccatatcatatttttgaatgaactctgagtcagttgaaatagggtaccatctaggtcagtttaagaagagtcagctcagagaaagcaagcataagggaaaatgtcacgtaaactagatcagggaacaaaatcctctccttgtggaaatatcccatgcagtttgttgatacaacttagtatcttattgcctaaaaaaaaatttcttatcattgtttcaaaaaagcaaaatcatggaaaatttttgttgtccaggcaaataaaaggtcattttaatttagctgcaatttcagtgttcctcactaggtggcatttaaatgtcgcctgatgtcattaagcaccatccaaaaagtctgcttcataatctattttcaagacttggtgattctgaaagttttggtttttgtgactttgtttctcaggaaaaaaaatattcctacttaaattttaagtctataattcaatttaaatatgtgtgtgtctcatccaggataggataggttgtcttctattttccattttacctatttactttttttgtaagaaaagagaaaaatgaattctaaagatgttccccatgggttttgattgtgtctaagctatgatgaccttcatataatcagcataaacataaaacaaattttttacttaacatgagtgcactttactaatcctcatggcacagtggctcacgcctgtaatcccagcacttgggaggacaatgtgggtggatcacgaggtcaggagttcgagaacagcctggccaacatggtgaaaccccgtctccactaaaaatacaaaaattagccaggcatggtggcgtacacttgtaattccagctactcaagaggctgaggcaggaggattgcttgaaccctgaaggcagaggttacagagccaagatagcgccactgcactccagcctggatgacagagcaagactccgtctcaaaaaaaaaaaaaaaaaaaagcaagagagttcaactaagaaaggtcacatatgtgaaagcccaaggacactgtttgatatacagcaggtattcaatcagtgttatttgaaaccaaatctgaatttgaagtttgaatcttctgagttggaatgaatttttttctagctgagggaaactgtatttttctttccccaaagaggaatgtaatgtaaagtgaaataaaactataagctatgttaaataca

SEQ ID NO: 173706 - DNA, 499 bp, Homo sapiens
  Payload ID: 14114
  Gene Symbol: RSAD2
  Gene Name: radical S-adenosyl methionine domain containing 2
  ENST ID: ENST00000442639
  CDS Start-End: 77-499
acgaaagccggaggcccaggcggggcaggagccctggggctggggcgcccttccggcctctcctcctcgccgcgagatgtgcgcgataaacggccggcgctcgggagcagacgcttggccccggggccccaggtgcgcggctccgcgggcctgcgcggtccccaggcgccggctcccggggctgacaccgaatgaggccccgcgccgtcggccccaaggtatggagaagatcaacttttcaggtggagagccatttcttcaagaccggggagaatacctgggcaagttggtgaggttctgcaaagtagagttgcggctgcccagcgtgagcatcgtgagcaatggaagcctgatccgggagaggtggttccagaattatggtgagtatttggacattctcgctatctcctgtgacagctttgacgaggaagtcaatgtccttattggccgtggccaaggaaagaagaaccatgtggaaaaccttcaaaagctgaggagg

SEQ ID NO: 173707 - DNA, 4491 bp, Homo sapiens
  Payload ID: 14115
  Gene Symbol: RDX
  Gene Name: radixin
  Uniprot ID: P35241
  ENST ID: ENST00000343115
  CDS Start-End: 321-2072
agcggcggcgttggcgctcagtccgcggcgcgaggacggccggccggcagggggaggcgggggggcgccgggcagccccgccttttcccgcggaggcgccgagcggccatattgcggagctgtctgcggtggcggcggcgcctctcgtctcccgcgggccagcgctcgcaccaccgcttctccctccctgtcgcagccgcgccgccgcgcagcgccccagccacacgccggcgggcagaagccgcccgctctccggaaagtgataacagaattcattgaagtggagaatttttaaagaaggtaacaaaaagagaaagaaaatgccgaaaccaatcaacgtaagagtaactacaatggatgctgagctggaatttgccattcagcccaatacaactggcaaacaactttttgaccaggtggtgaaaacagttggtttgcgtgaggtctggttttttgggctgcagtatgtagacagcaaaggttattctacatggcttaaactaaataaaaaggtaacacagcaggatgttaaaaaagagaatcctttacagttcaagtttagagctaaattctttcctgaagatgtttctgaggaattaattcaagaaataacccagagactcttcttcttgcaagttaaagaagccatcttaaatgatgagatatattgcccgccagaaactgcagttcttttggcttcctatgctgtccaagccaagtatggagattacaataaagagattcataagccaggctacctggctaatgatagactcctaccccagcgtgtattggaacaacacaaactaacaaaagaacagtgggaagaaagaatacagaactggcatgaagaacatagaggaatgttaagggaggattctatgatggaatacctgaagattgcacaagatctagaaatgtatggagtcaactattttgaaataaaaaataaaaaaggaactgaattgtggctaggtgttgatgctttgggtctgaatatttatgagcatgacgacaagttaacacctaaaattggttttccctggagtgaaatcagaaatatttcatttaatgacaaaaaatttgttataaagccaatcgacaaaaaggcacctgattttgtgttttatgcacctcgtctgagaatcaataagcggattttggccttatgtatgggaaaccatgaactatacatgcgaagaaggaagcctgatactattgaagtacaacagatgaaggctcaggctagggaggagaaacatcagaagcagttggaaagggcacaattagagaatgaaaagaagaaaagagaaatagcagaaaaggaaaaggaaagaatagaacgtgaaaaggaagagctaatggaacgtctaaaacaaattgaagagcagacaattaaagctcagaaagaactagaagaacagactcgaaaagctctagaactggatcaagaacgaaaacgagcaaaagaagaagcagaacgacttgaaaaggagcgtcgagctgctgaagaggcaaagtctgccatagcaaaacaagctgccgaccagatgaagaatcaggagcagctagcagcagaacttgctgaattcactgccaagattgcacttctagaggaagccaagaagaaaaaggaagaggaagctactgagtggcaacacaaagcttttgcagcccaggaagacttggaaaagaccaaagaagagttaaaaactgtgatgtctgccccccctccacctccaccaccaccagtcattcctccaacagaaaacgaacatgatgaacacgatgagaataatgctgaagctagtgctgaattatcaaatgaaggggtaatgaaccatagaagcgaggaagaacgtgtaaccgaaacacagaaaaatgagcgtgttaagaagcaacttcaggcattaagttcagaattagcccaagccagagatgaaaccaagaaaacacaaaatgatgttcttcatgctgagaatgttaaagcaggccgtgataagtacaagactctgcgacagattcgacaaggcaatacaaagcagcgtatcgatgagtttgaagcaatgtgagagctgttattttgcatatatgttcttcataagctgaaccaccaacagagaaaagcaggcctttgcagatatgatggaatgcatcccaccttgccaaagcacttacaccagtttgactgtgctagctaaaagacaaatttaaggggagctcttcaacattaaggcagtatgatatcatgcttggttttcttttttcttttggtccagggaatggagaatggtgttccattgcctcttttcacattttttttctttttcttttttttttctgttgaagattaacactaattatcacgtctgacaaatgtgtatgtgtggtttcagttctgtgtacattttaaaggataatggtgaacattttaatgggtttcccttgccctttccatatttaacctatttccacattctctctcactcacattttctcagtgtgcccttctcttatctgccatgtccatagccataattccaccatcatacagatcaggcagtgtttaaaatgatggtaggtagcacagtggacagtctttgatcatcatgtagaatatggctatgaatcaggaaagagattagaacatttaataatgtatgtacagctggtgcttagtttttttttaatctaaatttaattaccttattggatatttgatatttggttatttaatcacagtcatctttaacagcttacactgattggtgttttatctcctgtgatcctttgatggctttttttgcctaccatttcacagaggtttagacagcagtagtagctccctaggagagtttactgatgaaacagcctctgcaagattttaaaagttttgttcttttatagactgatttagaaaaacaaatgattagttaaaaaaagaaaatatacatttgttggtaactaatgttattttttaaaacctggaccttttctggaagggcagcatataaaaacatcagtcccgaggaggggacaacaatactacctcactactacatctgtgatgactggttgttcaaacacaatggagtgtgtaaggtatatgttttataattcataaccatagcctcgatcatcaagaaatactttcgaaatttcattttccttcagaatatcttaagagtgctaaatttttaactgcctttttgtcgagtcaaactgtgggattctgatttgtattaaaattgtaagctcctcactggtatactatcatcctggaggggtgttgtatggctgagcaagagagagagagaatgagagagagactgtgtgtgtgtgtgtgtgtgtgtgtgtgtgtactctgtgtgtgtatgagagagagaaatgctaaccttgtagcatgtgaagaatgtctgtaccttgatacgatagttacataatcagtatatttggtttctagatcactgtgcttattttgtttcaatctctgactaaaaatacttaaatttggtttgttaattcttattttagaaattataattttagtttatattaatttcggttatagcttactgaagaaatctttccagttagaaggaggttctaatattcacatgttctaatactttgtttattgtaaaacagctaaatttggagatacgtaaagccttgttttctctgtgtggttcagctactttccatttggtattacacagtcaaatttacatttatctattaaaattgccattttattaaacattttcatgcacagtagattcaagttgtgtctgaaaatatctcttgtgcttttttgattttgctgactttaaaaggattaatctgggcagacattatgtaaaagaaaggttgcgtttaatatattttttgaactttgtaggacaaaacatagctggttaaccttgaagtgactgttgtaccatggttgtgcacatgcttcagaatcctatggaagagaatattcctacttgcagtacatcaaaggaatggatggtggaccctactattcatgttttgagacataaatgttcactttaaagcaattgcataatagataaaaacctgaactttcattggatttttgttaattttcctcattttgaattatgtgcactaccatagctacatcagtttgatacagtattgaaaaattatcagttatattttgctgtttatgatctatttgtagattaggattaaaatggatttaatccatttttaaggctgtgtgaatttttctaaacaagaaccatttgcaatatggatttcttagagattaaaccaattataacttattagcagtcgcgagcacatgttcatatagtcaatgtaaaaatacactaatgagtatttggtaaatcccagtaggcttttaccattagcataattttgtgttgtacaattaagttacaattacatctctaattttggataatattcattggttaacaataaagtgacaaaagctca

SEQ ID NO: 173708 - DNA, 2761 bp, Homo sapiens
  Payload ID: 14115
  Gene Symbol: RDX
  Gene Name: radixin
  Uniprot ID: P35241
  ENST ID: ENST00000405097
  CDS Start-End: 311-2125
ttggcgctcagtccgcggcgcgaggacggccggccggcagggggaggcgggggggcgccgggcagccccgccttttcccgcggaggcgccgagcggccatattgcggagctgtctgcggtggcggcggcgcctctcgtctcccgcgggccagcgctcgcaccaccgcttctccctccctgtcgcagccgcgccgccgcgcagcgccccagccacacgccggcgggcagaagccgcccgctctccggaaagtgataacagaattcattgaagtggagaatttttaaagaaggtaacaaaaagagaaagaaaatgccgaaaccaatcaacgtaagagtaactacaatggatgctgagctggaatttgccattcagcccaatacaactggcaaacaactttttgaccaggtggtgaaaacagttggtttgcgtgaggtctggttttttgggctgcagtatgtagacagcaaaggttattctacatggcttaaactaaataaaaaggtaacacagcaggatgttaaaaaagagaatcctttacagttcaagtttagagctaaattctttcctgaagatgtttctgaggaattaattcaagaaataacccagagactcttcttcttgcaagttaaagaagccatcttaaatgatgagatatattgcccgccagaaactgcagttcttttggcttcctatgctgtccaagccaagtatggagattacaataaagagattcataagccaggctacctggctaatgatagactcctaccccagcgtgtattggaacaacacaaactaacaaaagaacagtgggaagaaagaatacagaactggcatgaagaacatagaggaatgttaagggaggattctatgatggaatacctgaagattgcacaagatctagaaatgtatggagtcaactattttgaaataaaaaataaaaaaggaactgaattgtggctaggtgttgatgctttgggtctgaatatttatgagcatgacgacaagttaacacctaaaattggttttccctggagtgaaatcagaaatatttcatttaatgacaaaaaatttgttataaagccaatcgacaaaaaggcacctgattttgtgttttatgcacctcgtctgagaatcaataagcggattttggccttatgtatgggaaaccatgaactatacatgcgaagaaggaagcctgatactattgaagtacaacagatgaaggctcaggctagggaggagaaacatcagaagcagttggaaagggcacaattagagaatgaaaagaagaaaagagaaatagcagaaaaggaaaaggaaagaatagaacgtgaaaaggaagagctaatggaacgtctaaaacaaattgaagagcagacaattaaagctcagaaagaactagaagaacagactcgaaaagctctagaactggatcaagaacgaaaacgagcaaaagaagaagcagaacgacttgaaaaggagcgtcgagctgctgaagaggcaaagtctgccatagcaaaacaagctgccgaccagatgaagaatcaggagcagctagcagcagaacttgctgaattcactgccaagattgcacttctagaggaagccaagaagaaaaaggaagaggaagctactgagtggcaacacaaagcttttgcagcccaggaagacttggaaaagaccaaagaagagttaaaaactgtgatgtctgccccccctccacctccaccaccaccagtcattcctccaacagaaaacgaacatgatgaacacgatgagaataatgctgaagctagtgctgaattatcaaatgaaggggtaatgaaccatagaagcgaggaagaacgtgtaaccgaaacacagaaaaatgagcgtgttaagaagcaacttcaggcattaagttcagaattagcccaagccagagatgaaaccaagaaaacacaaaatgatgttcttcatgctgagaatgttaaagcaggccgtgataagtacaagactctgcgacagattcgacaaggcaatacaaagcagcgtatcgatgagtttgaagcaatgtggggacccaaactgtatgcattgttccagatgcgctcttgccaaagcagcataaagcaaatgtaacccttaggaagaaggctccctccctcactaggcccctggctactgacttatgggaagctttaggataaggacatacctggtgttctgaatgtgtatatcccccaaagtctgcaatctcagctggaactggatggaccagtattccattacccagggccctggctcatggttctctcctcttctcagtttactgttggatttccctttcttgctattctctttctctccagacccctctcaattgcctttcctaaagacagaccttagcaagatgggccaggacttgggacttcgcacagcaccctgcagtcccaagccagcatctactgcaccccatcttcaggactctatcccccaaacatgctggaaggcatcagcttatgagaacccacttttttctgcatgactagcttgtaaggaagaatctatggacaggatttccaagaatttcccactttttcaaaaaatgtatgtgacttatatttggcttcaatccaagagcaaactcagtggtgaacagctccatttctgtgcacatgttggtggaatctgcagaaatcgatgcaacatttctttcctgtctgggctgtttgtataattgtatataaatgtagcaataaatatattctaacatca

SEQ ID NO: 173709 - DNA, 562 bp, Homo sapiens
  Payload ID: 14115
  Gene Symbol: RDX
  Gene Name: radixin
  ENST ID: ENST00000534683
  CDS Start-End: 328-482
attgcggagctgtctgcggtggcggcggcgcctctcgtctcccgcgggccagcgctcgcaccaccgcttctccctccctgtcgcagccgcgccgccgcgcagcgccccagccacacgccggcgggcagaagccgcccgctctccggaaagtgataacagaattcattgaagtggagaatttttaaagaagattacaataaagagattcataagccaggctacctggctaatgatagactcctaccccagcgtgtattggaacaacacaaactaacaaaagaacagtgggaagaaagaatacagaactggcatgaagaacatagaggaatgttaagggaggattctatgatggaatacctgaagattgcacaagatctagaaatgtatggagtcaactattttgaaataaaaaataaaaaaggaactgaattgtggctaggtgttgatgctttgggtctgaatatttatgagcatgacgacaagttaacacctaaaattggttttccctggagtgaaatcagaaatatttcatttaatgacaaaaaatttgttataaagccaa

SEQ ID NO: 173710 - DNA, 2511 bp, Homo sapiens
  Payload ID: 14115
  Gene Symbol: RDX
  Gene Name: radixin
  Uniprot ID: P35241
  ENST ID: ENST00000528498
  CDS Start-End: 311-2125
ttggcgctcagtccgcggcgcgaggacggccggccggcagggggaggcgggggggcgccgggcagccccgccttttcccgcggaggcgccgagcggccatattgcggagctgtctgcggtggcggcggcgcctctcgtctcccgcgggccagcgctcgcaccaccgcttctccctccctgtcgcagccgcgccgccgcgcagcgccccagccacacgccggcgggcagaagccgcccgctctccggaaagtgataacagaattcattgaagtggagaatttttaaagaaggtaacaaaaagagaaagaaaatgccgaaaccaatcaacgtaagagtaactacaatggatgctgagctggaatttgccattcagcccaatacaactggcaaacaactttttgaccaggtggtgaaaacagttggtttgcgtgaggtctggttttttgggctgcagtatgtagacagcaaaggttattctacatggcttaaactaaataaaaaggtaacacagcaggatgttaaaaaagagaatcctttacagttcaagtttagagctaaattctttcctgaagatgtttctgaggaattaattcaagaaataacccagagactcttcttcttgcaagttaaagaagccatcttaaatgatgagatatattgcccgccagaaactgcagttcttttggcttcctatgctgtccaagccaagtatggagattacaataaagagattcataagccaggctacctggctaatgatagactcctaccccagcgtgtattggaacaacacaaactaacaaaagaacagtgggaagaaagaatacagaactggcatgaagaacatagaggaatgttaagggaggattctatgatggaatacctgaagattgcacaagatctagaaatgtatggagtcaactattttgaaataaaaaataaaaaaggaactgaattgtggctaggtgttgatgctttgggtctgaatatttatgagcatgacgacaagttaacacctaaaattggttttccctggagtgaaatcagaaatatttcatttaatgacaaaaaatttgttataaagccaatcgacaaaaaggcacctgattttgtgttttatgcacctcgtctgagaatcaataagcggattttggccttatgtatgggaaaccatgaactatacatgcgaagaaggaagcctgatactattgaagtacaacagatgaaggctcaggctagggaggagaaacatcagaagcagttggaaagggcacaattagagaatgaaaagaagaaaagagaaatagcagaaaaggaaaaggaaagaatagaacgtgaaaaggaagagctaatggaacgtctaaaacaaattgaagagcagacaattaaagctcagaaagaactagaagaacagactcgaaaagctctagaactggatcaagaacgaaaacgagcaaaagaagaagcagaacgacttgaaaaggagcgtcgagctgctgaagaggcaaagtctgccatagcaaaacaagctgccgaccagatgaagaatcaggagcagctagcagcagaacttgctgaattcactgccaagattgcacttctagaggaagccaagaagaaaaaggaagaggaagctactgagtggcaacacaaagcttttgcagcccaggaagacttggaaaagaccaaagaagagttaaaaactgtgatgtctgccccccctccacctccaccaccaccagtcattcctccaacagaaaacgaacatgatgaacacgatgagaataatgctgaagctagtgctgaattatcaaatgaaggggtaatgaaccatagaagcgaggaagaacgtgtaaccgaaacacagaaaaatgagcgtgttaagaagcaacttcaggcattaagttcagaattagcccaagccagagatgaaaccaagaaaacacaaaatgatgttcttcatgctgagaatgttaaagcaggccgtgataagtacaagactctgcgacagattcgacaaggcaatacaaagcagcgtatcgatgagtttgaagcaatgtggggacccaaactgtatgcattgttccagatgcgctcttgccaaagcagcataaagcaaatgtaacccttaggaagaaggctccctccctcactagggctacaaagaatgctagagtggagacaagagtccagactctgaaataacctcctttggacacagaagctaccactgttgcttatcagacgcagcgggccctgggtttttctggggccttaagcagtgaaccctggtcagctggcctgagtcccaacccaagcccatcaccacaagcctcaagacaggaagatctcagtgaaacctttcctctaatccaagtgacatcattgtcgcaggtgtttgtacatgaaagcagagtgatgaaggtgtgtgggtccacggaagaagtaaaaatacagcactagttcatatttttcctagtctctccctgttcccaggtaaagttatagcat

SEQ ID NO: 173711 - DNA, 544 bp, Homo sapiens
  Payload ID: 14115
  Gene Symbol: RDX
  Gene Name: radixin
  ENST ID: ENST00000533991
  CDS Start-End: 196-544
ttttcccgcggaggcgccgagcggccatattgcggagctgtctgcggtggcggcggcgcctctcgtctcccgcgggccagcgctcgcaccaccgcttctccctccctgtcgcagccgcgccgccgcgcagcgccccagccacacgccggcgggcagaagccgcccgctctccggatcaacgtaagagtaactacaatggatgctgagctggaatttgccattcagcccaatacaactggcaaacaactttttgaccaggtggtgaaaacagttggtttgcgtgaggtctggttttttgggctgcagtatgtagacagcaaaggttattctacatggcttaaactaaataaaaaggtaacacagcaggatgttaaaaaagagaatcctttacagttcaagtttagagctaaattctttcctgaagatgtttctgaggaattaattcaagaaataacccagagactcttcttcttgcaagttaaagaagccatcttaaatgatgagatatattgcccgccagaaactgcagttcttttggcttcct

SEQ ID NO: 173712 - DNA, 1911 bp, Homo sapiens
  Payload ID: 14115
  Gene Symbol: RDX
  Gene Name: radixin
  ENST ID: ENST00000530131
  CDS Start-End: 213-371
atattgcggagctgtctgcggtggcggcggcgcctctcgtctcccgcgggccagcgctcgcaccaccgcttctccctccctgtcgcagccgcgccgccgcgcagcgccccagccacacgccggcgggcagaagccgcccgctctccggaaagtgataacagaattcattgaagtggagaatttttaaagaaggtaacaaaaagagaaagaaaatgccgaaaccaatcaacgtaagagtaactacaatggatgctgagctggaatttgccattcagcccaatacaactggcaaacaactttttgaccagtgtattggaacaacacaaactaacaaaagaacagtgggaagaaagaatacagaactggcatgaagaacatagaggaatgttaagggaggattctatgatggaatacctgaagattgcacaagatctagaaatgtatggagtcaactattttgaaataaaaaataaaaaaggaactgaattgtggctaggtgttgatgctttgggtctgaatatttatgagcatgacgacaagttaacacctaaaattggttttccctggagtgaaatcagaaatatttcatttaatgacaaaaaatttgttataaagccaatcgacaaaaaggcacctgattttgtgttttatgcacctcgtctgagaatcaataagcggattttggccttatgtatgggaaaccatgaactatacatgcgaagaaggaagcctgatactattgaagtacaacagatgaaggctcaggctagggaggagaaacatcagaagcagttggaaagggcacaattagagaatgaaaagaagaaaagagaaatagcagaaaaggaaaaggaaagaatagaacgtgaaaaggaagagctaatggaacgtctaaaacaaattgaagagcagacaattaaagctcagaaagaactagaagaacagactcgaaaagctctagaactggatcaagaacgaaaacgagcaaaagaagaagcagaacgacttgaaaaggagcgtcgagctgctgaagaggcaaagtctgccatagcaaaacaagctgccgaccagatgaagaatcaggagcagctagcagcagaacttgctgaattcactgccaagattgcacttctagaggaagccaagaagaaaaaggaagaggaagctactgagtggcaacacaaagcttttgcagcccaggaagacttggaaaagaccaaagaagagttaaaaactgtgatgtctgccccccctccacctccaccaccaccagtcattcctccaacagaaaacgaacatgatgaacacgatgagaataatgctgaagctagtgctgaattatcaaatgaaggggtaatgaaccatagaagcgaggaagaacgtgtaaccgaaacacagaaaaatgagcgtgttaagaagcaacttcaggcattaagttcagaattagcccaagccagagatgaaaccaagaaaacacaaaatgatgttcttcatgctgagaatgttaaagcaggccgtgataagtacaagactctgcgacagattcgacaaggcaatacaaagcagcgtatcgatgagtttgaagcaatgtgagagctgttattttgcatatatgttcttcataagctgaaccaccaacagagaaaagcaggcctttgcagatatgatggaatgcatcccaccttgccaaagcacttacaccagtttgactgtgctagctaaaagacaaatttaaggggagctcttcaacattaaggcagtatgatatcatgcttggttttcttttttcttttggtccagggaatggagaatggtgttccattgcctcttttcacattttttttctttttcttttttttttctgttgaagattaacactaattatcacgtctgacaaatgtgtatgtgtgg

SEQ ID NO: 173713 - DNA, 1814 bp, Homo sapiens
  Payload ID: 14115
  Gene Symbol: RDX
  Gene Name: radixin
  Uniprot ID: P35241
  ENST ID: ENST00000528900
  CDS Start-End: 405-1178
ttggcgctcagtccgcggcgcgaggacggccggccggcagggggaggcgggggggcgccgggcagccccgccttttcccgcggaggcgccgagcggccatattgcggagctgtctgcggtggcggcggcgcctctcgtctcccgcgggccagcgctcgcaccaccgcttctccctccctgtcgcagccgcgccgccgcgcagcgccccagccacacgccggcgggcagaagccgcccgctctccggaaagtgataacagaattcattgaagtggagaatttttaaagaaggtaacaaaaagagaaagaaaatgccgaaaccaggcacaattagagaatgaaaagaagaaaagagaaatagcagaaaaggaaaaggaaagaatagaacgtgaaaaggaagagctaatggaacgtctaaaacaaattgaagagcagacaattaaagctcagaaagaactagaagaacagactcgaaaagctctagaactggatcaagaacgaaaacgagcaaaagaagaagcagaacgacttgaaaaggagcgtcgagctgctgaagaggcaaagtctgccatagcaaaacaagctgccgaccagatgaagaatcaggagcagctagcagcagaacttgctgaattcactgccaagattgcacttctagaggaagccaagaagaaaaaggaagaggaagctactgagtggcaacacaaagcttttgcagcccaggaagacttggaaaagaccaaagaagagttaaaaactgtgatgtctgccccccctccacctccaccaccaccagtcattcctccaacagaaaacgaacatgatgaacacgatgagaataatgctgaagctagtgctgaattatcaaatgaaggggtaatgaaccatagaagcgaggaagaacgtgtaaccgaaacacagaaaaatgagcgtgttaagaagcaacttcaggcattaagttcagaattagcccaagccagagatgaaaccaagaaaacacaaaatgatgttcttcatgctgagaatgttaaagcaggccgtgataagtacaagactctgcgacagattcgacaaggcaatacaaagcagcgtatcgatgagtttgaagcaatgtggggacccaaactgtatgcattgttccagatgcgctcttgccaaagcagcataaagcaaatgtaacccttaggaagaaggctccctccctcactaggcccctggctactgacttatgggaagctttaggataaggacatacctggtgttctgaatgtgtatatcccccaaagtctgcaatctcagctggaactggatggaccagtattccattacccagggccctggctcatggttctctcctcttctcagtttactgttggatttccctttcttgctattctctttctctccagacccctctcaattgcctttcctaaagacagaccttagcaagatgggccaggacttgggacttcgcacagcaccctgcagtcccaagccagcatctactgcaccccatcttcaggactctatcccccaaacatgctggaaggcatcagcttatgagaacccacttttttctgcatgactagcttgtaaggaagaatctatggacaggatttccaagaatttcccactttttcaaaaaatgtatgtgacttatatttggcttcaatccaagagcaaactcagtggtgaacagctccatttctgtgcacatgttggtggaatctgcagaaatcgatgcaacatttctttcctgtctgggctgtttgtataattgtatataaatgtagcaataaatatattctaacatca

SEQ ID NO: 173714 - DNA, 803 bp, Homo sapiens
  Payload ID: 14115
  Gene Symbol: RDX
  Gene Name: radixin
  ENST ID: ENST00000528556
  CDS Start-End: 196-348
gcggtggcggcggcgcctctcgtctcccgcgggccagcgctcgcaccaccgcttctccctccctgtcgcagccgcgccgccgcgcagcgccccagccacacgccggcgggcagaagccgcccgctctccggaaagtgataacagaattcattgaagtggagaatttttaaagaaggtaacaaaaagagaaagaaaatgccgaaaccatcttgctgtgttccccaggctggtctcaaactcctgacctcaagagatcctcccaccttggccttccaaagtgctgggactaaagatgtgaggcaccatgtccagctcttgctctgccttttaatatccacgtgtccttagatcaacgtaagagtaactacaatggatgctgagctggaatttgccattcagcccaatacaactggcaaacaactttttgaccaggtggtgaaaacagttggtttgcgtgaggtctggttttttgggctgcagtatgtagacagcaaaggttattctacatggcttaaactaaataaaaaggtaacacagcaggatgttaaaaaagagaatcctttacagttcaagtttagagctaaattctttcctgaagatgtttctgaggaattaattcaagaaataacccagagactcttcttcttgcaagttaaagaagccatcttaaatgatgagatatattgcccgccagaaactgcagttcttttggcttcctatgctgtccaagccaagtatggagattacaataaagagattcataagccaggctacctggctaatgatagactcctaccccagcg

SEQ ID NO: 173715 - DNA, 531 bp, Homo sapiens
  Payload ID: 14115
  Gene Symbol: RDX
  Gene Name: radixin
  ENST ID: ENST00000533678
  CDS Start-End: 217-351
ggccatattgcggagctgtctgcggtggcggcggcgcctctcgtctcccgcgggccagcgctcgcaccaccgcttctccctccctgtcgcagccgcgccgccgcgcagcgccccagccacacgccggcgggcagaagccgcccgctctccggaaagtgataacagaattcattgaagtggagaatttttaaagaaggtaacaaaaagagaaagaaaatgccgaaaccagctggtctcaaactcctgacctcaagagatcctcccaccttggccttccaaagtgctgggactaaagatgtgaggcaccatgtccagctcttgctctgccttttaatatccacgtgtccttagatcaacgtaagagtaactacaatggatgctgagctggaatttgccattcagcccaatacaactggcaaacaactttttgaccaggtggtgaaaacagttggtttgcgtgaggtctggttttttgggctgcagtatgtagacagcaaaggttattctacatggcttaaactaaataaaaag

SEQ ID NO: 173716 - DNA, 1549 bp, Homo sapiens
  Payload ID: 14115
  Gene Symbol: RDX
  Gene Name: radixin
  Uniprot ID: P35241
  ENST ID: ENST00000530301
  CDS Start-End: 311-913
ttggcgctcagtccgcggcgcgaggacggccggccggcagggggaggcgggggggcgccgggcagccccgccttttcccgcggaggcgccgagcggccatattgcggagctgtctgcggtggcggcggcgcctctcgtctcccgcgggccagcgctcgcaccaccgcttctccctccctgtcgcagccgcgccgccgcgcagcgccccagccacacgccggcgggcagaagccgcccgctctccggaaagtgataacagaattcattgaagtggagaatttttaaagaaggtaacaaaaagagaaagaaaatgccgaaaccaatcaacgtaagagtaactacaatggatgctgagctggaatttgccattcagcccaatacaactggcaaacaactttttgaccaggtaacacagcaggatgttaaaaaagagaatcctttacagttcaagtttagagctaaattctttcctgaagatgtttctgaggaattaattcaagaaataacccagagactcttcttcttgcaagttaaagaagccatcttaaatgatgagatatattgcccgccagaaactgcagttcttttggcttcctatgctgtccaagccaagtatggagattacaataaagagattcataagccaggctacctggctaatgatagactcctaccccagcgtgtattggaacaacacaaactaacaaaagaacaagatgaaaccaagaaaacacaaaatgatgttcttcatgctgagaatgttaaagcaggccgtgataagtacaagactctgcgacagattcgacaaggcaatacaaagcagcgtatcgatgagtttgaagcaatgtggggacccaaactgtatgcattgttccagatgcgctcttgccaaagcagcataaagcaaatgtaacccttaggaagaaggctccctccctcactaggcccctggctactgacttatgggaagctttaggataaggacatacctggtgttctgaatgtgtatatcccccaaagtctgcaatctcagctggaactggatggaccagtattccattacccagggccctggctcatggttctctcctcttctcagtttactgttggatttccctttcttgctattctctttctctccagacccctctcaattgcctttcctaaagacagaccttagcaagatgggccaggacttgggacttcgcacagcaccctgcagtcccaagccagcatctactgcaccccatcttcaggactctatcccccaaacatgctggaaggcatcagcttatgagaacccacttttttctgcatgactagcttgtaaggaagaatctatggacaggatttccaagaatttcccactttttcaaaaaatgtatgtgacttatatttggcttcaatccaagagcaaactcagtggtgaacagctccatttctgtgcacatgttggtggaatctgcagaaatcgatgcaacatttctttcctgtctgggctgtttgtataattgtatataaatgtagcaataaatatattctaacatca

SEQ ID NO: 173717 - DNA, 536 bp, Homo sapiens
  Payload ID: 14115
  Gene Symbol: RDX
  Gene Name: radixin
  ENST ID: ENST00000532118
  CDS Start-End: 92-536
cttttagtatttaataattgcaaatgatagtgtattattttgttttctgctcaccttaggaacaatacagatcaacgtaagagtaactacaatggatgctgagctggaatttgccattcagcccaatacaactggcaaacaactttttgaccaggtggtgaaaacagttggtttgcgtgaggtctggttttttgggctgcagtatgtagacagcaaaggttattctacatggcttaaactaaataaaaaggtaacacagcaggatgttaaaaaagagaatcctttacagttcaagtttagagctaaattctttcctgaagatgtttctgaggaattaattcaagaaataacccagagactcttcttcttgcaagttaaagaagccatcttaaatgatgagatatattgcccgccagaaactgcagttcttttggcttcctatgctgtccaagccaagtatggagattacaataaagagattcataagccaggctacctggctaatgatagactcctaccccagcgtgtattggaac

SEQ ID NO: 173718 - DNA, 2558 bp, Homo sapiens
  Payload ID: 14115
  Gene Symbol: RDX
  Gene Name: radixin
  Uniprot ID: P35241
  ENST ID: ENST00000530749
  CDS Start-End: 311-2125
ttggcgctcagtccgcggcgcgaggacggccggccggcagggggaggcgggggggcgccgggcagccccgccttttcccgcggaggcgccgagcggccatattgcggagctgtctgcggtggcggcggcgcctctcgtctcccgcgggccagcgctcgcaccaccgcttctccctccctgtcgcagccgcgccgccgcgcagcgccccagccacacgccggcgggcagaagccgcccgctctccggaaagtgataacagaattcattgaagtggagaatttttaaagaaggtaacaaaaagagaaagaaaatgccgaaaccaatcaacgtaagagtaactacaatggatgctgagctggaatttgccattcagcccaatacaactggcaaacaactttttgaccaggtggtgaaaacagttggtttgcgtgaggtctggttttttgggctgcagtatgtagacagcaaaggttattctacatggcttaaactaaataaaaaggtaacacagcaggatgttaaaaaagagaatcctttacagttcaagtttagagctaaattctttcctgaagatgtttctgaggaattaattcaagaaataacccagagactcttcttcttgcaagttaaagaagccatcttaaatgatgagatatattgcccgccagaaactgcagttcttttggcttcctatgctgtccaagccaagtatggagattacaataaagagattcataagccaggctacctggctaatgatagactcctaccccagcgtgtattggaacaacacaaactaacaaaagaacagtgggaagaaagaatacagaactggcatgaagaacatagaggaatgttaagggaggattctatgatggaatacctgaagattgcacaagatctagaaatgtatggagtcaactattttgaaataaaaaataaaaaaggaactgaattgtggctaggtgttgatgctttgggtctgaatatttatgagcatgacgacaagttaacacctaaaattggttttccctggagtgaaatcagaaatatttcatttaatgacaaaaaatttgttataaagccaatcgacaaaaaggcacctgattttgtgttttatgcacctcgtctgagaatcaataagcggattttggccttatgtatgggaaaccatgaactatacatgcgaagaaggaagcctgatactattgaagtacaacagatgaaggctcaggctagggaggagaaacatcagaagcagttggaaagggcacaattagagaatgaaaagaagaaaagagaaatagcagaaaaggaaaaggaaagaatagaacgtgaaaaggaagagctaatggaacgtctaaaacaaattgaagagcagacaattaaagctcagaaagaactagaagaacagactcgaaaagctctagaactggatcaagaacgaaaacgagcaaaagaagaagcagaacgacttgaaaaggagcgtcgagctgctgaagaggcaaagtctgccatagcaaaacaagctgccgaccagatgaagaatcaggagcagctagcagcagaacttgctgaattcactgccaagattgcacttctagaggaagccaagaagaaaaaggaagaggaagctactgagtggcaacacaaagcttttgcagcccaggaagacttggaaaagaccaaagaagagttaaaaactgtgatgtctgccccccctccacctccaccaccaccagtcattcctccaacagaaaacgaacatgatgaacacgatgagaataatgctgaagctagtgctgaattatcaaatgaaggggtaatgaaccatagaagcgaggaagaacgtgtaaccgaaacacagaaaaatgagcgtgttaagaagcaacttcaggcattaagttcagaattagcccaagccagagatgaaaccaagaaaacacaaaatgatgttcttcatgctgagaatgttaaagcaggccgtgataagtacaagactctgcgacagattcgacaaggcaatacaaagcagcgtatcgatgagtttgaagcaatgtggggacccaaactgtatgcattgttccagatgcgctcttgccaaagcagcataaagcaaatgtaacccttaggaagaaggctccctccctcactaggccactgctgcaggacagtgaagctgacttaaaatgcccctgccctgggctacaaagaatgctagagtggagacaagagtccagactctgaaataacctcctttggacacagaagctaccactgttgcttatcagacgcagcgggccctgggtttttctggggccttaagcagtgaaccctggtcagctggcctgagtcccaacccaagcccatcaccacaagcctcaagacaggaagatctcagtgaaacctttcctctaatccaagtgacatcattgtcgcaggtgtttgtacatgaaagcagagtgatgaaggtgtgtgggtccacggaagaagtaaaaatacagcactagttcatatttttcctagtctctccctgttcccaggtaaagttatagcat

SEQ ID NO: 173719 - DNA, 4117 bp, Homo sapiens
  Payload ID: 14115
  Gene Symbol: RDX
  Gene Name: radixin
  Uniprot ID: P35241
  ENST ID: ENST00000544551
  CDS Start-End: 348-1691
ttggcgctcagtccgcggcgcgaggacggccggccggcagggggaggcgggggggcgccgggcagccccgccttttcccgcggaggcgccgagcggccatattgcggagctgtctgcggtggcggcggcgcctctcgtctcccgcgggccagcgctcgcaccaccgcttctccctccctgtcgcagccgcgccgccgcgcagcgccccagccacacgccggcgggcagaagccgcccgctctccggaaagtgataacagaattcattgaagtggagaatttttaaagaaggtaacaaaaagagaaagaaaatgccgaaaccaatcaacgtaagagtaactacaatggatgctgagctggaatttgccattcagcccaatacaactggcaaacaactttttgaccagtgtattggaacaacacaaactaacaaaagaacagtgggaagaaagaatacagaactggcatgaagaacatagaggaatgttaagggaggattctatgatggaatacctgaagattgcacaagatctagaaatgtatggagtcaactattttgaaataaaaaataaaaaaggaactgaattgtggctaggtgttgatgctttgggtctgaatatttatgagcatgacgacaagttaacacctaaaattggttttccctggagtgaaatcagaaatatttcatttaatgacaaaaaatttgttataaagccaatcgacaaaaaggcacctgattttgtgttttatgcacctcgtctgagaatcaataagcggattttggccttatgtatgggaaaccatgaactatacatgcgaagaaggaagcctgatactattgaagtacaacagatgaaggctcaggctagggaggagaaacatcagaagcagttggaaagggcacaattagagaatgaaaagaagaaaagagaaatagcagaaaaggaaaaggaaagaatagaacgtgaaaaggaagagctaatggaacgtctaaaacaaattgaagagcagacaattaaagctcagaaagaactagaagaacagactcgaaaagctctagaactggatcaagaacgaaaacgagcaaaagaagaagcagaacgacttgaaaaggagcgtcgagctgctgaagaggcaaagtctgccatagcaaaacaagctgccgaccagatgaagaatcaggagcagctagcagcagaacttgctgaattcactgccaagattgcacttctagaggaagccaagaagaaaaaggaagaggaagctactgagtggcaacacaaagcttttgcagcccaggaagacttggaaaagaccaaagaagagttaaaaactgtgatgtctgccccccctccacctccaccaccaccagtcattcctccaacagaaaacgaacatgatgaacacgatgagaataatgctgaagctagtgctgaattatcaaatgaaggggtaatgaaccatagaagcgaggaagaacgtgtaaccgaaacacagaaaaatgagcgtgttaagaagcaacttcaggcattaagttcagaattagcccaagccagagatgaaaccaagaaaacacaaaatgatgttcttcatgctgagaatgttaaagcaggccgtgataagtacaagactctgcgacagattcgacaaggcaatacaaagcagcgtatcgatgagtttgaagcaatgtgagagctgttattttgcatatatgttcttcataagctgaaccaccaacagagaaaagcaggcctttgcagatatgatggaatgcatcccaccttgccaaagcacttacaccagtttgactgtgctagctaaaagacaaatttaaggggagctcttcaacattaaggcagtatgatatcatgcttggttttcttttttcttttggtccagggaatggagaatggtgttccattgcctcttttcacattttttttctttttcttttttttttctgttgaagattaacactaattatcacgtctgacaaatgtgtatgtgtggtttcagttctgtgtacattttaaaggataatggtgaacattttaatgggtttcccttgccctttccatatttaacctatttccacattctctctcactcacattttctcagtgtgcccttctcttatctgccatgtccatagccataattccaccatcatacagatcaggcagtgtttaaaatgatggtaggtagcacagtggacagtctttgatcatcatgtagaatatggctatgaatcaggaaagagattagaacatttaataatgtatgtacagctggtgcttagtttttttttaatctaaatttaattaccttattggatatttgatatttggttatttaatcacagtcatctttaacagcttacactgattggtgttttatctcctgtgatcctttgatggctttttttgcctaccatttcacagaggtttagacagcagtagtagctccctaggagagtttactgatgaaacagcctctgcaagattttaaaagttttgttcttttatagactgatttagaaaaacaaatgattagttaaaaaaagaaaatatacatttgttggtaactaatgttattttttaaaacctggaccttttctggaagggcagcatataaaaacatcagtcccgaggaggggacaacaatactacctcactactacatctgtgatgactggttgttcaaacacaatggagtgtgtaaggtatatgttttataattcataaccatagcctcgatcatcaagaaatactttcgaaatttcattttccttcagaatatcttaagagtgctaaatttttaactgcctttttgtcgagtcaaactgtgggattctgatttgtattaaaattgtaagctcctcactggtatactatcatcctggaggggtgttgtatggctgagcaagagagagagagaatgagagagagactgtgtgtgtgtgtgtgtgtgtgtgtgtgtgtactctgtgtgtgtatgagagagagaaatgctaaccttgtagcatgtgaagaatgtctgtaccttgatacgatagttacataatcagtatatttggtttctagatcactgtgcttattttgtttcaatctctgactaaaaatacttaaatttggtttgttaattcttattttagaaattataattttagtttatattaatttcggttatagcttactgaagaaatctttccagttagaaggaggttctaatattcacatgttctaatactttgtttattgtaaaacagctaaatttggagatacgtaaagccttgttttctctgtgtggttcagctactttccatttggtattacacagtcaaatttacatttatctattaaaattgccattttattaaacattttcatgcacagtagattcaagttgtgtctgaaaatatctcttgtgcttttttgattttgctgactttaaaaggattaatctgggcagacattatgtaaaagaaaggttgcgtttaatatattttttgaactttgtaggacaaaacatagctggttaaccttgaagtgactgttgtaccatggttgtgcacatgcttcagaatcctatggaagagaatattcctacttgcagtacatcaaaggaatggatggtggaccctactattcatgttttgagacataaatgttcactttaaagcaattgcataatagataaaaacctgaactttcattggatttttgttaattttcctcattttgaattatgtgcactaccatagctacatcagtttgatacagtattgaaaaattatcagttatattttgctgtttatgatctatttgtagattaggattaaaatggatttaatccatttttaaggctgtgtgaatttttctaaacaagaaccatttgcaatatggatttcttagagattaaaccaattataacttattagcagtcgcgagcacatgttcatatagtcaatgtaaaaatacactaatgagtatttggtaaatcccagtaggcttttaccattagcataattttgtgttgtacaattaagttacaattacatctctaattttggataatattcattggttaacaataaagtgacaaaagctcatgccttc

SEQ ID NO: 173720 - DNA, 3300 bp, Homo sapiens
  Payload ID: 14116
  Gene Symbol: RAF1
  Gene Name: Raf-1 proto-oncogene, serine/threonine kinase
  Uniprot ID: P04049
  ENST ID: ENST00000251849
  CDS Start-End: 441-2387
agtcgactgccagtagggctcgcgcagaatcggagagccggtggcgtcgcaggtcgggaggacgagcaccgagtcgagggctcgctcgtctgggccgcccgagagtcttaatcgcgggcgcttgggccgccatcttagatggcgggagtaagaggaaaacgattgtgaggcgggaacggctttctgctgccttttttgggccccgaaaagggtcagctggccgggctttggggcgcgtgccctgaggcgcggagcgcgtttgctacgatgcgggggctgctcggggctccgtcccctgggctggggacgcgccgaatgtgaccgcctcccgctccctcacccgccgcggggaggaggagcgggcgagaagctgccgccgaacgacaggacgttggggcggcctggctccctcaggtttaagaattgtttaagctgcatcaatggagcacatacagggagcttggaagacgatcagcaatggttttggattcaaagatgccgtgtttgatggctccagctgcatctctcctacaatagttcagcagtttggctatcagcgccgggcatcagatgatggcaaactcacagatccttctaagacaagcaacactatccgtgttttcttgccgaacaagcaaagaacagtggtcaatgtgcgaaatggaatgagcttgcatgactgccttatgaaagcactcaaggtgaggggcctgcaaccagagtgctgtgcagtgttcagacttctccacgaacacaaaggtaaaaaagcacgcttagattggaatactgatgctgcgtctttgattggagaagaacttcaagtagatttcctggatcatgttcccctcacaacacacaactttgctcggaagacgttcctgaagcttgccttctgtgacatctgtcagaaattcctgctcaatggatttcgatgtcagacttgtggctacaaatttcatgagcactgtagcaccaaagtacctactatgtgtgtggactggagtaacatcagacaactcttattgtttccaaattccactattggtgatagtggagtcccagcactaccttctttgactatgcgtcgtatgcgagagtctgtttccaggatgcctgttagttctcagcacagatattctacacctcacgccttcacctttaacacctccagtccctcatctgaaggttccctctcccagaggcagaggtcgacatccacacctaatgtccacatggtcagcaccaccctgcctgtggacagcaggatgattgaggatgcaattcgaagtcacagcgaatcagcctcaccttcagccctgtccagtagccccaacaatctgagcccaacaggctggtcacagccgaaaacccccgtgccagcacaaagagagcgggcaccagtatctgggacccaggagaaaaacaaaattaggcctcgtggacagagagattcaagctattattgggaaatagaagccagtgaagtgatgctgtccactcggattgggtcaggctcttttggaactgtttataagggtaaatggcacggagatgttgcagtaaagatcctaaaggttgtcgacccaaccccagagcaattccaggccttcaggaatgaggtggctgttctgcgcaaaacacggcatgtgaacattctgcttttcatggggtacatgacaaaggacaacctggcaattgtgacccagtggtgcgagggcagcagcctctacaaacacctgcatgtccaggagaccaagtttcagatgttccagctaattgacattgcccggcagacggctcagggaatggactatttgcatgcaaagaacatcatccatagagacatgaaatccaacaatatatttctccatgaaggcttaacagtgaaaattggagattttggtttggcaacagtaaagtcacgctggagtggttctcagcaggttgaacaacctactggctctgtcctctggatggccccagaggtgatccgaatgcaggataacaacccattcagtttccagtcggatgtctactcctatggcatcgtattgtatgaactgatgacgggggagcttccttattctcacatcaacaaccgagatcagatcatcttcatggtgggccgaggatatgcctccccagatcttagtaagctatataagaactgccccaaagcaatgaagaggctggtagctgactgtgtgaagaaagtaaaggaagagaggcctctttttccccagatcctgtcttccattgagctgctccaacactctctaccgaagatcaaccggagcgcttccgagccatccttgcatcgggcagcccacactgaggatatcaatgcttgcacgctgaccacgtccccgaggctgcctgtcttctagttgactttgcacctgtcttcaggctgccaggggaggaggagaagccagcaggcaccacttttctgctccctttctccagaggcagaacacatgttttcagagaagctgctgctaaggaccttctagactgctcacagggccttaacttcatgttgccttcttttctatccctttgggccctgggagaaggaagccatttgcagtgctggtgtgtcctgctccctccccacattccccatgctcaaggcccagccttctgtagatgcgcaagtggatgttgatggtagtacaaaaagcaggggcccagccccagctgttggctacatgagtatttagaggaagtaaggtagcaggcagtccagccctgatgtggagacacatgggattttggaaatcagcttctggaggaatgcatgtcacaggcgggactttcttcagagagtggtgcagcgccagacattttgcacataaggcaccaaacagcccaggactgccgagactctggccgcccgaaggagcctgctttggtactatggaacttttcttaggggacacgtcctcctttcacagcttctaaggtgtccagtgcattgggatggttttccaggcaaggcactcggccaatccgcatctcagccctctcagggagcagtcttccatcatgctgaattttgtcttccaggagctgcccctatggggcggggccgcagggccagccttgtttctctaacaaacaaacaaacaaacagccttgtttctctagtcacatcatgtgtatacaaggaagccaggaatacaggttttcttgatgatttgggttttaattttgtttttattgcacctgacaaaatacagttatctgatggtccctcaattatgttattttaataaaataaattaaatttaggtgtaa

SEQ ID NO: 173721 - DNA, 962 bp, Homo sapiens
  Payload ID: 14116
  Gene Symbol: RAF1
  Gene Name: Raf-1 proto-oncogene, serine/threonine kinase
  ENST ID: ENST00000416093
  CDS Start-End: 340-549
agagtcttaatcgcgggcgcttgggccgccatcttagatggcgggagtaagaggaaaacgattgtgaggcgggaacggctttctgctgccttttttgggccccgaaaagggtcagctggccgggctttggggcgcgtgccctgaggcgcggagcgcgtttgctacgatgcgggggctgctcggggctccgtcccctgggctggggacgcgccgaatgtgaccgcctcccgctccctcacccgccgcggggaggaggagcgggcgagaagctgccgccgaacgacaggacgttggggcggcctggctccctcaggtttaagaattgtttaagctgcatcaatggagcacatacagggagcttggaagacgatcagcaatggttttggattcaaagatgccgtgtttgatggctccagctgcatctctcctacaatagttcagcagtttggctatcagcgccgggcatcagatgatggcaaactcacagatccttctaagacaagcaacactatccgtgttttcttgccgaacaagcaaagaacagtgtaaaaaagcacgcttagattggaatactgatgctgcgtctttgattggagaagaacttcaagtagatttcctggatcatgttcccctcacaacacacaactttgctcggaagacgttcctgaagcttgccttctgtgacatctgtcagaaattcctgctcaatggatttcgatgtcagacttgtggctacaaatttcatgagcactgtagcaccaaagtacctactatgtgtgtggactggagtaacatcagacaactcttttctcagcacagatattctacacctcacgccttcacctttaacacctccagtccctcatctgaaggttccctctcccagaggcagaggtcgacatccacacctaatgtccacatggtcagcaccaccctgcctgtggacagcaggatgattgagg

SEQ ID NO: 173722 - DNA, 1831 bp, Homo sapiens
  Payload ID: 14116
  Gene Symbol: RAF1
  Gene Name: Raf-1 proto-oncogene, serine/threonine kinase
  ENST ID: ENST00000432427
  CDS Start-End: 1-1584
aggggcctgcaaccagagtgctgtgcagtgttcagacttctccacgaacacaaaggtaaaaaagcacgcttagattggaatactgatgctgcgtctttgattggagaagaacttcaagtagatttcctggatcatgttcccctcacaacacacaactttgctcggaagacgttcctgaagcttgccttctgtgacatctgtcagaaattcctgctcaatggatttcgatgtcagacttgtggctacaaatttcatgagcactgtagcaccaaagtacctactatgtgtgtggactggagtaacatcagacaactcttttctcagcacagatattctacacctcacgccttcacctttaacacctccagtccctcatctgaaggttccctctcccagaggcagaggtcgacatccacacctaatgtccacatggtcagcaccaccctgcctgtggacagcaggatgattgaggatgcaattcgaagtcacagcgaatcagcctcaccttcagccctgtccagtagccccaacaatctgagcccaacaggctggtcacagccgaaaacccccgtgccagcacaaagagagcgggcaccagtatctgggacccaggagaaaaacaaaattaggcctcgtggacagagagattcaagctattattgggaaatagaagccagtgaagtgatgctgtccactcggattgggtcaggctcttttggaactgtttataagggtaaatggcacggagatgttgcagtaaagatcctaaaggttgtcgacccaaccccagagcaattccaggccttcaggaatgaggtggctgttctgcgcaaaacacggcatgtgaacattctgcttttcatggggtacatgacaaaggacaacctggcaattgtgacccagtggtgcgagggcagcagcctctacaaacacctgcatgtccaggagaccaagtttcagatgttccagctaattgacattgcccggcagacggctcagggaatggactatttgcatgcaaagaacatcatccatagagacatgaaatccaacaatatatttctccatgaaggcttaacagtgaaaattggagattttggtttggcaacagtaaagtcacgctggagtggttctcagcaggttgaacaacctactggctctgtcctctggatggccccagaggtgatccgaatgcaggataacaacccattcagtttccagtcggatgtctactcctatggcatcgtattgtatgaactgatgacgggggagcttccttattctcacatcaacaaccgagatcagatcatcttcatggtgggccgaggatatgcctccccagatcttagtaagctatataagaactgccccaaagcaatgaagaggctggtagctgactgtgtgaagaaagtaaaggaagagaggcctctttttccccagatcctgtcttccattgagctgctccaacactctctaccgaagatcaaccggagcgcttccgagccatccttgcatcgggcagcccacactgaggatatcaatgcttgcacgctgaccacgtccccgaggctgcctgtcttctagttgactttgcacctgtcttcaggctgccaggggaggaggagaagccagcaggcaccacttttctgctccctttctccagaggcagaacacatgttttcagagaagctgctgctaaggaccttctagactgctcacagggccttaacttcatgttgccttcttttctatccctttgggccctgggagaaggaagccatttgcagtgctggtgtgtcctgctccctccccacattccccatgctcaagg

SEQ ID NO: 173723 - DNA, 2354 bp, Homo sapiens
  Payload ID: 14116
  Gene Symbol: RAF1
  Gene Name: Raf-1 proto-oncogene, serine/threonine kinase
  ENST ID: ENST00000423275
  CDS Start-End: 340-549
agagtcttaatcgcgggcgcttgggccgccatcttagatggcgggagtaagaggaaaacgattgtgaggcgggaacggctttctgctgccttttttgggccccgaaaagggtcagctggccgggctttggggcgcgtgccctgaggcgcggagcgcgtttgctacgatgcgggggctgctcggggctccgtcccctgggctggggacgcgccgaatgtgaccgcctcccgctccctcacccgccgcggggaggaggagcgggcgagaagctgccgccgaacgacaggacgttggggcggcctggctccctcaggtttaagaattgtttaagctgcatcaatggagcacatacagggagcttggaagacgatcagcaatggttttggattcaaagatgccgtgtttgatggctccagctgcatctctcctacaatagttcagcagtttggctatcagcgccgggcatcagatgatggcaaactcacagatccttctaagacaagcaacactatccgtgttttcttgccgaacaagcaaagaacagtgtaaaaaagcacgcttagattggaatactgatgctgcgtctttgattggagaagaacttcaagtagatttcctggatcatgttcccctcacaacacacaactttgctcggaagacgttcctgaagcttgccttctgtgacatctgtcagaaattcctgctcaatggatttcgatgtcagacttgtggctacaaatttcatgagcactgtagcaccaaagtacctactatgtgtgtggactggagtaacatcagacaactcttattgtttccaaattccactattggtgatagtggagtcccagcactaccttctttgactatgcgtcgtatgcgagagtctgtttccaggatgcctgttagttctcagcacagatattctacacctcacgccttcacctttaacacctccagtccctcatctgaaggttccctctcccagaggcagaggtcgacatccacacctaatgtccacatggtcagcaccaccctgcctgtggacagcaggatgattgaggatgcaattcgaagtcacagcgaatcagcctcaccttcagccctgtccagtagccccaacaatctgagcccaacaggctggtcacagccgaaaacccccgtgccagcacaaagagagcgggcaccagtatctgggacccaggagaaaaacaaaattaggcctcgtggacagagagattcaagctattattgggaaatagaagccagtgaagtgatgctgtccactcggattgggtcaggctcttttggaactgtttataagggtaaatggcacggagatgttgcagtaaagatcctaaaggttgtcgacccaaccccagagcaattccaggccttcaggaatgaggtggctgttctgcgcaaaacacggcatgtgaacattctgcttttcatggggtacatgacaaaggacaacctggcaattgtgacccagtggtgcgagggcagcagcctctacaaacacctgcatgtccaggagaccaagtttcagatgttccagctaattgacattgcccggcagacggctcagggaatggactatttgcatgcaaagaacatcatccatagagacatgaaatccaacaatatatttctccatgaaggcttaacagtgaaaattggagattttggtttggcaacagtaaagtcacgctggagtggttctcagcaggttgaacaacctactggctctgtcctctggatggccccagaggtgatccgaatgcaggataacaacccattcagtttccagtcggatgtctactcctatggcatcgtattgtatgaactgatgacgggggagcttccttattctcacatcaacaaccgagatcagatcatcttcatggtgggccgaggatatgcctccccagatcttagtaagctatataagaactgccccaaagcaatgaagaggctggtagctgactgtgtgaagaaagtaaaggaagagaggcctctttttccccagatcctgtcttccattgagctgctccaacactctctaccgaagatcaaccggagcgcttccgagccatccttgcatcgggcagcccacactgaggatatcaatgcttgcacgctgaccacgtccccgaggctgcctgtcttctagttgactttgcacctgtcttcaggctgccaggggaggaggagaagccagcaggcaccacttttctgctccctttctccagaggcagaacacatgttttcagagaagctgctgctaaggaccttctagactgctcacagggccttaacttcatgttgccttcttttctatccctttgggccct

SEQ ID NO: 173724 - DNA, 3085 bp, Homo sapiens
  Payload ID: 14116
  Gene Symbol: RAF1
  Gene Name: Raf-1 proto-oncogene, serine/threonine kinase
  Uniprot ID: P04049
  ENST ID: ENST00000442415
  CDS Start-End: 363-2369
ggctcgctcgtctgggccgcccgagagtcttaatcgcgggcgcttgggccgccatcttagatggcgggagtaagaggaaaacgattgtgaggcgggaacggctttctgctgccttttttgggccccgaaaagggtcagctggccgggctttggggcgcgtgccctgaggcgcggagcgcgtttgctacgatgcgggggctgctcggggctccgtcccctgggctggggacgcgccgaatgtgaccgcctcccgctccctcacccgccgcggggaggaggagcgggcgagaagctgccgccgaacgacaggacgttggggcggcctggctccctcaggtttaagaattgtttaagctgcatcaatggagcacatacagggagcttggaagacgatcagcaatggttttggattcaaagatgccgtgtttgatggctccagctgcatctctcctacaatagttcagcagtttggctatcagcgccgggcatcagatgatggcaaactcacagatccttctaagacaagcaacactatccgtgttttcttgccgaacaagcaaagaacagtggtcaatgtgcgaaatggaatgagcttgcatgactgccttatgaaagcactcaaggtgaggggcctgcaaccagagtgctgtgcagtgttcagacttctccacgaacacaaaggtaaaaaagcacgcttagattggaatactgatgctgcgtctttgattggagaagaacttcaagtagatttcctggatcatgttcccctcacaacacacaactttgctcggaagacgttcctgaagcttgccttctgtgacatctgtcagaaattcctgctcaatggatttcgatgtcagacttgtggctacaaatttcatgagcactgtagcaccaaagtacctactatgtgtgtggactggagtaacatcagacaactcttattgtttccaaattccactattggtgatagtggagtcccagcactaccttctttgactatgcgtcgtatgcgagagtctgtttccaggatgcctgttagttctcagcacagatattctacacctcacgccttcacctttaacacctccagtccctcatctgaaggttccctctcccagaggcagaggtcgacatccacacctaatgtccacatggtcagcaccaccctgcctgtggacagcaggatgattgagaataacaacctgagtgcttctcccagggcgtggtccagacgattttgtttgaggggaagagatgcaattcgaagtcacagcgaatcagcctcaccttcagccctgtccagtagccccaacaatctgagcccaacaggctggtcacagccgaaaacccccgtgccagcacaaagagagcgggcaccagtatctgggacccaggagaaaaacaaaattaggcctcgtggacagagagattcaagctattattgggaaatagaagccagtgaagtgatgctgtccactcggattgggtcaggctcttttggaactgtttataagggtaaatggcacggagatgttgcagtaaagatcctaaaggttgtcgacccaaccccagagcaattccaggccttcaggaatgaggtggctgttctgcgcaaaacacggcatgtgaacattctgcttttcatggggtacatgacaaaggacaacctggcaattgtgacccagtggtgcgagggcagcagcctctacaaacacctgcatgtccaggagaccaagtttcagatgttccagctaattgacattgcccggcagacggctcagggaatggactatttgcatgcaaagaacatcatccatagagacatgaaatccaacaatatatttctccatgaaggcttaacagtgaaaattggagattttggtttggcaacagtaaagtcacgctggagtggttctcagcaggttgaacaacctactggctctgtcctctggatggccccagaggtgatccgaatgcaggataacaacccattcagtttccagtcggatgtctactcctatggcatcgtattgtatgaactgatgacgggggagcttccttattctcacatcaacaaccgagatcagatcatcttcatggtgggccgaggatatgcctccccagatcttagtaagctatataagaactgccccaaagcaatgaagaggctggtagctgactgtgtgaagaaagtaaaggaagagaggcctctttttccccagatcctgtcttccattgagctgctccaacactctctaccgaagatcaaccggagcgcttccgagccatccttgcatcgggcagcccacactgaggatatcaatgcttgcacgctgaccacgtccccgaggctgcctgtcttctagttgactttgcacctgtcttcaggctgccaggggaggaggagaagccagcaggcaccacttttctgctccctttctccagaggcagaacacatgttttcagagaagctgctgctaaggaccttctagactgctcacagggccttaacttcatgttgccttcttttctatccctttgggccctgggagaaggaagccatttgcagtgctggtgtgtcctgctccctccccacattccccatgctcaaggcccagccttctgtagatgcgcaagtggatgttgatggtagtacaaaaagcaggggcccagccccagctgttggctacatgagtatttagaggaagtaaggtagcaggcagtccagccctgatgtggagacacatgggattttggaaatcagcttctggaggaatgcatgtcacaggcgggactttcttcagagagtggtgcagcgccagacattttgcacataaggcaccaaacagcccaggactgccgagactctggccgcccgaaggagcctgctttggtactatggaacttttcttaggggacacgtcctcctttcacagcttctaaggtgtccagtgcattgggatggttttccaggcaaggcactcggccaatccgcatctcagccctctcagggagcagtcttccatcatgctgaattttgtcttccaggagctgcccctatggggcggggccgcagggccag

SEQ ID NO: 173725 - DNA, 5827 bp, Homo sapiens
  Payload ID: 14117
  Gene Symbol: RFTN2
  Gene Name: raftlin family member 2
  Uniprot ID: Q52LD8
  ENST ID: ENST00000295049
  CDS Start-End: 538-2043
gagggaaaacagaaaaagaattgtgtgccactatgtctgaatatatcttctacttgtagataattacatccaagttgcccttttgcctttttatttccgtttttggacacctctttttatcatccagccaactggaatagacaaagcaccgctggtgccctgagcgacagaactctggtagggggctggctgtaaattgacgtggcatggaaattctccgctaagttgtagcagcttgcatgtttctctaagatcaagcccagcctcctggagctgtagcttaatcatgggttcaatgactttacagaaaaatggatagaaaaattcttcaactcctttctttggacccagatggttttttttgggttttttttttttttttggtttttgcttttttttttttttttggttatctatagtttagctgaaaacaaaatcaaagcagttaagtctgtaactttctttttgcagcttaaacaacagaatttgctgctctccctcccctttcctgcaatttaattccttacagattttgccatggggtgcggacttagaaagctagaagaccctgatgatagcagccctggaaaaatattttctaccctgaagagaccgcaagtggaaacaaagacagaatttgcttacgaatatgtattgctggattttactctacaagcttcatcaaacccagaagtcatcaagataaattcaattctggatatagtaacaaaagtggaaaactattatcttaaaggatatattgtcggggctattcatcctgttatacaacctgtggggcagcgaaaacacctacctgcaagttacctatacagagtggtgctattgcgcttgaaattaagcccaaagaattcggcagcacccagtggacaaagacgcccaaggctcgtgattgaggaatgtcccctaacttctgaggcacaaacaaatgacgcagcaaaagaactgatagaaaagattaatgtcgctgctaaaagaggaatgaaatttgttggattcatatcacagcattattctccatctaaattctgcaatggaaccaaccatgatggagatatagaatcgatgctacatgtgagacacggttcagatgaaaactgtagaagttggaatgaagggacgttaagtgggcagtcatctgaaagcggaattgaggaagaacttcatcatgaaagtggacagtatcaaatggaacaaaatggcagccctacttcctctaaatcaagaaagggagaagcctcagataacaaattgtatacagtcttcaatgcttttgatgatgattcaacctcctgggcctatcaggaaggcatcctgtcaatgaaagtaacaagaaaaggatcagtcattagtacacttgatgctgattggctggagttaactaccttttattataaacaaggcttgtctttaattgattcttttgtattctgggaaacatctaaaggggaacatttgcctaaatctttggaaggattttttatctatgaagaagaaggttctggagttccaggttctagtaggaaaggaaatgatgccatcgtagtagaacaatggactgttattgagggatgtgaaatcaaaacagattatggccctctgctgcacactctggctgaattcggatggcttctgacaagcgtgttgcccacacctgtattgagacatgacagtgaagggaatttggctacaaagcagatcgtattccttcagaggccagttatgtggaattcagctgctcaaacaccagataagaaagccagccgccacataaaaggtgaagacaagaataaagccactagtagaagcatcggattagacacaacctcgtcacaacctgcagagagcagacacctgcctgaggagtgccgcctttctccctcccgggaatgctggacaaaggagggaaggctggcacagcacaacagcttctctgggttcagcagcagtgacaacgtcctccgggaattagacgacggacagtttgatcaggaagatggagtgactcaggtcacttgtatgtgagccatgaggtgaagcaaaggaaggccctgtaaataattgttaaaatcattgccaactgaccttattgtattactttctctgcatttatgtaatatttttgaatttttccagacccagcctttcctctaatctatgtaaactttggcacaacctcccagacaaggaagaataaccaacatatttatacatttagaatcatgtttacacttctctcaactaaaacatctggttaaacagatgttccattcggttattacacaataatctatttcagcttctcatgaatgtacaaagtagactttcttacaattcctggtaaggagactgaatatctcaatcagtattttacccaattagagagagttctcaggaagttacagtcttatttaagctgaaaaataacctctctctctctttttttttctctctctctcatacacacacacagctaattagtgcaaataaatatctatttcccaaatataataattaatccacattttgtctttaactatagcatgtatatacaaagcaagcccctatgtgttaaaatattttttgaaaaaaatcttttttatgtatctttgcttttaaagggtcatgtcaccaaccctgtactgattcattgtacataaatgttgttgctcctaaaagcctaaaaatgcagacagcaaagcagcatctcttaaaattcaatatgaaaagaacccataatctcaatacataaataccttagtagagagtaagatttaatttttttttattttaaagtccaaatactatgaagaggaaaaatatcaacttcaatttgaaactgaagtcttttacatctgtctagatttgaattctgcttttattttgacttgttaaatcctgaagaatgttgaaacctagaattttcaatctggcaggagtagaaagatgctcatagcacacgcgatatgtatgataacatattttgtttcatcttgcttttctttccccttctaatagaggtggctttgccttgacccagcctttaacaatctttaaaattctacaaaataaaggattttcatttatctatgaaaggcttactttgaaagatggaacctccaagtgaattacaacttattctatcattgatgaattcagcctattatatatttttattaacattgatgttgacattgtaagatcattttaataataaaacatcatttttattgtgttattgttttattgaacacaaatattcatataatatgtttggtttgggggttttttgtggctttttttgagacggagtctcactctgtcacccaggctggaatgcagtggcacagtcgcagctcactgcaacctccacctcctggcttcaagcgattctcctgcctcagcctccagattagctggaactacagccagtgtgcgccaccacgcccagctaatttttgtatttttagtagagatggggtttcaccatgttggccaggatggtctcgatctcttgacctcatgatctgcctgccttgtcctcccaaaatgctgggattacaggcgtgagccaccatgcctggccttcatataatatgttttatacatataacagatatgtattacatgttatcaattatatagtgtatctaaactaagtcaatctccattaattgctgataaaattaacaggaattattccacttttatcatccagaagtacagtataaaggaatttaagaatattcttctcagtcttattctatagcaatagctgtcaacaatatttgcagaaatggtttttgttttgacttttagatggacttgagttccataatcaagagttagtggatttttggtagaaacaatcactgcttcaggagtccataaaacgtaatgaagttaggaagcacaaagaacaaatcagaaagatctgtttttcccaattccagggtctacaagaggtagagacttctttatcattcagcccacatacataggggattggaagtagtaaattaaaaacagagataggaatttatatttgactaagaaaaaactcagaaatatagcaataactttttttttttttttttttttttgagacagagcctcactctgtcacccaggctgcaatctcggcttactgcaacctccgcctcccaggttcaagtgactctcctgcctcagcctcctgagtagcagggattacaggcctgcaccaccatgcctggctaagttttgtaattttagtagagatggggtttcaccatgttggccaggctggtctcgaactcctggcctcaagcaatccacccaccttggcctcccaatgtgctgggattacaggtgtgagccactgcacccagccaagcaatcgcttttttaaaaaatttgtgtaagcatactttctcagtttatttttttctcccctcccgtttatttttaatctgagttatttcttattaaaataacttttattaaaataaacttactagtctgtcatatcctcaaaacttgttttagaagcatttgctccaacaattacccttaagttatgtgatgaatttgtatgatagcgaataatttatgatcaagtggttctagagtattttaaatgtgtgtaaatagctatgagcctattattttaaaaaaagaaaaaaacttgggctctctatgcctaaggagttaaatatgtctaattttattatctgccagttgtatattcagttctttttataacactatgatttccttaggggctctggcatgtgaatttttaaaacctgtaagttataatgaaaggtatcaagatcccagatgttgggtgaagatctgccattccccttggtgtagtatctatggcattttcatcttcgttttcaataccaagtgttaattccatcccctttggattgtataccaccttgttatcttttatggacacatttaacacctacctaatcaccagggaaatcagctctatcagtgtcattacaattcatttcagtaaaagagaaaaggaaaggtcaccctctttgagagattctagggctttcaggaggaggagaagcaggagacagagctacagtctattcaaatcacaactatctccaaatcatttgtgttatcaggagcaggtgtttatatatttgaatataaatgtaacagatgcattttcatttctttcattctggagtgccagaggagctgtcccgttttcccgcccttgcctgttattgattcctcaccaccattccttcttggctggaaggactgtggccctttccctccccatatggctaaagaggatttctttctcttaactcttcagagccccagagtagtactgtatggaaagtgtaaattcagatggagaatcaaatgaagtgaaattgctaacaatggggatagtatataactaagaacacattatataaaaatgtactagtggatacatagaaaaactagctaaatgttactcatcagaacttgtaacatatcaatttaaataacatttgctggtaatctatcatcccttgagaatgaattttatttgtgtaatagtgcaaagtttgcagaaccaggtctgtcagatatttaagttctgagatggtgtttgaggcagaaaattaggcaaaactgtaaaatgatgagcctcagttttgatgaggttcataaagttttggtgaagacgactgcaaaagaaatgggttctaaacatgttttgagcattcaaatttttgtatgtaaaaataccaagtaattaaatcaatggaataaatgaatcatttatgtgtaagataaa

SEQ ID NO: 173726 - DNA, 584 bp, Homo sapiens
  Payload ID: 14117
  Gene Symbol: RFTN2
  Gene Name: raftlin family member 2
  ENST ID: ENST00000454447
  CDS Start-End: 1-582
ggattttttatctatgaagaagaaggttctggagttccaggttctagtaggaaaggaaatgatgccatcgtagtagaacaatggactgttattgagggatgtgaaatcaaaacagattatggccctctgctgcacactctggctgaattcggatggcttctgacaagcgtgttgcccacacctgtattgagacatgacagtgaagggaatttggctacaaagcagatcgtattccttcagaggccagttatgtggaattcagctgctcaaacaccagatatgtgggtaagacagtgtgaaaagaataagaagaaagccagccgccacataaaaggtgaagacaagaataaagccactagtagaagcatcggattagacacaacctcgtcacaacctgcagagagcagacacctgcctgaggagtgccgcctttctccctcccgggaatgctggacaaaggagggaaggctggcacagcacaacagcttctctgggttcagcagcagtgacaacgtcctccgggaattagacgacggacagtttgatcaggaagatggagtgactcaggtcacttgtatgtgagc

SEQ ID NO: 173727 - DNA, 584 bp, Homo sapiens
  Payload ID: 14117
  Gene Symbol: RFTN2
  Gene Name: raftlin family member 2
  ENST ID: ENST00000429081
  CDS Start-End: 236-584
tttcttggtagtagttgagaggaaggagggtaggcgcaggacagagaggagagggaaaacagaaaaagaattgtgtgccactatgtctgaatatatcttctacttgtagataattacatccaagttgcccttttgcctttttatttccgtttttggacacctctttttatcatccagccaactggaatagacaaagcaccgctggtgccctgagcgacagaactctgattttgccatggggtgcggacttagaaagctagaagaccctgatgatagcagccctggaaaaatattttctaccctgaagagaccgcaagtggaaacaaagacagaatttgcttacgaatatgtattgctggattttactctacaagcttcatcaaacccagaagtcatcaagataaattcaattctggatatagtaacaaaagtggaaaactattatcttaaaggatatattgtcggggctattcatcctgttatacaacctgtggggcagcgaaaacacctacctgcaagttacctatacagagtggtgctattgcgcttgaaattaagcccaaagaattcggcagcacccagtg

SEQ ID NO: 173728 - DNA, 2982 bp, Homo sapiens
  Payload ID: 14118
  Gene Symbol: RFTN1
  Gene Name: raftlin, lipid raft linker 1
  Uniprot ID: Q14699
  ENST ID: ENST00000334133
  CDS Start-End: 274-2010
cgtcggggctggagccggagcgcgccgggcgctgggcgcagcgagcgagagcgcggcggccgcgggctccggcgagggacagacgcaccgatcgccggagggacagacacacgaccacgcggcgccaccgcccacgcctccacccaccggcgcccaagtcctccccgcgccgcctcctctgtatggcacaaactttcctcccgggacggaacacgctgcctcagggagcccgcgaccgcgccttctcctccgccggtcccatacgctgctgaaatgggttgcggattgaacaagttagagaaacgtgatgaaaaacggcctgggaatatttattcaactttgaagaggcctcaggtggaaaccaagatagatgtgtcctatgaataccgcttcctggagttcacgactctgagtgctgcggagctccctgggtcctcagcagtgaggctggcctccctgcgtgacctgcccgcccagctcctggagctgtaccagcagggcttctcgctggcggccctgcaccccttcgtgcagcccacccatgagcgggagaagacgcccctggagcacatctttagagccatcctgatcaagaaaaccgacagatctcagaaaactgatcttcacaatgaaggctacatcttggaattagattgctgttcctccttagaccacccgacagaccagaaactcatcccagagttcattaagaagatccaggaggctgcaagccagggcctgaaattcgttggtgttatacctcagtaccattcctctgtgaactcggcaggcagcagtgctccggtgtctactgccaacagcaccgaggatgccagagatgcaaaaaacgcacgtggggatcacgcgtcactggagaatgagaaaccggggactggggatgtgtgcagtgctccggctgggagaaaccaaagcccagagcccagctcaggccccagaggggaggtgcccctcgccaagcagcccagctcaccctccggagagggagatggtggagaactttcaccacagggggtgagcaagacactggatggaccggagagcaaccccttggaggtgcatgaagagccactctcagggaaaatggagatcttcacccttttcaacaaaccgaagagccatcagaagtgccggcaatactaccctgtcaccattcctctccatgtctccaagaatggccagacagtgagcggtttggacgccaactggttagagcacatgagcgaccacttccggaaaggaggcatgctggtgaacgcagtcttctaccttggaatagtgaatgattccttacatggcttgacagatggagtattcatctttgaagctgtttccacagaagatagcaaaaccatacagggctatgatgctattgtggttgaacaatggacagtcctggaaggtgtcgaagtgcagacagactacgtgcccctgctgaactcgctggcggcctatggctggcagctcacctgtgtgctaccaactcccgtcgtcaagactaccagcgaggggagtgtatccaccaagcagattgtctttcttcagagaccttgtctacctcagaaaatcaagaagaaggaatcgaagtttcagtggcgattctccagagaagaaatgcacaacaggcagatgaggaaatcaaaaggtaaactcagtgccagagacaaacaacaagcagaagaaaatgagaagaacttagaagaccagtcttccaaagctggagacatgggaaactgtgtttcaggacagcagcaggagggtggagtctccgaggagatgaagggccctgtccaagaggacaagggagaacagctgtcccctggtggcctgctgtgtggggtgggtgtggagggtgaggctgtgcagaatggtcctgccagccacagcagggccctggtggggatttgcactgggcactccaatcctggagaggatgccagggacggggatgctgaggaagtcagagagcttggtacggttgaagaaaactgagtcttgggcaatttgtgctaaaactaggtgagttgccaaacccaaggcatcttaccaacagctggtttgggggctggtttccctggtgttgtgtgttacctaccctttggcttggcttgacctctccttgtgagctcacctgagccctcccagggccaggttcctgacagtgttggtttttgcacatccactggaaaggtgtcattaatgacccagtgttagaatgcaagaggtcaggttattctagccctcatggctgaaggcccagtcctggctccaccactcctccagccagagggtctggaccatccagtgcctgtcctcgccacagggcctccagggagcattcgggtcaaatccatggacaccctgggctacaaaccaaggctgctgttcatcccacatcgtgtggggcagtgtccatcccctgcagctacttggtgacttaacaactccaggagccctgtcagctgccctcctccacctaaaccccttcgactcttctgctttgacaaagaaaatgacattggggaggggaggtgctccgcctcccagcttttctcaaaatagtcctatagatactggtaatctggaaatgaagaagtaattctgtctctgcacctacttttgcagaatgttcaaggaagtattctgtgttagtattaatgccaaaaagttgtttttaaaggttttgtactcagcacatcatacaaaccacattacttctgtcacttcagggcatcgggactggctggcgcccttgttatgtgctattttaatcagtgtaacattggtcaagttgttacccatgtatgctgtgtttatcatgtgtatatcgtccagaaagtattaaggctttaggtagatgcaactggcgaaccttggagagggaatgctgattgtcttgaccaaacccacagcctgtctcttctcttgtttagttacttacggcaataaatcatctatgagtta

SEQ ID NO: 173729 - DNA, 599 bp, Homo sapiens
  Payload ID: 14118
  Gene Symbol: RFTN1
  Gene Name: raftlin, lipid raft linker 1
  ENST ID: ENST00000441460
  CDS Start-End: 151-599
gggtttgctctggggacagaggtgctggacgtgtaggagcagacatgccgcgcgctccgaggaagcgccggaaccaccagaagcacagggacgcgggtgccgagagtccccagcactgaaaacggggatctcctcttctcagctgctgaaatgggttgcggattgaacaagttagagaaacgtgatgaaaaacggcctgggaatatttattcaactttgaagaggcctcaggtggaaaccaagatagatgtgtcctatgaataccgcttcctggagttcacgactctgagtgctgcggagctccctgggtcctcagcagtgaggctggcctccctgcgtgacctgcccgcccagctcctggagctgtaccagcagggcttctcgctggcggccctgcaccccttcgtgcagcccacccatgagcgggagaagacgcccctggagcacatctttagagccatcctgatcaagaaaaccgacagatctcagaaaactgatcttcacaatgaaggctacatcttggaattagattgctgttcctccttagaccacccgacagaccagaaactcatcccagagttcattaagaagatccagga

SEQ ID NO: 173730 - DNA, 555 bp, Homo sapiens
  Payload ID: 14118
  Gene Symbol: RFTN1
  Gene Name: raftlin, lipid raft linker 1
  ENST ID: ENST00000431547
  CDS Start-End: 213-555
aaatcttgaaggatccttgtctcccaggcgctcttcctgacagcacacaaccttgattaggaggggctgggagggaggatcgatgagcccctgacccctgggttctgaggctgccagggtcgcttgcagctcggccgcgtggaggtgaccgggcggaactccgagggggcgcggggagagctgggcgggcccaccgctccagcgctgctgaaatgggttgcggattgaacaagttagagaaacgtgatgaaaaacggcctgggaatatttattcaactttgaagaggcctcaggtggaaaccaagatagatgtgtcctatgaataccgcttcctggagttcacgactctgagtgctgcggagctccctgggtcctcagcagtgaggctggcctccctgcgtgacctgcccgcccagctcctggagctgtaccagcagggcttctcgctggcggccctgcaccccttcgtgcagcccacccatgagcgggagaagacgcccctggagcacatctttagagccatcctgatcaagaaaaccgacagatctcagaaaa

SEQ ID NO: 173731 - DNA, 2695 bp, Homo sapiens
  Payload ID: 14118
  Gene Symbol: RFTN1
  Gene Name: raftlin, lipid raft linker 1
  ENST ID: ENST00000432519
  CDS Start-End: 84-1712
ctcgtacagtccttcatcttcatggcagaaaggctgttctgcccctgcgccctccctggcctctctggggatccctgcagctgatgtattgtgatggagcagtggacttggatgctgctgcggagctccctgggtcctcagcagtgaggctggcctccctgcgtgacctgcccgcccagctcctggagctgtaccagcagggcttctcgctggcggccctgcaccccttcgtgcagcccacccatgagcgggagaagacgcccctggagcacatctttagagccatcctgatcaagaaaaccgacagatctcagaaaactgatcttcacaatgaaggctacatcttggaattagattgctgttcctccttagaccacccgacagaccagaaactcatcccagagttcattaagaagatccaggaggctgcaagccagggcctgaaattcgttggtgttatacctcagtaccattcctctgtgaactcggcaggcagcagtgctccggtgtctactgccaacagcaccgaggatgccagagatgcaaaaaacgcacgtggggatcacgcgtcactggagaatgagaaaccggggactggggatgtgtgcagtgctccggctgggagaaaccaaagcccagagcccagctcaggccccagaggggaggtgcccctcgccaagcagcccagctcaccctccggagagggagatggtggagaactttcaccacagggggtgagcaagacactggatggaccggagagcaaccccttggaggtgcatgaagagccactctcagggaaaatggagatcttcacccttttcaacaaaccgaagagccatcagaagtgccggcaatactaccctgtcaccattcctctccatgtctccaagaatggccagacagtgagcggtttggacgccaactggttagagcacatgagcgaccacttccggaaaggaggcatgctggtgaacgcagtcttctaccttggaatagtgaatgattccttacatggcttgacagatggagtattcatctttgaagctgtttccacagaagatagcaaaaccatacagggctatgatgctattgtggttgaacaatggacagtcctggaaggtgtcgaagtgcagacagactacgtgcccctgctgaactcgctggcggcctatggctggcagctcacctgtgtgctaccaactcccgtcgtcaagactaccagcgaggggagtgtatccaccaagcagattgtctttcttcagagaccttgtctacctcagaaaatcaagaagaaggaatcgaagtttcagtggcgattctccagagaagaaatgcacaacaggcagatgaggaaatcaaaaggtaaactcagtgccagagacaaacaacaagcagaagaaaatgagaagaacttagaagaccagtcttccaaagctggagacatgggaaactgtgtttcaggacagcagcaggagggtggagtctccgaggagatgaagggccctgtccaagaggacaagggagaacagctgtcccctggtggcctgctgtgtggggtgggtgtggagggtgaggctgtgcagaatggtcctgccagccacagcagggccctggtggggatttgcactgggcactccaatcctggagaggatgccagggacggggatgctgaggaagtcagagagcttggtacggttgaagaaaactgagtcttgggcaatttgtgctaaaactaggtgagttgccaaacccaaggcatcttaccaacagctggtttgggggctggtttccctggtgttgtgtgttacctaccctttggcttggcttgacctctccttgtgagctcacctgagccctcccagggccaggttcctgacagtgttggtttttgcacatccactggaaaggtgtcattaatgacccagtgttagaatgcaagaggtcaggttattctagccctcatggctgaaggcccagtcctggctccaccactcctccagccagagggtctggaccatccagtgcctgtcctcgccacagggcctccagggagcattcgggtcaaatccatggacaccctgggctacaaaccaaggctgctgttcatcccacatcgtgtggggcagtgtccatcccctgcagctacttggtgacttaacaactccaggagccctgtcagctgccctcctccacctaaaccccttcgactcttctgctttgacaaagaaaatgacattggggaggggaggtgctccgcctcccagcttttctcaaaatagtcctatagatactggtaatctggaaatgaagaagtaattctgtctctgcacctacttttgcagaatgttcaaggaagtattctgtgttagtattaatgccaaaaagttgtttttaaaggttttgtactcagcacatcatacaaaccacattacttctgtcacttcagggcatcgggactggctggcgcccttgttatgtgctattttaatcagtgtaacattggtcaagttgttacccatgtatgctgtgtttatcatgtgtatatcgtccagaaagtattaaggctttaggtagatgcaactggcgaaccttggagagggaatgctgattgtcttgaccaaacccacagcctgtctcttctcttgtttagttacttacggcaataaatcatctatgagttagtgcaccgtga

SEQ ID NO: 173732 - DNA, 1137 bp, Homo sapiens
  Payload ID: 14118
  Gene Symbol: RFTN1
  Gene Name: raftlin, lipid raft linker 1
  ENST ID: ENST00000451036
  CDS Start-End: 313-1137
atggaccgggtctctggcgggtagtgggaaccgcgcgtggcgcctccctgcaggttgctctttgccggggctccggagctgccagagcagcaccccctggcccgcgtcggatggggacctgggctgatccttgggacgcctggatcttgggccaacttttttttgcggggaacgggtgtaggggagtcattcctggagcgatgtagggagaggcacttcggagcagcctgttgggggtcgtaggctctgcaggctcagaagcgcctaggaaggacgcagaggtgggggagcttggaggctacagctgctgaaatgggttgcggattgaacaagttagagaaacgtgatgaaaaacggcctgggaatatttattcaactttgaagaggcctcaggtggaaaccaagatagatgtgtcctatgaataccgcttcctggagttcacgactctgagtgctgcggagctccctgggtcctcagcagtgaggctggcctccctgcgtgacctgcccgcccagctcctggagctgtaccagcagggcttctcgctggcggccctgcaccccttcgtgcagcccacccatgagcgggagaagacgcccctggagcacatctttagagccatcctgatcaagaaaaccgacagatctcagaaaactgatcttcacaatgaaggctacatcttggaattagattgctgttcctccttagaccacccgacagaccagaaactcatcccagagttcattaagaagatccaggaggctgcaagccagggcctgaaattcgttggtgttatacctcagtaccattcctctgtgaactcggcaggcagcagtgctccggtgtctactgccaacagcaccgaggatgccagagatgcaaaaaacgcacgtggggatcacgcgtcactggagaatgagaaaccggggactggggatgtgtgcagtgctccggctgggagaaaccaaagcccagagcccagctcaggccccagaggggaggtgcccctcgccaagcagcccagctcaccctccggagagggagatggtggagaactttcaccacagggggtgagcaagacactggatggaccggagagcaaccccttggaggtgcatgaagagccactctcaggg

SEQ ID NO: 173733 - DNA, 578 bp, Homo sapiens
  Payload ID: 14118
  Gene Symbol: RFTN1
  Gene Name: raftlin, lipid raft linker 1
  ENST ID: ENST00000449415
  CDS Start-End: 130-578
gaggtgctggacgtgtaggagcagacatgccgcgcgctccgaggaagcgccggaaccaccagaagcacagggacgcgggtgccgagagtccccagcactgaaaacggggatctcctcttctctgctgaaatgggttgcggattgaacaagttagagaaacgtgatgaaaaacggcctgggaatatttattcaactttgaagaggcctcaggtggaaaccaagatagatgtgtcctatgaataccgcttcctggagttcacgactctgagtgctgcggagctccctgggtcctcagcagtgaggctggcctccctgcgtgacctgcccgcccagctcctggagctgtaccagcagggcttctcgctggcggccctgcaccccttcgtgcagcccacccatgagcgggagaagacgcccctggagcacatctttagagccatcctgatcaagaaaaccgacagatctcagaaaactgatcttcacaatgaaggctacatcttggaattagattgctgttcctccttagaccacccgacagaccagaaactcatcccagagttcattaagaagatccagga

SEQ ID NO: 173734 - DNA, 577 bp, Homo sapiens
  Payload ID: 14118
  Gene Symbol: RFTN1
  Gene Name: raftlin, lipid raft linker 1
  ENST ID: ENST00000453536
  CDS Start-End: 90-443
ggcacaaactttcctcccgggacggaacacgctgcctcagggagcccgcgaccgcgccttctcctccgccggtcccatacgctgctgaaatgggttgcggattgaacaagttagagaaacgtgatgaaaaacggcctgggaatatttattcaactttgaagaggcctcaggtggaaaccaagatagatgtgtcctatgaataccgcttcctggagttcacgactctgagtgctgcggagctccctgggtcctcagcagtgaggctggcctccctgcgtgacctgcccgcccagctcctggagctgtaccagcagggcttctcgctggcggccctgcaccccttcgtgcagcccacccatgagcgggagaagacgcccctggagcacatctttagagccatcctgatcaagaaaaccgacaggaaatcacatctctgccagtagtacccttttattctcactcctttcagaaaattcctttggaatggtgaaatacagcctctcaaatctccagtgctctgtatctcagaaaactgatcttcacaatgaaggctacatcttggaattagattgctgtt

SEQ ID NO: 173735 - DNA, 616 bp, Homo sapiens
  Payload ID: 14118
  Gene Symbol: RFTN1
  Gene Name: raftlin, lipid raft linker 1
  ENST ID: ENST00000607320
  CDS Start-End: 1-267
gtgcagacagactacgtgcccctgctgaactcgctggcggcctatggctggcagctcacctgtgtgctaccaactcccgtcgtcaagactaccagcgaggggagtgtatccaccaagcagattgtctttcttcagagaccttgtctacctcagaaaatcaagaagaaggaatcgaagtttcagtggcgattctccagagaagaaatgcacaacaggcagatgaggaaatcaaaagttacttacggcaataaatcatctatgagttagtgcaccgtgaggattgagtgtttatcgtgtcactaggaacagtcctggcctcatgtccaaaggattccagcccacaccccccattcactataagtttctaactcctggcagcatgatgacgtggtggaggaagacaaagttcccatggaaagctgcagagccagctaggcttgctgtgctttctcgtcatttgtagaaagagatggcaagtggaactcagatgccaccagtttcttcacagctctgagcatcaatcgcctcaagtgtgaaatggggtgaaatggcacccacctctttggatttttgtgaggattaataagatgtgaataaagtgcttggtccatggtaa

SEQ ID NO: 173736 - DNA, 6336 bp, Homo sapiens
  Payload ID: 14119
  Gene Symbol: RALGPS1
  Gene Name: Ral GEF with PH domain and SH3 binding motif 1
  Uniprot ID: Q5JS13
  ENST ID: ENST00000259351
  CDS Start-End: 268-1941
cgccgctcaggccctggagcggacggttcctactgcggctgggcaccggctccgctcccgcgtctgcccgcgctccagctgcgcctggcccggccccggcccggctcggcgtggccccggcctccaagcgaaggcgccgctgccgctgggccgctcccagggccatgaggaagcggcggcagccactgcggcccgcgtcaaggacttctccagacaggttatgttacctgcagaggctgccctgaagctccctgtggcctggagactatgtacaagaggaatggtctgatggctagcgtgttggtcacctctgccactccacagggcagcagcagctcggactctctggagggccagagctgcgactatgccagcaagagctatgatgccgttgtcttcgatgtcttgaaagtgaccccagaggagtttgctagccagattacattaatggatatacctgtgtttaaagctatccagccggaggaactagccagctgtggatggagtaagaaggagaaacacagtcttgcccctaacgttgtggcctttacccggaggtttaaccaggtcagtttttgggttgtacgagaaattctaacagcacagactttaaaaataagggcagaaatcctcagccattttgtgaaaatagccaagaaacttctagaactcaacaaccttcattctctcatgtctgtggtatcagcattacaaagtgctcccatcttcaggctgacaaaaacctgggctcttttaaatcgaaaagacaagactacctttgagaaattggactacctgatgtcgaaagaagataattacaagcggacacgggaatatatccgaagcctgaagatggttccaagtattccctatctaggaatctatcttctggatttaatctacattgattctgcatatcctgcctcaggcagtatcatggaaaatgaacaaagatccaatcagatgaacaatattcttcgaataattgctgatttacaagtttcctgcagctatgatcacctcaccaccctgccccatgtgcagaagtacctgaagtccgtacgctacattgaagagctccagaagtttgtggaagacgacaactacaaactgtcgctcagaatcgaaccaggaagcagctctccaagactagtctcttccaaggaagatcttgcaggtccctctgctggctccggttctgcgaggttcagccggaggcccacctgtcctgacacatctgttgctggcagcctccccacacctccagtccccagacacaggaagagccacagcctaggcaacaatatgatgtgtcagttgagtgtagttgagagtaaaagtgcgacattcccatcggagaaagcaaggcacctactggacgacagtgtcctagagtcccgcagcccccgaaggggcctggctctgacctcctcctctgctgtcaccaatggactctccctaggcagtagtgagagctcagagtttagtgaagagatgtcttcagggctggaaagccccaccggcccgtgcatctgttctctggggaactccgcagctgtgcccaccatggaggggcctctgagaagaaaaaccctgctcaaggaagggcggaagcctgcgctgtcctcgtggaccaggtactgggtcatactctcaggatccaccctcctgtactacggagccaagtccttgcggggcacagacagaaaacactataaatccacacctggcaaaaaggtttccatcgtgggctggatggtgcagctgcccgatgaccccgagcacccagatatcttccagctgaacaaccctgacaaaggcaatgtttacaagtttcagactggttcccgatttcatgcaatactgtggcacaagcatttggatgatgcatgtaaaagcaacaggcctcaggtacctgcaaaccttatgtcatttgagtaagtctctgcaggacgtggcatgacttcagaggcttctgggaacccaggctgggcctggtggtgaagagcagtcctgggcacaggctgtgagccagggtgctgggaaactcacagctggactcaggggacacggcctgtggcctcaccatcccagagggcttcaccagtgtgggatccacctgtcagtccccagcgactctcatgacactcattctgcagcaccgcctcttggggcagtggtcagaccccacacgccctctctgggcccaccacctgcatctgcgactagagagcacccggcccacgttgggttctcagtgctttctactgcacagagtggacagcgctaactaacctgtgagaggggcccgagagaaggaacagctgtggaacaggctttttacaccccaagtgcatggggttgctcgcccacagggctgcctcagattttgtacaaccccgaagcgtcctctgcgtgtgcgtgctgtacgtgtgtgtgtgtgtgtgagcgagtgtgaactcttcaagaaacatgcattttggcacaagactcgtgacatcacacacttcattcgctttgaggccctgctttaaccttaagttatagccctgtccaccgaggaaggtcagggtgagagcctagattcctcctgtgtcaagggtccctcgcattcttttactgtaaacaaacaatgccttaaattgtgtcttgttttctgttcctatgggtgctattcatctggaaggcctgcttccaggcctctttgctgtcagcccttctgagacaggacctggcttcaggactgtggactgggctgctggcctgcttgcttcctcccttccccattcctagcagggcctgaggccctcctcttctcgcccttcccaccatgccagaatgggaagttgtgacgttgcagctccaaccgacgtgctcatagtgatcagctgtgcaggagccatgaggcaccaacctctccccgcagggcaaagcctgtgcccccatcatctcactcctttgcctgcactgccagggtggggcccaccaagattcctgatcatgacgggaagctgagtgaccctgaggccttaagcttccccagtcttggccccaaatgcagtcaccagcaagttttccattttccaagtccaagggcacaattgttgatgaccgtgtgacaatagagcgaagccccggggagtgaacggtccaacctctgcattcagttaggagctcttcacatgaatcacatccttatctgtcaccttgtgtcacattttaaagtgacttttattttgcacaaataatttttattcagaataataaatcactctttatcatagtatcttctcttccctcttcccctttagtttggatagcctaactctgagaagttaacccttaaacagttttctggaagagactgaatttctgggtccttgcagctgtgatggtttcagagctcagactgatcaggcatcaagctaccctcaagagtttctgggctggatgtttcagaacaacatctacaccagtaaagtgtaataggtcagtttcaaaacgaccaaaagacccaccactgtattttgaccaaataatgacaacttctttagaaatttgaatggcttggtgaggaaagtagttgtcaccagggcctcattttgtagttgagccttacaatgcttagtagttcatcttctttttgagcaaagactagaatactttcctcctaagagaaactcccaggtgataaaagttgatgccatcaaaccttgacaccgggtgctctgcacacccacgcggatgttgcacctcattctcccgatgactattcaaatcagcatctagaggctgaatgacaatgccaaacactccacctctgatcagaaccatgcagtgttaacactttaacctacattgaatctgattctacctgttaacttttaaaaagtcgtaagtttggatgaaagtgcaagatgtggaacatcaactacctattttccttgggtttttccactctgcaaactgtcctggtttttcacaccaatgaagtattatagatgccaatccaaaacctcagaatttcaggcaccacaaaaacaggtaattttctatcccttataagtttgtcttttctttcagaaacatctcttagcctaatttgaaatagcacaatcacaattcaaaatgtttagtcttctcactaattgagtctgcttccacgtcctctcccaggaacattcttagctcggactcttgaagaatctctttagattttgttggcaaaagccttatagaagcagtaagaggcttgaccacgccggaagagtcctggagctaaagctggaagacactcagctctctaagcaggggctcggccaaacatgggagttaagtgctgcttgtcttcccagtgttggtttgaaccctgtgagcctgagacagagagggccaggcaccaaccacaaggcgggaaagtccatgggtagaccctccccctggagggaagcatttctagtttttgctccttgactgtccagagtgtacaaatgttcataacgccattgaagggattatttcttgcatgcatatgctgaatttttttaagcaaatggatcatggcaccccaaaatgaaagttatagaaagctgtctacaactgtggagttggtagctggtaacattgttgtctcaagaacaactcacctctctccctaggactaatttttgtctctctcagttgaacatgttttgtcattcaagatcagtcaggtgcattctggcaactgacatacttgatggaggattgattcggtagagagcagtagaaatcttgttctaactgtgcctggtgagagactttggccccctccctccctataaggctgtggaacctgaggaagtagatacttgaagagattctgtttaggaagaaactcactctcttttgccagttgaatttatagagcattttttttcttaccaagatggccagtatcattttacccccacctcccaagccccaagaggtgtaccttttcagatgccattttacaggcggaaatgctccatgaaacaggaagccacttgcaagcaacatctgctctgttcctcaggtggggcccagagcccttccccgagactgctgatgtctgtaaccactggggagcactgccaaaaatacagctttctggtttgtgagcccataaatgacttaaatcagctttacatcatttttacatatcaagtggtttcatgttaaaaaacaaactcctagtcctttagaaataacagattctctgcacaaaaccacccattcattcatttattcattcacagcactagcaagtgctgcctatgctgagaacaagtcagatctgatccctgccctcatggacctgaccactcaacaaacagtccccaccacacctatctccttaggcaagactttgcctctctcctagtcctgagtataaatcctgtgcatagattcctctagaaaggcatcaaaaggctcaacagactgaatggcctcttggtctgcgaaaattcagttgcaatgaggatgaagtcactatcctagaggctgcttggcccagaagagccaggcacagagctgcagttgggcacgccaaggattccaaaggtggaatgagagagtagggtcaaactgtcacagtatctgctccataggtttctgtttttaatttcaatgttaaatacaactacaatatgagcgagaactgcattttcttgggtgttgagaacttgtaccatggacttcagaccgccttgcagccgtatgctgcacaagcgtgtacaccccctgggcagcctcaaaaccccgcttacagcagcaacacaggagatcatctgtccattttagaaccattaatctctttatccattgctgaacgactgtgactattcagtaacgaagtaatagtaattaattagtatggtataatctttaataaatttcgtgccaaaatgcatggttttccacttagcattcaaaatgttgcatagagagtagttttcaatttcttatgtactcttcgaagtaagttgaaaatcagtttctacattttaattcgtttcctgttaaatctgttgcactctcctgggctgtctttttctccagcagacccctgcatgcagttgtgtaaggactttctctaattcttgtgaatcgtctcacccgcagtaaccactgaacgtcaatcagccctccatggggttctttcgatttttggtgaagtattttgttacctcagtcttgtatcaagttgctgtatttttcagcttgttacattgataataattatttcactaattaaatactttaatgtacaaacatctttgtttactttgaaattaaatgtgttttccaatg

SEQ ID NO: 173737 - DNA, 770 bp, Homo sapiens
  Payload ID: 14119
  Gene Symbol: RALGPS1
  Gene Name: Ral GEF with PH domain and SH3 binding motif 1
  ENST ID: ENST00000319107
  CDS Start-End: 252-770
gctcccgcgtctgcccgcgctccagctgcgcctggcccggccccggcccggctcggcgtggccccggcctccaagcgaaggcgccgctgccgctgggccgctcccagggccatgaggaagcggcggcagccactgcggcccgcgtcaaggtgaccggccgggactgcggcggcggggagagcggcggacttctccagacaggttatgttacctgcagaggctgccctgaagctccctgtggcctggagactatgtacaagaggaatggtctgatggctagcgtgttggtcacctctgccactccacagggcagcagcagctcggactctctggagggccagagctgcgactatgccagcaagagctatgatgccgttgtcttcgatgtcttgaaagtgaccccagaggagtttgctagccagattacattaatggatatacctgtgtttaaagctatccagccggaggaactagccagctgtggatggagtaagaaggagaaacacagtcttgcccctaacgttgtggcctttacccggaggtttaaccagaaacttctagaactcaacaaccttcattctctcatgtctgtggtatcagcattacaaagtgctcccatcttcaggctgacaaaaacctgggctcttttaaatcgaaaagacaagactacctttgagaaattggactacctgatgtcgaaagaagataattacaagcggacacgggaatatatccgaagcctgaagatggttccaagtattccctatcta

SEQ ID NO: 173738 - DNA, 2466 bp, Homo sapiens
  Payload ID: 14119
  Gene Symbol: RALGPS1
  Gene Name: Ral GEF with PH domain and SH3 binding motif 1
  Uniprot ID: Q5JS13
  ENST ID: ENST00000373434
  CDS Start-End: 66-1655
gacttctccagacaggttatgttacctgcagaggctgccctgaagctccctgtggcctggagactatgtacaagaggaatggtctgatggctagcgtgttggtcacctctgccactccacagggcagcagcagctcggactctctggagggccagagctgcgactatgccagcaagagctatgatgccgttgtcttcgatgtcttgaaagtgaccccagaggagtttgctagccagattacattaatggatatacctgtgtttaaagctatccagccggaggaactagccagctgtggatggagtaagaaggagaaacacagtcttgcccctaacgttgtggcctttacccggaggtttaaccaggtcagtttttgggttgtacgagaaattctaacagcacagactttaaaaataagggcagaaatcctcagccattttgtgaaaatagccaagaaacttctagaactcaacaaccttcattctctcatgtctgtggtatcagcattacaaagtgctcccatcttcaggctgacaaaaacctgggctcttttaaatcgaaaagacaagactacctttgagaaattggactacctgatgtcgaaagaagataattacaagcggacacgggaatatatccgaagcctgaagatggttccaagtattccctatctaggaatctatcttctggatttaatctacattgattctgcatatcctgcctcaggcagtatcatggaaaatgaacaaagatccaatcagatgaacaatattcttcgaataattgctgatttacaagtttcctgcagctatgatcacctcaccaccctgccccatgtgcagaagtacctgaagtccgtacgctacattgaagagctccagaagtttgtggaagacgacaactacaaactgtcgctcagaatcgaaccaggaagcagctctccaagactagtctcttccaaggaagatcttgcaggtccctctgctggctccggttctgcgaggttcagccggaggcccacctgtcctgacacatctgttgctggcagcctccccacacctccagtccccagacacaggaagagccacagcctaggcaacaacaggggacgtctctatgccaccctggggcccaactggcgggttccagttaggaattctcccagaacccggagctgtgtctacagccccaccggcccgtgcatctgttctctggggaactccgcagctgtgcccaccatggaggggcctctgagaagaaaaaccctgctcaaggaagggcggaagcctgcgctgtcctcgtggaccaggtactgggtcatactctcaggatccaccctcctgtactacggagccaagtccttgcggggcacagacagaaaacacgtttccatcgtgggctggatggtgcagctgcccgatgaccccgagcacccagatatcttccagctgaacaaccctgacaaaggcaatgtttacaagtttcagactggttcccgatttcatgcaatactgtggcacaagcatttggatgatgcatgtaaaagcaacaggcctcaggaagccggagcagctccaggtccaacaggaactgacagccacgaggtggaccacctggagggcggtgcggggaaggaggcagggccctgtgcctgaagcctgggcaccatggtggccccagtcaggagcaacagtggtagccctgagtaaaacccattgtccctctttggaggagcggccagaggatgacagcagccccagcaggcagcagtgcctgggcaggctgatccagcagagcactaatgggtcagtttcatgtattggcagatgtggtgtagcatggcaaggctacaagttttaaggatttttgtctgattttcagacctggaggaggggatttttcttcctactttcccccttttttatttctaatttactttcaaccaaatattcccactatgtgctatatgtaataataaaaagttgacaacaactgaaatattcaacagcagaggatgatttaagtgaatcacagtacatccgtgtgatggaatgccaggagggtgtaagaaagagtgtgacagaaatgcatctattcacaaggaaacatcgcagtgactagagtgattttctgttctgtggaactgcatgtcctaaacttgtttttattaacactgaatacacttaaaccttatctataacatatgtataggtataaacaacagcaataaaacaccttattgccaccatgagcctaacagcagagccaccagggccttggaatgctgtccctcaccatggcctcttcctaattcggtttctctccctcccacctgtgccccagcaccactctcctgatttgtttgctgattattcctttagaattgcaggtcacgtacttgattccttcatgtgttgtctggggtgcatttttaaactttcttataaatagaaccataaagatgca

SEQ ID NO: 173739 - DNA, 1667 bp, Homo sapiens
  Payload ID: 14119
  Gene Symbol: RALGPS1
  Gene Name: Ral GEF with PH domain and SH3 binding motif 1
  Uniprot ID: Q5JS13
  ENST ID: ENST00000373436
  CDS Start-End: 228-1145
gctgcgcctggcccggccccggcccggctcggcgtggccccggcctccaagcgaaggcgccgctgccgctgggccgctcccagggccatgaggaagcggcggcagccactgcggcccgcgtcaaggtgaccggccgggactgcggcggcggggagagcggcggacttctccagacaggttatgttacctgcagaggctgccctgaagctccctgtggcctggagactatgtacaagaggaatggtctgatggctagcgtgttggtcacctctgccactccacagggcagcagcagctcggactctctggagggccagagctgcgactatgccagcaagagctatgatgccgttgtcttcgatgtcttgaaagtgaccccagaggagtttgctagccagattacattaatggatatacctgtgtttaaagctatccagccggaggaactagccagctgtggatggagtaagaaggagaaacacagtcttgcccctaacgttgtggcctttacccggaggtttaaccaggtcagtttttgggttgtacgagaaattctaacagcacagactttaaaaataagggcagaaatcctcagccattttgtgaaaatagccaagaaacttctagaactcaacaaccttcattctctcatgtctgtggtatcagcattacaaagtgctcccatcttcaggctgacaaaaacctgggctcttttaaatcgaaaagacaagactacctttgagaaattggactacctgatgtcgaaagaagataattacaagcggacacgggaatatatccgaagcctgaagatggttccaagtattccctatctaggaatctatcttctggatttaatctacattgattctgcatatcctgcctcaggcagtatcatggaaaatgaacaaagatccaatcagatgaacaatattcttcgaataattgctgatttacaagtttcctgcagctatgatcacctcaccaccctgccccatgtgcagaagtacctgaagtccgtacgctacattgaagagctccagaagtttgtggaagacgacaactacaaactgtcgctcagaatcgaaccaggaagcagctctccaagactagtctcttccaaggaagatcttgcagccatgtgagaccagaaaccagcaagccagccaacctccagcatcagagccctggcaggggacagaatggaccccagatggttcacatgaagagactttaatgaacagaaccaataaagcatggcgaggcacccatgggccggcccagggtcctggggagggtggagccctaggctaaagggcatggggaagaagtgttaccaatcccagggatggctgagttctggaggatgattggctgtgcagggtctgtgggcagggagggggaagcaggagcgagcagagaaaaatccctggcctccctttcctccagccctcagtctgccaccagagcctttcattggccaaatccaatagaaagctgggggcaaggggtccaggagatgcatctcaggggtcagcctcccccgaacagaagtggcaagtgggcagggcaaaaaatgcagctgaattgtgtgaacagactactcagcatactgccaagcctcagtgtctctatctgtaaagtgggcataaaatcttcctccttca

SEQ ID NO: 173740 - DNA, 819 bp, Homo sapiens
  Payload ID: 14119
  Gene Symbol: RALGPS1
  Gene Name: Ral GEF with PH domain and SH3 binding motif 1
  Uniprot ID: Q5JS13
  ENST ID: ENST00000394011
  CDS Start-End: 273-599
ctgcggctgggcaccggctccgctcccgcgtctgcccgcgctccagctgcgcctggcccggccccggcccggctcggcgtggccccggcctccaagcgaaggcgccgctgccgctgggccgctcccagggccatgaggaagcggcggcagccactgcggcccgcgtcaaggtgaccggccgggactgcggcggcggggagagcggcggacttctccagacaggttatgttacctgcagaggctgccctgaagctccctgtggcctggagactatgtacaagaggaatggtctgatggctagcgtgttggtcacctctgccactccacagggcagcagcagctcggactctctggagggccagagctgcgactatgccagcaagagctatgatgccgttgtcttcgatgtcttgaaagtgaccccagaggagtttgctagccagattacattaatggatatacctgtgtttaaagctatccagccggagaaaggctggcctgccagaatggaagactccctgcagaagtccacagtttcctccaggccacatgacacgttgcagttcaggaaaacactgcctgtgggtccaggaacctgaccctctggccttttgtctggatgccgtttgcctgctctgaagaagcgggcgttccagaaagccgaggtcaatgttggacgtcggacaaaccctgtgtgtctttgctgctccttggaatcagtgtttggccctcggagagggaagaatgtggccagcaggcagtcatttgtaaagtggagattggtttccctgacatcattaaaacccctctctcaggtca

SEQ ID NO: 173741 - DNA, 1672 bp, Homo sapiens
  Payload ID: 14119
  Gene Symbol: RALGPS1
  Gene Name: Ral GEF with PH domain and SH3 binding motif 1
  Uniprot ID: Q5JS13
  ENST ID: ENST00000394022
  CDS Start-End: 293-1447
cctggagcggacggttcctactgcggctgggcaccggctccgctcccgcgtctgcccgcgctccagctgcgcctggcccggccccggcccggctcggcgtggccccggcctccaagcgaaggcgccgctgccgctgggccgctcccagggccatgaggaagcggcggcagccactgcggcccgcgtcaaggtgaccggccgggactgcggcggcggggagagcggcggacttctccagacaggttatgttacctgcagaggctgccctgaagctccctgtggcctggagactatgtacaagaggaatggtctgatggctagcgtgttggtcacctctgccactccacagggcagcagcagctcggactctctggagggccagagctgcgactatgccagcaagagctatgatgccgttgtcttcgatgtcttgaaagtgaccccagaggagtttgctagccagattacattaatggatatacctgtgtttaaagctatccagccggaggaactagccagctgtggatggagtaagaaggagaaacacagtcttgcccctaacgttgtggcctttacccggaggtttaaccaggtcagtttttgggttgtacgagaaattctaacagcacagactttaaaaataagggcagaaatcctcagccattttgtgaaaatagccaagaaacttctagaactcaacaaccttcattctctcatgtctgtggtatcagcattacaaagtgctcccatcttcaggctgacaaaaacctgggctcttttaaatcgaaaagacaagactacctttgagaaattggactacctgatgtcgaaagaagataattacaagcggacacgggaatatatccgaagcctgaagatggttccaagtattccctatctaggaatctatcttctggatttaatctacattgattctgcatatcctgcctcaggcagtatcatggaaaatgaacaaagatccaatcagatgaacaatattcttcgaataattgctgatttacaagtttcctgcagctatgatcacctcaccaccctgccccatgtgcagaagtacctgaagtccgtacgctacattgaagagctccagaagtttgtggaagacgacaactacaaactgtcgctcagaatcgaaccaggaagcagctctccaagactagtctcttccaaggaagatcttgcagtctcccatctcagcagcctgtcacatcaaggtcaagcagaagaggcaagactcaaacccacctctggccaacaccctgcctggatgtggcccagctcctcacgagtaccagcggctcccccagcatctgctgctccgcgctccccgtggcctaggaatctaagaaatgatcaaggtcaaccaggtgcagtggctctcacctgtaatcccagcactttgggaagccgaagcaggaggatcacttgagcccaggagttcaagaccagcctgggcaacatggcaaaaccccatctctacaaaagtatataaatgatctgggcatggtggtgcgtgcctacagccccagctcctcagggcttaggcgagatcgcttgatcccaggagggggaggctacagtgagccgtgatcgcgccaccgcgctccagcttgggtgacagagcaagaccttgtctcaggaaaaaaaaaaaaaa

SEQ ID NO: 173742 - DNA, 4858 bp, Homo sapiens
  Payload ID: 14119
  Gene Symbol: RALGPS1
  Gene Name: Ral GEF with PH domain and SH3 binding motif 1
  ENST ID: ENST00000438723
  CDS Start-End: 1-461
ggaattctcccagaacccggagctgtgtctacagccccaccggcccgtgcatctgttctctggggaactccgcagctgtgcccaccatggaggggcctctgagaagaaaaaccctgctcaaggaagggcggaagcctgcgctgtcctcgtggaccaggtactgggtcatactctcaggatccaccctcctgtactacggagccaagtccttgcggggcacagacagaaaacactataaatccacacctggcaaaaaggtttccatcgtgggctggatggtgcagctgcccgatgaccccgagcacccagatatcttccagctgaacaaccctgacaaaggcaatgtttacaagtttcagactggttcccgatttcatgcaatactgtggcacaagcatttggatgatgcatgtaaaagcaacaggcctcaggtacctgcaaaccttatgtcatttgagtaagtctctgcaggacgtggcatgacttcagaggcttctgggaacccaggctgggcctggtggtgaagagcagtcctgggcacaggctgtgagccagggtgctgggaaactcacagctggactcaggggacacggcctgtggcctcaccatcccagagggcttcaccagtgtgggatccacctgtcagtccccagcgactctcatgacactcattctgcagcaccgcctcttggggcagtggtcagaccccacacgccctctctgggcccaccacctgcatctgcgactagagagcacccggcccacgttgggttctcagtgctttctactgcacagagtggacagcgctaactaacctgtgagaggggcccgagagaaggaacagctgtggaacaggctttttacaccccaagtgcatggggttgctcgcccacagggctgcctcagattttgtacaaccccgaagcgtcctctgcgtgtgcgtgctgtacgtgtgtgtgtgtgtgtgagcgagtgtgaactcttcaagaaacatgcattttggcacaagactcgtgacatcacacacttcattcgctttgaggccctgctttaaccttaagttatagccctgtccaccgaggaaggtcagggtgagagcctagattcctcctgtgtcaagggtccctcgcattcttttactgtaaacaaacaatgccttaaattgtgtcttgttttctgttcctatgggtgctattcatctggaaggcctgcttccaggcctctttgctgtcagcccttctgagacaggacctggcttcaggactgtggactgggctgctggcctgcttgcttcctcccttccccattcctagcagggcctgaggccctcctcttctcgcccttcccaccatgccagaatgggaagttgtgacgttgcagctccaaccgacgtgctcatagtgatcagctgtgcaggagccatgaggcaccaacctctccccgcagggcaaagcctgtgcccccatcatctcactcctttgcctgcactgccagggtggggcccaccaagattcctgatcatgacgggaagctgagtgaccctgaggccttaagcttccccagtcttggccccaaatgcagtcaccagcaagttttccattttccaagtccaagggcacaattgttgatgaccgtgtgacaatagagcgaagccccggggagtgaacggtccaacctctgcattcagttaggagctcttcacatgaatcacatccttatctgtcaccttgtgtcacattttaaagtgacttttattttgcacaaataatttttattcagaataataaatcactctttatcatagtatcttctcttccctcttcccctttagtttggatagcctaactctgagaagttaacccttaaacagttttctggaagagactgaatttctgggtccttgcagctgtgatggtttcagagctcagactgatcaggcatcaagctaccctcaagagtttctgggctggatgtttcagaacaacatctacaccagtaaagtgtaataggtcagtttcaaaacgaccaaaagacccaccactgtattttgaccaaataatgacaacttctttagaaatttgaatggcttggtgaggaaagtagttgtcaccagggcctcattttgtagttgagccttacaatgcttagtagttcatcttctttttgagcaaagactagaatactttcctcctaagagaaactcccaggtgataaaagttgatgccatcaaaccttgacaccgggtgctctgcacacccacgcggatgttgcacctcattctcccgatgactattcaaatcagcatctagaggctgaatgacaatgccaaacactccacctctgatcagaaccatgcagtgttaacactttaacctacattgaatctgattctacctgttaacttttaaaaagtcgtaagtttggatgaaagtgcaagatgtggaacatcaactacctattttccttgggtttttccactctgcaaactgtcctggtttttcacaccaatgaagtattatagatgccaatccaaaacctcagaatttcaggcaccacaaaaacaggtaattttctatcccttataagtttgtcttttctttcagaaacatctcttagcctaatttgaaatagcacaatcacaattcaaaatgtttagtcttctcactaattgagtctgcttccacgtcctctcccaggaacattcttagctcggactcttgaagaatctctttagattttgttggcaaaagccttatagaagcagtaagaggcttgaccacgccggaagagtcctggagctaaagctggaagacactcagctctctaagcaggggctcggccaaacatgggagttaagtgctgcttgtcttcccagtgttggtttgaaccctgtgagcctgagacagagagggccaggcaccaaccacaaggcgggaaagtccatgggtagaccctccccctggagggaagcatttctagtttttgctccttgactgtccagagtgtacaaatgttcataacgccattgaagggattatttcttgcatgcatatgctgaatttttttaagcaaatggatcatggcaccccaaaatgaaagttatagaaagctgtctacaactgtggagttggtagctggtaacattgttgtctcaagaacaactcacctctctccctaggactaatttttgtctctctcagttgaacatgttttgtcattcaagatcagtcaggtgcattctggcaactgacatacttgatggaggattgattcggtagagagcagtagaaatcttgttctaactgtgcctggtgagagactttggccccctccctccctataaggctgtggaacctgaggaagtagatacttgaagagattctgtttaggaagaaactcactctcttttgccagttgaatttatagagcattttttttcttaccaagatggccagtatcattttacccccacctcccaagccccaagaggtgtaccttttcagatgccattttacaggcggaaatgctccatgaaacaggaagccacttgcaagcaacatctgctctgttcctcaggtggggcccagagcccttccccgagactgctgatgtctgtaaccactggggagcactgccaaaaatacagctttctggtttgtgagcccataaatgacttaaatcagctttacatcatttttacatatcaagtggtttcatgttaaaaaacaaactcctagtcctttagaaataacagattctctgcacaaaaccacccattcattcatttattcattcacagcactagcaagtgctgcctatgctgagaacaagtcagatctgatccctgccctcatggacctgaccactcaacaaacagtccccaccacacctatctccttaggcaagactttgcctctctcctagtcctgagtataaatcctgtgcatagattcctctagaaaggcatcaaaaggctcaacagactgaatggcctcttggtctgcgaaaattcagttgcaatgaggatgaagtcactatcctagaggctgcttggcccagaagagccaggcacagagctgcagttgggcacgccaaggattccaaaggtggaatgagagagtagggtcaaactgtcacagtatctgctccataggtttctgtttttaatttcaatgttaaatacaactacaatatgagcgagaactgcattttcttgggtgttgagaacttgtaccatggacttcagaccgccttgcagccgtatgctgcacaagcgtgtacaccccctgggcagcctcaaaaccccgcttacagcagcaacacaggagatcatctgtccattttagaaccattaatctctttatccattgctgaacgactgtgactattcagtaacgaagtaatagtaattaattagtatggtataatctttaataaatttcgtgccaaaatgcatggttttccacttagcattcaaaatgttgcatagagagtagttttcaatttcttatgtactcttcgaagtaagttgaaaatcagtttctacattttaattcgtttcctgttaaatctgttgcactctcctgggctgtctttttctccagcagacccctgcatgcagttgtgtaaggactttctctaattcttgtgaatcgtctcacccgcagtaaccactgaacgtcaatcagccctccatggggttctttcgatttttggtgaagtattttgttacctcagtcttgtatcaagttgctgtatttttcagcttgttacattgataataattatttcactaattaaatactttaatgtacaaacatctttgtttactttgaaattaaatgtgttttccaatgaa

SEQ ID NO: 173743 - DNA, 2362 bp, Homo sapiens
  Payload ID: 14119
  Gene Symbol: RALGPS1
  Gene Name: Ral GEF with PH domain and SH3 binding motif 1
  Uniprot ID: Q5JS13
  ENST ID: ENST00000424082
  CDS Start-End: 305-1918
cgccgctcaggccctggagcggacggttcctactgcggctgggcaccggctccgctcccgcgtctgcccgcgctccagctgcgcctggcccggccccggcccggctcggcgtggccccggcctccaagcgaaggcgccgctgccgctgggccgctcccagggccatgaggaagcggcggcagccactgcggcccgcgtcaaggtgaccggccgggactgcggcggcggggagagcggcggacttctccagacaggttatgttacctgcagaggctgccctgaagctccctgtggcctggagactatgtacaagaggaatggtctgatggctagcgtgttggtcacctctgccactccacagggcagcagcagctcggactctctggagggccagagctgcgactatgccagcaagagctatgatgccgttgtcttcgatgtcttgaaagtgaccccagaggagtttgctagccagattacattaatggatatacctgtgtttaaagctatccagccggaggaactagccagctgtggatggagtaagaaggagaaacacagtcttgcccctaacgttgtggcctttacccggaggtttaaccaggtcagtttttgggttgtacgagaaattctaacagcacagactttaaaaataagggcagaaatcctcagccattttgtgaaaatagccaagaaacttctagaactcaacaaccttcattctctcatgtctgtggtatcagcattacaaagtgctcccatcttcaggctgacaaaaacctgggctcttttaaatcgaaaagacaagactacctttgagaaattggactacctgatgtcgaaagaagataattacaagcggacacgggaatatatccgaagcctgaagatggttccaagtattccctatctaggaatctatcttctggatttaatctacattgattctgcatatcctgcctcaggcagtatcatggaaaatgaacaaagatccaatcagatgaacaatattcttcgaataattgctgatttacaagtttcctgcagctatgatcacctcaccaccctgccccatgtgcagaagtacctgaagtccgtacgctacattgaagagctccagaagtttgtggaagacgacaactacaaactgtcgctcagaatcgaaccaggaagcagctctccaagactagtctcttccaaggaagatcttgcaggtccctctgctggctccggttctgcgaggttcagccggaggcccacctgtcctgacacatctgttgctggcagcctccccacacctccagtccccagacacaggaagagccacagcctaggcaacaacaggggacgtctctatgccaccctggggcccaactggcgggttccagttaggaattctcccagaacccggagctgtgtctacagccccaccggcccgtgcatctgttctctggggaactccgcagctgtgcccaccatggaggggcctctgagaagaaaaaccctgctcaaggaagggcggaagcctgcgctgtcctcgtggaccaggtactgggtcatactctcaggatccaccctcctgtactacggagccaagtccttgcggggcacagacagaaaacactataaatccacacctggcaaaaaggtttccatcgtgggctggatggtgcagctgcccgatgaccccgagcacccagatatcttccagctgaacaaccctgacaaaggcaatgtttacaagtttcagactggttcccgatttcatgcaatactgtggcacaagcatttggatgatgcatgtaaaagcaacaggcctcaggaagccggagcagctccaggtccaacaggaactgacagccacgaggtggaccacctggagggcggtgcggggaaggaggcagggccctgtgcctgaagcctgggcaccatggtggccccagtcaggagcaacagtggtagccctgagtaaaacccattgtccctctttggaggagcggccagaggatgacagcagccccagcaggcagcagtgcctgggcaggctgatccagcagagcactaatgggtcagtttcatgtattggcagatgtggtgtagcatggcaaggctacaagttttaaggatttttgtctgattttcagacctggaggaggggatttttcttcctactttcccccttttttatttctaatttactttcaaccaaatattcccactatgtgctatatgtaataataaaaagttgacaacaactgaaatattcaacagcagaggatgatttaagtgaatcacagtacatccgtgtgatggaatgccaggagggtgtaagaaagagtgtgacagaaatgcatctattcac

SEQ ID NO: 173744 - DNA, 906 bp, Homo sapiens
  Payload ID: 14120
  Gene Symbol: RALGPS2
  Gene Name: Ral GEF with PH domain and SH3 binding motif 2
  ENST ID: ENST00000324778
  CDS Start-End: 108-906
gaggcgacggccgcggctgcacaggaataatgtatttgtggccttggacatgaggcagtcagtcctctgttgctgttaacataaggtcagggactgatgaggaaagcatggacctaatgaacgggcaggcaagcagtgtcaatattgcagctactgcttctgagggtcagataacattaatggatgttccagtatttaaagctattcaaccagatgagctttcaagttgtggatggaataaaaaagaaaaatatagttctgcaccaaatgcagttgccttcacaagaagattcaatcatgtaagcttttgggttgttagagagattcttcatgctcaaacattaaaaattagagcagaagttttgagccactatattaaaactgctaagaaactgtatgagctgaataaccttcatgcacttatggcagtggtttctggcctacagagtgccccaattttcaggttgactaaaacatgggcgttattaagtcgaaaagacaaaactacctttgaaaaattagaatatgtaatgagtaaagaagataactacaaaagactcagagactatataagtagcttaaagatgacaccttgcattccctatttaggtatctatttgtcagatttaacatacatcgattcagcatacccatcaactggcagcattctagaaaatgagcaaagatcaaatttaatgaataatatccttcgaataatttctgatttacagcagtcttgtgaatatgatattcccatgttgcctcatgtccaaaaatatctcaactctgttcagtatatagaagaactacaaaaatttgtggaagacgataattacaagctttcattaaagatagaaccagggacaagcaccccacgttctgctgcttccagagaagatttagtag

SEQ ID NO: 173745 - DNA, 438 bp, Homo sapiens
  Payload ID: 14120
  Gene Symbol: RALGPS2
  Gene Name: Ral GEF with PH domain and SH3 binding motif 2
  ENST ID: ENST00000367632
  CDS Start-End: 1-438
gccaagctgaaagttctactctttctagtggaatatcaataggtagcagcgatggttctgaactaagtgaagagacctcatggcctgcttttgaaagttctgcagaatcagaagatttggcagtacatttatatccaggagctgttactattcaaggtgttctcaggagaaaaactttgttaaaagaaggcaaaaagcctacagtagcatcttggacaaaatattgggcagctttgtgtgggacacagcttttttactatgctgccaaatctctaaaggctaccgaaagaaaacatttcaaatcaacatccaataagaacgtatctgtgataggatggatggtgatgatggctgatgaccctgaacatcctgatctcttcctgctgactgactctgagaaaggaaattcgtacaagtttcaagctggcaatagaatga

SEQ ID NO: 173746 - DNA, 7512 bp, Homo sapiens
  Payload ID: 14120
  Gene Symbol: RALGPS2
  Gene Name: Ral GEF with PH domain and SH3 binding motif 2
  Uniprot ID: Q86X27
  ENST ID: ENST00000367634
  CDS Start-End: 357-2030
gcgcgcgcgcgcggctccgccccgcccgcttggcgcgcgcccccgccaggtccgctctcgtcccccacccctggcgcggacggggtggttccagctcactctcctcccccgagcggcagcggcggcggcggcggcggctgctgcgggcgctgaatgagagacggtgactgttcgggtcgacgagtgctactctaggcggcggcggccgtggcggtgaagcgtgaggccggcatcgtctttccgtcctctgaggcgacggccgcggctgcacaggaataatgtatttgtggccttggacatgaggcagtcagtcctctgttgctgttaacataaggtcagggactgatgaggaaagcatggacctaatgaacgggcaggcaagcagtgtcaatattgcagctactgcttctgagaaaagtagcagctctgaatccttaagtgacaaaggctctgaattgaagaaaagctttgatgctgtggtattcgatgttcttaaggttacaccagaagaatatgcgggtcagataacattaatggatgttccagtatttaaagctattcaaccagatgagctttcaagttgtggatggaataaaaaagaaaaatatagttctgcaccaaatgcagttgccttcacaagaagattcaatcatgtaagcttttgggttgttagagagattcttcatgctcaaacattaaaaattagagcagaagttttgagccactatattaaaactgctaagaaactgtatgagctgaataaccttcatgcacttatggcagtggtttctggcctacagagtgccccaattttcaggttgactaaaacatgggcgttattaagtcgaaaagacaaaactacctttgaaaaattagaatatgtaatgagtaaagaagataactacaaaagactcagagactatataagtagcttaaagatgacaccttgcattccctatttaggtatctatttgtcagatttaacatacatcgattcagcatacccatcaactggcagcattctagaaaatgagcaaagatcaaatttaatgaataatatccttcgaataatttctgatttacagcagtcttgtgaatatgatattcccatgttgcctcatgtccaaaaatatctcaactctgttcagtatatagaagaactacaaaaatttgtggaagacgataattacaagctttcattaaagatagaaccagggacaagcaccccacgttctgctgcttccagagaagatttagtaggtcctgaagtaggagcgtctccacagagtggacgaaaaagtgtggcagctgaaggagccttgctcccacagacaccgccatcccctcggaatctgattccacatggacataggaagtgccatagtttgggttataatttcattcataaaatgaacacagcagaatttaagagtgcaacgtttccaaatgcaggaccaagacatctgttagatgatagcgtcatggagccccatgcgccatctcgaggccaagctgaaagttctactctttctagtggaatatcaataggtagcagcgatggttctgaactaagtgaagagacctcatggcctgcttttgaaagttctgcagaatcagaagatttggcagtacatttatatccaggagctgttactattcaaggtgttctcaggagaaaaactttgttaaaagaaggcaaaaagcctacagtagcatcttggacaaaatattgggcagctttgtgtgggacacagcttttttactatgctgccaaatctctaaaggctaccgaaagaaaacatttcaaatcaacatccaataagaacgtatctgtgataggatggatggtgatgatggctgatgaccctgaacatcctgatctcttcctgctgactgactctgagaaaggaaattcgtacaagtttcaagctggcaatagaatgaatgcaatgttatggtttaagcatttgagtgcagcctgccaaagtaacaaacaacaggttcctacaaacttgatgacttttgagtagaagcctgagaaaaaaagagaggtgaactgttgcttctacgtgagcatgaggacctgataaaagagcgccagctataaaccatcctgtgccaggaagagcccagaggctctgtctcagtcgttggagttctcaaccaaaaaagcactaatttcagggaatgatttgagatattcccagagaacaaattggagttgcaaaacaaactgccatgaaccatgcttcttatctcagaactgacctgtggaaaccactgccttaaaagaatgaaaggaaaaccaacatgaaacaccaaatagtgtgtgtgaatcttctggcggtgctgtgcttggaatagatcgtagctaatttgcatttcttttaactttgtaataattttagaggggggaattgccttttttagatatgctttaaaaaggaaaaacatactcttgtggattccatcaggagctggttttgaaccgaggtgaagagacttagcagggattgtaccagcagcccacctgcaaggtttgttctccctctagtagtctgcaacctcactggctttctcacagcaagagtgtaggaatgagaaatgttagtcatgtgagttcttgggtttgtttgggattgggtgggggtgtttgttttgttttggatgaggggagaatttttttaaacactaaacttctgaaatgtagtactgtaaggggaacattatttcctgcaggaggtacaaaggctgtgtgttcatttgccagacgctttttttttaaataggttccagaaaacatggttgtttctaactagggttaaagtttagctttctatatgaattcattgttggaccacagatctgcttaagtaaagagctataatcccaacctaaacttttctgagattttacaataattagatctttttccaagttaattgggttttcccttctcccagtcataggtggtttttatcatcaagacagactgatattttgtcaggatattttcttttacagtgtttgatgtgcataatgccagagttatttttttattattcattttctctctttttgttcaatatgagattcaggatcatatttgtttaaaaggtaacacatagagatgtatgtatatattttgttataagacatacaaaataattttaagagggataaaggtgaaaatatcagattctggaaattttaagtatctaaactttatacttgtatgatttaccataaacataccaaaacatttttctgaaaatttactgtcggtctctgacatgaaaccgtattttgtcagtagttgaccaagcagttttatgagaactcttctatgcaatgatgcatttaatttctaaagtaaatgttgaattattaaaaaaaaagtttgaaggtaagatgccttagaattttaatgaaaaatgacactcaaacaaaggctatatgtcgaatgttataaactcttgagacataatgaattttagcagtggcctagagtaaggtaatgctttgtgactgatatctactaatagacttctgttactttgggcctcacataaaatttctcacattcgtattcttagagaattttatacttttttattataagtattttgcccttgagtccatgaaacttcaatagaaaatattgcttatacaataattagcttaaaatccatccaaaggaaaagagaagagctttttttgagtgttaagttttttaatttagtattctgtttggaaaagatgttaagagttcaaatatgcttcttatgtaacagaaataccattatttctggggtttagtgacacaggctggagaggacaaaagtttcctgtcctgaatgatttttcaattaatgctctaagcttaacccatgttgggtaatagaaagacatagccagcagtattactacgtagaccttgcacatcttacttttgttttgcatttttaaaaatttcttaatttgtttatttctcttcagaaatagcgtttttaacagtgtatgtgcttttttaaaaagtattgtgaatgagaaccctgtggattttttttatttcatttgtttgtcataataagctaacgtagaaatgttgtaggttaaccatatctgtggaaatatgcagttggaagtcagagcctgacatcacatagttttgccaaagggagagagctaagctggaagatgtttttgatactttcggctctaaacattaatggatgtttgcgtagagtaagatagcgttcaaatttggttaatagtttatagatagacttgtggcctctgactgactaaatttcttaacagcacagaagtcgttgtttttctgtctttaaaatttattcattcagaaaattagtcattgctttttaagattattttagcatttgaagcaaattgaaaacagaaaagtgacttaaaatagtgtaggtgaattttttatctataatttaccaaataatacctgataataattcaaagaaaatatgttaccaaaatatattaaatatataggtagttcattcgtgggaagatgaatcttcttattaagcctgccctcaattgtaaataagtgactcaaaaactcaaaatgttcatcagcattcaggtcatttgtttcacccttagccaagaagaactcattagaaattcagttataatttcaatttaagcctgtttatgataagcataatgattggcatgttatatagcctgttgaaaataactacagaatgaccttccagagcactgtttttggcctcgtgcccgctctgttcaggctctgcttgtttttcagaatatgatttttacctccagacagtaagaattgaacaagaactgatcaaacacaccttcctattttgttttcttcactatgtaaatattatttgggcaaacattacaaaaagggatccaaacaatttgagtttcagtatttttttctccctaggcatgtgcttcaatttcaaatatttttttctgtgtggaaaatgccatgtaactattgcactaccttctgtgtggactgtgttggtattggttctttctgtatatcaaaagtcagggtgtttataactgcaaagtttgtataagtggctttattcctcttctagaagatttatgaggagcctaggaagcactattggtacaggaggaaaaaagaatggaaaacatgtttacagactctagctttccttattagcttaaactggggccctcaaagagcagcctgttgatcttttggccaaatgacttgagcataagtcttttatttctttttaaggttaaatcgtaaactgtatacctttactactgaaaacaaaactatagggcatcatactaattgaaaatcaatagtaatgggttccatccattagctttttaaatgaatagatctggtattgatttccttcctgtttttttgaggcacattcctttacaaccagtgtttaaaccaccacgtaatcatcttctgcaaacaaggggtgccagtgttgcctaacagaagataatctttaataaagcaaatcctctgcttcaaaggtttttgaaataattggatccctttttgaaaaggaagatgagtttaactgtgtccaggtggagtaatagtactgctgttgcatgaatagatgatacaaagcaagtgatgaggttggtatgacttctttagtgaccttttagggtttgcttttattttcctctcttttttgtattatttctttcaaacatagtaaatatatgattttacagccaaagtggtattctgttttttctaagctttgagatacaaatattgctatttaatcacattgatgatgaattactttccatgtgaaccttctcaaaatgatttaagtacctttgattttgctcccctaaaaatggcttgtgtctaaagtgacatttttttccctatttggagggttctaatgaaagagatccaggcataaaaactcttttgcttattgaaagcaatttgattacacctatgtttcaggttatagtggggagaaaatttggtcagtgccttattatttgaagagcaattttagggcatcaagtatgacaataatcatgtgccctcttgctcctcttatttcaggagtgtgtgctatccctctctccaccagcttaatctttctcaccccaagtctaacaaagtctttacagaaacctctgtaggtgattgttgcagtcttccttggtttttgagtctttttaaacaagctcctaccctgcttctatccttttagagtaggagattaaaaataaacccaccccagtcaacctttagataagcactcttaaaaacaaatttgaagagcactcttcagccaagttcatttttattttgttgttgatgttttgagcatacatttaattgtaaggccttttggaaaagccctaaaagaataagatacaaccagaaatatttgagttttgttaaatgtactgaaatcttgtaatgaaaatccctttggccagaaatgagatttatttccatttatttttacatttaagtaacactcaaaacaaacaagtagtcacttaacctgccagttattattttcttgaaaatatacaagaaagtaaaaatatctctaatatataagttaaaggaaagttaagagactaagctagttttttcagtgaaagcaaagttggaaatattttgcttctctcagattattggaagacctagagctactggatgttaacctgaatcaagatgttcttttcacatttttttaaagggctagtatgttccagagtaggcaagtagtcattcaagccaaatgaaagagttaactggtccttgaggagtgttagcaaaatttaaattttgaccctggccatttgtactacagaagtgattatgggattaaaagaatacataattacagtgttttgggattgggctcttttttttcttaatagaaaagcagaaacttcataaataatagctgtgctttagataccagataacaaatattgtttcccctgaagatatgacctactagaactactcacatatatagtccaataattactgacttaataggtatggtaaaatagctgataataagtcagactctcaagagtttctgtaccttgattattgacaaattcattgttttacatcctactaaagaacatgtgtgtggggagggggtggggaactggttcacaacataatctgaaggagatcaaacatctgtaaggacaggtacccagtgatgataatatatctgaaaacacaagccatttttattctttatcccaattaacttgaggtactctaatgatgaagcactcgattgcactatgacctccttgagtgatgtgcagcttggttcctctctcactttttgtttctttttaatatgcaaatgtgagtgtgcgatcttcagtgtgtctgcataagctaacttaagatgaatttaagtacagttttctgaaatatttctattgaaataaattacttaaaattat

SEQ ID NO: 173747 - DNA, 5834 bp, Homo sapiens
  Payload ID: 14120
  Gene Symbol: RALGPS2
  Gene Name: Ral GEF with PH domain and SH3 binding motif 2
  Uniprot ID: Q86X27
  ENST ID: ENST00000367635
  CDS Start-End: 339-2090
gccccgcccgcttggcgcgcgcccccgccaggtccgctctcgtcccccacccctggcgcggacggggtggttccagctcactctcctcccccgagcggcagcggcggcggcggcggcggctgctgcgggcgctgaatgagagacggtgactgttcgggtcgacgagtgctactctaggcggcggcggccgtggcggtgaagcgtgaggccggcatcgtctttccgtcctctgaggcgacggccgcggctgcacaggaataatgtatttgtggccttggacatgaggcagtcagtcctctgttgctgttaacataaggtcagggactgatgaggaaagcatggacctaatgaacgggcaggcaagcagtgtcaatattgcagctactgcttctgagaaaagtagcagctctgaatccttaagtgacaaaggctctgaattgaagaaaagctttgatgctgtggtattcgatgttcttaaggttacaccagaagaatatgcgggtcagataacattaatggatgttccagtatttaaagctattcaaccagatgagctttcaagttgtggatggaataaaaaagaaaaatatagttctgcaccaaatgcagttgccttcacaagaagattcaatcatgtaagcttttgggttgttagagagattcttcatgctcaaacattaaaaattagagcagaagttttgagccactatattaaaactgctaagaaactgtatgagctgaataaccttcatgcacttatggcagtggtttctggcctacagagtgccccaattttcaggttgactaaaacatgggcgttattaagtcgaaaagacaaaactacctttgaaaaattagaatatgtaatgagtaaagaagataactacaaaagactcagagactatataagtagcttaaagatgacaccttgcattccctatttaggtatctatttgtcagatttaacatacatcgattcagcatacccatcaactggcagcattctagaaaatgagcaaagatcaaatttaatgaataatatccttcgaataatttctgatttacagcagtcttgtgaatatgatattcccatgttgcctcatgtccaaaaatatctcaactctgttcagtatatagaagaactacaaaaatttgtggaagacgataattacaagctttcattaaagatagaaccagggacaagcaccccacgttctgctgcttccagagaagatttagtaggtcctgaagtaggagcgtctccacagagtggacgaaaaagtgtggcagctgaaggagccttgctcccacagacaccgccatcccctcggaatctgattccacatggacataggaagtgccatagtttgggttataatttcattcataaaatgaacacagcagaatttaagagtgcaacgtttccaaatgcaggaccaagacatctgttagatgatagcgtcatggagccccatgcgccatctcgaggccaagctgaaagttctactctttctagtggaatatcaataggtagcagcgatggttctgaactaagtgaagagacctcatggcctgcttttgaaaggaacagattataccattctctcggcccggtgacaagagtggcacgaaatggctatcgaagtcacatgaaggccagcagttctgcagaatcagaagatttggcagtacatttatatccaggagctgttactattcaaggtgttctcaggagaaaaactttgttaaaagaaggcaaaaagcctacagtagcatcttggacaaaatattgggcagctttgtgtgggacacagcttttttactatgctgccaaatctctaaaggctaccgaaagaaaacatttcaaatcaacatccaataagaacgtatctgtgataggatggatggtgatgatggctgatgaccctgaacatcctgatctcttcctgctgactgactctgagaaaggaaattcgtacaagtttcaagctggcaatagaatgaatgcaatgttatggtttaagcatttgagtgcagcctgccaaagtaacaaacaacaggttcctacaaacttgatgacttttgagtagaagcctgagaaaaaaagagaggtgaactgttgcttctacgtgagcatgaggacctgataaaagagcgccagctataaaccatcctgtgccaggaagagcccagaggctctgtctcagtcgttggagttctcaaccaaaaaagcactaatttcagggaatgatttgagatattcccagagaacaaattggagttgcaaaacaaactgccatgaaccatgcttcttatctcagaactgacctgtggaaaccactgccttaaaagaatgaaaggaaaaccaacatgaaacaccaaatagtgtgtgtgaatcttctggcggtgctgtgcttggaatagatcgtagctaatttgcatttcttttaactttgtaataattttagaggggggaattgccttttttagatatgctttaaaaaggaaaaacatactcttgtggattccatcaggagctggttttgaaccgaggtgaagagacttagcagggattgtaccagcagcccacctgcaaggtttgttctccctctagtagtctgcaacctcactggctttctcacagcaagagtgtaggaatgagaaatgttagtcatgtgagttcttgggtttgtttgggattgggtgggggtgtttgttttgttttggatgaggggagaatttttttaaacactaaacttctgaaatgtagtactgtaaggggaacattatttcctgcaggaggtacaaaggctgtgtgttcatttgccagacgctttttttttaaataggttccagaaaacatggttgtttctaactagggttaaagtttagctttctatatgaattcattgttggaccacagatctgcttaagtaaagagctataatcccaacctaaacttttctgagattttacaataattagatctttttccaagttaattgggttttcccttctcccagtcataggtggtttttatcatcaagacagactgatattttgtcaggatattttcttttacagtgtttgatgtgcataatgccagagttatttttttattattcattttctctctttttgttcaatatgagattcaggatcatatttgtttaaaaggtaacacatagagatgtatgtatatattttgttataagacatacaaaataattttaagagggataaaggtgaaaatatcagattctggaaattttaagtatctaaactttatacttgtatgatttaccataaacataccaaaacatttttctgaaaatttactgtcggtctctgacatgaaaccgtattttgtcagtagttgaccaagcagttttatgagaactcttctatgcaatgatgcatttaatttctaaagtaaatgttgaattattaaaaaaaaagtttgaaggtaagatgccttagaattttaatgaaaaatgacactcaaacaaaggctatatgtcgaatgttataaactcttgagacataatgaattttagcagtggcctagagtaaggtaatgctttgtgactgatatctactaatagacttctgttactttgggcctcacataaaatttctcacattcgtattcttagagaattttatacttttttattataagtattttgcccttgagtccatgaaacttcaatagaaaatattgcttatacaataattagcttaaaatccatccaaaggaaaagagaagagctttttttgagtgttaagttttttaatttagtattctgtttggaaaagatgttaagagttcaaatatgcttcttatgtaacagaaataccattatttctggggtttagtgacacaggctggagaggacaaaagtttcctgtcctgaatgatttttcaattaatgctctaagcttaacccatgttgggtaatagaaagacatagccagcagtattactacgtagaccttgcacatcttacttttgttttgcatttttaaaaatttcttaatttgtttatttctcttcagaaatagcgtttttaacagtgtatgtgcttttttaaaaagtattgtgaatgagaaccctgtggattttttttatttcatttgtttgtcataataagctaacgtagaaatgttgtaggttaaccatatctgtggaaatatgcagttggaagtcagagcctgacatcacatagttttgccaaagggagagagctaagctggaagatgtttttgatactttcggctctaaacattaatggatgtttgcgtagagtaagatagcgttcaaatttggttaatagtttatagatagacttgtggcctctgactgactaaatttcttaacagcacagaagtcgttgtttttctgtctttaaaatttattcattcagaaaattagtcattgctttttaagattattttagcatttgaagcaaattgaaaacagaaaagtgacttaaaatagtgtaggtgaattttttatctataatttaccaaataatacctgataataattcaaagaaaatatgttaccaaaatatattaaatatataggtagttcattcgtgggaagatgaatcttcttattaagcctgccctcaattgtaaataagtgactcaaaaactcaaaatgttcatcagcattcaggtcatttgtttcacccttagccaagaagaactcattagaaattcagttataatttcaatttaagcctgtttatgataagcataatgattggcatgttatatagcctgttgaaaataactacagaatgaccttccagagcactgtttttggcctcgtgcccgctctgttcaggctctgcttgtttttcagaatatgatttttacctccagacagtaagaattgaacaagaactgatcaaacacaccttcctattttgttttcttcactatgtaaatattatttgggcaaacattacaaaaagggatccaaacaatttgagtttcagtatttttttctccctaggcatgtgcttcaatttcaaatatttttttctgtgtggaaaatgccatgtaactattgcactaccttctgtgtggactgtgttggtattggttctttctgtatatcaaaagtcagggtgtttataactgcaaagtttgtataagtggctttattcctcttctagaagatttatgaggagcctaggaagcactattggtacaggaggaaaaaagaatggaaaacatgtttacagactctagctttccttattagcttaaactggggccctcaaagagcagcctgttgatcttttggccaaatgacttgagcataagtcttttatttctttttaaggttaaatcgtaaactgtatacctttactactgaaaacaaaactatagggcatcatactaattgaaaatcaatagtaatgggttccatccattagctttttaaatgaatagatctggtattgatttccttcctgtttttttgaggcacattcctttacaaccagtgtttaaaccaccacgtaatcatcttctgcaaacaaggggtgccagtgttgcctaacagaagataatctttaataaagcaaatcctctgcttcaaaggtttttgaaataattggatccctttttgaaaaggaagatgagtttaactgtgtccaggtggagtaatagtactgctgttgcatgaatagatgatacaaagcaagtgatgaggttggtatgacttctttagtgaccttttagggtttgcttttattttcctctcttttttgtattatttctttcaaacatagtaaatatatgattttacagccaaa

SEQ ID NO: 173748 - DNA, 662 bp, Homo sapiens
  Payload ID: 14120
  Gene Symbol: RALGPS2
  Gene Name: Ral GEF with PH domain and SH3 binding motif 2
  ENST ID: ENST00000415888
  CDS Start-End: 1-298
tcagtatatagaagaactacaaaaatttgtggaagacgataattacaagctttcattaaagatagaaccagggacaagcaccccacgttctgctgcttccagagaagatttagtaggtcctgaagtaggagcgtctccacagagtggacgaaaaagtgtggcagctgaaggagccttgctcccacagacaccgccatcccctcggaatctgattccacatggacataggaagtgccatagtttgggttataagtcagcatttttaattttatctttcaaatttttaagtcttttgtaattggatttattgtcgatttattagttcagtagaaaatggtatccttgaatagttttcttttttcttaatagctgttttctgattcagtaaaatgccttgtttgcctaaaagcttttatttcttactttacctgaatttggaaatgggattttgtcaacaatgcatttatatttggggacgataaatgaacattacagagggccatcataaataaaatcaggatagcaatatacctttttaaaagagttacaacctttatatcaagacagtcattgtttgtcttaaccaaaataagtcaaaaataacagctataaaaattattttctttattcctaaatataaagaaaactgactttttgtttaa

SEQ ID NO: 173749 - DNA, 7911 bp, Homo sapiens
  Payload ID: 14121
  Gene Symbol: RALGAPA1
  Gene Name: Ral GTPase activating protein, alpha subunit 1 (catalytic)
  Uniprot ID: Q6GYQ0
  ENST ID: ENST00000307138
  CDS Start-End: 470-6721
atcactaccacactcgtctccgtttcggcctctgcagggtgtaagctgctaaagaagcttcaaccttaagggggcctcagggagagagttgtgctcctgccgccgagagctccaccttcgtggctctgggtccggggccccggcctgtggcggcgagcggcggccgctggagacgagcggcggcggcaggcggccagcccgggtctgcctcgctccgtgcagggccgggagagggatccgccatattggagctggggccgaaggtgccttggagccgcggcgcgaggcgggtggaggtggcggccctggcctggatcgggaaggagtcggctctgccctggcccgcaaggctggggagctaatgagcctctctggctagtctcctccccgtccactccctccactttctgccgccgggacccggctgggagccggctgtggcagtggcagtggcagtggcagcgacaggatgttctccaagaagccgcacggggacgtgaagaagtccacccagaaggtgctagacaccaagaaggacgcactgactcgcctcaagcacctgcgcatcgtcatcgagaatgcagaatctattgatcttaaacagtttttcgaccaacatttttcacatatatactatgtgttctttgaaaattttgtgactattgaagctagtcttaaacagaaaggtcacaagtctcaaagagaggaattggatgctatactttttatttttgagaaaattttacaacttcttccagaaagaattcatcagcgatggcagtttcatagtattggattgattttaaagaagctacttcacacaggaaactccttaaagattaggcgggaaggtgttcgtcttttcttactatggttgcaagctcttcagaataactgtagcaaagaacagctctggatgttttcatgcttaatccctggattttcagcaccacagtctgaacatggacctcgaactttagataatctcattaatcctccactcaaccttcaagaaactcaagtcactatagaagaaatcactcctcttgtccccccacaatcaggagataaagggcaagaagatctcacaagctattttcttgaagcacttctaaaatacatagtcattcaggtaaaaagtttagaatggaagaacaaagaaaaccaagaaaggggattttcatttttgttttcacattttaagaaatattacttgccttatatttttccaaacatctgtaaggaaaacagtttatatcatcctatacttgacatcccgcagatgagaccaaagccacattatgtcgtgataaagaaagatgctgaaaccaatgaagcaatctattgtacaaaggagcctttcattaaggctcgtgttattgtcattcgttggctggtttctttctggctggagccaaaaccacatacaggacctcatattcctgggatggaaggtgaagtcttgccaaagaatattcagagagcagctgctagtttagtatccagagaagaaagcaaaaatgataatgctgataaaacagacagaactacagaacccgaacagtctcattccaatacaagcactctcacggagcgagaacctagctcatctagtctctgtagtattgatgaagaacatctcacagacattgaaatagttcgcagagttttttcttctaaaaggagtaatgtaaactttgtgacagagatatttcgtcaggcatttttattaccaatttgtgaagcagcagctatgagaaaagtggtaaaagtatatcaagaatggatccaacaagaggaaaaacctttgttcatgcaagagcctgaagaaattgtgatcacttcttcagacctcccttgcattgaaaatgtcacagaccatgatatttcaatggaagaaggagaaaaaagagaagaggaaaatgggaccaatactgctgatcatgttcgaaattccagttgggcaaaaaacggctcctaccaaggtgctcttcataacgcctctgaagaagccacagaacaaaacatacgagctggtacccaggcagttttgcaggtgtttattataaactcatcaaatatatttcttcttgaacctgcaaatgaaataaaaaatcttctggatgaacacacagatatgtgtaaacgcattcttaacatttatcggtacatggttgtacaagtatcaatggacaaaaagacttgggaacagatgctgcttgtgttgctcagagtcacggaatctgtactgaagatgccatcacaagcttttctacagttccaagggaaaaaaaatatgaccttggcaggtcgacttgcaggaccacttttccagacccttatagttgcctggatcaaagcaaacctaaatgtgtacatctcccgagaactttgggatgacttactgtcagtattgtcatcgctgacctattgggaagagttggccactgagtggtcactgactatggagacattaactaaagttttagctaggaatttatatagtttggatctcagtgatttaccattggataagctgagtgaacagaaacaaaaaaagcacaaagggaaaggagttggacatgaatttcagaaagtttcagttgacaagtcattttctagaggatggagtcgtgatcagcctggccaagccccaatgagacagaggagtgcaacaaccactggttctccaggaaccgaaaaggcgaggagtatagtacggcaaaaaactgtcgatattgatgatgctcaaatacttccccgctcaactagagtcagacatttttcacaaagtgaagaaactggaaatgaagtttttggtgctttgaatgaggagcagccattgcctcgaagtagcagcacttctgacatcttggaaccattcactgttgaacgagccaaagtcaataaagaggacatgagccaaaaactgcctcctcttaatagtgatattggcggcagcagtgctaatgttcctgatctgatggatgagtttatagcagaacgacttcgaagtggtaatgcctcgactatgacaagaagaggaagtagtccaggcagcctggaaattcccaaagacctccctgatattctaaacaagcagaaccagatgcgccctattgatgacccaggtgtgccctcagaatggacttctcctgccagtgcagggagcagtgatcttatcagctcagatagtcattcggattctttcagcgctttccaatatgatggccgaaaatttgacaattttggctttggaaccgacactggggttacgtcctctgctgatgtggattcaggttctggccatcatcagagtgctgaagagcaggaagtggctagtctaactactcttcatatagattctgaaacaagcagtcttaatcagcaagctttctctgctgaagttgcaactattactggttcagaaagtgcttccccagtccactcacctctgggctccaggtcacagactccttccccttctacattgaatatagatcacatggaacagaaggatctgcagctcgacgagaagctccaccactctgttcttcagacaccagatgatctagaaattagtgaatttccatcagaatgttgtagtgtgatggcaggaggtactctgactggatggcatgctgatgttgctactgtaatgtggcgaagaatgctaggcattttgggagatgtaaattcaatcatggatcctgaaatacatgctcaagtttttgattacctctgtgaactttggcagaatctagctaagattagagataaccttggcatttcaactgataacctgacctccccttctccaccagttttaattcctccactgagaattcttacaccttggctttttaaggcaaccatgttgactgataaatataaacaaggtaaattacatgcatataaacttatttgtaatacaatgaaaagaagacaagatgtttctccaaatagagattttctaacacatttctacaatataatgcattgtggattacttcatattgaccaggatattgtcaatacaatcatcaaacactgctcacctcaatttttttcacttggtttgcctggtgccacaatgcttattatggattttattgtagcagctggtagagtggcttcttcagcttttctcaatgcaccaagagtagaagcacaagttcttctgggatctttggtttgctttcccaacttatattgtgaactgccttctcttcatcccaacattcctgatgttgctgtgtctcagtttacagatgttaaggaacttataatcaaaactgtattaagctcggcaagagatgagccctctggtcctgcacgatgtgtagcactttgtagtttaggtatttggatttgtgaagaactagtccatgagtctcatcatcctcaaattaaggaagctctgaatgtgatttgtgtttccttaaagtttactaataaaacagtagcccacgtagcttgtaacatgcttcacatgctggttcattatgtacctagacttcagatttaccagcctgattctcccttgaaaattattcaaatcctaatagctaccatcacccatcttttaccaagtacagaggcttcatcttatgaaatggacaagaggttggtagtatctttacttctctgccttctggactggatcatggccttacctctaaagacactgctccaaccatttcatgctacgggagcagaaagcgataaaacagaaaaatctgttctcaattgcatttataaggttttacatgggtgtgtttatggagctcagtgttttagcaatccaaggtattttcccatgagcctctctgatttggcatctgtagattatgatccttttatgcatttggaaagtctgaaagagcctgagcctctgcactctcctgactcagaacgatcttctaaactccagccagtaacagaagtgaaaactcaaatgcagcatggattaatctctatagcagcccgcactgttattacacatctggtaaatcacctgggccattatccaatgagcggtggtcctgctatgctaacaagtcaggtgtgtgaaaatcacgacaatcattacagtgaaagtactgaactttctcctgaactctttgagagtccaaatatccagttctttgtgttaaataatacaaccttagtgtcctgtatccagatcagatcagaagagaatatgcctggaggaggtttatctgctggccttgcatcagccaattcaaatgtcagaatcatagtacgtgatctctctggaaaatattcatgggattctgctatactgtatggcccacctcctgtaagtggcttgtcagaacctacatctttcatgctttcattgtctcaccaagagaagccagaagagcctccgacatctaatgaatgcttagaagatataaccgtaaaagatggactttctctccagtttaaaagatttagagaaactgtaccaacttgggatacaataagagatgaagaagatgttcttgatgagctcttgcagtatttgggtgttactagtcctgaatgcttacagagaactggaatctcacttaatattcctgctccacaacctgtgtgcatttctgaaaaacaagaaaatgatgttattaatgctatccttaagcaacatacagaagaaaaagaatttgttgagaagcactttaatgacttaaacatgaaagctgtggaacaagatgaaccaatacctcaaaaacctcagtcagcattttattattgcagattgcttcttagtatattgggaatgaattcctgggacaaacggaggagctttcatctcctgaagaaaaatgaaaagctacttagagaacttaggaacttggattcaaggcagtgccgagagacacacaagattgcagtattttatgttgctgaaggacaagaagacaaacactccattctcaccaatacaggaggaagtcaagcatatgaagattttgtagctggtcttggttgggaggtaaatcttacaaaccattgtggttttatgggaggactacaaaaaaacaaaagcactggattgaccactccatattttgctacctctacagtagaggtaatatttcacgtgtcaacaagaatgccttctgattctgatgattctttgaccaaaaaattgagacatttgggaaatgatgaagtgcacattgtttggtcagagcatactagagactacaggagaggaattattcccacagaatttggtgatgtccttattgtaatatatccaatgaaaaatcacatgttcagtattcagataatgaaaaaaccagaggttcccttctttggtcccctttttgatggtgctattgtgaatggaaaggttctacccattatggttagagcaacagctataaatgcaagccgtgctctgaaatctctgattccattgtatcaaaacttctatgaggagagagcacgatacctgcaaacaattgtccagcaccacttagaaccaacaacatttgaagattttgcagcacaggttttttctccagctccctaccaccatttaccatctgatgccggctcctacccagagattctacccagtgaaactcccacagcaacgcaggtagatggggctgacctggcctctccaatgtctcctcgaactagcaaaagccgcatgtccatgaagctgcgtcgttcctctggctcagccaataaatcctaaggagacaagcagcccagcagtgatcagcagtagccaccttagcacgaacatagggttaaccctttcaggccttcatgtctgccataacatgcatgtttcttcctgtacatttatttgagaaaacactggatttaaataattttaaataatttgtagcttaatattaaagatttaagttatttattgtttcattttttttcccacaatccaagctgccatattttgagggcagggggagttttattctacaccctttaccttcctagataattatgtctaagtagttttatctttaatttcatggttaactgtgagccaaaatacaattggacaattagtctcattatttattgtgccccattgcaactttatggttcaataaatatataattttttacaaatgtaaaattttacatttaagcatttgtaaagttacagcaaaagatgtacctgttaatacacagaatgtgtacagattatttgttatgacaataaaacactcaaaataaatggtctttagcatctcaaattccaactgaaatcattttagtattaactcttcttcccaaagcaatgtctcatttcttggctgtgcaggtgatgccatgttatatccaataactagaaaaatcactgtgctgaacttttatgtttagcttccaagtatttttctaatgttttgcatttcaagtggtatcactgttaaatgccatttgttttcagattgtggccttttattattggctgctagatcctggtgtttctatgttcttttttaagcaccaaaaagaagatggggaagaaaagaaggaaaattttctgatataaatatgttgttcaaattatgagtattatttaaaaaagaaaaaggaacataacccaggagtctaagttaaatctaatattgttaatactgaacttgcaggtccaggttggtatacattccaccctctagaagtattttcttacagtagataagctgctcacattttgttttgaatgggcatctcctgaggaaatgtagcatgacattggtactaactgcatgtgtaaatacatcatactggcaaaccgtaaaatataaattatgtatcatcattcatgtagtatctataatttgtaacagtgggggggaaagatgacatggtatttaataatacaataaaaatattcttatcacttcctatcca

SEQ ID NO: 173750 - DNA, 6328 bp, Homo sapiens
  Payload ID: 14121
  Gene Symbol: RALGAPA1
  Gene Name: Ral GTPase activating protein, alpha subunit 1 (catalytic)
  Uniprot ID: Q6GYQ0
  ENST ID: ENST00000382366
  CDS Start-End: 100-6249
tctggctagtctcctccccgtccactccctccactttctgccgccgggacccggctgggagccggctgtggcagtggcagtggcagtggcagcgacaggatgttctccaagaagccgcacggggacgtgaagaagtccacccagaaggtgctagacaccaagaaggacgcactgactcgcctcaagcacctgcgcatcgtcatcgagaatgcagaatctattgatcttaaacagtttttcgaccaacatttttcacatatatactatgtgttctttgaaaattttgtgactattgaagctagtcttaaacagaaaggtcacaagtctcaaagagaggaattggatgctatactttttatttttgagaaaattttacaacttcttccagaaagaattcatcagcgatggcagtttcatagtattggattgattttaaagaagctacttcacacaggaaactccttaaagattaggcgggaaggtgttcgtcttttcttactatggttgcaagctcttcagaataactgtagcaaagaacagctctggatgttttcatgcttaatccctggattttcagcaccacagtctgaacatggacctcgaactttagataatctcattaatcctccactcaaccttcaagaaactcaagtcactatagaagaaatcactcctcttgtccccccacaatcaggagataaagggcaagaagatctcacaagctattttcttgaagcacttctaaaatacatagtcattcaggtaaaaagtttagaatggaagaacaaagaaaaccaagaaaggggattttcatttttgttttcacattttaagaaatattacttgccttatatttttccaaacatctgtaaggaaaacagtttatatcatcctatacttgacatcccgcagatgagaccaaagccacattatgtcgtgataaagaaagatgctgaaaccaatgaagcaatctattgtacaaaggagcctttcattaaggctcgtgttattgtcattcgttggctggtttctttctggctggagccaaaaccacatacaggacctcatattcctgggatggaaggtgaagtcttgccaaagaatattcagagagcagctgctagtttagtatccagagaagaaagcaaaaatgataatgctgataaaacagacagaactacagaacccgaacagtctcattccaatacaagcactctcacggagcgagaacctagctcatctagtctctgtagtattgatgaagaacatctcacagacattgaaatagttcgcagagttttttcttctaaaaggagtaatgtaaactttgtgacagagatatttcgtcaggcatttttattaccaatttgtgaagcagcagctatgagaaaagtggtaaaagtatatcaagaatggatccaacaagaggaaaaacctttgttcatgcaagagcctgaagaaattgtgatcacttcttcagacctcccttgcattgaaaatgtcacagaccatgatatttcaatggaagaaggagaaaaaagagaagaggaaaatgggaccaatactgctgatcatgttcgaaattccagttgggcaaaaaacggctcctaccaaggtgctcttcataacgcctctgaagaagccacagaacaaaacatacgagctggtacccaggcagttttgcaggtgtttattataaactcatcaaatatatttcttcttgaacctgcaaatgaaataaaaaatcttctggatgaacacacagatatgtgtaaacgcattcttaacatttatcggtacatggttgtacaagtatcaatggacaaaaagacttgggaacagatgctgcttgtgttgctcagagtcacggaatctgtactgaagatgccatcacaagcttttctacagttccaagggaaaaaaaatatgaccttggcaggtcgacttgcaggaccacttttccagacccttatagttgcctggatcaaagcaaacctaaatgtgtacatctcccgagaactttgggatgacttactgtcagtattgtcatcgctgacctattgggaagagttggccactgagtggtcactgactatggagacattaactaaagttttagctaggaatttatatagtttggatctcagtgatttaccattggataagctgagtgaacagaaacaaaaaaagcacaaagggaaaggagttggacatgaatttcagaaagtttcagttgacaagtcattttctagaggatggagtcgtgatcagcctggccaagccccaatgagacagaggagtgcaacaaccactggttctccaggaaccgaaaaggcgaggagtatagtacggcaaaaaactgtcgatattgatgatgctcaaatacttccccgctcaactagagtcagacatttttcacaaagtgaagaaactggaaatgaagtttttggtgctttgaatgaggagcagccattgcctcgaagtagcagcacttctgacatcttggaaccattcactgttgaacgagccaaagaggcagaacagaatgccaccagaggctccactgagggatctgtacagtcatgtaatgggctattttggaaggaaagctgcagtgatattggcggcagcagtgctaatgttcctgatctgatggatgagtttatagcagaacgacttcgaagtggtaatgcctcgactatgacaagaagaggaagtagtccaggcagcctggaaattcccaaagacctccctgatattctaaacaagcagaaccagatgcgccctattgatgacccaggtgtgccctcagaatggacttctcctgccagtgcagggagcagtgatcttatcagctcagatagtcattcggattctttcagcgctttccaatatgatggccgaaaatttgacaattttggctttggaaccgacactggggttacgtcctctgctgatgtggattcaggttctggccatcatcagagtgctgaagagcaggaagtggctagtctaactactcttcatatagattctgaaacaagcagtcttaatcagcaagctttctctgctgaagttgcaactattactggttcagaaagtgcttccccagtccactcacctctgggctccaggtcacagactccttccccttctacattgaatatagatcacatggaacagaaggatctgcagctcgacgagaagctccaccactctgttcttcagacaccagatgatctagaaattagtgaatttccatcagaatgttgtagtgtgatggcaggaggtactctgactggatggcatgctgatgttgctactgtaatgtggcgaagaatgctaggcattttgggagatgtaaattcaatcatggatcctgaaatacatgctcaagtttttgattacctctgtgaactttggcagaatctagctaagattagagataaccttggcatttcaactgataacctgacctccccttctccaccagttttaattcctccactgagaattcttacaccttggctttttaaggcaaccatgttgactgataaatataaacaaggtaaattacatgcatataaacttatttgtaatacaatgaaaagaagacaagatgtttctccaaatagagattttctaacacatttctacaatataatgcattgtggattacttcatattgaccaggatattgtcaatacaatcatcaaacactgctcacctcaatttttttcacttggtttgcctggtgccacaatgcttattatggattttattgtagcagctggtagagtggcttcttcagcttttctcaatgcaccaagagtagaagcacaagttcttctgggatctttggtttgctttcccaacttatattgtgaactgccttctcttcatcccaacattcctgatgttgctgtgtctcagtttacagatgttaaggaacttataatcaaaactgtattaagctcggcaagagatgagccctctggtcctgcacgatgtgtagcactttgtagtttaggtatttggatttgtgaagaactagtccatgagtctcatcatcctcaaattaaggaagctctgaatgtgatttgtgtttccttaaagtttactaataaaacagtagcccacgtagcttgtaacatgcttcacatgctggttcattatgtacctagacttcagatttaccagcctgattctcccttgaaaattattcaaatcctaatagctaccatcacccatcttttaccaagtacagaggcttcatcttatgaaatggacaagaggttggtagtatctttacttctctgccttctggactggatcatggccttacctctaaagacactgctccaaccatttcatgctacgggagcagaaagcgataaaacagaaaaatctgttctcaattgcatttataaggttttacatgggtgtgtttatggagctcagtgttttagcaatccaaggtattttcccatgagcctctctgatttggcatctgtagattatgatccttttatgcatttggaaagtctgaaagagcctgagcctctgcactctcctgactcagaacgatcttctaaactccagccagtaacagaagtgaaaactcaaatgcagcatggattaatctctatagcagcccgcactgttattacacatctggtaaatcacctgggccattatccaatgagcggtggtcctgctatgctaacaagtcaggtgtgtgaaaatcacgacaatcattacagtgaaagtactgaactttctcctgaactctttgagagtccaaatatccagttctttgtgttaaataatacaaccttagtgtcctgtatccagatcagatcagaagagaatatgcctggaggaggtttatctgctggccttgcatcagccaattcaaatgtcagaatcatagtacgtgatctctctggaaaatattcatgggattctgctatactgtatggcccacctcctgtaagtggcttgtcagaacctacatctttcatgctttcattgtctcaccaagagaagccagaagagcctccgacatctaatgaatgcttagaagatataaccgtaaaagatggactttctctccagtttaaaagatttagagaaactgtaccaacttgggatacaataagagatgaagaagatgttcttgatgagctcttgcagtatttgggtgttactagtcctgaatgcttacagagaactggaatctcacttaatattcctgctccacaacctgtgtgcatttctgaaaaacaagaaaatgatgttattaatgctatccttaagcaacatacagaagaaaaagaatttgttgagaagcactttaatgacttaaacatgaaagctgtggaacaagatgaaccaatacctcaaaaacctcagtcagcattttattattgcagattgcttcttagtatattgggaatgaattcctgggacaaacggaggagctttcatctcctgaagaaaaatgaaaagctacttagagaacttaggaacttggattcaaggcagtgccgagagacacacaagattgcagtattttatgttgctgaaggacaagaagacaaacactccattctcaccaatacaggaggaagtcaagcatatgaagattttgtagctggtcttggttgggaggtaaatcttacaaaccattgtggttttatgggaggactacaaaaaaacaaaagcactggattgaccactccatattttgctacctctacagtagaggtaatatttcacgtgtcaacaagaatgccttctgattctgatgattctttgaccaaaaaattgagacatttgggaaatgatgaagtgcacattgtttggtcagagcatactagagactacaggagaggaattattcccacagaatttggtgatgtccttattgtaatatatccaatgaaaaatcacatgttcagtattcagataatgaaaaaaccagaggttcccttctttggtcccctttttgatggtgctattgtgaatggaaaggttctacccattatggttagagcaacagctataaatgcaagccgtgctctgaaatctctgattccattgtatcaaaacttctatgaggagagagcacgatacctgcaaacaattgtccagcaccacttagaaccaacaacatttgaagattttgcagcacaggttttttctccagctccctaccaccatttaccatctgatgccgatcattaaatatcagttctgtttatctgaaggctcctacccagagattctacccagtgaaactcccacagcaacgcaggtagatggg

SEQ ID NO: 173751 - DNA, 7864 bp, Homo sapiens
  Payload ID: 14121
  Gene Symbol: RALGAPA1
  Gene Name: Ral GTPase activating protein, alpha subunit 1 (catalytic)
  Uniprot ID: Q6GYQ0
  ENST ID: ENST00000389698
  CDS Start-End: 392-6502
agggagagagttgtgctcctgccgccgagagctccaccttcgtggctctgggtccggggccccggcctgtggcggcgagcggcggccgctggagacgagcggcggcggcaggcggccagcccgggtctgcctcgctccgtgcagggccgggagagggatccgccatattggagctggggccgaaggtgccttggagccgcggcgcgaggcgggtggaggtggcggccctggcctggatcgggaaggagtcggctctgccctggcccgcaaggctggggagctaatgagcctctctggctagtctcctccccgtccactccctccactttctgccgccgggacccggctgggagccggctgtggcagtggcagtggcagtggcagcgacaggatgttctccaagaagccgcacggggacgtgaagaagtccacccagaaggtgctagacaccaagaaggacgcactgactcgcctcaagcacctgcgcatcgtcatcgagaatgcagaatctattgatcttaaacagtttttcgaccaacatttttcacatatatactatgtgttctttgaaaattttgtgactattgaagctagtcttaaacagaaaggtcacaagtctcaaagagaggaattggatgctatactttttatttttgagaaaattttacaacttcttccagaaagaattcatcagcgatggcagtttcatagtattggattgattttaaagaagctacttcacacaggaaactccttaaagattaggcgggaaggtgttcgtcttttcttactatggttgcaagctcttcagaataactgtagcaaagaacagctctggatgttttcatgcttaatccctggattttcagcaccacagtctgaacatggacctcgaactttagataatctcattaatcctccactcaaccttcaagaaactcaagtcactatagaagaaatcactcctcttgtccccccacaatcaggagataaagggcaagaagatctcacaagctattttcttgaagcacttctaaaatacatagtcattcaggtaaaaagtttagaatggaagaacaaagaaaaccaagaaaggggattttcatttttgttttcacattttaagaaatattacttgccttatatttttccaaacatctgtaaggaaaacagtttatatcatcctatacttgacatcccgcagatgagaccaaagccacattatgtcgtgataaagaaagatgctgaaaccaatgaagcaatctattgtacaaaggagcctttcattaaggctcgtgttattgtcattcgttggctggtttctttctggctggagccaaaaccacatacaggacctcatattcctgggatggaaggtgaagtcttgccaaagaatattcagagagcagctgctagtttagtatccagagaagaaagcaaaaatgataatgctgataaaacagacagaactacagaacccgaacagtctcattccaatacaagcactctcacggagcgagaacctagctcatctagtctctgtagtattgatgaagaacatctcacagacattgaaatagttcgcagagttttttcttctaaaaggagtaatgtaaactttgtgacagagatatttcgtcaggcatttttattaccaatttgtgaagcagcagctatgagaaaagtggtaaaagtatatcaagaatggatccaacaagaggaaaaacctttgttcatgcaagagcctgaagaaattgtgatcacttcttcagacctcccttgcattgaaaatgtcacagaccatgatatttcaatggaagaaggagaaaaaagagaagaggaaaatgggaccaatactgctgatcatgttcgaaattccagttgggcaaaaaacggctcctaccaaggtgctcttcataacgcctctgaagaagccacagaacaaaacatacgagctggtacccaggcagttttgcaggtgtttattataaactcatcaaatatatttcttcttgaacctgcaaatgaaataaaaaatcttctggatgaacacacagatatgtgtaaacgcattcttaacatttatcggtacatggttgtacaagtatcaatggacaaaaagacttgggaacagatgctgcttgtgttgctcagagtcacggaatctgtactgaagatgccatcacaagcttttctacagttccaagggaaaaaaaatatgaccttggcaggtcgacttgcaggaccacttttccagacccttatagttgcctggatcaaagcaaacctaaatgtgtacatctcccgagaactttgggatgacttactgtcagtattgtcatcgctgacctattgggaagagttggccactgagtggtcactgactatggagacattaactaaagttttagctaggaatttatatagtttggatctcagtgatttaccattggataagctgagtgaacagaaacaaaaaaagcacaaagggaaaggagttggacatgaatttcagaaagtttcagttgacaagtcattttctagaggatggagtcgtgatcagcctggccaagccccaatgagacagaggagtgcaacaaccactggttctccaggaaccgaaaaggcgaggagtatagtacggcaaaaaactgtcgatattgatgatgctcaaatacttccccgctcaactagagtcagacatttttcacaaagtgaagaaactggaaatgaagtttttggtgctttgaatgaggagcagccattgcctcgaagtagcagcacttctgacatcttggaaccattcactgttgaacgagccaaagtcaataaagaggacatgagccaaaaactgcctcctcttaatagtgatattggcggcagcagtgctaatgttcctgatctgatggatgagtttatagcagaacgacttcgaagtggtaatgcctcgactatgacaagaagaggaagtagtccaggcagcctggaaattcccaaagacctccctgatattctaaacaagcagaaccagatgcgccctattgatgacccaggtgtgccctcagaatggacttctcctgccagtgcagggagcagtgatcttatcagctcagatagtcattcggattctttcagcgctttccaatatgatggccgaaaatttgacaattttggctttggaaccgacactggggttacgtcctctgctgatgtggattcaggttctggccatcatcagagtgctgaagagcaggaagtggctagtctaactactcttcatatagattctgaaacaagcagtcttaatcagcaagctttctctgctgaagttgcaactattactggttcagaaagtgcttccccagtccactcacctctgggctccaggtcacagactccttccccttctacattgaatatagatcacatggaacagaaggatctgcagctcgacgagaagctccaccactctgttcttcagacaccagatgatctagaaattagtgaatttccatcagaatgttgtagtgtgatggcaggaggtactctgactggatggcatgctgatgttgctactgtaatgtggcgaagaatgctaggcattttgggagatgtaaattcaatcatggatcctgaaatacatgctcaagtttttgattacctctgtgaactttggcagaatctagctaagattagagataaccttggcatttcaactgataacctgacctccccttctccaccagttttaattcctccactgagaattcttacaccttggctttttaaggcaaccatgttgactgataaatataaacaaggtaaattacatgcatataaacttatttgtaatacaatgaaaagaagacaagatgtttctccaaatagagattttctaacacatttctacaatataatgcattgtggattacttcatattgaccaggatattgtcaatacaatcatcaaacactgctcacctcaatttttttcacttggtttgcctggtgccacaatgcttattatggattttattgtagcagctggtagagtggcttcttcagcttttctcaatgcaccaagagtagaagcacaagttcttctgggatctttggtttgctttcccaacttatattgtgaactgccttctcttcatcccaacattcctgatgttgctgtgtctcagtttacagatgttaaggaacttataatcaaaactgtattaagctcggcaagagatgagccctctggtcctgcacgatgtgtagcactttgtagtttaggtatttggatttgtgaagaactagtccatgagtctcatcatcctcaaattaaggaagctctgaatgtgatttgtgtttccttaaagtttactaataaaacagtagcccacgtagcttgtaacatgcttcacatgctggttcattatgtacctagacttcagatttaccagcctgattctcccttgaaaattattcaaatcctaatagctaccatcacccatcttttaccaagtacagaggcttcatcttatgaaatggacaagaggttggtagtatctttacttctctgccttctggactggatcatggccttacctctaaagacactgctccaaccatttcatgctacgggagcagaaagcgataaaacagaaaaatctgttctcaattgcatttataaggttttacatgggtgtgtttatggagctcagtgttttagcaatccaaggtattttcccatgagcctctctgatttggcatctgtagattatgatccttttatgcatttggaaagtctgaaagagcctgagcctctgcactctcctgactcagaacgatcttctaaactccagccagtaacagaagtgaaaactcaaatgcagcatggattaatctctatagcagcccgcactgttattacacatctggtaaatcacctgggccattatccaatgagcggtggtcctgctatgctaacaagtcaggtgtgtgaaaatcacgacaatcattacagtgaaagtactgaactttctcctgaactctttgagagtccaaatatccagttctttgtgttaaataatacaaccttagtgtcctgtatccagatcagatcagaagagaatatgcctggaggaggtttatctgctggccttgcatcagccaattcaaatgtcagaatcatagtacgtgatctctctggaaaatattcatgggattctgctatactgtatggcccacctcctgtaagtggcttgtcagaacctacatctttcatgctttcattgtctcaccaagagaagccagaagagcctccgacatctaatgaatgcttagaagatataaccgtaaaagatggactttctctccagtttaaaagatttagagaaactgtaccaacttgggatacaataagagatgaagaagatgttcttgatgagctcttgcagtatttgggtgttactagtcctgaatgcttacagagaactggaatctcacttaatattcctgctccacaacctgtgtgcatttctgaaaaacaagaaaatgatgttattaatgctatccttaagcaacatacagaagaaaaagaatttgttgagaagcactttaatgacttaaacatgaaagctgtggaacaagatgaaccaatacctcaaaaacctcagtcagcattttattattgcagattgcttcttagtatattgggaatgaattcctgggacaaacggaggagctttcatctcctgaagaaaaatgaaaagctacttagagaacttaggaacttggattcaaggcagtgccgagagacacacaagattgcagtattttatgttgctgaaggacaagaagacaaacactccattctcaccaatacaggaggaagtcaagcatatgaagattttgtagctggtcttggttgggaggtaaatcttacaaaccattgtggttttatgggaggactacaaaaaaacaaaagcactggattgaccactccatattttgctacctctacagtagaggtaatatttcacgtgtcaacaagaatgccttctgattctgatgattctttgaccaaaaaattgagacatttgggaaatgatgaagtgcacattgtttggtcagagcatactagagactacaggagaggaattattcccacagaatttggtgatgtccttattgtaatatatccaatgaaaaatcacatgttcagtattcagataatgaaaaaaccagaggttcccttctttggtcccctttttgatggtgctattgtgaatggaaaggttctacccattatggttagagcaacagctataaatgcaagccgtgctctgaaatctctgattccattgtatcaaaacttctatgaggagagagcacgatacctgcaaacaattgtccagcaccacttagaaccaacaacatttgaagattttgcagcacaggttttttctccagctccctaccaccatttaccatctgatgccgatcattaaatatcagttctgtttatctgaaggctcctacccagagattctacccagtgaaactcccacagcaacgcaggtagatggggctgacctggcctctccaatgtctcctcgaactagcaaaagccgcatgtccatgaagctgcgtcgttcctctggctcagccaataaatcctaaggagacaagcagcccagcagtgatcagcagtagccaccttagcacgaacatagggttaaccctttcaggccttcatgtctgccataacatgcatgtttcttcctgtacatttatttgagaaaacactggatttaaataattttaaataatttgtagcttaatattaaagatttaagttatttattgtttcattttttttcccacaatccaagctgccatattttgagggcagggggagttttattctacaccctttaccttcctagataattatgtctaagtagttttatctttaatttcatggttaactgtgagccaaaatacaattggacaattagtctcattatttattgtgccccattgcaactttatggttcaataaatatataattttttacaaatgtaaaattttacatttaagcatttgtaaagttacagcaaaagatgtacctgttaatacacagaatgtgtacagattatttgttatgacaataaaacactcaaaataaatggtctttagcatctcaaattccaactgaaatcattttagtattaactcttcttcccaaagcaatgtctcatttcttggctgtgcaggtgatgccatgttatatccaataactagaaaaatcactgtgctgaacttttatgtttagcttccaagtatttttctaatgttttgcatttcaagtggtatcactgttaaatgccatttgttttcagattgtggccttttattattggctgctagatcctggtgtttctatgttcttttttaagcaccaaaaagaagatggggaagaaaagaaggaaaattttctgatataaatatgttgttcaaattatgagtattatttaaaaaagaaaaaggaacataacccaggagtctaagttaaatctaatattgttaatactgaacttgcaggtccaggttggtatacattccaccctctagaagtattttcttacagtagataagctgctcacattttgttttgaatgggcatctcctgaggaaatgtagcatgacattggtactaactgcatgtgtaaatacatcatactggcaaaccgtaaaatataaattatgtatcatcattcatgtagtatctataatttgtaacagtgggggggaaagatgacatggtatttaataatacaataaaaatattcttatcacttcctatcca

SEQ ID NO: 173752 - DNA, 2358 bp, Homo sapiens
  Payload ID: 14121
  Gene Symbol: RALGAPA1
  Gene Name: Ral GTPase activating protein, alpha subunit 1 (catalytic)
  ENST ID: ENST00000554573
  CDS Start-End: 1-1070
aaaatgatgttattaatgctatccttaagcaacatacagaagaaaaagaatttgttgagaagcactttaatgacttaaacatgaaagctgtggaacaagatgaaccaatacctcaaaaacctcagtcagcattttattattgcagattgcttcttagtatattgggaatgaattcctgggacaaacggaggagctttcatctcctgaagaaaaatgaaaagctacttagagaacttaggaacttggattcaaggcagtgccgagagacacacaagattgcagtattttatgttgctgaaggacaagaagacaaacactccattctcaccaatacaggaggaagtcaagcatatgaagattttgtagctggtcttggttgggaggtaaatcttacaaaccattgtggttttatgggaggactacaaaaaaacaaaagcactggattgaccactccatattttgctacctctacagtagaggtaatatttcacgtgtcaacaagaatgccttctgattctgatgattctttgaccaaaaaattgagacatttgggaaatgatgaagtgcacattgtttggtcagagcatactagagactacaggagaggaattattcccacagaatttggtgatgtccttattgtaatatatccaatgaaaaatcacatgttcagtattcagataatgaaaaaaccagaggttcccttctttggtcccctttttgatggtgctattgtgaatggaaaggttctacccattatggttagagcaacagctataaatgcaagccgtgctctgaaatctctgattccattgtatcaaaacttctatgaggagagagcacgatacctgcaaacaattgtccagcaccacttagaaccaacaacatttgaagattttgcagcacaggttttttctccagctccctaccaccatttaccatctgatgccgttgaaagaaatgcagtgatagttctcttcctcccaaaacctccgctagaaaacattggccatctcaaggctcctacccagagattctacccagtgaaactcccacagcaacgcaggtagatggggctgacctggcctctccaatgtctcctcgaactagcaaaagccgcatgtccatgaagctgcgtcgttcctctggctcagccaataaatcctaaggagacaagcagcccagcagtgatcagcagtagccaccttagcacgaacatagggttaaccctttcaggccttcatgtctgccataacatgcatgtttcttcctgtacatttatttgagaaaacactggatttaaataattttaaataatttgtagcttaatattaaagatttaagttatttattgtttcattttttttcccacaatccaagctgccatattttgagggcagggggagttttattctacaccctttaccttcctagataattatgtctaagtagttttatctttaatttcatggttaactgtgagccaaaatacaattggacaattagtctcattatttattgtgccccattgcaactttatggttcaataaatatataattttttacaaatgtaaaattttacatttaagcatttgtaaagttacagcaaaagatgtacctgttaatacacagaatgtgtacagattatttgttatgacaataaaacactcaaaataaatggtctttagcatctcaaattccaactgaaatcattttagtattaactcttcttcccaaagcaatgtctcatttcttggctgtgcaggtgatgccatgttatatccaataactagaaaaatcactgtgctgaacttttatgtttagcttccaagtatttttctaatgttttgcatttcaagtggtatcactgttaaatgccatttgttttcagattgtggccttttattattggctgctagatcctggtgtttctatgttcttttttaagcaccaaaaagaagatggggaagaaaagaaggaaaattttctgatataaatatgttgttcaaattatgagtattatttaaaaaagaaaaaggaacataacccaggagtctaagttaaatctaatattgttaatactgaacttgcaggtccaggttggtatacattccaccctctagaagtattttcttacagtagataagctgctcacattttgttttgaatgggcatctcctgaggaaatgtagcatgacattggtactaactgcatgtgtaaatacatcatactggcaaaccgtaaaatataaattatgtatcatcattcatgtagtatctataatttgtaacagtgggggggaaagatgacatggtatttaataatacaataaaaatattcttatcacttcctatcca

SEQ ID NO: 173753 - DNA, 3354 bp, Homo sapiens
  Payload ID: 14121
  Gene Symbol: RALGAPA1
  Gene Name: Ral GTPase activating protein, alpha subunit 1 (catalytic)
  ENST ID: ENST00000554259
  CDS Start-End: 1-2169
cagatcctaatagctaccatcacccatcttttaccaagtacagaggcttcatcttatgaaatggacaagaggttggtagtatctttacttctctgccttctggactggatcatggccttacctctaaagacactgctccaaccatttcatgctacgggagcagaaagcgataaaacagaaaaatctgttctcaattgcatttataaggttttacatgggtgtgtttatggagctcagtgttttagcaatccaaggtattttcccatgagcctctctgatttggcatctgtagattatgatccttttatgcatttggaaagtctgaaagagcctgagcctctgcactctcctgactcagaacgatcttctaaactccagccagtaacagaagtgaaaactcaaatgcagcatggattaatctctatagcagcccgcactgttattacacatctggtaaatcacctgggccattatccaatgagcggtggtcctgctatgctaacaagtcaggtgtgtgaaaatcacgacaatcattacagtgaaagtactgaactttctcctgaactctttgagagtccaaatatccagttctttgtgttaaataatacaaccttagtgtcctgtatccagatcagatcagaagagaatatgcctggaggaggtttatctgctggccttgcatcagccaattcaaatgtcagaatcatagtacgtgatctctctggaaaatattcatgggattctgctatactgtatggcccacctcctgtaagtggcttgtcagaacctacatctttcatgctttcattgtctcaccaagagaagccagaagagcctccgacatctaatgaatgcttagaagatataaccgtaaaagatggactttctctccagtttaaaagatttagagaaactgtaccaacttgggatacaataagagatgaagaagatgttcttgatgagctcttgcagtatttgggtgttactagtcctgaatgcttacagagaactggaatctcacttaatattcctgctccacaacctgtgtgcatttctgaaaaacaagaaaatgatgttattaatgctatccttaagcaacatacagaagaaaaagaatttgttgagaagcactttaatgacttaaacatgaaagctgtggaacaagatgaaccaatacctcaaaaacctcagtcagcattttattattgcagattgcttcttagtatattgggaatgaattcctgggacaaacggaggagctttcatctcctgaagaaaaatgaaaagctacttagagaacttaggaacttggattcaaggcagtgccgagagacacacaagattgcagtattttatgttgctgaaggacaagaagacaaacactccattctcaccaatacaggaggaagtcaagcatatgaagattttgtagctggtcttggttgggaggtaaatcttacaaaccattgtggttttatgggaggactacaaaaaaacaaaagcactggattgaccactccatattttgctacctctacagtagaggtaatatttcacgtgtcaacaagaatgccttctgattctgatgattctttgaccaaaaaattgagacatttgggaaatgatgaagtgcacattgtttggtcagagcatactagagactacaggagaggaattattcccacagaatttggtgatgtccttattgtaatatatccaatgaaaaatcacatgttcagtattcagataatgaaaaaaccagaggttcccttctttggtcccctttttgatggtgctattgtgaatggaaaggttctacccattatggttagagcaacagctataaatgcaagccgtgctctgaaatctctgattccattgtatcaaaacttctatgaggagagagcacgatacctgcaaacaattgtccagcaccacttagaaccaacaacatttgaagattttgcagcacaggttttttctccagctccctaccaccatttaccatctgatgccgttggctcctacccagagattctacccagtgaaactcccacagcaacgcaggtagatggggctgacctggcctctccaatgtctcctcgaactagcaaaagccgcatgtccatgaagctgcgtcgttcctctggctcagccaataaatcctaaggagacaagcagcccagcagtgatcagcagtagccaccttagcacgaacatagggttaaccctttcaggccttcatgtctgccataacatgcatgtttcttcctgtacatttatttgagaaaacactggatttaaataattttaaataatttgtagcttaatattaaagatttaagttatttattgtttcattttttttcccacaatccaagctgccatattttgagggcagggggagttttattctacaccctttaccttcctagataattatgtctaagtagttttatctttaatttcatggttaactgtgagccaaaatacaattggacaattagtctcattatttattgtgccccattgcaactttatggttcaataaatatataattttttacaaatgtaaaattttacatttaagcatttgtaaagttacagcaaaagatgtacctgttaatacacagaatgtgtacagattatttgttatgacaataaaacactcaaaataaatggtctttagcatctcaaattccaactgaaatcattttagtattaactcttcttcccaaagcaatgtctcatttcttggctgtgcaggtgatgccatgttatatccaataactagaaaaatcactgtgctgaacttttatgtttagcttccaagtatttttctaatgttttgcatttcaagtggtatcactgttaaatgccatttgttttcagattgtggccttttattattggctgctagatcctggtgtttctatgttcttttttaagcaccaaaaagaagatggggaagaaaagaaggaaaattttctgatataaatatgttgttcaaattatgagtattatttaaaaaagaaaaaggaacataacccaggagtctaagttaaatctaatattgttaatactgaacttgcaggtccaggttggtatacattccaccctctagaagtattttcttacagtagataagctgctcacattttgttttgaatgggcatctcctgaggaaatgtagcatgacattggtactaactgcatgtgtaaatacatcatactggcaaaccgtaaaatataaattatgtatcatcattcatgtagtatctataatttgtaacagtgggggggaaagatgacatggtatttaataatacaataaaaatattcttatcacttcct

SEQ ID NO: 173754 - DNA, 6271 bp, Homo sapiens
  Payload ID: 14121
  Gene Symbol: RALGAPA1
  Gene Name: Ral GTPase activating protein, alpha subunit 1 (catalytic)
  Uniprot ID: Q6GYQ0
  ENST ID: ENST00000553892
  CDS Start-End: 1-6252
atgttctccaagaagccgcacggggacgtgaagaagtccacccagaaggtgctagacaccaagaaggacgcactgactcgcctcaagcacctgcgcatcgtcatcgagaatgcagaatctattgatcttaaacagtttttcgaccaacatttttcacatatatactatgtgttctttgaaaattttgtgactattgaagctagtcttaaacagaaaggtcacaagtctcaaagagaggaattggatgctatactttttatttttgagaaaattttacaacttcttccagaaagaattcatcagcgatggcagtttcatagtattggattgattttaaagaagctacttcacacaggaaactccttaaagattaggcgggaaggtgttcgtcttttcttactatggttgcaagctcttcagaataactgtagcaaagaacagctctggatgttttcatgcttaatccctggattttcagcaccacagtctgaacatggacctcgaactttagataatctcattaatcctccactcaaccttcaagaaactcaagtcactatagaagaaatcactcctcttgtccccccacaatcaggagataaagggcaagaagatctcacaagctattttcttgaagcacttctaaaatacatagtcattcaggtaaaaagtttagaatggaagaacaaagaaaaccaagaaaggggattttcatttttgttttcacattttaagaaatattacttgccttatatttttccaaacatctgtaaggaaaacagtttatatcatcctatacttgacatcccgcagatgagaccaaagccacattatgtcgtgataaagaaagatgctgaaaccaatgaagcaatctattgtacaaaggagcctttcattaaggctcgtgttattgtcattcgttggctggtttctttctggctggagccaaaaccacatacaggacctcatattcctgggatggaaggtgaagtcttgccaaagaatattcagagagcagctgctagtttagtatccagagaagaaagcaaaaatgataatgctgataaaacagacagaactacagaacccgaacagtctcattccaatacaagcactctcacggagcgagaacctagctcatctagtctctgtagtattgatgaagaacatctcacagacattgaaatagttcgcagagttttttcttctaaaaggagtaatgtaaactttgtgacagagatatttcgtcaggcatttttattaccaatttgtgaagcagcagctatgagaaaagtggtaaaagtatatcaagaatggatccaacaagaggaaaaacctttgttcatgcaagagcctgaagaaattgtgatcacttcttcagacctcccttgcattgaaaatgtcacagaccatgatatttcaatggaagaaggagaaaaaagagaagaggaaaatgggaccaatactgctgatcatgttcgaaattccagttgggcaaaaaacggctcctaccaaggtgctcttcataacgcctctgaagaagccacagaacaaaacatacgagctggtacccaggcagttttgcaggtgtttattataaactcatcaaatatatttcttcttgaacctgcaaatgaaataaaaaatcttctggatgaacacacagatatgtgtaaacgcattcttaacatttatcggtacatggttgtacaagtatcaatggacaaaaagacttgggaacagatgctgcttgtgttgctcagagtcacggaatctgtactgaagatgccatcacaagcttttctacagttccaagggaaaaaaaatatgaccttggcaggtcgacttgcaggaccacttttccagacccttatagttgcctggatcaaagcaaacctaaatgtgtacatctcccgagaactttgggatgacttactgtcagtattgtcatcgctgacctattgggaagagttggccactgagtggtcactgactatggagacattaactaaagttttagctaggaatttatatagtttggatctcagtgatttaccattggataagctgagtgaacagaaacaaaaaaagcacaaagggaaaggagttggacatgaatttcagaaagtttcagttgacaagtcattttctagaggatggagtcgtgatcagcctggccaagccccaatgagacagaggagtgcaacaaccactggttctccaggaaccgaaaaggcgaggagtatagtacggcaaaaaactgtcgccatgagaagccgatccattggtgaatgtgctctgccatcggcctatatacgcagtgctaaaagtgctcctgttctgatccatacttccaaacccttcttgcctgatattgttctcactcccctttctgatgagctttcagatattgatgatgctcaaatacttccccgctcaactagagtcagacatttttcacaaagtgaagaaactggaaatgaagtttttggtgctttgaatgaggagcagccattgcctcgaagtagcagcacttctgacatcttggaaccattcactgttgaacgagccaaagtcaataaagaggacatgagccaaaaactgcctcctcttaatagtgatattggcggcagcagtgctaatgttcctgatctgatggatgagtttatagcagaacgacttcgaagtggtaatgcctcgactatgacaagaagaggaagtagtccaggcagcctggaaattcccaaagacctccctgatattctaaacaagcagaaccagatgcgccctattgatgacccaggtgtgccctcagaatggacttctcctgccagtgcagggagcagtgatcttatcagctcagatagtcattcggattctttcagcgctttccaatatgatggccgaaaatttgacaattttggctttggaaccgacactggggttacgtcctctgctgatgtggattcaggttctggccatcatcagagtgctgaagagcaggaagtggctagtctaactactcttcatatagattctgaaacaagcagtcttaatcagcaagctttctctgctgaagttgcaactattactggttcagaaagtgcttccccagtccactcacctctgggctccaggtcacagactccttccccttctacattgaatatagatcacatggaacagaaggatctgcagctcgacgagaagctccaccactctgttcttcagacaccagatgatctagaaattagtgaatttccatcagaatgttgtagtgtgatggcaggaggtactctgactggatggcatgctgatgttgctactgtaatgtggcgaagaatgctaggcattttgggagatgtaaattcaatcatggatcctgaaatacatgctcaagtttttgattacctctgtgaactttggcagaatctagctaagattagagataaccttggcatttcaactgataacctgacctccccttctccaccagttttaattcctccactgagaattcttacaccttggctttttaaggcaaccatgttgactgataaatataaacaaggtaaattacatgcatataaacttatttgtaatacaatgaaaagaagacaagatgtttctccaaatagagattttctaacacatttctacaatataatgcattgtggattacttcatattgaccaggatattgtcaatacaatcatcaaacactgctcacctcaatttttttcacttggtttgcctggtgccacaatgcttattatggattttattgtagcagctggtagagtggcttcttcagcttttctcaatgcaccaagagtagaagcacaagttcttctgggatctttggtttgctttcccaacttatattgtgaactgccttctcttcatcccaacattcctgatgttgctgtgtctcagtttacagatgttaaggaacttataatcaaaactgtattaagctcggcaagagatgagccctctggtcctgcacgatgtgtagcactttgtagtttaggtatttggatttgtgaagaactagtccatgagtctcatcatcctcaaattaaggaagctctgaatgtgatttgtgtttccttaaagtttactaataaaacagtagcccacgtagcttgtaacatgcttcacatgctggttcattatgtacctagacttcagatttaccagcctgattctcccttgaaaattattcaaatcctaatagctaccatcacccatcttttaccaagtacagaggcttcatcttatgaaatggacaagaggttggtagtatctttacttctctgccttctggactggatcatggccttacctctaaagacactgctccaaccatttcatgctacgggagcagaaagcgataaaacagaaaaatctgttctcaattgcatttataaggttttacatgggtgtgtttatggagctcagtgttttagcaatccaaggtattttcccatgagcctctctgatttggcatctgtagattatgatccttttatgcatttggaaagtctgaaagagcctgagcctctgcactctcctgactcagaacgatcttctaaactccagccagtaacagaagtgaaaactcaaatgcagcatggattaatctctatagcagcccgcactgttattacacatctggtaaatcacctgggccattatccaatgagcggtggtcctgctatgctaacaagtcaggtgtgtgaaaatcacgacaatcattacagtgaaagtactgaactttctcctgaactctttgagagtccaaatatccagttctttgtgttaaataatacaaccttagtgtcctgtatccagatcagatcagaagagaatatgcctggaggaggtttatctgctggccttgcatcagccaattcaaatgtcagaatcatagtacgtgatctctctggaaaatattcatgggattctgctatactgtatggcccacctcctgtaagtggcttgtcagaacctacatctttcatgctttcattgtctcaccaagagaagccagaagagcctccgacatctaatgaatgcttagaagatataaccgtaaaagatggactttctctccagtttaaaagatttagagaaactgtaccaacttgggatacaataagagatgaagaagatgttcttgatgagctcttgcagtatttgggtgttactagtcctgaatgcttacagagaactggaatctcacttaatattcctgctccacaacctgtgtgcatttctgaaaaacaagaaaatgatgttattaatgctatccttaagcaacatacagaagaaaaagaatttgttgagaagcactttaatgacttaaacatgaaagctgtggaacaagatgaaccaatacctcaaaaacctcagtcagcattttattattgcagattgcttcttagtatattgggaatgaattcctgggacaaacggaggagctttcatctcctgaagaaaaatgaaaagctacttagagaacttaggaacttggattcaaggcagtgccgagagacacacaagattgcagtattttatgttgctgaaggacaagaagacaaacactccattctcaccaatacaggaggaagtcaagcatatgaagattttgtagctggtcttggttgggaggtaaatcttacaaaccattgtggttttatgggaggactacaaaaaaacaaaagcactggattgaccactccatattttgctacctctacagtagaggtaatatttcacgtgtcaacaagaatgccttctgattctgatgattctttgaccaaaaaattgagacatttgggaaatgatgaagtgcacattgtttggtcagagcatactagagactacaggagaggaattattcccacagaatttggtgatgtccttattgtaatatatccaatgaaaaatcacatgttcagtattcagataatgaaaaaaccagaggttcccttctttggtcccctttttgatggtgctattgtgaatggaaaggttctacccattatggttagagcaacagctataaatgcaagccgtgctctgaaatctctgattccattgtatcaaaacttctatgaggagagagcacgatacctgcaaacaattgtccagcaccacttagaaccaacaacatttgaagattttgcagcacaggttttttctccagctccctaccaccatttaccatctgatgccgatcattaaatatcagttctgtttatct

SEQ ID NO: 173755 - DNA, 6152 bp, Homo sapiens
  Payload ID: 14122
  Gene Symbol: RALGAPA2
  Gene Name: Ral GTPase activating protein, alpha subunit 2 (catalytic)
  Uniprot ID: Q2PPJ7
  ENST ID: ENST00000202677
  CDS Start-End: 9-5630
gccgcgggatgttctcccgaaggagccacggggatgtgaagaagtccacccagaaggtgctggacccgaagaaggacgtgctgacccgcctgaagcacctgcgggcgctgctggataatgtggatgcaaatgatcttaagcagttttttgagaccaactattctcagatatatttcatcttctatgaaaattttatagcactggaaaatagtttgaaattaaaagggaataataagtcacaaagggaggagctggactccatcctcttcctttttgaaaaaatactgcagtttctacctgaacgaattttctttcgatggcattaccagagtataggctcaactttaaagaagcttctacacactggaaattctattaagataagatgtgaaggaatcaggctgtttcttctgtggcttcaagcacttcagacaaactgtgcagaagagcaggttctgatttttgcttgcctggtgcctggtttcccagcagtcatgtcatccaggggcccttgcacactggagacactcatcaatcccagccctagtgtagctgatgtaaagatatatccagaagaaatcactccactcctaccagccatatcaggggagaagattgctgaggaccaaacctgcttttttcttcaaatactgttgaagtatatggttattcaggctgcgagcttggagtggaagaataaggagaatcaagatactggttttaaatttctttttacattgtttcgaaagtattatcttcctcatttatttccatcatttactaagttaacaaacatctacaaacctgtacttgacatcccccatttgagaccaaagcctgtgtacattactaccactcgagacaatgagaacatttacagtacaaagattccatatatggcagctcgtgttgtttttattaagtggattgtaaccttctttttggaaaaaaagtatctaactgcaacacaaaacactaaaaatggagttgatgtattgcctaaaatcatccagactgttggtggtggtgctgtgcaggagagagcgcctgagctggatggtggtgggcccacggagcaggacaaaagccattctaacagcagcaccttgtcggaccgaagactcagcaactccagcctctgtagcattgaagaagagcaccgaatggtgtatgaaatggtacagcggattctcttgtcaacacgaggttatgtcaacttcgtgaatgaagtatttcaccaggcatttttgttgccttcctgtgagatagctgtaacaagaaaagtagttcaagtgtacagaaagtggattctccaggacaaacctgtgttcatggaggagccagatagaaaagatgttgcccaagaagatgctgaaaaattaggattttccgagactgatagcaaggaggcctcatctgaaagttctggtcataaacgatcttccagttggggacgcacatactccttcacaagtgcaatgagcagagggtgtgtgacagaggaggaaaatacaaatgtgaaagccggcgtccaggctttgttgcaggtatttttgacgaactctgcaaacatctttttgttggaaccatgtgctgaagttcctgtgctcttgaaagaacaagttgatgcttgtaaagctgttttgattatttttaggcgcatgataatggagcttacaatgaataaaaagacatgggaacagatgttgcaaatactactcaggataacagaagctgtcatgcagaagccaaaggataaacaaataaaggacttgtttgcccagagcttggcagggttactatttaggacgctcatggtagcttggatccgagcaaacctctgtgtgtacatttctcgagagctctgggatgactttcttggtgtgctgtcctccctcacggaatgggaggaacttataaacgagtgggccaacattatggactccttgacagcagtgcttgcaagaaccgtttatggagttgagatgacaaacctacctctggataaattaagtgaacaaaaggaaaagaagcaacgaggcaaaggctgtgttctagatcctcagaaaggaaccaccgtggggaggtccttttctctcagctggcggagccacccagatgtgaccgaaccgatgcgatttaggagtgccaccacgtctggagcaccgggagtggaaaaggcaagaaatattgttcgccaaaaagcaactgaagtggaggagtgtcaacagtcagaaaatgcacctgcagccggatctggccatctcacagtgggacagcagcagcaggtccttcggagcagcagcacctccgacatccccgagccgctgtgctcagattcttctcagggtcaaaaggcagaaaacacacagaattcgagttcttcagagcctcagcctattcaagagaataaaggacatgtgaagagagaacatgaaggaataacaatcttagttcgaagaagcagcagccctgctgaattggatttgaaagatgatttgcagcagacacaaggaaaatgtagggaaagacagaagagtgaaagtaccaacagtgacacaactctgggctgtaccaatgaggcagagctgtccatgggcccatggcagacctgtgaggaagacccagaactgaatactcccacagatgttgtggctgatgctgatgcccgtcattggttacaactgagtcccaccgatgcttcaaatttaacagatagcagcgagtgcctcacagatgactgtagtataatcgccggggggagcctcactggttggcacccagactctgctgctgtgttatggcgaagggtcttggggatcctcggagatgtgaataacatccagtcacccaagatccatgccagagttttctgctatctctatgaactctggtacaaactagcaaagatacgggataatctagcaataagcctggataaccagtcttctccatctcctccagttttgatcccaccactcagaatgtttgcatcatggctgtttaaggcggcgacactgccaaatgaatataaggaaggcaaactacaagcctacaggctgatctgtgccatgatgaccagacgccaggacgttctgccaaactcagatttcctggtgcatttttaccttgtgatgcacctgggattaaccagcgaggatcaggatatcttaaatacgatcataaggcactgtccaccccgctttttctccctgggttttcctggcttctcaatgctggtgggggacttcatcacggccgctgccagggtccttagcacagacattttgacggcgcctcgttcagaggctgtcactgtcctcggctctctggtctgctttccaaatacctaccaggagattcctttactgcagtcagtgccagaagtaaatgaggccattacaggaactgaagatgtcaagcattacctcataaatattttactgaagaatgccacagaagaaccaaatgaatatgcaagatgcattgctgtttgctcccttggggtctggatatgtgaagagcttgcacagtgtacaagccaccctcaggtgaaagaggccatcaatgtgataggagtaactctgaagtttcccaacaaaatcgtggcccaggtagcttgcgatgtccttcagttgctggtttcctactgggagaagcttcagatgtttgaaacctctctgcctcggaaaatggcagaaatcctcgtggccacagttgcttttcttttaccaagtgcagagtactcctcagtggaaacagacaagaagtttattgtgtccttgctactctgcctcttggactggtgcatggcattgcccgtgagtgtccttctccaccccgtgtccacagcagtcctagaggagcagcattcggccagagcccccttgctggattatatctacagggttttgcactgctgtgtgtgtggctcaagcacgtacacccaacagagtcactacatactgaccctggctgacttgtcatccacggattatgaccccttcctgccactggcaaatgtgaagagctctgagccagtccagtatcattcatcagcagaattgggtaacctgctgactgttgaagaggagaagaagagaagaagtttggagttgatccctttgactgctcgaatggtgatggcccacctggtgaaccacctggggcactaccccctcagtgggggccctgccatactgcacagccttgtcagcgagaaccatgacaatgcccatgtggaaggctccgagctgtcctttgaggtgttcagaagtccaaacctgcagctgtttgtatttaatgatagcaccctcatctcctaccttcagacacccacagaaggaccggtagggggatcaccagtgggctctctctctgatgtgagagtaattgtgagggatatctcagggaagtactcttgggatggtaaggttttatatggacctttggaaggctgcttagcacccaatggaagaaatccttcatttctgatttcgagctggcatcgtgacacatttggacctcagaaagactcttctcaagttgaggagggggatgatgttcttgacaaattacttgaaaacattggccatacaagtcctgaatgccttttaccgtcacagctaaatctaaatgaaccttccctaaccccatgtggcatgaactatgaccaagagaaggaaatcattgaggtcattttgcgccaaaatgctcaagaggatgagtatatccagagtcataacttcgattctgcaatgaaagtcaccagccaagggcagccctccccagtggagccccgaggacccttttatttctgcaggttattgcttgatgacttgggaatgaattcttgggacagaaggaagaattttcatctattgaagaaaaattcaaaattattgagagagctgaaaaatttggactcccgccagtgccgtgagacacacaaaatcgcagtgttttacattgctgaaggtcaagaagacaagtgttcaatcctctctaatgaaagaggaagccaagcatatgaagactttgttgctggacttggatgggaggtggatctctccacccactgtgggttcatgggtggccttcagcgcaatggcagcaccgggcagacggccccttactatgctacctcaactgtggaagtgattttccatgtttccactcgaatgccgtcagactcagatgattccctcaccaaaaagcttcgtcacttggggaatgacgaggtccatatcgtctggtctgaacactccagagactaccgcaggggtattatcccaactgcctttggagatgtttcaatcattatttacccaatgaagaatcacatgttcttcatcgcgataacgaagaaacctgaggttccattttttgggcctctgtttgatggagccatagtgagtgggaagctgctgccaagccttgtatgtgccacgtgcatcaacgccagcagggctgtgaagtgcctcatcccactctaccagagcttctatgaagagcgagctctgtatctcgaagcaataattcagaaccaccgcgaagtaatgacattcgaggatttcgcagcccaagtcttttctccctctcccagctactccctcagcggaacggattaaaacacgtaaaggtctcatttcaatatttgagcaaggggccctggcctccagtctgagtgctgacctcgaagagcccctgagtgaggaggagacagaacaccctctcctgcctctgccccgagccactaaacccagaatctccaggaaatttcgttgctgtactagtgccctcagcaggtcttcccattagtggacttctgaagcccatggtgaatcccactaccgtgtctcagatgggactcaaactaggctgtatcatcttgtcctgaaacctcacaaaccttggacttccaaagaagaaaagaaaaagtcaccaaaaaccagagatgaacccactgacacgtgggcactggtgtggctgctctgggcagatgacagcaggaaaagattctgcgctttcagggagggggcagagggcagcttgcttctgcaccccaagttgtttcttctcatttatgaacccaagcatgattcacaaaggggctggcaaaacaattgtctaattgaggaatctgatctgca

SEQ ID NO: 173756 - DNA, 2623 bp, Homo sapiens
  Payload ID: 14122
  Gene Symbol: RALGAPA2
  Gene Name: Ral GTPase activating protein, alpha subunit 2 (catalytic)
  ENST ID: ENST00000427175
  CDS Start-End: 1-752
ggcagccctccccagtggagccccgaggacccttttatttctgcaggttattgcttgatgacttgggaatgaattcttgggacagaaggaagaattttcatctattgaagaaaaattcaaaattattgagagagctgaaaaatttggactcccgccagtgccgtgagacacacaaaatcgcagtgttttacattgctgaaggtcaagaagacaagtgttcaatcctctctaatgaaagaggaagccaagcatatgaagactttgttgctggacttggatgggaggtggatctctccacccactgtgggttcatgggtggccttcagcgcaatggcagcaccgggcagacggccccttactatgctacctcaactgtggaagtgattttccatgtttccactcgaatgccgtcagactcagatgattccctcaccaaaaagcttcgtcacttggggaatgacgaggtccatatcgtctggtctgaacactccagagactaccgcaggggtattatcccaactgcctttggagatgtttcaatcattatttacccaatgaagaatcacatgttcttcatcgcgataacgaagaaacctgaggttccattttttgggcctctgtttgatggagccatagtgagtgggaagctgctgccaagccttgtatgtgccacgtgcatcaacgccagcagggctgtgaagtgcctcatcccactctaccagagcttgtatctttttgctttaaatgtgtaacttactaaccatcccagaatcaagattcctggcagtttttcataagaggtaagtattcaaaactgaattgaagagggaagagaatttttttcaacctctgttaaaaataacatagtggtttttcatagcatttgttaatttatattaaatataataattttatgctgcattaaacttagagtttactttcataatttactcacatacgtttgtgtctgagaagctgtgaccattatgagatgctcatatcttcttaggtattttgccccacgttcagtctcatcctgtatccctcttatttgtggcagtccattgtatataaggtgggatgctgagcaaaacgtatcgctcattcagagtgcctaccagaaaccaaagcaaatgaaatgaccctaataaatcaaagaatgtggcaggtaccacctgagaagtgcaagtaggtttctggaagatcagaggagatagaaattgcatttggttgagggtagagggaaagatgtcctgaattaagttgcatttggacttatcaataggaatagctagaaattcttttgtaattttcccaaatcattgatattttctctagttcctgattttgtttccaaaaacagaataaatttcactcctaaaattttttcctcaaacattaattggcctgctgtagtccttaaattcaagcatgatctcaagttataagaaaaagagattaagatgggtgaccttataaaattgatgcaaaaaaagtgacctcctaataaaacttagaatctctttgtttctaattggtattgataataatttgaaacatattgtgtttgacctctatatatacttctcccaacctgatagtaagtgatgtgttgctatagcaagtgagagttgggggtagatgaaaactatcccatgtgaatagatacggttcatgaaaaaatacctttcattaaaatcctggtcacttcattgactgatattctgcctttagattaaaaaaaaatacatatgccatgtggcaacttaaaattatcatagaaatgagtagtagaaaagagctattaggtcccatctggtccctcccctgggggccagggcaggattattcccttcagtgtactctctcgtgctttgtccaggctggtggtgagtgttttggagatggcattctttgcagtgatttccacaacactgtagacgtaatcttgtggctggtgtcaatttggccttcagcatggagtttttatttcacatactattaaaaagagcctcttggcagaaatgagaaagaactattcagcgattagtttgtcagtttgcatgtcaactaggacgagctgggcacgcatcagtcaagtatgttggaccaaggcagcaaaaaaaaaaaaaaaaaaaaaatcttattttacaaatgagaaaattccattttatattaattccattgtgacttttgtcatgtcaccttctctacttactgaacttctcattataaaatacttgctttgttattttgtttaacactgctttctcaaataagaattaatgtgatacaattggaatgatcaggtttagggaaaatggtatttttaaaagttcaaaggatactattcagaatcactttgaaaacttttcaagcagtgacacatcaggactaatgtggataccagctagggctactgatgctattgtgtgttagtaaatgtactctaactcacaaaatagctaacttgacatctcaaacaacaatgtagtacagaaattaggaaaaatattttaaaaactattatgttgatcattatcaatattttaaacttttttttgtcttgtacctggagaaaatttaattggtattattcaaataaattgtttaaaacaagaaa

SEQ ID NO: 173757 - DNA, 8769 bp, Homo sapiens
  Payload ID: 14122
  Gene Symbol: RALGAPA2
  Gene Name: Ral GTPase activating protein, alpha subunit 2 (catalytic)
  ENST ID: ENST00000430436
  CDS Start-End: 1-5222
taaagatatatccagaagaaatcactccactcctaccagccatatcaggggagaagattgctgaggaccaaacctgcttttttcttcaaatactgttgaagtatatggttattcaggctgcgagcttggagtggaagaataaggagaatcaagatactggttttaaatttctttttacattgtttcgaaagtattatcttcctcatttatttccatcatttactaagttaacaaacatctacaaacctgtacttgacatcccccatttgagaccaaagcctgtgtacattactaccactcgagacaatgagaacatttacagtacaaagattccatatatggcagctcgtgttgtttttattaagtggattgtaaccttctttttggaaaaaaagtatctaactgcaacacaaaacactaaaaatggagttgatgtattgcctaaaatcatccagactgttggtggtggtgctgtgcaggagagagcgcctgagctggatggtggtgggcccacggagcaggacaaaagccattctaacagcagcaccttgtcggaccgaagactcagcaactccagcctctgtagcattgaagaagagcaccgaatggtgtatgaaatggtacagcggattctcttgtcaacacgaggttatgtcaacttcgtgaatgaagtatttcaccaggcatttttgttgccttcctgtgagatagctgtaacaagaaaagtagttcaagtgtacagaaagtggattctccaggacaaacctgtgttcatggaggagccagatagaaaagatgttgcccaagaagatgctgaaaaattaggattttccgagactgatagcaaggaggcctcatctgaaagttctggtcataaacgatcttccagttggggacgcacatactccttcacaagtgcaatgagcagagggtgtgtgacagaggaggaaaatacaaatgtgaaagccggcgtccaggctttgttgcaggtatttttgacgaactctgcaaacatctttttgttggaaccatgtgctgaagttcctgtgctcttgaaagaacaagttgatgcttgtaaagctgttttgattatttttaggcgcatgataatggagcttacaatgaataaaaagacatgggaacagatgttgcaaatactactcaggataacagaagctgtcatgcagaagccaaaggataaacaaataaaggacttgtttgcccagagcttggcagggttactatttaggacgctcatggtagcttggatccgagcaaacctctgtgtgtacatttctcgagagctctgggatgactttcttggtgtgctgtcctccctcacggaatgggaggaacttataaacgagtgggccaacattatggactccttgacagcagtgcttgcaagaaccgtttatggagttgagatgacaaacctacctctggataaattaagtgaacaaaaggaaaagaagcaacgaggcaaaggctgtgttctagatcctcagaaaggaaccaccgtggggaggtccttttctctcagctggcggagccacccagatgtgaccgaaccgatgcgatttaggagtgccaccacgtctggagcaccgggagtggaaaaggcaagaaatattgttcgccaaaaagcaactgaagtggaggagtgtcaacagtcagaaaatgcacctgcagccggatctggccatctcacagtgggacagcagcagcaggtccttcggagcagcagcacctccgacatccccgagccgctgtgctcagattcttctcagggtcaaaaggcagaaaacacacagaattcgagttcttcagagcctcagcctattcaagagaataaaggacatgtgaagagagaacatgaaggaataacaatcttagttcgaagaagcagcagccctgctgaattggatttgaaagatgatttgcagcagacacaaggaaaatgtagggaaagacagaagagtgaaagtaccaacagtgacacaactctgggctgtaccaatgaggcagagctgtccatgggcccatggcagacctgtgaggaagacccagaactgaatactcccacagatgttgtggctgatgctgatgcccgtcattggttacaactgagtcccaccgatgcttcaaatttaacagatagcagcgagtgcctcacagatgactgtagtataatcgccggggggagcctcactggttggcacccagactctgctgctgtgttatggcgaagggtcttggggatcctcggagatgtgaataacatccagtcacccaagatccatgccagagttttctgctatctctatgaactctggtacaaactagcaaagatacgggataatctagcaataagcctggataaccagtcttctccatctcctccagttttgatcccaccactcagaatgtttgcatcatggctgtttaaggcggcgacactgccaaatgaatataaggaaggcaaactacaagcctacaggctgatctgtgccatgatgaccagacgccaggacgttctgccaaactcagatttcctggtgcatttttaccttgtgatgcacctgggattaaccagcgaggatcaggatatcttaaatacgatcataaggcactgtccaccccgctttttctccctgggttttcctggcttctcaatgctggtgggggacttcatcacggccgctgccagggtccttagcacagacattttgacggcgcctcgttcagaggctgtcactgtcctcggctctctggtctgctttccaaatacctaccaggagattcctttactgcagtcagtgccagaagtaaatgaggccattacaggaactgaagatgtcaagcattacctcataaatattttactgaagaatgccacagaagaaccaaatgaatatgcaagatgcattgctgtttgctcccttggggtctggatatgtgaagagcttgcacagtgtacaagccaccctcaggtgaaagaggccatcaatgtgataggagtaactctgaagtttcccaacaaaatcgtggcccaggtagcttgcgatgtccttcagttgctggtttcctactgggagaagcttcagatgtttgaaacctctctgcctcggaaaatggcagaaatcctcgtggccacagttgcttttcttttaccaagtgcagagtactcctcagtggaaacagacaagaagtttattgtgtccttgctactctgcctcttggactggtgcatggcattgcccgtgagtgtccttctccaccccgtgtccacagcagtcctagaggagcagcattcggccagagcccccttgctggattatatctacagggttttgcactgctgtgtgtgtggctcaagcacgtacacccaacagagtcactacatactgaccctggctgacttgtcatccacggattatgaccccttcctgccactggcaaatgtgaagagctctgagccagtccagtatcattcatcagcagaattgggtaacctgctgactgttgaagaggagaagaagagaagaagtttggagttgatccctttgactgctcgaatggtgatggcccacctggtgaaccacctggggcactaccccctcagtgggggccctgccatactgcacagccttgtcagcgagaaccatgacaatgcccatgtggaaggctccgagctgtcctttgaggtgttcagaagtccaaacctgcagctgtttgtatttaatgatagcaccctcatctcctaccttcagacacccacagaaggaccggtagggggatcaccagtgggctctctctctgatgtgagagtaattgtgagggatatctcagggaagtactcttgggatggtaaggttttatatggacctttggaaggctgcttagcacccaatggaagaaatccttcatttctgatttcgagctggcatcgtgacacatttggacctcagaaagactcttctcaagttgaggagggggatgatgttcttgacaaattacttgaaaacattggccatacaagtcctgaatgccttttaccgtcacagctaaatctaaatgaaccttccctaaccccatgtggcatgaactatgaccaagagaaggaaatcattgaggtcattttgcgccaaaatgctcaagaggatgagtatatccagagtcataacttcgattctgcaatgaaagtcaccagccaagggcagccctccccagtggagccccgaggacccttttatttctgcaggttattgcttgatgacttgggaatgaattcttgggacagaaggaagaattttcatctattgaagaaaaattcaaaattattgagagagctgaaaaatttggactcccgccagtgccgtgagacacacaaaatcgcagtgttttacattgctgaaggtcaagaagacaagtgttcaatcctctctaatgaaagaggaagccaagcatatgaagactttgttgctggacttggatgggaggtggatctctccacccactgtgggttcatgggtggccttcagcgcaatggcagcaccgggcagacggccccttactatgctacctcaactgtggaagtgattttccatgtttccactcgaatgccgtcagactcagatgattccctcaccaaaaagcttcgtcacttggggaatgacgaggtccatatcgtctggtctgaacactccagagactaccgcaggggtattatcccaactgcctttggagatgtttcaatcattatttacccaatgaagaatcacatgttcttcatcgcgataacgaagaaacctgaggttccattttttgggcctctgtttgatggagccatagtgagtgggaagctgctgccaagccttgtatgtgccacgtgcatcaacgccagcagggctgtgaagtgcctcatcccactctaccagagcttctatgaagagcgagctctgtatctcgaagcaataattcagaaccaccgcgaagtaatgacattcgaggatttcgcagcccaagtcttttctccctctcccagctactccctcagcggaacgggggccctggcctccagtctgagtgctgacctcgaagagcccctgagtgaggaggagacagaacaccctctcctgcctctgccccgagccactaaacccagaatctccaggaaatttcgttgctgtactagtgccctcagcaggtcttcccattagtggacttctgaagcccatggtgaatcccactaccgtgtctcagatgggactcaaactaggctgtatcatcttgtcctgaaacctcacaaaccttggacttccaaagaagaaaagaaaaagtcaccaaaaaccagagatgaacccactgacacgtgggcactggtgtggctgctctgggcagatgacagcaggaaaagattctgcgctttcagggagggggcagagggcagcttgcttctgcaccccaagttgtttcttctcatttatgaacccaagcatgattcacaaaggggctggcaaaacaattgtctaattgaggaatctgatctgcattgattttgctagttccttttatgttaggatttatggtttactcaaaaatttcatcatcatggaaattggctttccccggggtcttttgcccaggagaagttttacctcagttgtccagtgttttcccacatggtacctgacgcccgctaactaagcagaggctctcctcaccacgcagaggcgcttcaggtcatgacagtgatgcccctatcttagaacactcagaagattccagaaatacagggtcctgtccttgcataagttcctgcaggacaggaagtgtcccaaggctcaaaacaacacagaccacatccacacaaaaggcgcatgccggcttcaggcgctaggctgagacgggtaccccccgaatggccttgtgcctccaaaagcctcacgctgcaactttgctgctcctgtctgttgcccagagaggcctcacacaggcctcagaaatgtttcttgtcacacaaagcttttggtagccgattccaagcgagggatttaatccttacatttttgcccatttggctccaaggaaggcttattagacctgtttttttgttgttgttgtttttttttcttaaaaacaaaatgaatgaatgaatgaaaagagaagcaatggtgagccctctcctgctggggcgccctgggtgggccttgcccgtcctgcagcagagaaatcagtcagcagcgaagagctgctggcgcaggccccaggctgtgtcctggacccttgacctgcctcagagctagaggtttgctccaccccgcacttcacttgggaagtaaatccaagaagcttaccagagtccatcgccactgcgcaggctttgttctcacagcggccaggtacagagcaacgccctgcagtgggaagggacagcagcacgagagacgcagcccctaactcagggcttatgatgggtgggctggtcctgggaaaggcgggccctgtgcgggaggcctccccaccttcctgtgccctctgccctctgcccttgcacacacttgttaccttcaggctgcttggccacccaggcctgaagaagccttctgaggctctcaccccatcagaacggccattttcactgaggagccagttttttccatttgccatggagctggtttggctggaacctggcctttgtagggaaaacggggagactcaggagccagactcactcttgggacaaatgagaaagagctgagccagtcgttcctgtcggaagggcgggcctgctcatcctggcgagaatttgcttttctgctttataggggattgcaggccaggcccactgacaggagcaccttgagaaccacctgaacagaagagaatgagggtgccccaaagtggaaggaagcttctggcccctgggccgttttgggaagggcccaggatactcacgggggctgaagggcaatgtgaagagtgactgcaagtcctggcattttctgtggtgtcagcaaatgcccctttattttaaatgattccagacatctgggcagcatagcttggccaccatcactcaggcttgatcctgctgttgagctgctcctgtctcctgtttacctcactcctgttgggaaggccatcgcatgctcctaggctccagagtcccctgtaggtctctaccagcaggtcgcctctgggagaacgtttcatcttcaggctctagaaactcctgttgcggaattgctggctttagtagaaaagatatgtcaggatttagaaatcgtattgaactctcctggacttctgctccatgatttcattttgctttcacgaaccagcgatccctaccttggggtgggaaattcaattgtaggcagcaaataactcaaccctcctgtaacccctgaggattataacgaccccatgacccccgatgacagccagcagtttggtgactagagttttttgagcctgccattctcagtagcagctttggtctggagatggaacgtggagcagggaatctgacagccacgtttctcgtgatcacgtggactggagttgtttttgttatctggggtggaaaattgcaatgatcaagtttcttttttattttttttttacttagaaaagcaaatattgtgtttttgtaataaatccctttcagcaaaattgcggaggatcattcatccactagggccccacctgaggcacagcgctgactcatcacggtggtaccagtaggtcagccatctggaaacagaagtggccctaattgggccaaaatgtggtaagactcgctggcctcaggcagggccaggccagttccctcacttctctgcacacctattcccagattccatccagagcaaagctgatgtttatcgtctcattgtacttaggctttcgtactttaaaaaattatgactttttaaaaataagccttcagcagacagaagtgaagaaatttagcctgggttgcctcagcaacaaagtctgcggttcctaagagccacatgttggggaagtggggtgacccaaacttggtgacataggttgattgatcagaccctcagccttacaagcaagagctcatgcagatccacagagccatgcacatcctgtcttcctgaccttcctcaggtggcaccacctgcgccccatggacctgctgtatcggtgtcatgtggaggtctgatgaatcctttaaaacctaactgtgatgtcgtaaatgtaactgtgctacctttatatctactgaagggcagcgtctgcatccgagggaaattcaacatgaaacaaccatcgttttagttgcactcagtctgtccatatgacatacacatgaagtgaatgtttccttatgttttcaggtctacaatgtttagtacatgtaaataaggaaaaaatttgataaatatggtaaattaagttatagcgtgtcatttgattcttattttgctgtctcttgttatttaattttcctaatgctccacatctaggttccttcctaggtggtgggaacaccttgcagacgtgtgtgcaccaggacacaccgcggcccaggcagccacaccgagaaagcacacatctccactgatggcagccacccgactctccagttaacctcttttactctttaattctgatttactgtgatgatttaataaagtggaaacacagcacttcagtgctatatgtttctctcattctcattatagtttataagaaaataaagttcaccctggcatctaataaaaa

SEQ ID NO: 173758 - DNA, 1432 bp, Homo sapiens
  Payload ID: 14122
  Gene Symbol: RALGAPA2
  Gene Name: Ral GTPase activating protein, alpha subunit 2 (catalytic)
  ENST ID: ENST00000620717
  CDS Start-End: 127-840
gaggatgagtatatccagagtcataacttcgattctgcaatgaaagtcaccagccaagggcagccctccccagtggagccccgaggacccttttatttctgcaggttattgcttgatgacttgggaatgaattcttgggacagaaggaagaattttcatctattgaagaaaaattcaaaattattgagagagctgaaaaatttggactcccgccagtgccgtgagacacacaaaatcgcagtgttttacattgctgaaggtcaagaagacaagtgttcaatcctctctaatgaaagaggaagccaagcatatgaagactttgttgctggacttggatgggaggtggatctctccacccactgtgggttcatgggtggccttcagcgcaatggcagcaccgggcagacggccccttactatgctacctcaactgtggaagtgattttccatgtttccactcgaatgccgtcagactcagatgattccctcaccaaaaagcttcgtcacttggggaatgacgaggtccatatcgtctggtctgaacactccagagactaccgcaggggtattatcccaactgcctttggagatgtttcaatcattatttacccaatgaagaatcacatgttcttcatcgcgataacgaagaaacctgaggttccattttttgggcctctgtttgatggagccatagtgagtgggaagctgctgccaagccttgtatgtgccacgtgcatcaacgccagcagggctgtgaagtgcctcatcccactctaccagagcttctatgaagagcgagctctgtatctcgaagcaatattcagaaccaccgcgaagtaatgacattcgaggatttcgcagcccaagtcttttctccctctcccagctactccctcagcggaacggattaaaacacgtaaaggtctcatttcaatatttgagcaaggggccctggcctccagtctgagtgctgacctcgaagagcccctgagtgaggaggagacagaacaccctctcctgcctctgccccgagccactaaacccagaatctccaggaaatttcgttgctgtactagtgccctcagcaggtcttcccattagtggacttctgaagcccatggtgaatcccactaccgtgtctcagatgggactcaaactaggctgtatcatcttgtcctgaaacctcacaaaccttggacttccaaagaagaaaagaaaaagtcaccaaaaaccagagatgaacccactgacacgtgggcactggtgtggctgctctgggcagatgacagcaggaaaagattctgcgctttcagggagggggcagagggcagcttgcttctgcaccccaagttgtttcttctcatttatgaacccaagcatgattcacaaaggggctggcaaaacaattgtctaattgaggaatctgatctgc

SEQ ID NO: 173759 - DNA, 8663 bp, Homo sapiens
  Payload ID: 14123
  Gene Symbol: RALGAPB
  Gene Name: Ral GTPase activating protein, beta subunit (non-catalytic)
  Uniprot ID: Q86X10
  ENST ID: ENST00000262879
  CDS Start-End: 285-4769
gagttatttgacgccgccgcccctggcagtcggaagttgcctgagcagatcccagccggctggctcgagtggccttcgtcgtcccttggcgccctgggagagtcgctgacgggtggactgacggaccgcctgaggacggccggccagggcggtgaaagcgccagccctatggcgcgggtcgcgtgaggcggaaggccgaggacggccggcggcggcgcccgccccggcgatgcgggccccgcccgtcgcctcaggtgccatttggattgtactttagtggcacgatgtactctgagtggaggtcactgcatttggtgattcagaatgatcaaggccataccagtgtgctgcacagctatccagagagcgttggacgagaggtggcaaatgctgtagtccgtcctcttgggcaggtgttaggtaccccttcagtggctggtagtgagaatttgttaaaaactgacaaagaagtaaaatggaccatggaagtaatttgctatggactgacccttccattggatggagagactgtaaaatattgcgttgatgtatatacagactggattatggctttagtgttgccaaaagattctattccattgccagttattaaagagcctaatcaatatgttcaaactatactaaaacacctacagaatctttttgtaccaagacaggaacagggttccagtcagattcgactatgcttacaggtcctgagagccattcagaaactggcccgtgagtcatctctcatggcccgagaaacttgggaagtcttactgttgtttcttctgcagattaacgacatacttctggccccaccaactgttcaaggtggcattgctgagaatctagcagagaagttgattggtgttctctttgaggtgtggttactagcttgtactcggtgcttcccaacacctccttattggaaaacagccaaggagatggtggctaactggaggcatcacccagcagtggtggagcagtggagcaaggtcatttgtgcactcacttccagattgctacgctttacatatggtccttcatttcctgcatttaaagttcccgatgaagatgccagtctgatccctccagaaatggataatgagtgtgttgcacagacatggtttcgctttttacacatgttaagtaatcctgtggatttgagtaacccagctattataagctctactcccaaatttcaggaacagttcttgaatgtgagcggaatgccgcaagaattgaatcagtatccctgccttaaacatctgcctcaaatattttttcgtgccatgcgtggaatcagctgtctggtggatgcattcttaggtatttctagaccccgatcagacagtgctcccccaacacccgtgaatagattaagtatgcctcaaagtgctgctgtcagtaccacccccccacataaccggaggcaccgggctgttactgtgaataaggccaccatgaagacaagcacagttagtactgctcatgcctctaaagttcagcaccagacgtcctccacctctcctctgtcaagtccaaatcagactagttcagaaccccggccactgcctgcccctcggagaccaaaggttaacagcatcttgaatctctttggatcatggttatttgatgcagcatttgttcactgtaaacttcataatgggataaacagagacagcagcatgactgccattacaacacaagctagcatggagtttcgacggaaagggtcacaaatgtccacagacaccatggtttccaatcctatgtttgatgcaagtgaatttcctgataactatgaagcaggaagagctgaggcttgtgggacactgtgtaggattttttgtagcaagaagactggagaagagattctgccagcttatttatccagattttacatgcttttaattcaaggtttgcagataaatgattatgtgtgccatcctgtcttggccagcgttattctaaactctcctcctttgttctgctgtgacttgaaagggattgatgttgtggttccttactttatttcagctcttgaaaccattttgcctgacagagaactctcaaaattcaaaagctatgtaaatccaacagaattgcgaagatcctccattaatatcctgctttctttgttgcccctccctcatcattttggcacagtcaaatctgaggtggtcctggaaggaaagtttagtaacgatgacagctcttcttatgataaaccaataacttttctgtccctgaagttgagacttgtgaatatattaataggtgccttgcaaactgaaacggaccccaacaacacccaaatgatattaggggcaatgttaaatattgttcaagattcagcacttttggaagccattggttgccagatggagatgggtggtggagaaaataacctgaagagtcatagtcgcaccaatagtggtattagttcagcaagtggtggaagcacggagcccacgactcccgatagtgagagacctgctcaagctctcttaagagattatgctcttaatacagattcagctgctgggctcctgattcgcagcattcatctcgtcacccaaagactcaactcccagtggcgccaagacatgagcatatcactggcagctctagagctcctctctggccttgcaaaggtaaaagtgatggttgactcaggagaccggaagcgagccatcagttctgtgtgcacctacattgtttatcagtgtagtcggccagctcctttacactccagggatctgcactccatgatagtggcagcttttcagtgtctctgtgtctggctgacagagcaccctgatatgcttgatgaaaaggactgccttaaggaagtactggagattgtggaactgggtatctcaggaagtaagtccaagaacaatgagcaagaggtcaagtacaaaggagataaggagccaaaccctgcatctatgagggtaaaggatgctgctgaagccaccctaacatgcattatgcagttgctcggcgcatttccttcacctagtggtcctgcctctccttgtagtcttgtgaatgagaccactttgattaaatactccaggctgccaaccataaacaagcatagtttccggtactttgtcttggataacagtgtcatcctggcaatgctggaacaacctcttggaaatgagcagaatgattttttcccctctgtcactgtgctggtccggggaatgtctggaagacttgcttgggcacaacagctttgtcttttacccagaggagcaaaagcaaatcagaagctttttgtacctgaacctcgcccagttcctaaaaatgacgttggatttaaatattctgtgaaacatcggccatttcctgaagaggtggacaagattccttttgtgaaagcagatctcagcattccagatttgcatgaaatagtcactgaagaattagaagagagacacgaaaaattaaggagtggcatggcccagcagattgcttatgaaatacaccttgagcaacagagtgaggaggaattgcagaagagaagttttcctgacccagttacggattgcaagcccccgcctcctgcccaggaattccaaacagcccgcctttttctctcacactttggatttttgtccttagaagcactgaaggaacctgcaaatagtcgtctacctcctcaccttattgcacttgattccacgatacctggattttttgatgacattgggtatctggatctcttgccatgtcgtccttttgacacagtttttattttctatatgaagccaggtcagaaaacgaaccaagagattttaaagaatgtggagtcttccagaactgttcagccacatttcctagaatttttgctttcccttggctggtcagtagatgtgggcagacaccctggttggactgggcatgtttctaccagttggtctattaattgttgtgatgatggtgaaggatctcaacaagaagtgatttcctctgaagatattggagctagcattttcaatggacagaagaaggtgctgtattatgctgatgcccttacagaaattgcttttgtggttccttctcctgtggagtccttaactgattcattggaaagtaacatctcggaccaagatagtgattcaaatatggatcttatgccaggaattctgaaacagccatccctgacacttgagcttttccccaatcatacagacaatcttaattcctcacagaggctcagtcccagttccagaatgaggaagctgcctcagggtcgccctgttcctccccttggacctgagacaagagtttctgtagtctgggtggaacgctatgatgatatagaaaactttcccctctcagagctgatgacagagatcagtactggtgtggaaactactgcaaatagtagcacttcactgagatctacaactcttgaaaaagaagttcctgtcatcttcatccaccctttaaacactggattattccggataaaaattcaaggagccactggaaaatttaatatggtcatccctcttgtggatgggatgattgtcagcaggcgagctcttggctttctggtgaggcagactgtaattaacatttgtagaagaaagagactggaaagtgactcctacagtcccccccatgtccgccggaaacagaaaatcaccgacattgtcaacaagtaccggaacaagcagctggagccagagttttatacttcacttttccaggaggttggactcaagaactgcagttcttagaccactgaatttctaagactgttgaactccagtttgggaactataacacagcagaacagtttgataggtgatcactgtaaaaataaaaacaaatcactcccaagagcttactgtttaatcaccagaatagaagaaacacattataacccatttgatagaagactttgggctatctagtgaaatgggctcccagacacaatcacactcctgctgataatgatgatatacattttagccataaactttcttttaaaagtgacaattttagttaaacataagccttttgaggagaaaggcttttatgcatctcagttaaacacgtgcattggtagtatcaacaaatttgcaatatagaagttgaagatagttttttacctcactttttaggaggttgtattcaaaattaaaatctcagaatcttacaggacatttaaagactcatgttgatagcatggaggagaaggaaagaagtcacagccttctactcagttgtaggtcttcttgtcatccagctgtcacactgacaaaaagaaaagatgatacatgttttttgctcagataagaagcctgacattaaaagatgtcatatttttttctccacatttcaaaaagttgtccttctcatcactgcacagatctgtctgaaagcctcagtttctgagtgacccaggaacagatcagaaatggagcatggccttgtcctttaatggggatgcaaataaagtttgtggggttaaaagttataagacagcagtgataccccactctctccattattgtccagcggggtgacataatgacaggttaaatatttgtgattcattgattaaatattatttaaagaaatgtaaattcacaataagggttgaaaattatttggtttcatccattgtctcttatttcaggaccaagcagcaaactgcagtagtttgtgaaggattctaatatggggttcaggaatagcctctcaacgctactaattcagatctctcccagagaactactggatttcctcataattgacaaacatgagtgaccacctctttgggtggctactgttagaaatggctgttgtcatgttttctggactttgccagccaacagatccctgccaggttttggaaatacttctattacctcgctgctacttttctgcagggataaaacttttgaggtggccagacccagaacatccaaggattcctgttacagtgctacagtatacactgctcatttatcctattctcatgtgctttcttctttagtaagattattttaagaaaataagtgatatttaaagtccaaagaggaatgatcacagttgtataaggggtgttttcccacttgaactctgatgtcagtcgactgtgggtcagagctacaaccatctgtttggtttgatgttttggtggtttacttacggagtggggatagtgtgagacctaattccctgtgcaaatgtctcttattccagaaatgtgcattttgtcatctataagcaagaaatatgggcatagcagctcttggtttaaagtttgccataacctgttcatgtttgttttaagctcaggtaaagataacctcctctttctatgactccagtttccattcaggttatagtattattcaatagttgattttctttttaagctgggcaataaattgatgtttccagatggtaacatgggagagggcatataggataaagatgagcaaattctaccctaaaaatgttctagtagttcacaggaagaagatgaggtttaataactttcaaggtaattctagattgacattttgaggggaaaatgggctcttgttctagttgaagtgagcagagaaggctataaattaatatgtaacttacagcattccagaggttaaaaataactgatgcagatgtacttcttcagtgtgattcttcagatcaaacttttacttttggcatagttaatttcagaaaaatgtgctgtatgtgtgtgtgtatgagggttggtcttgctgatccttcagttagctctaaattctggcaactccttgtaattccaatgtatttgatacatgaacaatcatgttgaatgcatttgtgatctgggagacttcctcgtcttccagggaaggaaggatgtgcagcccctgaaggcatgaaactcccagtgtgtacggagccagtggaatatgggatacccataccttaccaggcgctggttccttctgctcacaataacatctgcccaaagagggagtgggaagaacgcttagctctttcactagtatggatttgagttcatggtcactatttttacccacctgcctttgttaaaaatcactttgagtagaatagcactggaggaacatatttagcacctaatattaatatttagtagtccattgataaatttgccagcatatgttctagcctctggggggaaaccaggaccacttttgtctgtggcttaaacagttcagttgctatatctgttgggtatgccgggggtggatgagtgtggcattccgtgaagaggaaggtggtaagtaaggtttcccttctactgccttcttaagttgcaggagggagcttttctcctcccctctggttgggagcactgaggacagtgaggagggcttttaccttgttaatcctttccttatttagctagctttcctttttgtctagggcttcctcttgagaccctcttccatccattgggcctttgaaaggactaatcagacacacacacacacacacacacacacacacacactcgcatactcatgcacattttccttcatttccagatcctttatttcagagcagcccattttcctctggattcattgatgaatacaagtacccacacctttggccagtaatgtcagttacctgctgcaggttctgtgtatgaggccttcatgaacggttaccttctccatacactagggaagcatttgtcagactctgcagactgggttctagagaggcagagtctttaagagtattcatttcttctggaaggtggagctttacccaaagtggaagttagccttgctcaaagatgtgttttgtggtaggtggtaaaaataaataaataaataaataataaaaaaagaaacatgtattggaggtaatttgacactgctgctggcagtagttctctattcaccattttaaagcccattcaggttctctcttcctgaaaagaactgattgctgtgtttacatgaaatgacattggagtcagatggtctgttttaaagatttccatgacagcctcttttcctgagttggagagattggaggtggtctatccgtacgatgtggaatcaaacggtgggtttcttagtagctaaagaagccatgtacttctagtgtgtttctcagaatatcaactcatgttcttcagatgcttttctttttttaatggtgagggaaaaggtataatttgggattccacagtgccttgcatatagtaggcgcccagtaaatacttgttgaagcaaaccaagtttcccaagtcctcatctcttatagtgaccaagacatctttctcctctgaagggcttggcagttgtggctaaaaaataagcagtatcattatttgcttgaaatcatatatacagtttgtatgaatttcagtatgttgccaagacatgattttttcttattgtattttctgtaaatatttctggcactgaactgtaaagtaaaggcaaagtgtaaatatgaaggcgtgcccgtgccccttgcctcctgtgtttcatcttcgtcggttagggaagaaggtccagaggtttgtttgtatttatgccgatcctttgtccagaagaagcccatggaatattgaatgtaatacatttagtcaattaaattttaaggagattcttatctaataa

SEQ ID NO: 173760 - DNA, 8435 bp, Homo sapiens
  Payload ID: 14123
  Gene Symbol: RALGAPB
  Gene Name: Ral GTPase activating protein, beta subunit (non-catalytic)
  Uniprot ID: Q86X10
  ENST ID: ENST00000397040
  CDS Start-End: 59-4543
cttggcgccctgggagagtcgctgacgggtgccatttggattgtactttagtggcacgatgtactctgagtggaggtcactgcatttggtgattcagaatgatcaaggccataccagtgtgctgcacagctatccagagagcgttggacgagaggtggcaaatgctgtagtccgtcctcttgggcaggtgttaggtaccccttcagtggctggtagtgagaatttgttaaaaactgacaaagaagtaaaatggaccatggaagtaatttgctatggactgacccttccattggatggagagactgtaaaatattgcgttgatgtatatacagactggattatggctttagtgttgccaaaagattctattccattgccagttattaaagagcctaatcaatatgttcaaactatactaaaacacctacagaatctttttgtaccaagacaggaacagggttccagtcagattcgactatgcttacaggtcctgagagccattcagaaactggcccgtgagtcatctctcatggcccgagaaacttgggaagtcttactgttgtttcttctgcagattaacgacatacttctggccccaccaactgttcaaggtggcattgctgagaatctagcagagaagttgattggtgttctctttgaggtgtggttactagcttgtactcggtgcttcccaacacctccttattggaaaacagccaaggagatggtggctaactggaggcatcacccagcagtggtggagcagtggagcaaggtcatttgtgcactcacttccagattgctacgctttacatatggtccttcatttcctgcatttaaagttcccgatgaagatgccagtctgatccctccagaaatggataatgagtgtgttgcacagacatggtttcgctttttacacatgttaagtaatcctgtggatttgagtaacccagctattataagctctactcccaaatttcaggaacagttcttgaatgtgagcggaatgccgcaagaattgaatcagtatccctgccttaaacatctgcctcaaatattttttcgtgccatgcgtggaatcagctgtctggtggatgcattcttaggtatttctagaccccgatcagacagtgctcccccaacacccgtgaatagattaagtatgcctcaaagtgctgctgtcagtaccacccccccacataaccggaggcaccgggctgttactgtgaataaggccaccatgaagacaagcacagttagtactgctcatgcctctaaagttcagcaccagacgtcctccacctctcctctgtcaagtccaaatcagactagttcagaaccccggccactgcctgcccctcggagaccaaaggttaacagcatcttgaatctctttggatcatggttatttgatgcagcatttgttcactgtaaacttcataatgggataaacagagacagcagcatgactgccattacaacacaagctagcatggagtttcgacggaaagggtcacaaatgtccacagacaccatggtttccaatcctatgtttgatgcaagtgaatttcctgataactatgaagcaggaagagctgaggcttgtgggacactgtgtaggattttttgtagcaagaagactggagaagagattctgccagcttatttatccagattttacatgcttttaattcaaggtttgcagataaatgattatgtgtgccatcctgtcttggccagcgttattctaaactctcctcctttgttctgctgtgacttgaaagggattgatgttgtggttccttactttatttcagctcttgaaaccattttgcctgacagagaactctcaaaattcaaaagctatgtaaatccaacagaattgcgaagatcctccattaatatcctgctttctttgttgcccctccctcatcattttggcacagtcaaatctgaggtggtcctggaaggaaagtttagtaacgatgacagctcttcttatgataaaccaataacttttctgtccctgaagttgagacttgtgaatatattaataggtgccttgcaaactgaaacggaccccaacaacacccaaatgatattaggggcaatgttaaatattgttcaagattcagcacttttggaagccattggttgccagatggagatgggtggtggagaaaataacctgaagagtcatagtcgcaccaatagtggtattagttcagcaagtggtggaagcacggagcccacgactcccgatagtgagagacctgctcaagctctcttaagagattatgctcttaatacagattcagctgctgggctcctgattcgcagcattcatctcgtcacccaaagactcaactcccagtggcgccaagacatgagcatatcactggcagctctagagctcctctctggccttgcaaaggtaaaagtgatggttgactcaggagaccggaagcgagccatcagttctgtgtgcacctacattgtttatcagtgtagtcggccagctcctttacactccagggatctgcactccatgatagtggcagcttttcagtgtctctgtgtctggctgacagagcaccctgatatgcttgatgaaaaggactgccttaaggaagtactggagattgtggaactgggtatctcaggaagtaagtccaagaacaatgagcaagaggtcaagtacaaaggagataaggagccaaaccctgcatctatgagggtaaaggatgctgctgaagccaccctaacatgcattatgcagttgctcggcgcatttccttcacctagtggtcctgcctctccttgtagtcttgtgaatgagaccactttgattaaatactccaggctgccaaccataaacaagcatagtttccggtactttgtcttggataacagtgtcatcctggcaatgctggaacaacctcttggaaatgagcagaatgattttttcccctctgtcactgtgctggtccggggaatgtctggaagacttgcttgggcacaacagctttgtcttttacccagaggagcaaaagcaaatcagaagctttttgtacctgaacctcgcccagttcctaaaaatgacgttggatttaaatattctgtgaaacatcggccatttcctgaagaggtggacaagattccttttgtgaaagcagatctcagcattccagatttgcatgaaatagtcactgaagaattagaagagagacacgaaaaattaaggagtggcatggcccagcagattgcttatgaaatacaccttgagcaacagagtgaggaggaattgcagaagagaagttttcctgacccagttacggattgcaagcccccgcctcctgcccaggaattccaaacagcccgcctttttctctcacactttggatttttgtccttagaagcactgaaggaacctgcaaatagtcgtctacctcctcaccttattgcacttgattccacgatacctggattttttgatgacattgggtatctggatctcttgccatgtcgtccttttgacacagtttttattttctatatgaagccaggtcagaaaacgaaccaagagattttaaagaatgtggagtcttccagaactgttcagccacatttcctagaatttttgctttcccttggctggtcagtagatgtgggcagacaccctggttggactgggcatgtttctaccagttggtctattaattgttgtgatgatggtgaaggatctcaacaagaagtgatttcctctgaagatattggagctagcattttcaatggacagaagaaggtgctgtattatgctgatgcccttacagaaattgcttttgtggttccttctcctgtggagtccttaactgattcattggaaagtaacatctcggaccaagatagtgattcaaatatggatcttatgccaggaattctgaaacagccatccctgacacttgagcttttccccaatcatacagacaatcttaattcctcacagaggctcagtcccagttccagaatgaggaagctgcctcagggtcgccctgttcctccccttggacctgagacaagagtttctgtagtctgggtggaacgctatgatgatatagaaaactttcccctctcagagctgatgacagagatcagtactggtgtggaaactactgcaaatagtagcacttcactgagatctacaactcttgaaaaagaagttcctgtcatcttcatccaccctttaaacactggattattccggataaaaattcaaggagccactggaaaatttaatatggtcatccctcttgtggatgggatgattgtcagcaggcgagctcttggctttctggtgaggcagactgtaattaacatttgtagaagaaagagactggaaagtgactcctacagtcccccccatgtccgccggaaacagaaaatcaccgacattgtcaacaagtaccggaacaagcagctggagccagagttttatacttcacttttccaggaggttggactcaagaactgcagttcttagaccactgaatttctaagactgttgaactccagtttgggaactataacacagcagaacagtttgataggtgatcactgtaaaaataaaaacaaatcactcccaagagcttactgtttaatcaccagaatagaagaaacacattataacccatttgatagaagactttgggctatctagtgaaatgggctcccagacacaatcacactcctgctgataatgatgatatacattttagccataaactttcttttaaaagtgacaattttagttaaacataagccttttgaggagaaaggcttttatgcatctcagttaaacacgtgcattggtagtatcaacaaatttgcaatatagaagttgaagatagttttttacctcactttttaggaggttgtattcaaaattaaaatctcagaatcttacaggacatttaaagactcatgttgatagcatggaggagaaggaaagaagtcacagccttctactcagttgtaggtcttcttgtcatccagctgtcacactgacaaaaagaaaagatgatacatgttttttgctcagataagaagcctgacattaaaagatgtcatatttttttctccacatttcaaaaagttgtccttctcatcactgcacagatctgtctgaaagcctcagtttctgagtgacccaggaacagatcagaaatggagcatggccttgtcctttaatggggatgcaaataaagtttgtggggttaaaagttataagacagcagtgataccccactctctccattattgtccagcggggtgacataatgacaggttaaatatttgtgattcattgattaaatattatttaaagaaatgtaaattcacaataagggttgaaaattatttggtttcatccattgtctcttatttcaggaccaagcagcaaactgcagtagtttgtgaaggattctaatatggggttcaggaatagcctctcaacgctactaattcagatctctcccagagaactactggatttcctcataattgacaaacatgagtgaccacctctttgggtggctactgttagaaatggctgttgtcatgttttctggactttgccagccaacagatccctgccaggttttggaaatacttctattacctcgctgctacttttctgcagggataaaacttttgaggtggccagacccagaacatccaaggattcctgttacagtgctacagtatacactgctcatttatcctattctcatgtgctttcttctttagtaagattattttaagaaaataagtgatatttaaagtccaaagaggaatgatcacagttgtataaggggtgttttcccacttgaactctgatgtcagtcgactgtgggtcagagctacaaccatctgtttggtttgatgttttggtggtttacttacggagtggggatagtgtgagacctaattccctgtgcaaatgtctcttattccagaaatgtgcattttgtcatctataagcaagaaatatgggcatagcagctcttggtttaaagtttgccataacctgttcatgtttgttttaagctcaggtaaagataacctcctctttctatgactccagtttccattcaggttatagtattattcaatagttgattttctttttaagctgggcaataaattgatgtttccagatggtaacatgggagagggcatataggataaagatgagcaaattctaccctaaaaatgttctagtagttcacaggaagaagatgaggtttaataactttcaaggtaattctagattgacattttgaggggaaaatgggctcttgttctagttgaagtgagcagagaaggctataaattaatatgtaacttacagcattccagaggttaaaaataactgatgcagatgtacttcttcagtgtgattcttcagatcaaacttttacttttggcatagttaatttcagaaaaatgtgctgtatgtgtgtgtgtatgagggttggtcttgctgatccttcagttagctctaaattctggcaactccttgtaattccaatgtatttgatacatgaacaatcatgttgaatgcatttgtgatctgggagacttcctcgtcttccagggaaggaaggatgtgcagcccctgaaggcatgaaactcccagtgtgtacggagccagtggaatatgggatacccataccttaccaggcgctggttccttctgctcacaataacatctgcccaaagagggagtgggaagaacgcttagctctttcactagtatggatttgagttcatggtcactatttttacccacctgcctttgttaaaaatcactttgagtagaatagcactggaggaacatatttagcacctaatattaatatttagtagtccattgataaatttgccagcatatgttctagcctctggggggaaaccaggaccacttttgtctgtggcttaaacagttcagttgctatatctgttgggtatgccgggggtggatgagtgtggcattccgtgaagaggaaggtggtaagtaaggtttcccttctactgccttcttaagttgcaggagggagcttttctcctcccctctggttgggagcactgaggacagtgaggagggcttttaccttgttaatcctttccttatttagctagctttcctttttgtctagggcttcctcttgagaccctcttccatccattgggcctttgaaaggactaatcagacacacacacacacacacacacacacacacacactcgcatactcatgcacattttccttcatttccagatcctttatttcagagcagcccattttcctctggattcattgatgaatacaagtacccacacctttggccagtaatgtcagttacctgctgcaggttctgtgtatgaggccttcatgaacggttaccttctccatacactagggaagcatttgtcagactctgcagactgggttctagagaggcagagtctttaagagtattcatttcttctggaaggtggagctttacccaaagtggaagttagccttgctcaaagatgtgttttgtggtaggtggtaaaaataaataaataaataaataataaaaaaagaaacatgtattggaggtaatttgacactgctgctggcagtagttctctattcaccattttaaagcccattcaggttctctcttcctgaaaagaactgattgctgtgtttacatgaaatgacattggagtcagatggtctgttttaaagatttccatgacagcctcttttcctgagttggagagattggaggtggtctatccgtacgatgtggaatcaaacggtgggtttcttagtagctaaagaagccatgtacttctagtgtgtttctcagaatatcaactcatgttcttcagatgcttttctttttttaatggtgagggaaaaggtataatttgggattccacagtgccttgcatatagtaggcgcccagtaaatacttgttgaagcaaaccaagtttcccaagtcctcatctcttatagtgaccaagacatctttctcctctgaagggcttggcagttgtggctaaaaaataagcagtatcattatttgcttgaaatcatatatacagtttgtatgaatttcagtatgttgccaagacatgattttttcttattgtattttctgtaaatatttctggcactgaactgtaaagtaaaggcaaagtgtaaatatgaaggcgtgcccgtgccccttgcctcctgtgtttcatcttcgtcggttagggaagaaggtccagaggtttgtttgtatttatgccgatcctttgtccagaagaagcccatggaatattgaatgtaatacatttagtcaattaaattttaaggagattcttatctaat

SEQ ID NO: 173761 - DNA, 8652 bp, Homo sapiens
  Payload ID: 14123
  Gene Symbol: RALGAPB
  Gene Name: Ral GTPase activating protein, beta subunit (non-catalytic)
  Uniprot ID: Q86X10
  ENST ID: ENST00000397042
  CDS Start-End: 285-4760
gagttatttgacgccgccgcccctggcagtcggaagttgcctgagcagatcccagccggctggctcgagtggccttcgtcgtcccttggcgccctgggagagtcgctgacgggtggactgacggaccgcctgaggacggccggccagggcggtgaaagcgccagccctatggcgcgggtcgcgtgaggcggaaggccgaggacggccggcggcggcgcccgccccggcgatgcgggccccgcccgtcgcctcaggtgccatttggattgtactttagtggcacgatgtactctgagtggaggtcactgcatttggtgattcagaatgatcaaggccataccagtgtgctgcacagctatccagagagcgttggacgagaggtggcaaatgctgtagtccgtcctcttgggcaggtgttaggtaccccttcagtggctggtagtgagaatttgttaaaaactgacaaagaagtaaaatggaccatggaagtaatttgctatggactgacccttccattggatggagagactgtaaaatattgcgttgatgtatatacagactggattatggctttagtgttgccaaaagattctattccattgccagttattaaagagcctaatcaatatgttcaaactatactaaaacacctacagaatctttttgtaccaagacaggaacagggttccagtcagattcgactatgcttacaggtcctgagagccattcagaaactggcccgtgagtcatctctcatggcccgagaaacttgggaagtcttactgttgtttcttctgcagattaacgacatacttctggccccaccaactgttcaaggtggcattgctgagaatctagcagagaagttgattggtgttctctttgaggtgtggttactagcttgtactcggtgcttcccaacacctccttattggaaaacagccaaggagatggtggctaactggaggcatcacccagcagtggtggagcagtggagcaaggtcatttgtgcactcacttccagattgctacgctttacatatggtccttcatttcctgcatttaaagttcccgatgaagatgccagtctgatccctccagaaatggataatgagtgtgttgcacagacatggtttcgctttttacacatgttaagtaatcctgtggatttgagtaacccagctattataagctctactcccaaatttcaggaacagttcttgaatgtgagcggaatgccgcaagaattgaatcagtatccctgccttaaacatctgcctcaaatattttttcgtgccatgcgtggaatcagctgtctggtggatgcattcttaggtatttctagaccccgatcagacagtgctcccccaacacccgtgaatagattaagtatgcctcaaagtgctgctgtcagtaccacccccccacataaccggaggcaccgggctgttactgtgaataaggccaccatgaagacaagcacagttagtactgctcatgcctctaaagttcagcaccagacgtcctccacctctcctctgtcaagtccaaatcagactagttcagaaccccggccactgcctgcccctcggagaccaaaggttaacagcatcttgaatctctttggatcatggttatttgatgcagcatttgttcactgtaaacttcataatgggataaacagagacagcagcatgactgccattacaacacaagctagcatggagtttcgacggaaagggtcacaaatgtccacagacaccatggtttccaatcctatgtttgatgcaagtgaatttcctgataactatgaagcaggaagagctgaggcttgtgggacactgtgtaggattttttgtagcaagaagactggagaagagattctgccagcttatttatccagattttacatgcttttaattcaaggtttgcagataaatgattatgtgtgccatcctgtcttggccagcgttattctaaactctcctcctttgttctgctgtgacttgaaagggattgatgttgtggttccttactttatttcagctcttgaaaccattttgcctgacagagaactctcaaaattcaaaagctatgtaaatccaacagaattgcgaagatcctccattaatatcctgctttctttgttgcccctccctcatcattttggcacagtcaaatctgaggtggtcctggaaggaaagtttagtaacgatgacagctcttcttatgataaaccaataacttttctgtccctgaagttgagacttgtgaatatattaataggtgccttgcaaactgaaacggaccccaacaacacccaaatgatattaggggcaatgttaaatattgttcaagattcagcacttttggaagccattggttgccagatggagatgggtggtggagaaaataacctgaagagtcatagtcgcaccaatagtggtattagttcagcaagtggtggaagcacggagcccacgactcccgatagtgagagacctgctcaagctctcttaagagattatgattcagctgctgggctcctgattcgcagcattcatctcgtcacccaaagactcaactcccagtggcgccaagacatgagcatatcactggcagctctagagctcctctctggccttgcaaaggtaaaagtgatggttgactcaggagaccggaagcgagccatcagttctgtgtgcacctacattgtttatcagtgtagtcggccagctcctttacactccagggatctgcactccatgatagtggcagcttttcagtgtctctgtgtctggctgacagagcaccctgatatgcttgatgaaaaggactgccttaaggaagtactggagattgtggaactgggtatctcaggaagtaagtccaagaacaatgagcaagaggtcaagtacaaaggagataaggagccaaaccctgcatctatgagggtaaaggatgctgctgaagccaccctaacatgcattatgcagttgctcggcgcatttccttcacctagtggtcctgcctctccttgtagtcttgtgaatgagaccactttgattaaatactccaggctgccaaccataaacaagcatagtttccggtactttgtcttggataacagtgtcatcctggcaatgctggaacaacctcttggaaatgagcagaatgattttttcccctctgtcactgtgctggtccggggaatgtctggaagacttgcttgggcacaacagctttgtcttttacccagaggagcaaaagcaaatcagaagctttttgtacctgaacctcgcccagttcctaaaaatgacgttggatttaaatattctgtgaaacatcggccatttcctgaagaggtggacaagattccttttgtgaaagcagatctcagcattccagatttgcatgaaatagtcactgaagaattagaagagagacacgaaaaattaaggagtggcatggcccagcagattgcttatgaaatacaccttgagcaacagagtgaggaggaattgcagaagagaagttttcctgacccagttacggattgcaagcccccgcctcctgcccaggaattccaaacagcccgcctttttctctcacactttggatttttgtccttagaagcactgaaggaacctgcaaatagtcgtctacctcctcaccttattgcacttgattccacgatacctggattttttgatgacattgggtatctggatctcttgccatgtcgtccttttgacacagtttttattttctatatgaagccaggtcagaaaacgaaccaagagattttaaagaatgtggagtcttccagaactgttcagccacatttcctagaatttttgctttcccttggctggtcagtagatgtgggcagacaccctggttggactgggcatgtttctaccagttggtctattaattgttgtgatgatggtgaaggatctcaacaagaagaagtgatttcctctgaagatattggagctagcattttcaatggacagaagaaggtgctgtattatgctgatgcccttacagaaattgcttttgtggttccttctcctgtggagtccttaactgattcattggaaagtaacatctcggaccaagatagtgattcaaatatggatcttatgccaggaattctgaaacagccatccctgacacttgagcttttccccaatcatacagacaatcttaattcctcacagaggctcagtcccagttccagaatgaggaagctgcctcagggtcgccctgttcctccccttggacctgagacaagagtttctgtagtctgggtggaacgctatgatgatatagaaaactttcccctctcagagctgatgacagagatcagtactggtgtggaaactactgcaaatagtagcacttcactgagatctacaactcttgaaaaagaagttcctgtcatcttcatccaccctttaaacactggattattccggataaaaattcaaggagccactggaaaatttaatatggtcatccctcttgtggatgggatgattgtcagcaggcgagctcttggctttctggtgaggcagactgtaattaacatttgtagaagaaagagactggaaagtgactcctacagtcccccccatgtccgccggaaacagaaaatcaccgacattgtcaacaagtaccggaacaagcagctggagccagagttttatacttcacttttccaggaggttggactcaagaactgcagttcttagaccactgaatttctaagactgttgaactccagtttgggaactataacacagcagaacagtttgataggtgatcactgtaaaaataaaaacaaatcactcccaagagcttactgtttaatcaccagaatagaagaaacacattataacccatttgatagaagactttgggctatctagtgaaatgggctcccagacacaatcacactcctgctgataatgatgatatacattttagccataaactttcttttaaaagtgacaattttagttaaacataagccttttgaggagaaaggcttttatgcatctcagttaaacacgtgcattggtagtatcaacaaatttgcaatatagaagttgaagatagttttttacctcactttttaggaggttgtattcaaaattaaaatctcagaatcttacaggacatttaaagactcatgttgatagcatggaggagaaggaaagaagtcacagccttctactcagttgtaggtcttcttgtcatccagctgtcacactgacaaaaagaaaagatgatacatgttttttgctcagataagaagcctgacattaaaagatgtcatatttttttctccacatttcaaaaagttgtccttctcatcactgcacagatctgtctgaaagcctcagtttctgagtgacccaggaacagatcagaaatggagcatggccttgtcctttaatggggatgcaaataaagtttgtggggttaaaagttataagacagcagtgataccccactctctccattattgtccagcggggtgacataatgacaggttaaatatttgtgattcattgattaaatattatttaaagaaatgtaaattcacaataagggttgaaaattatttggtttcatccattgtctcttatttcaggaccaagcagcaaactgcagtagtttgtgaaggattctaatatggggttcaggaatagcctctcaacgctactaattcagatctctcccagagaactactggatttcctcataattgacaaacatgagtgaccacctctttgggtggctactgttagaaatggctgttgtcatgttttctggactttgccagccaacagatccctgccaggttttggaaatacttctattacctcgctgctacttttctgcagggataaaacttttgaggtggccagacccagaacatccaaggattcctgttacagtgctacagtatacactgctcatttatcctattctcatgtgctttcttctttagtaagattattttaagaaaataagtgatatttaaagtccaaagaggaatgatcacagttgtataaggggtgttttcccacttgaactctgatgtcagtcgactgtgggtcagagctacaaccatctgtttggtttgatgttttggtggtttacttacggagtggggatagtgtgagacctaattccctgtgcaaatgtctcttattccagaaatgtgcattttgtcatctataagcaagaaatatgggcatagcagctcttggtttaaagtttgccataacctgttcatgtttgttttaagctcaggtaaagataacctcctctttctatgactccagtttccattcaggttatagtattattcaatagttgattttctttttaagctgggcaataaattgatgtttccagatggtaacatgggagagggcatataggataaagatgagcaaattctaccctaaaaatgttctagtagttcacaggaagaagatgaggtttaataactttcaaggtaattctagattgacattttgaggggaaaatgggctcttgttctagttgaagtgagcagagaaggctataaattaatatgtaacttacagcattccagaggttaaaaataactgatgcagatgtacttcttcagtgtgattcttcagatcaaacttttacttttggcatagttaatttcagaaaaatgtgctgtatgtgtgtgtgtatgagggttggtcttgctgatccttcagttagctctaaattctggcaactccttgtaattccaatgtatttgatacatgaacaatcatgttgaatgcatttgtgatctgggagacttcctcgtcttccagggaaggaaggatgtgcagcccctgaaggcatgaaactcccagtgtgtacggagccagtggaatatgggatacccataccttaccaggcgctggttccttctgctcacaataacatctgcccaaagagggagtgggaagaacgcttagctctttcactagtatggatttgagttcatggtcactatttttacccacctgcctttgttaaaaatcactttgagtagaatagcactggaggaacatatttagcacctaatattaatatttagtagtccattgataaatttgccagcatatgttctagcctctggggggaaaccaggaccacttttgtctgtggcttaaacagttcagttgctatatctgttgggtatgccgggggtggatgagtgtggcattccgtgaagaggaaggtggtaagtaaggtttcccttctactgccttcttaagttgcaggagggagcttttctcctcccctctggttgggagcactgaggacagtgaggagggcttttaccttgttaatcctttccttatttagctagctttcctttttgtctagggcttcctcttgagaccctcttccatccattgggcctttgaaaggactaatcagacacacacacacacacacacacacacacacacactcgcatactcatgcacattttccttcatttccagatcctttatttcagagcagcccattttcctctggattcattgatgaatacaagtacccacacctttggccagtaatgtcagttacctgctgcaggttctgtgtatgaggccttcatgaacggttaccttctccatacactagggaagcatttgtcagactctgcagactgggttctagagaggcagagtctttaagagtattcatttcttctggaaggtggagctttacccaaagtggaagttagccttgctcaaagatgtgttttgtggtaggtggtaaaaataaataaataaataaataataaaaaaagaaacatgtattggaggtaatttgacactgctgctggcagtagttctctattcaccattttaaagcccattcaggttctctcttcctgaaaagaactgattgctgtgtttacatgaaatgacattggagtcagatggtctgttttaaagatttccatgacagcctcttttcctgagttggagagattggaggtggtctatccgtacgatgtggaatcaaacggtgggtttcttagtagctaaagaagccatgtacttctagtgtgtttctcagaatatcaactcatgttcttcagatgcttttctttttttaatggtgagggaaaaggtataatttgggattccacagtgccttgcatatagtaggcgcccagtaaatacttgttgaagcaaaccaagtttcccaagtcctcatctcttatagtgaccaagacatctttctcctctgaagggcttggcagttgtggctaaaaaataagcagtatcattatttgcttgaaatcatatatacagtttgtatgaatttcagtatgttgccaagacatgattttttcttattgtattttctgtaaatatttctggcactgaactgtaaagtaaaggcaaagtgtaaatatgaaggcgtgcccgtgccccttgcctcctgtgtttcatcttcgtcggttagggaagaaggtccagaggtttgtttgtatttatgccgatcctttgtccagaagaagcccatggaatattgaatgtaatacatttagtcaattaaattttaaggagattcttatctaat

SEQ ID NO: 173762 - DNA, 4075 bp, Homo sapiens
  Payload ID: 14123
  Gene Symbol: RALGAPB
  Gene Name: Ral GTPase activating protein, beta subunit (non-catalytic)
  ENST ID: ENST00000438490
  CDS Start-End: 1-3972
attaacgacatacttctggccccaccaactgttcaaggtggcattgctgagaatctagcagagaagttgattggtgttctctttgaggtgtggttactagcttgtactcggtgcttcccaacacctccttattggaaaacagccaaggagatggtggctaactggaggcatcacccagcagtggtggagcagtggagcaaggtcatttgtgcactcacttccagattgctacgctttacatatggtccttcatttcctgcatttaaagttcccgatgaagatgccagtctgatccctccagaaatggataatgagtgtgttgcacagacatggtttcgctttttacacatgttaagtaatcctgtggatttgagtaacccagctattataagctctactcccaaatttcaggaacagttcttgaatgtgagcggaatgccgcaagaattgaatcagtatccctgccttaaacatctgcctcaaatattttttcgtgccatgcgtggaatcagctgtctggtggatgcattcttaggtatttctagaccccgatcagacagtgctcccccaacacccgtgaatagattaagtatgcctcaaagtgctgctgtcagtaccacccccccacataaccggaggcaccgggctgttactgtgaataaggccaccatgaagacaagcacagttagtactgctcatgcctctaaagttcagcaccagacgtcctccacctctcctctgtcaagtccaaatcagactagttcagaaccccggccactgcctgcccctcggagaccaaaggttaacagcatcttgaatctctttggatcatggttatttgatgcagcatttgttcactgtaaacttcataatgggataaacagagacagcagcatgactgccattacaacacaagctagcatggagtttcgacggaaagggtcacaaatgtccacagacaccatggtttccaatcctatgtttgatgcaagtgaatttcctgataactatgaagcaggaagagctgaggcttgtgggacactgtgtaggattttttgtagcaagaagactggagaagagattctgccagcttatttatccagattttacatgcttttaattcaaggtttgcagataaatgattatgtgtgccatcctgtcttggccagcgttattctaaactctcctcctttgttctgctgtgacttgaaagggattgatgttgtggttccttactttatttcagctcttgaaaccattttgcctgacagagaactctcaaaattcaaaagctatgtaaatccaacagaattgcgaagatcctccattaatatcctgctttctttgttgcccctccctcatcattttggcacagtcaaatctgaggtggtcctggaaggaaagtttagtaacgatgacagctcttcttatgataaaccaataacttttctgtccctgaagttgagacttgtgaatatattaataggtgccttgcaaactgaaacggaccccaacaacacccaaatgatattaggggcaatgttaaatattgttcaagattcagcacttttggaagccattggttgccagatggagatgggtggtggagaaaataacctgaagagtcatagtcgcaccaatagtggtattagttcagcaagtggtggaagcacggagcccacgactcccgatagtgagagacctgctcaagctctcttaagagattatgctcttaatacagattcagctgctgggctcctgattcgcagcattcatctcgtcacccaaagactcaactcccagtggcgccaagacatgagcatatcactggcagctctagagctcctctctggccttgcaaaggtaaaagtgatggttgactcaggagaccggaagcgagccatcagttctgtgtgcacctacattgtttatcagtgtagtcggccagctcctttacactccagggatctgcactccatgatagtggcagcttttcagtgtctctgtgtctggctgacagagcaccctgatatgcttgatgaaaaggactgccttaaggaagtactggagattgtggaactgggtatctcaggaagtaagtccaagaacaatgagcaagaggtcaagtacaaaggagataaggagccaaaccctgcatctatgagggtaaaggatgctgctgaagccaccctaacatgcattatgcagttgctcggcgcatttccttcacctagtggtcctgcctctccttgtagtcttgtgaatgagaccactttgattaaatactccaggctgccaaccataaacaagcatagtttccggtactttgtcttggataacagtgtcatcctggcaatgctggaacaacctcttggaaatgagcagaatgattttttcccctctgtcactgtgctggtccggggaatgtctggaagacttgcttgggcacaacagctttgtcttttacccagaggagcaaaagcaaatcagaagctttttgtacctgaacctcgcccagttcctaaaaatgacgttggatttaaatattctgtgaaacatcggccatttcctgaagaggtggacaagattccttttgtgaaagcagatctcagcattccagatttgcatgaaatagtcactgaagaattagaagagagacacgaaaaattaaggagtggcatggcccagcagattgcttatgaaatacaccttgagcaacagagtgaggaggaattgcagaagagaagttttcctgacccagttacggattgcaagcccccgcctcctgcccaggaattccaaacagcccgcctttttctctcacactttggatttttgtccttagaagcactgaaggaacctgcaaatagtcgtctacctcctcaccttattgcacttgattccacgatacctggattttttgatgacattgggtatctggatctcttgccatgtcgtccttttgacacagtttttattttctatatgaagccaggtcagaaaacgaaccaagagattttaaagaatgtggagtcttccagaactgttcagccacatttcctagaatttttgctttcccttggctggtcagtagatgtgggcagacaccctggttggactgggcatgtttctaccagttggtctattaattgttgtgatgatggtgaaggatctcaacaagaagaagtgatttcctctgaagatattggagctagcattttcaatggacagaagaaggtgctgtattatgctgatgcccttacagaaattgcttttgtggttccttctcctgtggagtccttaactgattcattggaaagtaacatctcggaccaagatagtgattcaaatatggatcttatgccaggaattctgaaacagccatccctgacacttgagcttttccccaatcatacagacaatcttaattcctcacagaggctcagtcccagttccagaatgaggaagctgcctcagggtcgccctgttcctccccttggacctgagacaagagtttctgtagtctgggtggaacgctatgatgatatagaaaactttcccctctcagagctgatgacagagatcagtactggtgtggaaactactgcaaatagtagcacttcactgagatctacaactcttgaaaaagaagttcctgtcatcttcatccaccctttaaacactggattattccggataaaaattcaaggagccactggaaaatttaatatggtcatccctcttgtggatgggatgattgtcagcaggcgagctcttggctttctggtgaggcagactgtaattaacatttgtagaagaaagagactggaaagtgactcctacagtcccccccatgtccgccggaaacagaaaatcaccgacattgtcaacaagtaccggaacaagcagctggagccagagttttatacttcacttttccaggaggttggactcaagaactgcagttcttagaccactgaatttctaagactgttgaactccagtttgggaactataacacagcagaacagtttgataggtgatcactgtaaaaataaaaacaaatcactcccaa

SEQ ID NO: 173763 - DNA, 4858 bp, Homo sapiens
  Payload ID: 14123
  Gene Symbol: RALGAPB
  Gene Name: Ral GTPase activating protein, beta subunit (non-catalytic)
  ENST ID: ENST00000632792
  CDS Start-End: 1-2599
tgaggtggtcctggaaggaaagtttagtaacgatgacagctcttcttatgataaaccaataacttttctgtccctgaagttgagacttgtgaatatattaataggtgccttgcaaactgaaacggaccccaacaacacccaaatgatattaggggcaatgttaaatattgttcaagattcagcacttttggaagccattggttgccagatggagatgggtggtggagaaaataacctgaagagtcatagtcgcaccaatagtggtattagttcagcaagtggtggaagcacggagcccacgactcccgatagtgagagacctgctcaagctctcttaagagattatggatcgacagctcttaatacagattcagctgctgggctcctgattcgcagcattcatctcgtcacccaaagactcaactcccagtggcgccaagacatgagcatatcactggcagctctagagctcctctctggccttgcaaaggtaaaagtgatggttgactcaggagaccggaagcgagccatcagttctgtgtgcacctacattgtttatcagtgtagtcggccagctcctttacactccagggatctgcactccatgatagtggcagcttttcagtgtctctgtgtctggctgacagagcaccctgatatgcttgatgaaaaggactgccttaaggaagtactggagattgtggaactgggtatctcaggaagtaagtccaagaacaatgagcaagaggtcaagtacaaaggagataaggagccaaaccctgcatctatgagggtaaaggatgctgctgaagccaccctaacatgcattatgcagttgctcggcgcatttccttcacctagtggtcctgcctctccttgtagtcttgtgaatgagaccactttgattaaatactccaggctgccaaccataaacaagcatagtttccggtactttgtcttggataacagtgtcatcctggcaatgctggaacaacctcttggaaatgagcagaatgattttttcccctctgtcactgtgctggtccggggaatgtctggaagacttgcttgggcacaacagctttgtcttttacccagaggagcaaaagcaaatcagaagctttttgtacctgaacctcgcccagttcctaaaaatgacgttggatttaaatattctgtgaaacatcggccatttcctgaagaggtggacaagattccttttgtgaaagcagatctcagcattccagatttgcatgaaatagtcactgaagaattagaagagagacacgaaaaattaaggagtggcatggcccagcagattgcttatgaaatacaccttgagcaacagagtgaggaggaattgcagaagagaagttttcctgacccagttacggattgcaagcccccgcctcctgcccaggaattccaaacagcccgcctttttctctcacactttggatttttgtccttagaagcactgaaggaacctgcaaatagtcgtctacctcctcaccttattgcacttgattccacgatacctggattttttgatgacattgggtatctggatctcttgccatgtcgtccttttgacacagtttttattttctatatgaagccaggtcagaaaacgaaccaagagattttaaagaatgtggagtcttccagaactgttcagccacatttcctagaatttttgctttcccttggctggtcagtagatgtgggcagacaccctggttggactgggcatgtttctaccagttggtctattaattgttgtgatgatggtgaaggatctcaacaagaagaagtgatttcctctgaagatattggagctagcattttcaatggacagaagaaggtgctgtattatgctgatgcccttacagaaattgcttttgtggttccttctcctgtggagtccttaactgattcattggaaagtaacatctcggaccaagatagtgattcaaatatggatcttatgccaggaattctgaaacagccatccctgacacttgagcttttccccaatcatacagacaatcttaattcctcacagaggctcagtcccagttccagaatgaggaagctgcctcagggtcgccctgttcctccccttggacctgagacaagagtttctgtagtctgggtggaacgctatgatgatatagaaaactttcccctctcagagctgatgacagagatcagtactggtgtggaaactactgcaaatagtagcacttcactgagatctacaactcttgaaaaagaagttcctgtcatcttcatccaccctttaaacactggattattccggataaaaattcaaggagccactggaaaatttaatatggtcatccctcttgtggatgggatgattgtcagcaggcgagctcttggctttctggtgaggcagactgtaattaacatttgtagaagaaagagactggaaagtgactcctacagtcccccccatgtccgccggaaacagaaaatcaccgacattgtcaacaagtaccggaacaagcagctggagccagagttttatacttcacttttccaggaggttggactcaagaactgcagttcttagaccactgaatttctaagactgttgaactccagtttgggaactataacacagcagaacagtttgataggtgatcactgtaaaaataaaaacaaatcactcccaagagcttactgtttaatcaccagaatagaagaaacacattataacccatttgatagaagactttgggctatctagtgaaatgggctcccagacacaatcacactcctgctgataatgatgatatacattttagccataaactttcttttaaaagtgacaattttagttaaacataagccttttgaggagaaaggcttttatgcatctcagttaaacacgtgcattggtagtatcaacaaatttgcaatatagaagttgaagatagttttttacctcactttttaggaggttgtattcaaaattaaaatctcagaatcttacaggacatttaaagactcatgttgatagcatggaggagaaggaaagaagtcacagccttctactcagttgtaggtcttcttgtcatccagctgtcacactgacaaaaagaaaagatgatacatgttttttgctcagataagaagcctgacattaaaagatgtcatatttttttctccacatttcaaaaagttgtccttctcatcactgcacagatctgtctgaaagcctcagtttctgagtgacccaggaacagatcagaaatggagcatggccttgtcctttaatggggatgcaaataaagtttgtggggttaaaagttataagacagcagtgataccccactctctccattattgtccagcggggtgacataatgacaggttaaatatttgtgattcattgattaaatattatttaaagaaatgtaaattcacaataagggttgaaaattatttggtttcatccattgtctcttatttcaggaccaagcagcaaactgcagtagtttgtgaaggattctaatatggggttcaggaatagcctctcaacgctactaattcagatctctcccagagaactactggatttcctcataattgacaaacatgagtgaccacctctttgggtggctactgttagaaatggctgttgtcatgttttctggactttgccagccaacagatccctgccaggttttggaaatacttctattacctcgctgctacttttctgcagggataaaacttttgaggtggccagacccagaacatccaaggattcctgttacagtgctacagtatacactgctcatttatcctattctcatgtgctttcttctttagtaagattattttaagaaaataagtgatatttaaagtccaaagaggaatgatcacagttgtataaggggtgttttcccacttgaactctgatgtcagtcgactgtgggtcagagctacaaccatctgtttggtttgatgttttggtggtttacttacggagtggggatagtgtgagacctaattccctgtgcaaatgtctcttattccagaaatgtgcattttgtcatctataagcaagaaatatgggcatagcagctcttggtttaaagtttgccataacctgttcatgtttgttttaagctcaggtaaagataacctcctctttctatgactccagtttccattcaggttatagtattattcaatagttgattttctttttaagctgggcaataaattgatgtttccagatggtaacatgggagagggcatataggataaagatgagcaaattctaccctaaaaatgttctagtagttcacaggaagaagatgaggtttaataactttcaaggtaattctagattgacattttgaggggaaaatgggctcttgttctagttgaagtgagcagagaaggctataaattaatatgtaacttacagcattccagaggttaaaaataactgatgcagatgtacttcttcagtgtgattcttcagatcaaacttttacttttggcatagttaatttcagaaaaatgtgctgtatgtgtgtgtgtatgagggttggtcttgctgatccttcagttagctctaaattctggcaactccttgtaattccaatgtatttgatacatgaacaatcatgttgaatgcatttgtgatctgggagacttcctcgtcttccagggaaggaaggatgtgcagcccctgaaggcatgaaactcccagtgtgtacggagccagtggaatatgggatacccataccttaccaggcgctggttccttctgctcacaataacatctgcccaaagagggagtgggaagaacgct

SEQ ID NO: 173764 - DNA, 3598 bp, Homo sapiens
  Payload ID: 14124
  Gene Symbol: RALGDS
  Gene Name: ral guanine nucleotide dissociation stimulator
  Uniprot ID: Q12967
  ENST ID: ENST00000372047
  CDS Start-End: 23-2731
gcgcccgcgctgcgagccttccatggtgcagcgcatgtgggccgaggcggccgggcctgctggcggcgccgagccgctgtttccgggctcccggcggagccgcagcgtgtgggacgccgtgcgcctggaggtgggcgtccccgacagctgcccggtggtgctgcacagcttcacgcagctagaccccgacctgccgcgcccggagagctccacgcaggagatcggtgaggagctgatcaacggagtcatctactccatctccctgcgcaaggtgcagctgcaccacggaggcaacaaggggcagcgctggctcgggtatgagaatgagtcggccctgaacctttatgagacttgcaaggtgcggaccgtgaaggctggcacgctggagaagctggtggagcacctggtgccagccttccagggcagcgacctctcctacgtcaccatcttcctgtgtacctatagagccttcaccaccacccaacaggtcctggacctgctgttcaaaagatacggctgcatcctcccctattccgacgaggatggtggaccccaggaccaacttaaaaatgccatctcctccatcctgggcacctggctggaccagtactcggaggatttctgtcaacctccggactttccctgcctcaagcagctggtggcctacgtgcagctcaacatgccaggctcagacctggagcgccgtgcccaccttctcctggcccagctggagcactcggaacccattgaggcagagcctgaggctctgtcaccagtgccagctctaaaaccaactccagagctcgagctagctctaacaccagctcgagcacccagcccagtgccggctccagccccggagccagagccagctccaacaccagctccaggttcagagctagaagtagctccagcaccagctccggagctccagcaggctccagagccagctgtgggactagaatcggctccagcgccagctctggaactagagccagctccagaacaggatccagctccctcacaaactctagagctggagccagctccagcaccagttccatcattacagccttcctggccttcacctgtggttgcagagaacgggctgagtgaggagaagcctcacctcttggtgttccctccagatctggtggcagagcagtttacactgatggatgcggaactgttcaagaaggtggtgccctaccactgcctgggctccatctggtcccagcgggacaagaagggcaaggagcacctggcgcccaccatccgcgccactgtcacccagttcaacagtgtggccaactgtgtcatcaccacctgcctcgggaaccgaagcacgaaagccccagacagggccagggtggtggagcactggatcgaggtggccagggagtgccggatcctcaagaacttctcgtcactgtatgccatcctctctgccctgcagagcaactccatccaccgtctgaagaagacgtgggaagacgtttccagggacagtttccggatctttcagaagctgtcagagatcttctcagatgagaacaactactcattgagccgggagctgctcatcaaggagggcacctccaagtttgccaccctggagatgaaccccaagagagcccagaaacggccgaaggagacgggcatcatccagggcaccgttccctacctgggcacgttcctcaccgacctggtgatgctggacactgccatgaaggactatctgtatggcagactcatcaactttgagaagaggaggaaggagttcgaggtgatcgcccagatcaagctgctgcagtcggcctgcaacaactacagcatcgcgccagatgagcaatttggggcctggttccgggccgtggagcggctcagcgagactgagagctacaacctgtcgtgcgagctggagcccccatccgagtcagccagcaacaccctcaggaccaagaagaacacagccattgtcaagcgctggagcgaccgccaggcccccagcactgagctcagtaccagtggcagctcccactccaagtcctgtgaccagctcaggtgtggcccctacctcagcagcggggacatcgctgacgcgctcagcgtgcactcggccggctcctctagctccgacgtggaggagatcaacatcagcttcgtcccggagtctcctgatggccaggaaaagaagttctgggaatcagcctcacagtcatccccggagacctccggcatcagctcagcctccagcagcacctcgtcctcctcagcctccaccacgcccgtggctgccacacgcacccacaagcgctctgtctcagggctctgcaactccagctccgcgctgccgctctacaaccagcaggtgggcgactgctgtatcatccgcgtcagcctggacgtggacaatggcaacatgtacaagagcatcctggtgaccagccaagataaggctccggctgtaatccgcaaggccatggacaaacacaacctggaggaggaggagccggaggactatgagctgctgcagattctctcagatgaccggaagctgaagatccctgaaaacgccaacgtcttctatgccatgaactctaccgccaactatgactttgtcctcaagaagcggaccttcaccaagggagtgaaggtcaagcacggagccagctccaccctccctcgcatgaagcagaaaggactcaagattgccaagggcatcttctgagggcatcctcccagggtctggctggctggtagccaagcacttatggaccagagtggcccaggccagctgggcgccttcctcccacctgccagcccagggtaccccagactccagtttcatcctgaacctctcccgctgctgggattgacgcctgccattggtcaggctgacctggcctcccgtggaccactcgctgccttaggtgccttctgctctctggaaccagaggactagctgacttttgccaaggagcagtgccaacgggcatggcatggtgccctgcctgcccccgggcgccacctctgtacacttccctgacaccttcccaggtgtgggtcactgccacctgtgcccatgggcaccccagagcacccactgtgaccactgcagttctctcatgcccacaggcactggcctgtgaccttcgcaggggtcccggcccctcccaccactctagcctttctcaggctgcaccaaagattccatcatcagggccaactgagagtgagggagtctcacccaccgcttaccccagccctcccctgggagcagagagagaaaccctcttcatggaccagactctgcacccggtgagtgaggacagtcccagctgagtcccatcgatgttgaatctcatgccactgcaagtgccattcaccactgcgtcctgggctttacgagaccatgcaagacgggggttagtgaggaaggaggatttggggtgggggtggggtgattgaatatttgtataaaaagcaaaaagaaaaaaaaaatgtttgtttactgattggggaggggcaatatttatttgttgtaaatagcaaatgctagacttgaatattatattaaaatcctgtttctactata

SEQ ID NO: 173765 - DNA, 3634 bp, Homo sapiens
  Payload ID: 14124
  Gene Symbol: RALGDS
  Gene Name: ral guanine nucleotide dissociation stimulator
  Uniprot ID: Q12967
  ENST ID: ENST00000372050
  CDS Start-End: 23-2767
gcgcccgcgctgcgagccttccatggtgcagcgcatgtgggccgaggcggccgggcctgctggcggcgccgagccgctgtttccgggctcccggcggagccgcagcgtgtgggacgccgtgcgcctggaggtgggcgtccccgacagctgcccggtggtgctgcacagcttcacgcagctagaccccgacctgccgcgcccggagagctccacgcaggagatcggtgaggagctgatcaacggagtcatctactccatctccctgcgcaaggtgcagctgcaccacggaggcaacaaggggcagcgctggctcgggtatgagaatgagtcggccctgaacctttatgagacttgcaaggtgcggaccgtgaaggctggcacgctggagaagctggtggagcacctggtgccagccttccagggcagcgacctctcctacgtcaccatcttcctgtgtacctatagagccttcaccaccacccaacaggtcctggacctgctgttcaaaaggtacggtagatgtgacgccctcacggcctcctctagatacggctgcatcctcccctattccgacgaggatggtggaccccaggaccaacttaaaaatgccatctcctccatcctgggcacctggctggaccagtactcggaggatttctgtcaacctccggactttccctgcctcaagcagctggtggcctacgtgcagctcaacatgccaggctcagacctggagcgccgtgcccaccttctcctggcccagctggagcactcggaacccattgaggcagagcctgaggctctgtcaccagtgccagctctaaaaccaactccagagctcgagctagctctaacaccagctcgagcacccagcccagtgccggctccagccccggagccagagccagctccaacaccagctccaggttcagagctagaagtagctccagcaccagctccggagctccagcaggctccagagccagctgtgggactagaatcggctccagcgccagctctggaactagagccagctccagaacaggatccagctccctcacaaactctagagctggagccagctccagcaccagttccatcattacagccttcctggccttcacctgtggttgcagagaacgggctgagtgaggagaagcctcacctcttggtgttccctccagatctggtggcagagcagtttacactgatggatgcggaactgttcaagaaggtggtgccctaccactgcctgggctccatctggtcccagcgggacaagaagggcaaggagcacctggcgcccaccatccgcgccactgtcacccagttcaacagtgtggccaactgtgtcatcaccacctgcctcgggaaccgaagcacgaaagccccagacagggccagggtggtggagcactggatcgaggtggccagggagtgccggatcctcaagaacttctcgtcactgtatgccatcctctctgccctgcagagcaactccatccaccgtctgaagaagacgtgggaagacgtttccagggacagtttccggatctttcagaagctgtcagagatcttctcagatgagaacaactactcattgagccgggagctgctcatcaaggagggcacctccaagtttgccaccctggagatgaaccccaagagagcccagaaacggccgaaggagacgggcatcatccagggcaccgttccctacctgggcacgttcctcaccgacctggtgatgctggacactgccatgaaggactatctgtatggcagactcatcaactttgagaagaggaggaaggagttcgaggtgatcgcccagatcaagctgctgcagtcggcctgcaacaactacagcatcgcgccagatgagcaatttggggcctggttccgggccgtggagcggctcagcgagactgagagctacaacctgtcgtgcgagctggagcccccatccgagtcagccagcaacaccctcaggaccaagaagaacacagccattgtcaagcgctggagcgaccgccaggcccccagcactgagctcagtaccagtggcagctcccactccaagtcctgtgaccagctcaggtgtggcccctacctcagcagcggggacatcgctgacgcgctcagcgtgcactcggccggctcctctagctccgacgtggaggagatcaacatcagcttcgtcccggagtctcctgatggccaggaaaagaagttctgggaatcagcctcacagtcatccccggagacctccggcatcagctcagcctccagcagcacctcgtcctcctcagcctccaccacgcccgtggctgccacacgcacccacaagcgctctgtctcagggctctgcaactccagctccgcgctgccgctctacaaccagcaggtgggcgactgctgtatcatccgcgtcagcctggacgtggacaatggcaacatgtacaagagcatcctggtgaccagccaagataaggctccggctgtaatccgcaaggccatggacaaacacaacctggaggaggaggagccggaggactatgagctgctgcagattctctcagatgaccggaagctgaagatccctgaaaacgccaacgtcttctatgccatgaactctaccgccaactatgactttgtcctcaagaagcggaccttcaccaagggagtgaaggtcaagcacggagccagctccaccctccctcgcatgaagcagaaaggactcaagattgccaagggcatcttctgagggcatcctcccagggtctggctggctggtagccaagcacttatggaccagagtggcccaggccagctgggcgccttcctcccacctgccagcccagggtaccccagactccagtttcatcctgaacctctcccgctgctgggattgacgcctgccattggtcaggctgacctggcctcccgtggaccactcgctgccttaggtgccttctgctctctggaaccagaggactagctgacttttgccaaggagcagtgccaacgggcatggcatggtgccctgcctgcccccgggcgccacctctgtacacttccctgacaccttcccaggtgtgggtcactgccacctgtgcccatgggcaccccagagcacccactgtgaccactgcagttctctcatgcccacaggcactggcctgtgaccttcgcaggggtcccggcccctcccaccactctagcctttctcaggctgcaccaaagattccatcatcagggccaactgagagtgagggagtctcacccaccgcttaccccagccctcccctgggagcagagagagaaaccctcttcatggaccagactctgcacccggtgagtgaggacagtcccagctgagtcccatcgatgttgaatctcatgccactgcaagtgccattcaccactgcgtcctgggctttacgagaccatgcaagacgggggttagtgaggaaggaggatttggggtgggggtggggtgattgaatatttgtataaaaagcaaaaagaaaaaaaaaatgtttgtttactgattggggaggggcaatatttatttgttgtaaatagcaaatgctagacttgaatattatattaaaatcctgtttctactata

SEQ ID NO: 173766 - DNA, 3596 bp, Homo sapiens
  Payload ID: 14124
  Gene Symbol: RALGDS
  Gene Name: ral guanine nucleotide dissociation stimulator
  Uniprot ID: Q12967
  ENST ID: ENST00000372062
  CDS Start-End: 75-2732
gctcagaggagcagggctgggagcgaggtgctgctggggcagtgtctgggcgggaagccgggccccagggcctgatgtgcctgtgggggcactccacagcccctgcccacaccctctcctccccgcctctgctgttctgctccctgccctgtgccctccacttgcagccagggactgggcatccacccggccaggttcccaggaagagctccacgcaggagatcggtgaggagctgatcaacggagtcatctactccatctccctgcgcaaggtgcagctgcaccacggaggcaacaaggggcagcgctggctcgggtatgagaatgagtcggccctgaacctttatgagacttgcaaggtgcggaccgtgaaggctggcacgctggagaagctggtggagcacctggtgccagccttccagggcagcgacctctcctacgtcaccatcttcctgtgtacctatagagccttcaccaccacccaacaggtcctggacctgctgttcaaaagatacggctgcatcctcccctattccgacgaggatggtggaccccaggaccaacttaaaaatgccatctcctccatcctgggcacctggctggaccagtactcggaggatttctgtcaacctccggactttccctgcctcaagcagctggtggcctacgtgcagctcaacatgccaggctcagacctggagcgccgtgcccaccttctcctggcccagctggagcactcggaacccattgaggcagagcctgaggctctgtcaccagtgccagctctaaaaccaactccagagctcgagctagctctaacaccagctcgagcacccagcccagtgccggctccagccccggagccagagccagctccaacaccagctccaggttcagagctagaagtagctccagcaccagctccggagctccagcaggctccagagccagctgtgggactagaatcggctccagcgccagctctggaactagagccagctccagaacaggatccagctccctcacaaactctagagctggagccagctccagcaccagttccatcattacagccttcctggccttcacctgtggttgcagagaacgggctgagtgaggagaagcctcacctcttggtgttccctccagatctggtggcagagcagtttacactgatggatgcggaactgttcaagaaggtggtgccctaccactgcctgggctccatctggtcccagcgggacaagaagggcaaggagcacctggcgcccaccatccgcgccactgtcacccagttcaacagtgtggccaactgtgtcatcaccacctgcctcgggaaccgaagcacgaaagccccagacagggccagggtggtggagcactggatcgaggtggccagggagtgccggatcctcaagaacttctcgtcactgtatgccatcctctctgccctgcagagcaactccatccaccgtctgaagaagacgtgggaagacgtttccagggacagtttccggatctttcagaagctgtcagagatcttctcagatgagaacaactactcattgagccgggagctgctcatcaaggagggcacctccaagtttgccaccctggagatgaaccccaagagagcccagaaacggccgaaggagacgggcatcatccagggcaccgttccctacctgggcacgttcctcaccgacctggtgatgctggacactgccatgaaggactatctgtatggcagactcatcaactttgagaagaggaggaaggagttcgaggtgatcgcccagatcaagctgctgcagtcggcctgcaacaactacagcatcgcgccagatgagcaatttggggcctggttccgggccgtggagcggctcagcgagactgagagctacaacctgtcgtgcgagctggagcccccatccgagtcagccagcaacaccctcaggaccaagaagaacacagccattgtcaagcgctggagcgaccgccaggcccccagcactgagctcagtaccagtggcagctcccactccaagtcctgtgaccagctcaggtgtggcccctacctcagcagcggggacatcgctgacgcgctcagcgtgcactcggccggctcctctagctccgacgtggaggagatcaacatcagcttcgtcccggagtctcctgatggccaggaaaagaagttctgggaatcagcctcacagtcatccccggagacctccggcatcagctcagcctccagcagcacctcgtcctcctcagcctccaccacgcccgtggctgccacacgcacccacaagcgctctgtctcagggctctgcaactccagctccgcgctgccgctctacaaccagcaggtgggcgactgctgtatcatccgcgtcagcctggacgtggacaatggcaacatgtacaagagcatcctggtgaccagccaagataaggctccggctgtaatccgcaaggccatggacaaacacaacctggaggaggaggagccggaggactatgagctgctgcagattctctcagatgaccggaagctgaagatccctgaaaacgccaacgtcttctatgccatgaactctaccgccaactatgactttgtcctcaagaagcggaccttcaccaagggagtgaaggtcaagcacggagccagctccaccctccctcgcatgaagcagaaaggactcaagattgccaagggcatcttctgagggcatcctcccagggtctggctggctggtagccaagcacttatggaccagagtggcccaggccagctgggcgccttcctcccacctgccagcccagggtaccccagactccagtttcatcctgaacctctcccgctgctgggattgacgcctgccattggtcaggctgacctggcctcccgtggaccactcgctgccttaggtgccttctgctctctggaaccagaggactagctgacttttgccaaggagcagtgccaacgggcatggcatggtgccctgcctgcccccgggcgccacctctgtacacttccctgacaccttcccaggtgtgggtcactgccacctgtgcccatgggcaccccagagcacccactgtgaccactgcagttctctcatgcccacaggcactggcctgtgaccttcgcaggggtcccggcccctcccaccactctagcctttctcaggctgcaccaaagattccatcatcagggccaactgagagtgagggagtctcacccaccgcttaccccagccctcccctgggagcagagagagaaaccctcttcatggaccagactctgcacccggtgagtgaggacagtcccagctgagtcccatcgatgttgaatctcatgccactgcaagtgccattcaccactgcgtcctgggctttacgagaccatgcaagacgggggttagtgaggaaggaggatttggggtgggggtggggtgattgaatatttgtataaaaagcaaaaagaaaaaaaaaatgtttgtttactgattggggaggggcaatatttatttgttgtaaatagcaaatgctagacttgaatattatattaaaatcctgtttctact

SEQ ID NO: 173767 - DNA, 3689 bp, Homo sapiens
  Payload ID: 14124
  Gene Symbol: RALGDS
  Gene Name: ral guanine nucleotide dissociation stimulator
  Uniprot ID: Q12967
  ENST ID: ENST00000393157
  CDS Start-End: 84-2825
actccactagggcacgcaggcgacgagcacactggcagagggcctcccgcagggcccactccccacctggctctcgccccaccatggcccgggaagcaggccaggtttgtgccaggcctgccgtgcccagggggaggaagggctctgtgttctttgcctgtgtctctgtggtgaccgccaggagaagggccgtcgcccgtcgtgccgctctccaaagcccgacaccttggctggcacctctgccagcaccggccaccaccgagagctccacgcaggagatcggtgaggagctgatcaacggagtcatctactccatctccctgcgcaaggtgcagctgcaccacggaggcaacaaggggcagcgctggctcgggtatgagaatgagtcggccctgaacctttatgagacttgcaaggtgcggaccgtgaaggctggcacgctggagaagctggtggagcacctggtgccagccttccagggcagcgacctctcctacgtcaccatcttcctgtgtacctatagagccttcaccaccacccaacaggtcctggacctgctgttcaaaaggtacggtagatgtgacgccctcacggcctcctctagatacggctgcatcctcccctattccgacgaggatggtggaccccaggaccaacttaaaaatgccatctcctccatcctgggcacctggctggaccagtactcggaggatttctgtcaacctccggactttccctgcctcaagcagctggtggcctacgtgcagctcaacatgccaggctcagacctggagcgccgtgcccaccttctcctggcccagctggagcactcggaacccattgaggcagagcctgaggctctgtcaccagtgccagctctaaaaccaactccagagctcgagctagctctaacaccagctcgagcacccagcccagtgccggctccagccccggagccagagccagctccaacaccagctccaggttcagagctagaagtagctccagcaccagctccggagctccagcaggctccagagccagctgtgggactagaatcggctccagcgccagctctggaactagagccagctccagaacaggatccagctccctcacaaactctagagctggagccagctccagcaccagttccatcattacagccttcctggccttcacctgtggttgcagagaacgggctgagtgaggagaagcctcacctcttggtgttccctccagatctggtggcagagcagtttacactgatggatgcggaactgttcaagaaggtggtgccctaccactgcctgggctccatctggtcccagcgggacaagaagggcaaggagcacctggcgcccaccatccgcgccactgtcacccagttcaacagtgtggccaactgtgtcatcaccacctgcctcgggaaccgaagcacgaaagccccagacagggccagggtggtggagcactggatcgaggtggccagggagtgccggatcctcaagaacttctcgtcactgtatgccatcctctctgccctgcagagcaactccatccaccgtctgaagaagacgtgggaagacgtttccagggacagtttccggatctttcagaagctgtcagagatcttctcagatgagaacaactactcattgagccgggagctgctcatcaaggagggcacctccaagtttgccaccctggagatgaaccccaagagagcccagaaacggccgaaggagacgggcatcatccagggcaccgttccctacctgggcacgttcctcaccgacctggtgatgctggacactgccatgaaggactatctgtatggcagactcatcaactttgagaagaggaggaaggagttcgaggtgatcgcccagatcaagctgctgcagtcggcctgcaacaactacagcatcgcgccagatgagcaatttggggcctggttccgggccgtggagcggctcagcgagactgagagctacaacctgtcgtgcgagctggagcccccatccgagtcagccagcaacaccctcaggaccaagaagaacacagccattgtcaagcgctggagcgaccgccaggcccccagcactgagctcagtaccagtggcagctcccactccaagtcctgtgaccagctcaggtgtggcccctacctcagcagcggggacatcgctgacgcgctcagcgtgcactcggccggctcctctagctccgacgtggaggagatcaacatcagcttcgtcccggagtctcctgatggccaggaaaagaagttctgggaatcagcctcacagtcatccccggagacctccggcatcagctcagcctccagcagcacctcgtcctcctcagcctccaccacgcccgtggctgccacacgcacccacaagcgctctgtctcagggctctgcaactccagctccgcgctgccgctctacaaccagcaggtgggcgactgctgtatcatccgcgtcagcctggacgtggacaatggcaacatgtacaagagcatcctggtgaccagccaagataaggctccggctgtaatccgcaaggccatggacaaacacaacctggaggaggaggagccggaggactatgagctgctgcagattctctcagatgaccggaagctgaagatccctgaaaacgccaacgtcttctatgccatgaactctaccgccaactatgactttgtcctcaagaagcggaccttcaccaagggagtgaaggtcaagcacggagccagctccaccctccctcgcatgaagcagaaaggactcaagattgccaagggcatcttctgagggcatcctcccagggtctggctggctggtagccaagcacttatggaccagagtggcccaggccagctgggcgccttcctcccacctgccagcccagggtaccccagactccagtttcatcctgaacctctcccgctgctgggattgacgcctgccattggtcaggctgacctggcctcccgtggaccactcgctgccttaggtgccttctgctctctggaaccagaggactagctgacttttgccaaggagcagtgccaacgggcatggcatggtgccctgcctgcccccgggcgccacctctgtacacttccctgacaccttcccaggtgtgggtcactgccacctgtgcccatgggcaccccagagcacccactgtgaccactgcagttctctcatgcccacaggcactggcctgtgaccttcgcaggggtcccggcccctcccaccactctagcctttctcaggctgcaccaaagattccatcatcagggccaactgagagtgagggagtctcacccaccgcttaccccagccctcccctgggagcagagagagaaaccctcttcatggaccagactctgcacccggtgagtgaggacagtcccagctgagtcccatcgatgttgaatctcatgccactgcaagtgccattcaccactgcgtcctgggctttacgagaccatgcaagacgggggttagtgaggaaggaggatttggggtgggggtggggtgattgaatatttgtataaaaagcaaaaagaaaaaaaaaatgtttgtttactgattggggaggggcaatatttatttgttgtaaatagcaaatgctagacttgaatattatattaaaatcctgtttctact

SEQ ID NO: 173768 - DNA, 3801 bp, Homo sapiens
  Payload ID: 14124
  Gene Symbol: RALGDS
  Gene Name: ral guanine nucleotide dissociation stimulator
  Uniprot ID: Q12967
  ENST ID: ENST00000393160
  CDS Start-End: 355-2934
ccgagcgcgtccccgagctcacgcggcggggcgcgcccctcgcacctgcgggcgggctggggcggggccgcggctgtccccgcccacccgggcccgagcccggggagccggggcggaaccgagcggcgaggcccgagcggccggagcgcggcgcggcgcagacaatgggagcggcgctggcggctgccggggcggccccgagggccgcagagtcctgggcccggcggggaccggaggccgcgccatgagccccgcagccgggcgcacccctgcgccgcgcgcgggcccaggcgagcggcctctgcgagccccgggtcccgccctggggccggcgatgtgccaccgaggctgaggatgatggtagattgccagagctccacgcaggagatcggtgaggagctgatcaacggagtcatctactccatctccctgcgcaaggtgcagctgcaccacggaggcaacaaggggcagcgctggctcgggtatgagaatgagtcggccctgaacctttatgagacttgcaaggtgcggaccgtgaaggctggcacgctggagaagctggtggagcacctggtgccagccttccagggcagcgacctctcctacgtcaccatcttcctgtgtacctatagagccttcaccaccacccaacaggtcctggacctgctgttcaaaaggtacggtagatgtgacgccctcacggcctcctctagatacggctgcatcctcccctattccgacgaggatggtggaccccaggaccaacttaaaaatgccatctcctccatcctgggcacctggctggaccagtactcggaggatttctgtcaacctccggactttccctgcctcaagcagctggtggcctacgtgcagctcaacatgccaggctcagacctggagcgccgtgcccaccttctcctggcccagctggagcactcggaacccattgaggcagagcctgaggctctgtcaccagtgccagctctaaaaccaactccagagctcgagctagctctaacaccagctcgagcacccagcccagtgccggctccagccccggagccagagccagctccaacaccagctccaggttcagagctagaagtagctccagcaccagctccggagctccagcaggctccagagccagctgtgggactagaatcggctccagcgccagctctggaactagagccagctccagaacaggatccagctccctcacaaactctagagctggagccagctccagcaccagttccatcattacagccttcctggccttcacctgtggttgcagagaacgggctgagtgaggagaagcctcacctcttggtgttccctccagatctggtggcagagcagtttacactgatggatgcggaactgttcaagaaggtggtgccctaccactgcctgggctccatctggtcccagcgggacaagaagggcaaggagcacctggcgcccaccatccgcgccactgtcacccagttcaacagtgtggccaactgtgtcatcaccacctgcctcgggaaccgaagcacgaaagccccagacagggccagggtggtggagcactggatcgaggtggccagggagtgccggatcctcaagaacttctcgtcactgtatgccatcctctctgccctgcagagcaactccatccaccgtctgaagaagacgtgggaagacgtttccagggacagtttccggatctttcagaagctgtcagagatcttctcagatgagaacaactactcattgagccgggagctgctcatcaaggagggcacctccaagtttgccaccctggagatgaaccccaagagagcccagaaacggccgaaggagacgggcatcatccagggcaccgttccctacctgggcacgttcctcaccgacctggtgatgctggacactgccatgaaggactatctgtatggcagactcatcaactttgagaagaggaggaaggagttcgaggtgatcgcccagatcaagctgctgcagtcggcctgcaacaactacagcatcgcgccagatgagcaatttggggcctggttccgggccgtggagcggctcagcgagactgagagctacaacctgtcgtgcgagctggagcccccatccgagtcagccagcaacaccctcaggaccaagaagaacacagccattgtcaagcgctggagcgaccgccaggcccccagcactgagctcagtaccagtggcagctcccactccaagtcctgtgaccagctcaggtgtggcccctacctcagcagcggggacatcgctgacgcgctcagcgtgcactcggccggctcctctagctccgacgtggaggagatcaacatcagcttcgtcccggagtctcctgatggccaggaaaagaagttctgggaatcagcctcacagtcatccccggagacctccggcatcagctcagcctccagcagcacctcgtcctcctcagcctccaccacgcccgtggctgccacacgcacccacaagcgctctgtctcagggctctgcaactccagctccgcgctgccgctctacaaccagcaggtgggcgactgctgtatcatccgcgtcagcctggacgtggacaatggcaacatgtacaagagcatcctggtgaccagccaagataaggctccggctgtaatccgcaaggccatggacaaacacaacctggaggaggaggagccggaggactatgagctgctgcagattctctcagatgaccggaagctgaagatccctgaaaacgccaacgtcttctatgccatgaactctaccgccaactatgactttgtcctcaagaagcggaccttcaccaagggagtgaaggtcaagcacggagccagctccaccctccctcgcatgaagcagaaaggactcaagattgccaagggcatcttctgagggcatcctcccagggtctggctggctggtagccaagcacttatggaccagagtggcccaggccagctgggcgccttcctcccacctgccagcccagggtaccccagactccagtttcatcctgaacctctcccgctgctgggattgacgcctgccattggtcaggctgacctggcctcccgtggaccactcgctgccttaggtgccttctgctctctggaaccagaggactagctgacttttgccaaggagcagtgccaacgggcatggcatggtgccctgcctgcccccgggcgccacctctgtacacttccctgacaccttcccaggtgtgggtcactgccacctgtgcccatgggcaccccagagcacccactgtgaccactgcagttctctcatgcccacaggcactggcctgtgaccttcgcaggggtcccggcccctcccaccactctagcctttctcaggctgcaccaaagattccatcatcagggccaactgagagtgagggagtctcacccaccgcttaccccagccctcccctgggagcagagagagaaaccctcttcatggaccagactctgcacccggtgagtgaggacagtcccagctgagtcccatcgatgttgaatctcatgccactgcaagtgccattcaccactgcgtcctgggctttacgagaccatgcaagacgggggttagtgaggaaggaggatttggggtgggggtggggtgattgaatatttgtataaaaagcaaaaagaaaaaaaaaatgtttgtttactgattggggaggggcaatatttatttgttgtaaatagcaaatgctagacttgaatattatattaaaatcctgtttctactata

SEQ ID NO: 173769 - DNA, 926 bp, Homo sapiens
  Payload ID: 14124
  Gene Symbol: RALGDS
  Gene Name: ral guanine nucleotide dissociation stimulator
  ENST ID: ENST00000424572
  CDS Start-End: 1-926
gtggttgcagagaacgggctgagtgaggagaagcctcacctcttggtgttccctccagatctggtggcagagcagtttacactgatggatgcggagtgccggatcctcaagaacttctcgtcactgtatgccatcctctctgccctgcagagcaactccatccaccgtctgaagaagacgtgggaagacgtttccagggacagtttccggatctttcagaagctgtcagagatcttctcagatgagaacaactactcattgagccgggagctgctcatcaaggagggcacctccaagtttgccaccctggagatgaaccccaagagagcccagaaacggccgaaggagacgggcatcatccagggcaccgttccctacctgggcacgttcctcaccgacctggtgatgctggacactgccatgaaggactatctgtatggcagactcatcaactttgagaagaggaggaaggagttcgaggtgatcgcccagatcaagctgctgcagtcggcctgcaacaactacagcatcgcgccagatgagcaatttggggcctggttccgggccgtggagcggctcagcgagactgagagctacaacctgtcgtgcgagctggagcccccatccgagtcagccagcaacaccctcaggaccaagaagaacacagccattgtcaagcgctggagcgaccgccaggcccccagcactgagctcagtaccagtggcagctcccactccaagtcctgtgaccagctcaggtgtggcccctacctcagcagcggggacatcgctgacgcgctcagcgtgcactcggccggctcctctagctccgacgtggaggagatcaacatcagcttcgtcccggagtctcctgatggccaggaaaagaagttctgggaatcagcctcacagtcatccccggagac

SEQ ID NO: 173770 - DNA, 4602 bp, Homo sapiens
  Payload ID: 14124
  Gene Symbol: RALGDS
  Gene Name: ral guanine nucleotide dissociation stimulator
  ENST ID: ENST00000493438
  CDS Start-End: 3-2477
ccatggtgcagcgcatgtgggccgaggcggccgggcctgctggcggcgccgagccgctgtttccgggctcccggcggagccgcagcgtgtgggacgccgtgcgcctggaggtgggcgtccccgacagctgcccggtggtgctgcacagcttcacgcagctagaccccgacctgccgcgcccggagagctccacgcaggagatcggtgaggagctgatcaacggagtcatctactccatctccctgcgcaaggtgcagctgcaccacggaggcaacaaggggcagcgctggctcgggtatgagaatgagtcggccctgaacctttatgagacttgcaaggtgcggaccgtgaaggctggcacgctggagaagctggtggagcacctggtgccagccttccagggcagcgacctctcctacgtcaccatcttcctgtgtacctatagagccttcaccaccacccaacaggtcctggacctgctgttcaaaagatacggctgcatcctcccctattccgacgaggatggtggaccccaggaccaacttaaaaatgccatctcctccatcctgggcacctggctggaccagtactcggaggatttctgtcaacctccggactttccctgcctcaagcagctggtggcctacgtgcagctcaacatgccaggctcagacctggagcgccgtgcccaccttctcctggcccagctggagcactcggaacccattgaggcagagcctgaggctctgtcaccagtgccagctctaaaaccaactccagagctcgagctagctctaacaccagctcgagcacccagcccagtgccggctccagccccggagccagagccagctccaacaccagctccaggttcagagctagaagtagctccagcaccagctccggagctccagcaggctccagagccagctgtgggactagaatcggctccagcgccagctctggaactagagccagctccagaacaggatccagctccctcacaaactctagagctggagccagctccagcaccagttccatcattacagccttcctggccttcacctgtggttgcagagaacgggctgagtgaggagaagcctcacctcttggtgttccctccagatctggtggcagagcagtttacactgatggatgcggaactgttcaagaaggtggtgccctaccactgcctgggctccatctggtcccagcgggacaagaagggcaaggagcacctggcgcccaccatccgcgccactgtcacccagttcaacagtgtggccaactgtgtcatcaccacctgcctcgggaaccgaagcacgaaagccccagacagggccagggtggtggagcactggatcgaggtggccagggagtgccggatcctcaagaacttctcgtcactgtatgccatcctctctgccctgcagagcaactccatccaccgtctgaagaagacgtgggaagacgtttccagggacagtttccggatctttcagaagctgtcagagatcttctcagatgagaacaactactcattgagccgggagctgctcatcaaggagggcacctccaagtttgccaccctggagatgaaccccaagagagcccagaaacggccgaaggagacgggcatcatccagggcaccgttccctacctgggcacgttcctcaccgacctggtgatgctggacactgccatgaaggactatctgtatggcagactcatcaactttgagaagaggaggaaggagttcgaggtgatcgcccagatcaagctgctgcagtcggcctgcaacaactacagcatcgcgccagatgagcaatttggggcctggttccgggccgtggagcggctcagcgagactgagagctacaacctgtcgtgcgagctggagcccccatccgagtcagccagcaacaccctcaggaccaagaagaacacagccattgtcaagcgctggagcgaccgccaggcccccagcactgagctcagtaccagtggcagctcccactccaagtcctgtgaccagctcaggtgtggcccctacctcagcagcggggacatcgctgacgcgctcagcgtgcactcggccggctcctctagctccgacgtggaggagatcaacatcagcttcgtcccggagtctcctgatggccaggaaaagaagttctgggaatcagcctcacagtcatccccggagacctccggcatcagctcagcctccagcagcacctcgtcctcctcagcctccaccacgcccgtggctgccacacgcacccacaagcgctctgtctcagggctctgcaactccagctccgcgctgccgctctacaaccagcaggtgggcgactgctgtatcatccgcgtcagcctggacgtggacaatggcaacatgtacaagagcatcctggtaagccggcgggggtggcctgggtgcctccctccactggcggcaaatgcaccctgaacacagtgcaccatccctgccctcccggggtctaccttgtagttggcggggaaggacagatgtcagccaggtacagaaatgaagaaggtagtgatcagggacaaggctggcctgagggcagagggggaggaaaggagcagccgtgcaaagcccccaggagctgaaggggcggtgctgtaggggaggtgaggtcagggaagtatccagggcctggccacataggccctgagccctgccaggacctcgactttctcggggaggaagacaggagcaatgatggctggcttctctgtctggtgtgggctggtaccagagccgcaggggtgttggttaggaggccgctgtggcaaccaggctgggagccctggaaggggccagcagggtcagagtctagacaggatttggagacagcagatgggaattgctcacagaatgggtttgcctgggggctctttcttcatcctccaggtgtcctgcgacagatgaaccatttgtaacccccaccctctgtaccccagccctgggtcaggtgccccattattcacacacgctcctgacccctcattgccaggagctagcatggttgtcattaagcagtcacctgtggccctatgtccgagttccgcctgtgctctggccctcagggtcaaggtagcaggggcctggcctatgctgaccacactgagcatcctggccggcccctcctttcttacctccagggcttggactagggactgtctgttccccaggctcagtgatgctgttatcctggaggggcaagtgcttctcaaggaagtgtgggaggagggaacagtctcttacaggagaagcagggtaggcactgctgggacagacccctcctcattccatggaggcctcacatggggaacagaaggacggaggcctcacttggggagtaggagaatgtgacaaggccctctccggacccagcacctggccagaggctgtgaccagccaagataaggctccggctgtaatccgcaaggccatggacaaacacaacctggaggaggaggagccggaggactatgagctgctgcagattctctcagatgaccggaagctgaagatccctgaaaacgccaacgtcttctatgccatgaactctaccgccaactatgactttgtcctcaagaagcggaccttcaccaagggagtgaaggtcaagcacggagccagctccaccctccctcgcatgaagcagaaaggactcaagattgccaagggcatcttctgagggcatcctcccagggtctggctggctggtagccaagcacttatggaccagagtggcccaggccagctgggcgccttcctcccacctgccagcccagggtaccccagactccagtttcatcctgaacctctcccgctgctgggattgacgcctgccattggtcaggctgacctggcctcccgtggaccactcgctgccttaggtgccttctgctctctggaaccagaggactagctgacttttgccaaggagcagtgccaacgggcatggcatggtgccctgcctgcccccgggcgccacctctgtacacttccctgacaccttcccaggtgtgggtcactgccacctgtgcccatgggcaccccagagcacccactgtgaccactgcagttctctcatgcccacaggcactggcctgtgaccttcgcaggggtcccggcccctcccaccactctagcctttctcaggctgcaccaaagattccatcatcagggccaactgagagtgagggagtctcacccaccgcttaccccagccctcccctgggagcagagagagaaaccctcttcatggaccagactctgcacccggtgagtgaggacagtcccagctgagtcccatcgatgttgaatctcatgccactgcaagtgccattcaccactgcgtcctgggctttacgagaccatgcaagacgggggttagtgaggaaggaggatttggggtgggggtggggtgattgaatatttgtataaaaagcaaaaagaaaaaaaaaatgtttgtttactgattggggaggggcaatatttatttgttgtaaatagcaaatgctagacttgaatattatattaaaatcctgtttctactata

SEQ ID NO: 173771 - DNA, 5100 bp, Homo sapiens
  Payload ID: 14125
  Gene Symbol: RGL1
  Gene Name: ral guanine nucleotide dissociation stimulator-like 1
  Uniprot ID: Q9NZL6
  ENST ID: ENST00000304685
  CDS Start-End: 450-2861
ctgcggtccagtctagggggtctcagattggcggggatgggcagcagcggcaggtggccttggcttttgctgcagccgtcaacgacctatcatcggggtcctgcgtaaggtccggctggctgggacttggctgtgggtgggatggactggctgccggaccgagtgccctgcagttggtaggagtatgaggcagagtgatgcacacccgggcgcccagcatcgttctaattgccggagacattgcctcagactgtgcgctgctagaggctgcgttcctgagcaggaagcccgtttcctgggattggaactacccttcttggccagcgggaagtccccaaggacggagtcgaaaggtcaaatcttatctgtcagtgctgtgtgacagcatcgcaacgggatctgcagaacctgaactcgatccgtaatgcctcctgcctgcctctttcaagatggaggtgaaacctgtgggagaacctactcaagaggtgtctaaattcaaactttccaccaaggtagaaagcacgggacactggctggtggaagatcatgttcgaatatgggaagttttaaagacagaggagagctcgattcaggactggggtgaagaggtagaggaaggagctgtttaccatgtcaccctcaaaagagtccagattcaacaggctgccaataaaggagcaagatggctaggggttgaaggggaccagctgcctccaggacacacagtcagtcaatatgaaacctgtaagatcaggaccataaaagctggcaccttggagaagcttgtggagaacctgctgacagcttttggggacaatgactttacctatatcagcatctttctttcaacgtacagaggctttgcctccactaaagaagtgctggaactactgctggacaggtatggaaacctgacaagcccaaactgtgaagaagatggaagccaaagttcatcagagtccaaaatggtgatcaggaatgcaatcgcttccatactaagggcctggcttgaccagtgtgcagaagacttccgagagccccctcacttcccttgcttacagaaactgctggattatctcacacggatgatgccgggctctgacccagaaagaagagcacaaaatcttcttgagcagtttcagaagcaagaagtggaaactgacaatgggcttcccaacacgatctccttcagcctggaagaggaagaggaactggagggtggagagtcagcagaattcacgtgcttctcagaagatctcgtggcagagcagctgacctacatggatgcacaactcttcaagaaagtagtgcctcaccactgcctgggctgcatttggtctcgaagggataagaaggaaaacaaacatttggctcctacgatccgtgccaccatctctcagtttaataccctcaccaaatgtgttgtcagcaccatcctggggggcaaagaactcaaaactcagcagagagccaaaatcattgagaagtggatcaacatcgctcatgaatgtagactcctgaagaatttttcctccttgagggccatcgtttcggcactgcagtctaattccatctatcggttaaaaaagacttgggctgccgtcccaagggaccgaatgctgatgtttgaagaactttcagatatcttctcagaccataataaccatttgaccagccgagaactactgatgaaggaaggaacctcaaaatttgcaaacctggacagcagtgtgaaagaaaaccagaagcgtacccagaggcggctgcagctccagaaggacatgggtgtgatgcagggaactgtgccctacctgggcaccttcctgactgacctgaccatgcttgacactgcccttcaggactacatcgagggtggactgataaactttgagaaaaggagaagggaatttgaagtgattgcccagataaagctcttacagtctgcctgcaacagctattgcatgaccccagaccaaaagttcatccagtggttccagaggcagcagctcctgacagaggaggagagctatgccctgtcatgtgagattgaagcagctgctgacgccagcaccacctcgcccaagcctcggaagagcatggtgaagagactcagcctactgtttctagggtctgacatgatcaccagtcccactcccaccaaagagcagcccaagtccactgccagcgggagctctggtgaaagcatggactctgtcagcgtgtcatcctgcgagtcgaaccactcagaggctgaggagggctccattactcccatggacacccctgatgagcctcaaaaaaagctctctgagtcctcctcatcctgttcttctatccattccatggacacaaattcctcagggatgtcttccttaatcaaccccctctcctcccctccgtcctgcaacaacaaccccaaaatccacaagcgctctgtctcggtgacgtccattacctcgactgtgctgcctcctgtttacaaccaacagaatgaagacacctgcataatccgcatcagtgtggaagacaataacggcaacatgtacaagagcatcatgttgacgagccaggataaaacccccgctgtgatccagagagccatgctgaagcacaatctggactcagaccccgccgaggagtacgagctggtgcaggtcatctcggaggacaaagaacttgtgattccagactcagcaaatgtcttttatgccatgaacagccaagtgaactttgacttcattttgcgcaaaaagaactccatggaagaacaagtgaaactgcgtagccggaccagcttgacgttgcccaggacagctaaacggggctgctggagtaacagacacagcaaaatcaccctctgaagggagggaccagtggccccttgtttgccaaaggcagagtggggctgagaaacaggctgcggtgattgcaattaccatccggtgttcgaggatcattggtgaagtcagcagatatttattgagttcctgtggtgtgcaaagcattatgataggcaccgtggggaaactggaaatgaatttgacatgaaaaggatgaacgattcactgattctctttgactcatttgagactaaaatgcagaattaccaacatttaaaacatatatatgcacatgtatttggtatgcatgtgtatctatataaaaatatataagagggactttatgggatagtatggactatggaaaaacaaatttgcacaatggcctgggaagttgaggtcactttttacagggaaatagaagaaactgagaacctagtctcgtatattctgagtaaatggaatcagtcctgggaatagagagtgtcctttgtgccagtattacaagaagcccaaactttatttttataaagggagaggatgactttctcaatcaagtgccaccagataaaaacaactgcagaggctggaactgccacaggctgtatgaaaggccactttggaaagggtttggatgagctggtggccttcaacctctgcctgcatctgccactttctgctaccctagggaggccaggaggagcttcggaggaccatcgccccactggtctagccatcatgacacctctggaggtgtcaagctcctgaaacaagctcatttcagtttctggcaaccccgtgtatttccgttttccccctaaagaacatatcataatcattgcacaaataaccatgttctttggtaatgaagccagaaaagaaagcgcaaaagaatggtgactcatttggactcttatctgtcttggaatgtcactgcttcattgccttctctgattgccttttgcatgtaaaactatgtgtctggagtcttttgccatctggatcttagtacctctttattatgtgcaatttattcctcaggtgtggaaatttctactgcaattgactacgtttgattattttgagcttgtgaaagatttctgaacagtgattgtcccgttaatagcccctcagaagatgttccctgctgataacagcatcctattttacttacttttatagcattactgtgcctagtcgtggggaaagagatggggctgtatagattatctgaatcatttgtctaagaggtacattcttccagatggaatcaataacttttttttttccaggttcccgtgcttgctatcacagtatcattgttaagtgacacttttgtctctcataacaccatcacactcttccttccaagtctgagctgtgctggggtttgaactaaaagccatatgtggaatattgacatgtgtaagaagcactttcagaatgttgtcctttttaagaaatgattctcaaaataccagtttttattccaaaaatttagagaacaaacccggaatatgaagtgcagattgtaacatggagctatttttttttcttaatcccataatacagctcctaaaagttgtgtgggatttgcgttgcataaatagccatgtgaattccacaagaagcaccagggaaagtttagagatttgcggcaatggaccgaagaacgggccaggaagtcctccaatttcctttggtctttccaggagattggactacacattgtaaagactgactgggtttcaactagtcaaaaagcactttcttctgttttcaatccctgttcgatttgtgcttctgtgcttgtaggagagatggccagggtggcagccctcatgcaggttgaagtatatgtagcctcagcctgatattcttggtgcgaaggtaaaaaaaaaaaaataaataaaaccattggcctggttgagggcgtgaccaccaagacatatatgttgtgcccgtgttcatcctgtgtatttatactgtatatgtagagtctagatttatatactgcaatgtaaaatatatatatatttaccttttttaaagacaatggaaattccaagtagctaaaacttagcttcatttatttaatgccactttaaatgtcttaaatttgtttcctggtggacagccgggtaatgcttttagctgctcgcatgcttgtctttctgcatctccatcatctgtttaccttttggttaaactaataaactagtttgggacttggctggcatgtgctgccagacccaaaggg

SEQ ID NO: 173772 - DNA, 4724 bp, Homo sapiens
  Payload ID: 14125
  Gene Symbol: RGL1
  Gene Name: ral guanine nucleotide dissociation stimulator-like 1
  Uniprot ID: Q9NZL6
  ENST ID: ENST00000360851
  CDS Start-End: 179-2485
gtggcccgagtcgcgcgcaccggcggcggcgggggcagcgcggcgcgtgtctgtgcgctgcggtcgctcgggaccgggaccggggcgaggcgccgcggggctgagcccagcagacattgcgttggcctccgagcagggcgcatcatgcagcgttcgcgcaccggagagaaaactgagaatgaaattgctttggcaagctaaaatgagctcgattcaggactggggtgaagaggtagaggaaggagctgtttaccatgtcaccctcaaaagagtccagattcaacaggctgccaataaaggagcaagatggctaggggttgaaggggaccagctgcctccaggacacacagtcagtcaatatgaaacctgtaagatcaggaccataaaagctggcaccttggagaagcttgtggagaacctgctgacagcttttggggacaatgactttacctatatcagcatctttctttcaacgtacagaggctttgcctccactaaagaagtgctggaactactgctggacaggtatggaaacctgacaagcccaaactgtgaagaagatggaagccaaagttcatcagagtccaaaatggtgatcaggaatgcaatcgcttccatactaagggcctggcttgaccagtgtgcagaagacttccgagagccccctcacttcccttgcttacagaaactgctggattatctcacacggatgatgccgggctctgacccagaaagaagagcacaaaatcttcttgagcagtttcagaagcaagaagtggaaactgacaatgggcttcccaacacgatctccttcagcctggaagaggaagaggaactggagggtggagagtcagcagaattcacgtgcttctcagaagatctcgtggcagagcagctgacctacatggatgcacaactcttcaagaaagtagtgcctcaccactgcctgggctgcatttggtctcgaagggataagaaggaaaacaaacatttggctcctacgatccgtgccaccatctctcagtttaataccctcaccaaatgtgttgtcagcaccatcctggggggcaaagaactcaaaactcagcagagagccaaaatcattgagaagtggatcaacatcgctcatgaatgtagactcctgaagaatttttcctccttgagggccatcgtttcggcactgcagtctaattccatctatcggttaaaaaagacttgggctgccgtcccaagggaccgaatgctgatgtttgaagaactttcagatatcttctcagaccataataaccatttgaccagccgagaactactgatgaaggaaggaacctcaaaatttgcaaacctggacagcagtgtgaaagaaaaccagaagcgtacccagaggcggctgcagctccagaaggacatgggtgtgatgcagggaactgtgccctacctgggcaccttcctgactgacctgaccatgcttgacactgcccttcaggactacatcgagggtggactgataaactttgagaaaaggagaagggaatttgaagtgattgcccagataaagctcttacagtctgcctgcaacagctattgcatgaccccagaccaaaagttcatccagtggttccagaggcagcagctcctgacagaggaggagagctatgccctgtcatgtgagattgaagcagctgctgacgccagcaccacctcgcccaagcctcggaagagcatggtgaagagactcagcctactgtttctagggtctgacatgatcaccagtcccactcccaccaaagagcagcccaagtccactgccagcgggagctctggtgaaagcatggactctgtcagcgtgtcatcctgcgagtcgaaccactcagaggctgaggagggctccattactcccatggacacccctgatgagcctcaaaaaaagctctctgagtcctcctcatcctgttcttctatccattccatggacacaaattcctcagggatgtcttccttaatcaaccccctctcctcccctccgtcctgcaacaacaaccccaaaatccacaagcgctctgtctcggtgacgtccattacctcgactgtgctgcctcctgtttacaaccaacagaatgaagacacctgcataatccgcatcagtgtggaagacaataacggcaacatgtacaagagcatcatgttgacgagccaggataaaacccccgctgtgatccagagagccatgctgaagcacaatctggactcagaccccgccgaggagtacgagctggtgcaggtcatctcggaggacaaagaacttgtgattccagactcagcaaatgtcttttatgccatgaacagccaagtgaactttgacttcattttgcgcaaaaagaactccatggaagaacaagtgaaactgcgtagccggaccagcttgacgttgcccaggacagctaaacggggctgctggagtaacagacacagcaaaatcaccctctgaagggagggaccagtggccccttgtttgccaaaggcagagtggggctgagaaacaggctgcggtgattgcaattaccatccggtgttcgaggatcattggtgaagtcagcagatatttattgagttcctgtggtgtgcaaagcattatgataggcaccgtggggaaactggaaatgaatttgacatgaaaaggatgaacgattcactgattctctttgactcatttgagactaaaatgcagaattaccaacatttaaaacatatatatgcacatgtatttggtatgcatgtgtatctatataaaaatatataagagggactttatgggatagtatggactatggaaaaacaaatttgcacaatggcctgggaagttgaggtcactttttacagggaaatagaagaaactgagaacctagtctcgtatattctgagtaaatggaatcagtcctgggaatagagagtgtcctttgtgccagtattacaagaagcccaaactttatttttataaagggagaggatgactttctcaatcaagtgccaccagataaaaacaactgcagaggctggaactgccacaggctgtatgaaaggccactttggaaagggtttggatgagctggtggccttcaacctctgcctgcatctgccactttctgctaccctagggaggccaggaggagcttcggaggaccatcgccccactggtctagccatcatgacacctctggaggtgtcaagctcctgaaacaagctcatttcagtttctggcaaccccgtgtatttccgttttccccctaaagaacatatcataatcattgcacaaataaccatgttctttggtaatgaagccagaaaagaaagcgcaaaagaatggtgactcatttggactcttatctgtcttggaatgtcactgcttcattgccttctctgattgccttttgcatgtaaaactatgtgtctggagtcttttgccatctggatcttagtacctctttattatgtgcaatttattcctcaggtgtggaaatttctactgcaattgactacgtttgattattttgagcttgtgaaagatttctgaacagtgattgtcccgttaatagcccctcagaagatgttccctgctgataacagcatcctattttacttacttttatagcattactgtgcctagtcgtggggaaagagatggggctgtatagattatctgaatcatttgtctaagaggtacattcttccagatggaatcaataacttttttttttccaggttcccgtgcttgctatcacagtatcattgttaagtgacacttttgtctctcataacaccatcacactcttccttccaagtctgagctgtgctggggtttgaactaaaagccatatgtggaatattgacatgtgtaagaagcactttcagaatgttgtcctttttaagaaatgattctcaaaataccagtttttattccaaaaatttagagaacaaacccggaatatgaagtgcagattgtaacatggagctatttttttttcttaatcccataatacagctcctaaaagttgtgtgggatttgcgttgcataaatagccatgtgaattccacaagaagcaccagggaaagtttagagatttgcggcaatggaccgaagaacgggccaggaagtcctccaatttcctttggtctttccaggagattggactacacattgtaaagactgactgggtttcaactagtcaaaaagcactttcttctgttttcaatccctgttcgatttgtgcttctgtgcttgtaggagagatggccagggtggcagccctcatgcaggttgaagtatatgtagcctcagcctgatattcttggtgcgaaggtaaaaaaaaaaaaataaataaaaccattggcctggttgagggcgtgaccaccaagacatatatgttgtgcccgtgttcatcctgtgtatttatactgtatatgtagagtctagatttatatactgcaatgtaaaatatatatatatttaccttttttaaagacaatggaaattccaagtagctaaaacttagcttcatttatttaatgccactttaaatgtcttaaatttgtttcctggtggacagccgggtaatgcttttagctgctcgcatgcttgtctttctgcatctccatcatctgtttaccttttggttaaactaataaactagtttgggacttggctggcatgtgctgccagacccaaaggg

SEQ ID NO: 173773 - DNA, 3278 bp, Homo sapiens
  Payload ID: 14126
  Gene Symbol: RGL2
  Gene Name: ral guanine nucleotide dissociation stimulator-like 2
  Uniprot ID: O15211
  ENST ID: ENST00000383204
  CDS Start-End: 497-2830
ccggctctctctccgcctgaaacgcttcccgcgggagttttagccgtgttattgttggggaagggaatgtcaaattctgctcctgccttcccccaggggctggagactggaatctttattccagttcattgcgggtcgacgtggtctccagaatccccgagtgtagaggcggaggacagtggagctggggactcgggcgcctgggtcctggtccctgagcgtccagcgctcccctagtccgcggccctggctcctgtcctcacttccttccccttttggctcctgctctcggagcgggcggacgcgggggggagcggaaagggcgggagggcccaggagcccggcgggggggttcaagggggtacggaaaagccggggaggggactcggtccggggccggagaccgacggcaacagcggctcaggacccacgctgcccccacccctcccgagcaggcgcccccatggcccgaccccgctgattccttcactcggccatgctcccgcggcccctgcggctgcttttggacacgagcccccccgggggagtcgtactgagcagcttccgaagccgggaccccgaagagggtgggggcccaggtggcctggtcgtgggcggggggcaggaggaagaggaggaggaagaagaagaggcccctgtgtccgtctgggatgaggaggaggatggtgccgtgtttaccgtcacaagccgccaatatcgacctcttgatcccttggtccctatgcctcccccacgttcctcccgacggctccgagctggcactctggaggccctggtcagacacctactggatacccggacatcagggactgatgtgagcttcatgtcagccttcctggctacccaccgggccttcacctccacgcctgccttgctagggcttatggctgacaggctggaagcccttgaatctcatcctaccgacgaactagagaggacaacagaggtagccatctctgtactgtcaacctggctggcctctcaccctgaggattttggctctgaggccaagggtcagcttgaccggcttgagagcttcttacttcagacagggtatgcagcagggaagggtgttggggggggcagcgctgacctcatccgcaatctccggtcccgggtggacccccaggcccccgaccttcctaagcccctggccctccccggcgatccccctgctgaccccacggatgtcctggtgttcctcgctgaccacttggccgaacagctgaccctgctagatgcggaactttttctcaatttgatcccctctcagtgcctgggaggcctgtggggtcacagagaccggccaggacattctcacctctgcccatctgtccgagctactgtcacacagtttaacaaggtggcaggggcagtggttagttctgtcctgggggctacttccactggagagggacctggggaggtgaccatacggccactccgtcccccacagagggcccggctcctggagaagtggatccgcgtggcagaggagtgccggctgctccgaaacttctcttcagtttatgccgtggtgtcagccctgcagtccagccccatccacaggcttcgggcagcctggggggaagcaaccagggacagcctcagagtcttttccagcctctgccagattttctccgaggaggataattattcccagagtcgggagctgctcgtgcaggaggtgaagctgcagtctcctctggagccacactccaagaaggccccgaggtctggctcccggggtgggggtgtggtcccataccttggcaccttcctgaaggaccttgtgatgctggatgcagcctccaaggatgagttggagaatggatacatcaattttgacaagcggaggaaggagtttgcagtcctttctgagttgcgacggctccagaatgaatgtcgtggctataacctccaacctgaccatgatatccagaggtggctacaggggctccggccactgacagaggctcagagccatcgtgtatcctgtgaggtggagccacctggttccagtgaccctcctgccccacgggtgcttcggccaacattggtcatctcgcagtggacagaggttttgggctctgttggggtccctaccccgcttgtgtcctgtgaccggcccagtactgggggagatgaggcgcctacaactcctgctcctctgctgactcggctggcccagcacatgaagtggccatctgtctcgtcactagactctgccttggaaagcagtccatccctgcacagtccagctgaccccagccacctctccccaccagcctcctcccctaggccttctcgaggtcaccgccgctcagcctcctgtggctccccgctgagtgggggtgcagaagaggcctccggggggactggatatgggggagagggatctgggccaggggcctctgattgccgtatcatccgagtccagatggagttgggggaagatggcagtgtctataagagcattttggtgacaagccaggacaaggctccaagtgtcatcagtcgtgtccttaagaaaaacaatcgtgactctgcagtggcttcagagtatgagctggtacagctgctaccaggggagcgagagctgactatcccagcctcggctaatgtattctacgccatggatggagcttcacacgatttcctcctgcggcagcggcgaaggtcctctactgctacacctggcgtcaccagtggcccgtctgcctcaggaactcctccgagtgagggaggagggggctcctttcccaggatcaaggccacagggaggaagattgcacgggcactgttctgaggaggaagccccgttggcttacagaagtcatggtgttcataccagatgtgggtagccatcctgaatggtggcaattatatcacattgagacagaaattcagaaagggagccagccaccctggggcagtgaagtgccactggtttaccagacagctgagaaatccagccctgtgggaactggtgtcttataaccaagttggatacctgtgtatagcttcccaccttccatgagtgcagcacacaggtagtgctggaaaaacgcatcagtttctgattcttggccatatcctaacatgcaagggccaagcaaaggcttcaaggctctgagccccagggcagaggggaatggcaaaatgtaggtcctcgcaggagctcttcttcccactctgggggtttctatcactgtgacaacactaagataataaaccaaaacactacctgaattcta

SEQ ID NO: 173774 - DNA, 640 bp, Homo sapiens
  Payload ID: 14126
  Gene Symbol: RGL2
  Gene Name: ral guanine nucleotide dissociation stimulator-like 2
  ENST ID: ENST00000412959
  CDS Start-End: 201-640
accaagggcccccctattccacccttctgttgccccctcccccaaccttcctgcagaactcccttccggtcttcttgacacccacccacgtcccttccctgcccggttcccccgcgcctgcctgactctccacccccaccccaccccgtctctccccaggcgcccccatggcccgaccccgctgattccttcactcggccatgctcccgcggcccctgcggctgcttttggacacgagcccccccgggggagtcgtactgagcagcttccgaagccgggaccccgaagagggtgggggcccaggtggcctggtcgtgggcggggggcaggaggaagaggaggaggaagaagaagaggcccctgtgtccgtctgggatgaggaggaggatggtgccgtgtttaccgtcacaagccgccaatatcgacctcttgatcccttggtccctatgcctcccccacgttcctcccgacggctccgagctggcactctggaggccctggtcagacacctactggatacccggacatcagggactgatgtgagcttcatgtcagccttcctggctacccaccgggccttcacctccacgcctgccttgctagggcttatggctgacaggctggaagcccttgaatctca

SEQ ID NO: 173775 - DNA, 3278 bp, Homo sapiens; identical to SEQ ID NO: 173773
  Payload ID: 14126
  Gene Symbol: RGL2
  Gene Name: ral guanine nucleotide dissociation stimulator-like 2
  Uniprot ID: O15211
  ENST ID: ENST00000452084
  CDS Start-End: 497-2830

SEQ ID NO: 173776 - DNA, 640 bp, Homo sapiens; identical to SEQ ID NO: 173774
  Payload ID: 14126
  Gene Symbol: RGL2
  Gene Name: ral guanine nucleotide dissociation stimulator-like 2
  ENST ID: ENST00000425946
  CDS Start-End: 201-640

SEQ ID NO: 173777 - DNA, 640 bp, Homo sapiens; identical to SEQ ID NO: 173774
  Payload ID: 14126
  Gene Symbol: RGL2
  Gene Name: ral guanine nucleotide dissociation stimulator-like 2
  ENST ID: ENST00000455072
  CDS Start-End: 201-640

SEQ ID NO: 173778 - DNA, 640 bp, Homo sapiens; identical to SEQ ID NO: 173774
  Payload ID: 14126
  Gene Symbol: RGL2
  Gene Name: ral guanine nucleotide dissociation stimulator-like 2
  ENST ID: ENST00000431976
  CDS Start-End: 201-640

SEQ ID NO: 173779 - DNA, 3278 bp, Homo sapiens; identical to SEQ ID NO: 173773
  Payload ID: 14126
  Gene Symbol: RGL2
  Gene Name: ral guanine nucleotide dissociation stimulator-like 2
  Uniprot ID: O15211
  ENST ID: ENST00000413136
  CDS Start-End: 497-2830

SEQ ID NO: 173780 - DNA, 3278 bp, Homo sapiens; identical to SEQ ID NO: 173773
  Payload ID: 14126
  Gene Symbol: RGL2
  Gene Name: ral guanine nucleotide dissociation stimulator-like 2
  Uniprot ID: O15211
  ENST ID: ENST00000416548
  CDS Start-End: 497-2830

SEQ ID NO: 173781 - DNA, 640 bp, Homo sapiens; identical to SEQ ID NO: 173774
  Payload ID: 14126
  Gene Symbol: RGL2
  Gene Name: ral guanine nucleotide dissociation stimulator-like 2
  ENST ID: ENST00000446570
  CDS Start-End: 201-640

SEQ ID NO: 173782 - DNA, 3278 bp, Homo sapiens; identical to SEQ ID NO: 173773
  Payload ID: 14126
  Gene Symbol: RGL2
  Gene Name: ral guanine nucleotide dissociation stimulator-like 2
  Uniprot ID: O15211
  ENST ID: ENST00000497454
  CDS Start-End: 497-2830

SEQ ID NO: 173783 - DNA, 2542 bp, Homo sapiens
  Payload ID: 14127
  Gene Symbol: RGL3
  Gene Name: ral guanine nucleotide dissociation stimulator-like 3
  ENST ID: ENST00000380456
  CDS Start-End: 65-2197
acccgccacccgccggcccttccgcctcactcagcggcgccactgagagggacgggcgccggccatggagcgcacagcaggcaaagagctggccctggcaccgctgcaggactggggtgaagagaccgaggacggcgcggtgtacagtgtctccctgcggcggcagcgcagtcagcgcaggagcccggcggagggccccgggggcagccaggctcccagccccattgccaataccttcctccactatcgaaccagcaaggtgagggtgctgagggcagcgcgcctggagcggctggtgggagagttggtgtttggagaccgtgagcaggaccccagcttcatgcccgccttcctggccacctaccggacctttgtacccactgcctgcctgctgggctttctgctgccaccaatgccaccgcccccacctcccggggtagagatcaagaagacagcggtacaagatctgagcttcaacaagaacctgagggctgtggtgtcagtgctgggctcctggctgcaggaccaccctcaggatttccgagaccaccctgcccattcggacctgggcagtgtccgaacctttctgggctgggcggccccagggagtgctgaggctcaaaaagcagagaagcttctggaagattttttggaggaggctgagcgagagcaggaagaggagccgcctcaggtgtggacaggacctcccagagttgcccaaacttctgacccagactcttcagaggcctgcgcggaggaagaggaagggctcatgcctcaaggtccccagctcctggacttcagcgtggacgaggtggccgagcagctgaccctcatagacttggagctcttctccaaggtgaggctctacgagtgcttgggctccgtgtggtcgcagagggaccggccgggggctgcaggcgcctcccccactgtgcgcgccaccgtggcccagttcaacaccgtgaccggctgtgtgctgggttccgtgctcggagcaccgggcttggccgccccgcagagggcgcagcggctggagaagtggatccgcatcgcccagcgctgccgagaactgcggaacttctcctccttgcgcgccatcctgtccgccctgcaatctaaccccatctaccggctcaagcgcagctggggggcagtgagccgggaaccgctatctactttcaggaaactttcgcagattttctccgatgagaacaaccacctcagcagcagagagattcttttccaggaggaggccactgagggatcccaagaagaggacaacaccccaggcagcctgccctcaaaaccacccccaggccctgtcccctaccttggcaccttccttacggacctggttatgctggacacagccctgccggatatgttggagggggatctcattaactttgagaagaggaggaaggagtgggagatcctggcccgcatccagcagctgcagaggcgctgtcagagctacaccctgagcccccacccgcccatcctggctgccctgcatgcccagaaccagctcaccgaggagcagagctaccggctctcccgggtcattgagccaccagctgcctcctgccccagctccccacgcatccgacggcggatcagcctcaccaagcgtctcagtgcgaagcttgcccgagagaaaagctcatcacctagtgggagtcccggggacccctcatcccccacctccagtgtgtccccagggtcacccccctcaagtcctagaagcagagatgctcctgctggcagtcccccggcctctccagggccccagggccccagcaccaagctgcccctgagcctggacctgcccagcccccggcccttcgctttgcctctgggcagccctcgaatccccctcccggcgcagcagagctcggaggcccgtgtcatccgcgtcagcatcgacaatgaccacgggaacctgtatcgaagcatcttgctgaccagtcaggacaaagcccccagcgtggtccggcgagccttgcagaagcacaatgtgccccagccctgggcctgtgactatcagctctttcaagtccttcctggggaccgggtgctcctgattcctgacaatgccaacgtcttctatgccatgagtccagtcgcccccagagacttcatgctgcggcggaaagaggggacccggaacactctgtctgtctccccaagctgaggcagccctgtcctctccacaagacacaagtcccacaggcaagcttgcgactcttctcctggaaagctgccatcccccagtagaggccactgtgctgtgtatcccaggaccaccacccaactgtagcccattggaccccatctctttttctgactctgttggtactagatccatattccaaagacatcagcccatgggtggctggtggagagctcaatcccataaatgtagaaagaggtggggcatggatacgtcaaatccctccccagagaaatcttataaatgttagagacgcatcagaagtgacagatgcggatgaaaatagtgaccagagttatgaaacag

SEQ ID NO: 173784 - DNA, 2278 bp, Homo sapiens
  Payload ID: 14127
  Gene Symbol: RGL3
  Gene Name: ral guanine nucleotide dissociation stimulator-like 3
  Uniprot ID: Q3MIN7
  ENST ID: ENST00000393423
  CDS Start-End: 51-2201
ggcccttccgcctcactcagcggcgccactgagagggacgggcgccggccatggagcgcacagcaggcaaagagctggccctggcaccgctgcaggactggggtgaagagaccgaggacggcgcggtgtacagtgtctccctgcggcggcagcgcagtcagcgcaggagcccggcggagggccccgggggcagccaggctcccagccccattgccaataccttcctccactatcgaaccagcaaggtgagggtgctgagggcagcgcgcctggagcggctggtgggagagttggtgtttggagaccgtgagcaggaccccagcttcatgcccgccttcctggccacctaccggacctttgtacccactgcctgcctgctgggctttctgctgccaccaatgccaccgcccccacctcccggggtagagatcaagaagacagcggtacaagatctgagcttcaacaagaacctgagggctgtggtgtcagtgctgggctcctggctgcaggaccaccctcaggatttccgagaccaccctgcccattcggacctgggcagtgtccgaacctttctgggctgggcggccccagggagtgctgaggctcaaaaagcagagaagcttctggaagattttttggaggaggctgagcgagagcaggaagaggagccgcctcaggtgtggacaggacctcccagagttgcccaaacttctgacccagactcttcagaggcctgcgcggaggaagaggaagggctcatgcctcaaggtccccagctcctggacttcagcgtggacgaggtggccgagcagctgaccctcatagacttggagctcttctccaaggtgaggctctacgagtgcttgggctccgtgtggtcgcagagggaccggccgggggctgcaggcgcctcccccactgtgcgcgccaccgtggcccagttcaacaccgtgaccggctgtgtgctgggttccgtgctcggagcaccgggcttggccgccccgcagagggcgcagcggctggagaagtggatccgcatcgcccagcgctgccgagaactgcggaacttctcctccttgcgcgccatcctgtccgccctgcaatctaaccccatctaccggctcaagcgcagctggggggcagtgagccgggaaccgctatctactttcaggaaactttcgcagattttctccgatgagaacaaccacctcagcagcagagagattcttttccaggaggaggccactgagggatcccaagaagaggacaacaccccaggcagcctgccctcaaaaccacccccaggccctgtcccctaccttggcaccttccttacggacctggttatgctggacacagccctgccggatatgttggagggggatctcattaactttgagaagaggaggaaggagtgggagatcctggcccgcatccagcagctgcagaggcgctgtcagagctacaccctgagcccccacccgcccatcctggctgccctgcatgcccagaaccagctcaccgaggagcagagctaccggctctcccgggtcattgagccaccagctgcctcctgccccagctccccacgcatccgacggcggatcagcctcaccaagcgtctcagtgcgaagcttgcccgagagaaaagctcatcacctagtgggagtcccggggacccctcatcccccacctccagcctctgcatctcccccagtgtgtccccagggtcacccccctcaagtcctagaagcagagatgctcctgctggcagtcccccggcctctccagggccccagggccccagcaccaagctgcccctgagcctggacctgcccagcccccggcccttcgctttgcctctgggcagccctcgaatccccctcccggcgcagcagagctcggaggcccgtgtcatccgcgtcagcatcgacaatgaccacgggaacctgtatcgaagcatcttgctgaccagtcaggacaaagcccccagcgtggtccggcgagccttgcagaagcacaatgtgccccagccctgggcctgtgactatcagctctttcaagtccttcctggggaccgggtgctcctgattcctgacaatgccaacgtcttctatgccatgagtccagtcgcccccagagacttcatgctgcggcggaaagaggggacccggaacactctgtctgtctccccaagctgaggcagccctgtcctctccacaagacacaagtcccacaggcaagcttgcgactcttctcctggaaagctgccatcccc

SEQ ID NO: 173785 - DNA, 2303 bp, Homo sapiens
  Payload ID: 14127
  Gene Symbol: RGL3
  Gene Name: ral guanine nucleotide dissociation stimulator-like 3
  ENST ID: ENST00000562663
  CDS Start-End: 1-751
gcgcacagcaggcaaagagctggccctggcaccgctgcaggactggggtgaagagaccgaggacggcgcggtgtacagtgtctccctgcggcggcagcgcagtcagcgcaggagcccggcggagggccccgggggcagccaggctcccagccccattgccaataccttcctccactatcgaaccagcaaggtgagggtgctgagggcagcgcgcctggagcggctggtgggagagttggtgtttggagaccgtgagcaggaccccagcttcatgcccgccttcctggccacctaccggacctttgtacccactgcctgcctgctgggctttctgctgccaccaatgccaccgcccccacctcccggggtagagatcaagaagacagcggtacaagatctgagcttcaacaagaacctgagggctgtggtgtcagtgctgggctcctggctgcaggaccaccctcaggatttccgagaccaccctgcccattcggacctgggcagtgtccgaacctttctgggctgggcggccccagggagtgctgaggctcaaaaagcagagaagcttctggaagattttttggaggaggctgagcgagagcaggaagaggagccgcctcaggacctcccagagttgcccaaacttctgacccagactcttcagaggcctgcgcggaggaagaggaagggctcatgcctcaaggtccccagctcctggacttcagcgtggacgaggtggccgagcagctgaccctcatagacttggagctcttctccaaggtgaggctctacgagtgcttgggctccgtgtggtcgcagagggaccggccgggggctgcaggcgcctcccccactgtgcgcgccaccgtggcccagttcaacaccgtgaccggctgtgtgctgggttccgtgctcggagcaccgggcttggccgccccgcagagggcgcagcggctggagaagtggatccgcatcgcccagcgctgccgagaactgcggaacttctcctccttgcgcgccatcctgtccgccctgcaatctaaccccatctaccggctcaagcgcagctggggggcagtgagccgggaaccgctatctactttcaggaaactttcgcagattttctccgatgagaacaaccacctcagcagcagagagattcttttccaggaggaggccactgagggatcccaagaagaggacaacaccccaggcagcctgccctcaaaaccacccccaggccctgtcccctaccttggcaccttccttacggacctggttatgctggacacagccctgccggatatgttggagggggatctcattaactttgagaagaggaggaaggagtgggagatcctggcccgcatccagcagctgcagaggcgctgtcagagctacaccctgagcccccacccgcccatcctggctgccctgcatgcccagaaccagctcaccgaggagcagagctaccggctctcccgggtcattgagccaccagctgcctcctgccccagctccccacgcatccgacggcggatcagcctcaccaagcgtctcagtgcgaagcttgcccgagagaaaagctcatcacctagtgggagtcccggggacccctcatcccccacctccagtgtgtccccagggtcacccccctcaagtcctagaagcagagatgctcctgctggcagtcccccggcctctccagggccccagggccccagcaccaagctgcccctgagcctggacctgcccagcccccggcccttcgctttgcctctgggcagccctcgaatccccctcccggcgcagcagagctcggaggcccgtgtcatccgcgtcagcatcgacaatgaccacgggaacctgtatcgaagcatcttgctgaccagtcaggacaaagcccccagcgtggtccggcgagccttgcagaagcacaatgtgccccagccctgggcctgtgactatcagctctttcaagtccttcctggggaccggggctgggaagagatgctgatttctgcgataaaatcagtaggtacattttttggaatgttcgctatgtgccaggctagattttacagatgagaagtctgaagctcaggtaaggtaagtcacctgtccagggccacaaagaaaaaaaaaacgtgtgtctgaagccagaacgggagctgttgcggcccaactccctcccctgcccccaagcggcctctgggctcgggaagggcccctgcctcctcccgccaggcacttatctctacccaggctgagtgctggccccgccccctcggggatctgccact

SEQ ID NO: 173786 - DNA, 2366 bp, Homo sapiens
  Payload ID: 14127
  Gene Symbol: RGL3
  Gene Name: ral guanine nucleotide dissociation stimulator-like 3
  ENST ID: ENST00000563726
  CDS Start-End: 33-578
agcggcgccactgagagggacgggcgccggccatggagcgcacagcaggcaaagagctggccctggcaccgctgcaggactggggtgaagagaccgaggacggcgcggtgtacagtgtctccctgcggcggcagcgcagtcagcgcaggagcccggcggagggccccgggggcagccaggctcccagccccattgccaataccttcctccactatcgaaccagcaaggtgagggtgctgagggcagcgcgcctggagcggctggtgggagagttggtgtttggagaccgtgagcaggaccccagcttcatgcccgccttcctggccacctaccggacctttgtacccactgcctgcctgctgggctttctgctgccaccaatgccaccgcccccacctcccggagatcaagaagacagcggtacaagatctgagcttcaacaagaacctgagggctgtggtgtcagtgctgggctcctggctgcaggaccaccctcaggatttccgagaccaccctgcccattcggacctgggcagtgtccgaacctttctgggctgggcggccccagggagtgctgaggctcaaaaagcagagaagcttctggaagattttttggaggaggctgagcgagagcaggaagaggagccgcctcaggtgtggacagttgtttctggccaggtgttgtggcacatgcctatagtcccagctacttaggatgctgagatgggaggatctcttgactccgggaaatcaaagctgccgtgagctgtgagcatgcccctgcactccaggcgatagagctgggggaaggaggaatagttgtttcttcaaattgaaatccaaagatctactcaaggacctcccagagttgcccaaacttctgacccagactcttcagaggcctgcgcggaggaagaggaagggctcatgcctcaaggtccccagctcctggacttcagcgtggacgaggtggccgagcagctgaccctcatagacttggagctcttctccaaggtgaggctctacgagtgcttgggctccgtgtggtcgcagagggaccggccgggggctgcaggcgcctcccccactgtgcgcgccaccgtggcccagttcaacaccgtgaccggctgtgtgctgggttccgtgctcggagcaccgggcttggccgccccgcagagggcgcagcggctggagaagtggatccgcatcgcccagcgctgccgagaactgcggaacttctcctccttgcgcgccatcctgtccgccctgcaatctaaccccatctaccggctcaagcgcagctggggggcagtgagccgggaaccgctatctactttcaggaaactttcgcagattttctccgatgagaacaaccacctcagcagcagagagattcttttccaggaggaggccactgagggatcccaagaagaggacaacaccccaggcagcctgccctcaaaaccacccccaggccctgtcccctaccttggcaccttccttacggacctggttatgctggacacagccctgccggatatgttggagggggatctcattaactttgagaagaggaggaaggagtgggagatcctggcccgcatccagcagctgcagaggcgctgtcagagctacaccctgagcccccacccgcccatcctggctgccctgcatgcccagaaccagctcaccgaggagcagagctaccggctctcccgggtcattgagccaccagctgcctcctgccccagctccccacgcatccgacggcggatcagcctcaccaagcgtctcagtgcgaagcttgcccgagagaaaagctcatcacctagtgggagtcccggggacccctcatcccccacctccagtgtgtccccagggtcacccccctcaagtcctagaagcagagatgctcctgctggcagtcccccggcctctccagggccccagggccccagcaccaagctgcccctgagcctggacctgcccagcccccggcccttcgctttgcctctgggcagccctcgaatccccctcccggcgcagcagagctcggaggcccgtgtcatccgcgtcagcatcgacaatgaccacgggaacctgtatcgaagcatcttgctgaccagtcaggacaaagcccccagcgtggtccggcgagccttgcagaagcacaatgtgccccagccctgggcctgtgactatcagctctttcaagtccttcctggggaccggggctgggaagagatgctgatttctgcgataaaatcagtaggtacattttttggaatgttcgctatgtgccaggctagattttacagatgagaagtctgaagctcaggtaaggtaagtcacctgtccagggccac

SEQ ID NO: 173787 - DNA, 537 bp, Homo sapiens
  Payload ID: 14127
  Gene Symbol: RGL3
  Gene Name: ral guanine nucleotide dissociation stimulator-like 3
  ENST ID: ENST00000567080
  CDS Start-End: 37-537
actcagcggcgccactgagagggacgggcgccggccatggagcgcacagcaggcaaagagctggccctggcaccgctgcaggactggggtgaagagaccgaggacggcgcggtgtacagtgtctccctgcggcggcagcgcagtcagcgcaggagcccggcggagggccccgggggcagccaggctcccagccccattgccaataccttcctccactatcgaaccagcaaggtgagggtgctgagggcagcgcgcctggagcggctggtgggagagttggtgtttggagaccgtgagcaggaccccagcttcatgcccgccttcctggccacctaccggacctttgtacccactgcctgcctgctgggctttctgctgccaccaatgccaccgcccccacctcccggggtagagatcaagaagacagcggtacaagatctgagcttcaacaagaacctgaggaccaccctcaggatttccgagaccaccctgcccattcggacctgggcagtgtccgaacctttctgggctgggcgg

SEQ ID NO: 173788 - DNA, 557 bp, Homo sapiens
  Payload ID: 14127
  Gene Symbol: RGL3
  Gene Name: ral guanine nucleotide dissociation stimulator-like 3
  ENST ID: ENST00000567431
  CDS Start-End: 29-557
aggaagggaggggctcggaggcgaccagatgaggcgaccaggtagaaaggggactgggggcggccaggctcccagccccattgccaataccttcctccactatcgaaccagcaaggtgagggtgctgagggcagcgcgcctggagcggctggtgggagagttggtgtttggagaccgtgagcaggaccccagcttcatgcccgccttcctggccacctaccggacctttgtacccactgcctgcctgctgggctttctgctgccaccaatgccaccgcccccacctcccggggtagagatcaagaagacagcggtacaagatctgagcttcaacaagaacctgagggctgtggtgtcagtgctgggctcctggctgcaggaccaccctcaggatttccgagaccaccctgcccattcggacctgggcagtgtccgaacctttctgggctgggcggccccagggagtgctgaggctcaaaaagcagagaagcttctggaagattttttggaggaggctgagcgagagcaggaagaggagccgcctcaggtgtggacag

SEQ ID NO: 173789 - DNA, 501 bp, Homo sapiens
  Payload ID: 14127
  Gene Symbol: RGL3
  Gene Name: ral guanine nucleotide dissociation stimulator-like 3
  ENST ID: ENST00000589032
  CDS Start-End: 1-232
cttgggctccgtgtggtcgcagagggaccggccgggggctgcaggcgcctcccccactgtgcgcgccaccgtggcccagttcaacaccgtgaccggctgtgtgctgggttccgtgctcggagcaccgggcttggccgccccgcagagggcgcagcggctggagaagtggatccgcatcgcccagggaaccgctatctactttcaggaaactttcgcagattttctccgatgagaacaaccacctcagcagcagagagattcttttccaggaggaggccactgagggatcccaagaagaggacaacaccccaggcagcctgccctcaaaaccacccccaggccctgtcccctaccttggcaccttccttacggacctggttatgctggacacagccctgccggatatgttggagggggatctcattaactttgagaagaggaggaaggagtgggagatcctggcccgcatccagcagctgcagaggcgctgtcagagctaca

SEQ ID NO: 173790 - DNA, 2885 bp, Homo sapiens
  Payload ID: 14128
  Gene Symbol: RGL4
  Gene Name: ral guanine nucleotide dissociation stimulator-like 4
  Uniprot ID: Q8IZJ4
  ENST ID: ENST00000290691
  CDS Start-End: 1171-2592
taaacccatctcctcctatgccacctgcctgggcccctcctgggactttatcactgtgccacactttttggaactactggttagaaggtgagtgtccatccccctccaagacacagaggtgcctctgtcccctactggctctgtcttgaagatgcacctctcggagcctcggttggctcctctggaacagggagtagtgagaagacgaacctcacagggttcttgtagggactcaatgatctaagacacagcaaacaaaggggtccctagagcctaaaactctggaaaatctgctgggggtgctgtgattcatgtttgttacttttctcttccccctcacttgaagcagctctcagcattctgcctcaatggcctgtatcactcactgtttggaaaaacacatagaaaccaagtctgcgatggcactggtaaaggatgtctgagattccttctggctggtctttctccttgacacagacagaagaggggtcccttggtgctgaaaaaggagccacaggcccactcagacatctggagaggctcactggggttctccaaaggttggggttcactcattcaacacatacattcaaaacacctcatttgtgcatcgctcttcttggggcttggcataatttcataaacaaagcagatgacaatcccccggccttgattctactcagagtcaggcactcacagtagacagaataaacaagtcatatctacagaatgttacaggtgagaccctcatggcctcctctacgtatggtggcatcctcccagattctgactagaatgacgcagcccagcaacaaatataaactgggtggatttagggttctgaagggccttttcacccacaaaacatgggggaaaatatgtggactctggctggggagagactaaaggagctctggggctcatacttcttataattcccacgagaaggctgacatctggggacttcccccacaagaggcaaatagtgagttctgtaaatggagacttaggtcccctgcaaagcagaggggaggctggggtcacagctggccactgagagacccatccccctcagcaccgtggcttcccagctctccctgtcctcctccccccgacatctgccccttccctcctaaccccaggaccaggggacccagatctggagctttgatgaggaagctgctcacaaatctgcctgcagctgcagtcttgagtgcccaggtgtacagtgctgtgctccagggcctttgggaagagaatgtctgtgggacgccagggcgcacgagggtctgtacagccctgctgtatggccaggtctgccccttccaggacagcactgatggcttacgcaccatcacctccattttgttcaactggccccccgaaaacacttcagtttactatcagcccccgcaacggtcatctttccggataaagctggccttcaggaacctctcctggcctggactgggcttggaggaccatcaggaaattgtcctaggccagttggtgcttccggagcccaacgaggccaagccagatgatcctgctccacgtcctgggcaacacgcattaacaatgccggccctggagccagcaccaccactgctggcggacctggggcctgctctggagccagagtcacctgcagccctgggtccaccaggatatctacattcagcaccagggccagcaccagcaccaggggaagggccccctccagggacagtgctggagccacagtcagccccagagtcctcctgtccctgtcgtgggtctgtaaagaaccaacccagtgaggagctgcctgacatgacgaccttccctcccaggctgctggcagagcagctgaccctcatggatgcggagctgttcaagaaggtggtgctccacgaatgcttgggctgcatctggggccaaggacatctgaaggggaatgagcacatggcacccacagttcgtgccaccatcgcacacttcaacaggctcaccaactgcatcaccacctcctgcctcggggaccacagcatgagggcccgggacagggccagggtggtggagcactggatcaaggtggccagggagtgcctaagcctcaacaacttctcctcggtgcacgtcatcgtctctgctctgtgcagcaacccaataggtcagctacacaagacgtgggcaggagtgtccagcaaaagcatgaaagagctaaaagaactctgcaaaaaagacactgcagtgaagagggacctactgatcaaggcggggagctttaaggtggccacccaggagaggaacccccagagagtccagatgaggctgcggaggcagaagaagggtgtggtccccttcctgggggattttctgactgagttacagaggctggattcggccatcccggacgacctggatggcaacaccaacaagaggagcaaggaggtccgagttctgcaggaaatgcagctgctccaagtggctgccatgaattacaggcttcggcctcttgagaaatttgtcacctatttcacaagaatggagcagctcagtgacaaagagagctacaagctgtcctgccagctggagcccgaaaacccgtaggctggcaacatcctgcagtggctgggaacccaccgggatgctggccagaacaccggctctgcaccatccctcacccagaccgtagacaccagggaaccacatctaggaggctggcagctcagctgcatcttgccctggatcctcatcaccaactgctcctgctggccaggatcaggccatgggacttttgtgagtcaggcgggagaccattttatgtttattttctttagtgtataagtaagggttttttcttaactttcgttaaaataaaattttaaaaaactattcaaaat

SEQ ID NO: 173791 - DNA, 2420 bp, Homo sapiens
  Payload ID: 14128
  Gene Symbol: RGL4
  Gene Name: ral guanine nucleotide dissociation stimulator-like 4
  ENST ID: ENST00000401461
  CDS Start-End: 1114-2127
taggcgatgctcgagagaacaacatgttctcctgctgtatcccgacatgctgccgacctcctcgtcgcacaagaggccaaaatgagagtctttcccgagaatatagacattggttcaaccctcaccctcgacgcctctggccctttgccagaaggcacccacaggtaacacagggcccagggcaggcccatccaggctaggcctcagctgtgcccatcagggcagcctcaggcccctccccacttgtttgggggaaacaggagatgaggggccctccctggataggagcaggtaggttgtcaggtgtttggagcctggtaggtatgtcaggttcacagcccaggcagtgcctggcaggatgggaaggtgagtgtcaaggacacagtttgtctgctcagatctgaatcccaagtcctcaagctgtcatctgccggagacctcaggcttctctggctggaggtctatgcagatgctcctatgtgccaaatcctgttggggaagggggtgccagggatgagttctaatgggggtgtcccactgtggggtcagccagacaggccactgacacctcttggcccggctctcgggcactctctttgcagagctccacacaacagaccaaacaagagctgttggatggattcaatttctccatattcttcaaagggcacgtgcaccacaccaccaaccacgtccagtgccggtctgcgtatgaaaatgagatctgcaggatgctaactttccagcccggcactggggagaagctgttgggagtccctggttccagcctttctaactaaacccatctcctcctatgccacctgcctgggcccctcctgggactttatcactgtgccacactttttggaactactggttagaagcaccatcacctccattttgttcaactggccccccgaaaacacttcagtttactatcagcccccgcaacggtcatctttccggataaagctggccttcaggaacctctcctggcctggactgggcttggaggaccatcaggaaattgtcctaggccagttggtgcttccggagcccaacgaggccaagccagatgatcctgctccacgtcctgggcaacacgcattaacaatgccggccctggagccagcaccaccactgctggcggacctggggcctgctctggagccagagtcacctgcagccctgggtccaccaggatatctacattcagcaccagggccagcaccagcaccaggggaagggccccctccagggacagtgctggagccacagtcagccccagagtcctcctgtccctgtcgtgggtctgtaaagaaccaacccagtgaggagctgcctgacatgacgaccttccctcccaggctgctggcagagcagctgaccctcatggatgcggagctgttcaagaaggtggtgctccacgaatgcttgggctgcatctggggccaaggacatctgaaggggaatgagcacatggcacccacagttcgtgccaccatcgcacacttcaacaggctcaccaactgcatcaccacctcctgcctcggggaccacagcatgagggcccgggacagggccagggtggtggagcactggatcaaggtggccagggagtgcctaagcctcaacaacttctcctcggtgcacgtcatcgtctctgctctgtgcagcaacccaataggtcagctacacaagacgtgggcaggagtgtccagcaaaagcatgaaagagctaaaagaactctgcaaaaaagacactgcagtgaagagggacctactgatcaaggcggggagctttaaggtggccacccaggagaggaacccccagagagtccagatgaggctgcggaggcagaagaagggtgtggtccccttcctgggggattttctgactgagttacagaggctggattcggccatcccggacgacctggatggcaacaccaacaagaggagcaaggaggtccgagttctgcaggaaatgcagctgctccaagtggctgccatgaattacaggcttcggcctcttgagaaatttgtcacctatttcacaagaatggagcagctcagtgacaaagagagctacaagctgtcctgccagctggagcccgaaaacccgtaggctggcaacatcctgcagtggctgggaacccaccgggatgctggccagaacaccggctctgcaccatccctcacccagaccgtagacaccagggaaccacatctaggaggctggcagctcagctgcatcttgccctggatcctcatcaccaactgctcctgctggccaggatcaggccatgggacttttgtgagtcaggcgggagaccattttatgtttattttctttagtgtataagtaagggttttttcttaactttcgttaaaataaaattttaaaaaactattcaaaat

SEQ ID NO: 173792 - DNA, 759 bp, Homo sapiens
  Payload ID: 14128
  Gene Symbol: RGL4
  Gene Name: ral guanine nucleotide dissociation stimulator-like 4
  ENST ID: ENST00000452208
  CDS Start-End: 1-466
ctgggccagtggtatgagcacggtgccaggtggctcccgccactccctggggatccaagtgcggggtggctggggtgtaactgggggagaggaggagagcctcactgtccctgtcgctgacacctggcaggcggggagctttaaggtggccacccaggagaggaacccccagagagtccagatgaggctgcggaggcagaagaagggtgtggtccccttcctgggggattttctgactgagttacagaggctggattcggccatcccggacgacctggatggcaacaccaacaagaggagcaaggaggtccgagttctgcaggaaatgcagctgctccaagtggctgccatgaattacaggcttcggcctcttgagaaatttgtcacctatttcacaagaatggagcagctcagtgacaaagagagctacaagctgtcctgccagctggagcccgaaaacccgtaggctggcaacatcctgcagtggctgggaacccaccgggatgctggccagaacaccggctctgcaccatccctcacccagaccgtagacaccagggaaccacatctaggaggctggcagctcagctgcatcttgccctggatcctcatcaccaactgctcctgctggccaggatcaggccatgggacttttgtgagtcaggcgggagaccattttatgtttattttctttagtgtataagtaagggttttttcttaactttcgttaaaataaaattttaaaaaactattcaaaat

SEQ ID NO: 173793 - DNA, 3779 bp, Homo sapiens
  Payload ID: 14128
  Gene Symbol: RGL4
  Gene Name: ral guanine nucleotide dissociation stimulator-like 4
  ENST ID: ENST00000441897
  CDS Start-End: 1609-2916
acttcgtaggcgatgctcgagagaacaacatgttctcctgctgtatcccgacatgctgccgacctcctcgtcgcacaagaggccaaaatgagagtctttcccgagaatatagacattggttcaaccctcaccctcgacgcctctggccctttgccagaaggcacccacagctctcgggcactctctttgcagagctccacacaacagaccaaacaagagctgttggatggattcaatttctccatattcttcaaagggcacgtgcaccacaccaccaaccacgtccagtgccggtctgcggtgagattgggcacagaagggtctccacagacaggacttgtgaaaaccaagtatgaaaatgagatctgcaggatgctaactttccagcccggcactggggagaagctgttgggagtccctggttccagcctttctaactaaacccatctcctcctatgccacctgcctgggcccctcctgggactttatcactgtgccacactttttggaactactggttagaaggtgagtgtccatccccctccaagacacagaggtgcctctgtcccctactggctctgtcttgaagatgcacctctcggagcctcggttggctcctctggaacagggagtagtgagaagacgaacctcacagggttcttgtagggactcaatgatctaagacacagcaaacaaaggggtccctagagcctaaaactctggaaaatctgctgggggtgctgtgattcatgtttgttacttttctcttccccctcacttgaagcagctctcagcattctgcctcaatggcctgtatcactcactgtttggaaaaacacatagaaaccaagtctgcgatggcactggtaaaggatgtctgagattccttctggctggtctttctccttgacacagacagaagaggggtcccttggtgctgaaaaaggagccacaggcccactcagacatctggagaggctcactggggttctccaaaggttggggttcactcattcaacacatacattcaaaacacctcatttgtgcatcgctcttcttggggcttggcataatttcataaacaaagcagatgacaatcccccggccttgattctactcagagtcaggcactcacagtagacagaataaacaagtcatatctacagaatgttacaggtgagaccctcatggcctcctctacgtatggtggcatcctcccagattctgactagaatgacgcagcccagcaacaaatataaactgggtggatttagggttctgaagggccttttcacccacaaaacatgggggaaaatatgtggactctggctggggagagactaaaggagctctggggctcatacttcttataattcccacgagaaggctgacatctggggacttcccccacaagaggcaaatagtgagttctgtaaatggagacttaggtcccctgcaaagcagaggggaggctggggtcacagctggccactgagagacccatccccctcagcaccgtggcttcccagctctccctgtcctcctccccccgacatctgccccttccctcctaaccccaggaccaggggacccagatctggagctttgatgaggaagctgctcacaaatctgcctgcagctgcagtcttgagtgcccaggtgtacagtgctgtgctccagggcctttgggaagagaatgtctgtgggacgccagggcgcacgagggtctgtacagccctgctgtatggccaggtctgccccttccaggacagcactgatggcttacgcaccatcacctccattttgttcaactggccccccgaaaacacttcagtttactatcagcccccgcaacggtcatctttccggataaagctggccttcaggaacctctcctggcctggactgggcttggaggaccatcaggaaattgtcctaggccagttggtgcttccggagcccaacgaggccaagccagatgatcctgctccacgtcctgggcaacacgcattaacaatgccggccctggagccagcaccaccactgctggcggacctggggcctgctctggagccagagtcacctgcagccctgggtccaccaggatatctacattcagcaccagggccagcaccagcaccaggggaagggccccctccagggacagtgctggagccacagtcagccccagagtcctcctgtccctgtcgtgggtctgtaaagaaccaacccagtgaggagctgcctgacatgacgaccttccctcccaggctgctggcagagcagctgaccctcatggatgcggagctgttcaagaaggtggtgctccacgaatgcttgggctgcatctggggccaaggacatctgaaggggaatgagcacatggcacccacagttcgtgccaccatcgcacacttcaacaggctcaccaactgcatcaccacctcctgcctcggggaccacagcatgagggcccgggacagggccagggtggtggagcactggatcaaggtggccagggagtgcctaagcctcaacaacttctcctcggtgcacgtcatcgtctctgctctgtgcagcaacccaataggtcagctacacaagacgtgggcaggagtgtccagcaaaagcatgaaagagctaaaagaactctgcaaaaaagacactgcagtgaagagggacctactgatcaagagggatgacggtgagaacaacggcaacagctacaggaaactgagccctcagaggccctgtgaggtagctgtggtttgcatcactctttacagaagaggaaacagtctcagggaggcccggctgcaagactgggtgacacacacagggagtgtggatctgggccagtggcggggagctttaaggtggccacccaggagaggaacccccagagagtccagatgaggctgcggaggcagaagaagggtgtggtccccttcctgggggattttctgactgagttacagaggctggattcggccatcccggacgacctggatggcaacaccaacaagaggagcaaggaggtccgagttctgcaggaaatgcagctgctccaagtggctgccatgaattacaggcttcggcctcttgagaaatttgtcacctatttcacaagaatggagcagctcagtgacaaagagagatggggtttcacgatgatgtccaggatcgtctcaaactcctggcctcaagcaatccacccacctcagcctcccaaagtactgacgttacaggtgtgagccaccccacctggcctagaggaggctctcccgtggccagctgcagagagcctatggccatgcctccacggccagcatcaagccctgttgcatggggaccactggggacccaggattccagctgggcaggcactgacaggggacctgatgtgtggctcatggtggcctcacagctgcttctctgtcctgcagctacaagctgtcctgccagctggagcccgaaaacccgtaggctggcaacatcctgcagtggctgggaacccaccgggatgctggccagaacaccggctctgcaccatccctcacccagaccgtagacaccagggaaccacatctaggaggctggcagctcagctgcatcttgccctggatcctcatcaccaactgctcctgctggccaggatcaggccatgggacttttgtgagtcaggcgggagaccattttatgtttattttctttagtgtataagtaagggttttttcttaactttcgttaaaataaaattttaaaaaactattcaaaat

SEQ ID NO: 173794 - DNA, 2333 bp, Homo sapiens
  Payload ID: 14128
  Gene Symbol: RGL4
  Gene Name: ral guanine nucleotide dissociation stimulator-like 4
  ENST ID: ENST00000423392
  CDS Start-End: 726-2333
ttccttctggctggtctttctccttgacacagacagaagaggggtcccttggtgctgaaaaaggagccacaggcccactcagacatctggagaggctcactggggttctccaaaggttggggttcactcattcaacacatacattcaaaacacctcatttgtgcatcgctcttcttggggcttggcataatttcataaacaaagcagatgacaatcccccggccttgattctactcagagtcaggcactcacagtagacagaataaacaagtcatatctacagaatgttacaggtgagaccctcatggcctcctctacgtatggtggcatcctcccagattctgactagaatgacgcagcccagcaacaaatataaactgggtggatttagggttctgaagggccttttcacccacaaaacatgggggaaaatatgtggactctggctggggagagactaaaggagctctggggctcatacttcttataattcccacgagaaggctgacatctggggacttcccccacaagaggcaaatagtgagttctgtaaatggagacttaggtcccctgcaaagcagaggggaggctggggtcacagctggccactgagagacccatccccctcagcaccgtggcttcccagctctccctgtcctcctccccccgacatctgccccttccctcctaaccccaggaccaggggacccagatctggagctttgatgaggaagctgctcacaaatctgcctgcagctgcagtcttgagtgcccaggtgtacagtgctgtgctccagggcctttgggaagagaatgtctgtgggacgccagggcgcacgagggtctgtacagccctgctgtatggccaggtctgccccttccaggacagcactgatggcttacgcaccatcacctccattttgttcaactggccccccgaaaacacttcagtttactatcagcccccgcaacggtcatctttccggataaagctggccttcaggaacctctcctggcctggactgggcttggaggaccatcaggaaattgtcctaggccagttggtgcttccggagcccaacgaggccaagccagatgatcctgctccacgtcctgggcaacacgcattaacaatgccggccctggagccagcaccaccactgctggcggacctggggcctgctctggagccagagtcacctgcagccctgggtccaccaggatatctacattcagcaccagggccagcaccagcaccaggggaagggccccctccagggacagtgctggagccacagtcagccccagagtcctcctgtccctgtcgtgggtctgtaaagaaccaacccagtgaggagctgcctgacatgacgaccttccctcccaggctgctggcagagcagctgaccctcatggatgcggagctgttcaagaaggtggtgctccacgaatgcttgggctgcatctggggccaaggacatctgaaggggaatgagcacatggcacccacagttcgtgccaccatcgcacacttcaacaggctcaccaactgcatcaccacctcctgcctcggggaccacagcatgagggcccgggacagggccagggtggtggagcactggatcaaggtggccagggagtgcctaagcctcaacaacttctcctcggtgcacgtcatcgtctctgctctgtgcagcaacccaataggtcagctacacaagacgtgggcaggagtgtccagcaaaagcatgaaagagctaaaagaactctgcaaaaaagacactgcagtgaagagggacctactgatcaaggcggggagctttaaggtggccacccaggagaggaacccccagagagtccagatgaggctgcggaggcagaagaagggtgtggtccccttcctgggggattttctgactgagttacagaggctggattcggccatcccggacgacctggatggcaacaccaacaagaggagcaaggaggtccgagttctgcaggaaatgcagctgctccaagtggctgccatgaattacaggcttcggcctcttgagaaatttgtcacctatttcacaagaatggagcagctcagtgacaaagagagatggggtttcacgatgatgtccaggatcgtctcaaactcctggcctcaagcaatccacccacctcagcctcccaaagtactgacgttacagctacaagctgtcctgccagctggagcccgaaaacccgtaggctggcaacatcctgcagtggctgggaacccaccgggatgctggccagaacaccggctctgcaccatccctcacccagaccgtagacaccaggga

SEQ ID NO: 173795 - DNA, 3014 bp, Homo sapiens
  Payload ID: 14128
  Gene Symbol: RGL4
  Gene Name: ral guanine nucleotide dissociation stimulator-like 4
  ENST ID: ENST00000615003
  CDS Start-End: 1579-2811
taaacccatctcctcctatgccacctgcctgggcccctcctgggactttatcactgtgccacactttttggaactactggttagaaggtgagtgtccatccccctccaagacacagaggtgcctctgtcccctactggctctgtcttgaagatgcacctctcggagcctcggttggctcctctggaacagggagtagtgagaagacgaacctcacagggttcttgtagggactcaatgatctaagacacagcaaacaaaggggtccctagagcctaaaactctggaaaatctgctgggggtgctgtgattcatgtttgttacttttctcttccccctcacttgaagcagctctcagcattctgcctcaatggcctgtatcactcactgtttggaaaaacacatagaaaccaagtctgcgatggcactggtaaaggatgtctgagattccttctggctggtctttctccttgacacagacagaagaggggtcccttggtgctgaaaaaggagccacaggcccactcagacatctggagaggctcactggggttctccaaaggttggggttcactcattcaacacatacattcaaaacacctcatttgtgcatcgctcttcttggggcttggcataatttcataaacaaagcagatgacaatcccccggccttgattctactcagagtcaggcactcacagtagacagaataaacaagtcatatctacagaatgttacaggtgagaccctcatggcctcctctacgtatggtggcatcctcccagattctgactagaatgacgcagcccagcaacaaatataaactgggtggatttagggttctgaagggccttttcacccacaaaacatgggggaaaatatgtggactctggctggggagagactaaaggagctctggggctcatacttcttataattcccacgagaaggctgacatctggggacttcccccacaagaggcaaatagtgagttctgtaaatggagacttaggtcccctgcaaagcagaggggaggctggggtcacagctggccactgagagacccatccccctcagcaccgtggcttcccagctctccctgtcctcctccccccgacatctgccccttccctcctaaccccaggaccaggggacccagatctggagctttgatgaggaagctgctcacaaatctgcctgcagctgcagtcttgagtgcccaggtgtacagtgctgtgctccagggcctttgggaagagaatgtctgtgggacgccagggcgcacgagggtctgtacagccctgctgtatggccaggtctgccccttccaggacagcactgatggcttacgcaccatcacctccattttgttcaactggccccccgaaaacacttcagtttactatcagcccccgcaacggtcatctttccggataaagctggccttcaggaacctctcctggcctggactgggcttggaggaccatcaggaaattgtcctaggccagttggtgcttccggagcccaacgaggccaagccagatgatcctgctccacgtcctgggcaacacgcattaacaatgccggccctggagccagcaccaccactgctggcggacctggggcctgctctggagccagagtcacctgcagccctgggtccaccaggatatctacattcagcaccagggccagcaccagcaccaggggaagggccccctccagggacagtgctggagccacagtcagccccagagtcctcctgtccctgtcgtgggtctgtaaagaaccaacccagtgaggagctgcctgacatgacgaccttccctcccaggctgctggcagagcagctgaccctcatggatgcggagctgttcaagaaggtggtgctccacgaatgcttgggctgcatctggggccaaggacatctgaaggggaatgagcacatggcacccacagttcgtgccaccatcgcacacttcaacaggctcaccaactgcatcaccacctcctgcctcggggaccacagcatgagggcccgggacagggccagggtggtggagcactggatcaaggtggccagggagtgcctaagcctcaacaacttctcctcggtgcacgtcatcgtctctgctctgtgcagcaacccaataggtcagctacacaagacgtgggcaggagtgtccagcaaaagcatgaaagagctaaaagaactctgcaaaaaagacactgcagtgaagagggacctactgatcaaggcggggagctttaaggtggccacccaggagaggaacccccagagagtccagatgaggctgcggaggcagaagaagggtgtggtccccttcctgggggattttctgactgagttacagaggctggattcggccatcccggacgacctggatggcaacaccaacaagaggagcaaggaggtccgagttctgcaggaaatgcagctgctccaagtggctgccatgaattacaggcttcggcctcttgagaaatttgtcacctatttcacaagaatggagcagctcagtgacaaagagaggctgcactgcagtgtcaccatctctgttcactgcaacgtctgccttctgggctcaagtccttcctcagcctcccaagcagctgggactaccgctgtacaccaccatgtccggttgttctgctgttgttgttctgctacaagctgtcctgccagctggagcccgaaaacccgtaggctggcaacatcctgcagtggctgggaacccaccgggatgctggccagaacaccggctctgcaccatccctcacccagaccgtagacaccagggaaccacatctaggaggctggcagctcagctgcatcttgccctggatcctcatcaccaactgctcctgctggccaggatcaggccatgggacttttgtgagtcaggcgggagaccattttatgtttattttctttagtgtataagtaagggttttttcttaactttcgttaaaataaaattttaaaaaactattc

SEQ ID NO: 173796 - DNA, 2649 bp, Homo sapiens
  Payload ID: 14128
  Gene Symbol: RGL4
  Gene Name: ral guanine nucleotide dissociation stimulator-like 4
  ENST ID: ENST00000612432
  CDS Start-End: 1579-2649
taaacccatctcctcctatgccacctgcctgggcccctcctgggactttatcactgtgccacactttttggaactactggttagaaggtgagtgtccatccccctccaagacacagaggtgcctctgtcccctactggctctgtcttgaagatgcacctctcggagcctcggttggctcctctggaacagggagtagtgagaagacgaacctcacagggttcttgtagggactcaatgatctaagacacagcaaacaaaggggtccctagagcctaaaactctggaaaatctgctgggggtgctgtgattcatgtttgttacttttctcttccccctcacttgaagcagctctcagcattctgcctcaatggcctgtatcactcactgtttggaaaaacacatagaaaccaagtctgcgatggcactggtaaaggatgtctgagattccttctggctggtctttctccttgacacagacagaagaggggtcccttggtgctgaaaaaggagccacaggcccactcagacatctggagaggctcactggggttctccaaaggttggggttcactcattcaacacatacattcaaaacacctcatttgtgcatcgctcttcttggggcttggcataatttcataaacaaagcagatgacaatcccccggccttgattctactcagagtcaggcactcacagtagacagaataaacaagtcatatctacagaatgttacaggtgagaccctcatggcctcctctacgtatggtggcatcctcccagattctgactagaatgacgcagcccagcaacaaatataaactgggtggatttagggttctgaagggccttttcacccacaaaacatgggggaaaatatgtggactctggctggggagagactaaaggagctctggggctcatacttcttataattcccacgagaaggctgacatctggggacttcccccacaagaggcaaatagtgagttctgtaaatggagacttaggtcccctgcaaagcagaggggaggctggggtcacagctggccactgagagacccatccccctcagcaccgtggcttcccagctctccctgtcctcctccccccgacatctgccccttccctcctaaccccaggaccaggggacccagatctggagctttgatgaggaagctgctcacaaatctgcctgcagctgcagtcttgagtgcccaggtgtacagtgctgtgctccagggcctttgggaagagaatgtctgtgggacgccagggcgcacgagggtctgtacagccctgctgtatggccaggtctgccccttccaggacagcactgatggcttacgcaccatcacctccattttgttcaactggccccccgaaaacacttcagtttactatcagcccccgcaacggtcatctttccggataaagctggccttcaggaacctctcctggcctggactgggcttggaggaccatcaggaaattgtcctaggccagttggtgcttccggagcccaacgaggccaagccagatgatcctgctccacgtcctgggcaacacgcattaacaatgccggccctggagccagcaccaccactgctggcggacctggggcctgctctggagccagagtcacctgcagccctgggtccaccaggatatctacattcagcaccagggccagcaccagcaccaggggaagggccccctccagggacagtgctggagccacagtcagccccagagtcctcctgtccctgtcgtgggtctgtaaagaaccaacccagtgaggagctgcctgacatgacgaccttccctcccaggctgctggcagagcagctgaccctcatggatgcggagctgttcaagaaggtggtgctccacgaatgcttgggctgcatctggggccaaggacatctgaaggggaatgagcacatggcacccacagttcgtgccaccatcgcacacttcaacaggctcaccaactgcatcaccacctcctgcctcggggaccacagcatgagggcccgggacagggccagggtggtggagcactggatcaaggtggccagggagtgcctaagcctcaacaacttctcctcggtgcacgtcatcgtctctgctctgtgcagcaacccaataggtcagctacacaagacgtgggcaggagtgtccagcaaaagcatgaaagagctaaaagaactctgcaaaaaagacactgcagtgaagagggacctactgatcaaggcggggagctttaaggtggccacccaggagaggaacccccagagagtccagatgaggctgcggaggcagaagaagggtgtggtccccttcctgggggattttctgactgagttacagaggctggattcggccatcccggacgacctggatggcaacaccaacaagaggagcaaggaggtccgagttctgcaggaaatgcagctgctccaagtggctgccatgaattacaggcttcggcctcttgagaaatttgtcacctatttcacaagaatggagcagctcagtgacaaagagagatggggtttcacgatgatgtccaggatcgtctcaaactcctggcctcaagcaatccacccacctcagcctcccaaagtactgacgttacaggtgtga

SEQ ID NO: 173797 - DNA, 4368 bp, Homo sapiens
  Payload ID: 14129
  Gene Symbol: RALBP1
  Gene Name: ralA binding protein 1
  Uniprot ID: Q15311
  ENST ID: ENST00000019317
  CDS Start-End: 224-2191
agtctggtttaactggttggaacgactaaagcacgctggcgcaaggaaagctctcaacttcgggagctgaggcgcaggctggccagagcgtggagaggaaagccctttccatcctcaaggccgttgcaggagatgcccgcgagccaccttcgccagcaccacaccggggtgtaatggataggtaacagagaagacctcgtcccttcctagtcagggcatcagcatgactgagtgcttcctgccccccaccagcagccccagtgaacaccgcagggtggagcatggcagcgggcttacccggacccccagctctgaagagatcagccctactaagtttcctggattgtaccgcactggcgagccctcacctccccatgacatcctccatgagcctcctgatgtagtgtctgatgatgagaaagatcatgggaagaaaaaagggaaatttaagaaaaaggaaaagaggactgaaggctatgcagcctttcaggaagatagctctggagatgaggcagaaagtccttctaaaatgaagaggtccaagggaatccatgttttcaagaagcccagcttttctaaaaagaaggaaaaggattttaaaataaaagagaaacccaaagaagaaaagcataaagaagaaaagcacaaagaagaaaaacataaagagaagaagtcaaaagacttgacagcagctgatgttgttaaacagtggaaggaaaagaagaaaaagaaaaagccaattcaggagccagaggtgcctcagattgatgttccaaatctcaaacccatttttggaattcctttggctgatgcagtagagaggaccatgatgtatgatggcattcggctgccagccgttttccgtgaatgtatagattacgtagagaagtatggcatgaagtgtgaaggcatctacagagtatcaggaattaaatcaaaggtggatgagctaaaagcagcctatgaccgggaggagtctacaaacttggaagactatgagcctaacactgtagccagtttgctgaagcagtatttgcgagaccttccagagaatttgcttaccaaagagcttatgcccagatttgaagaggcttgtgggaggaccacggagactgagaaagtgcaggaattccagcgtttactcaaagaactgccagaatgtaactatcttctgatttcttggctcattgtgcacatggaccatgtcattgcaaaggaactggaaacaaaaatgaatatacagaacatttctatagtgctcagcccaactgtgcagatcagcaatcgagtcctgtatgtgtttttcacacatgtgcaagaactctttggaaatgtggtactaaagcaagtgatgaaacctctgcgatggtctaacatggccacgatgcccacgctgccagagacccaggcgggcatcaaggaggagatcaggagacaggagtttcttttgaattgtttacatcgagatctgcagggtgggataaaggatttgtctaaagaagaaagattatgggaagtacaaagaattttgacagccctcaaaagaaaactgagagaagctaaaagacaggagtgtgaaaccaagattgcacaagagatagccagtctttcaaaagaggatgtttccaaagaagagatgaatgaaaatgaagaagttataaatattctccttgctcaggagaatgagatcctgactgaacaggaggagctcctggccatggagcagtttctgcgccggcagattgcctcagaaaaagaagagattgaacgcctcagagctgagattgctgaaattcagagtcgccagcagcacggccgaagtgagactgaggagtactcctccgagagcgagagcgagagtgaggatgaggaggagctgcagatcattctggaagacttacagagacagaacgaagagctggaaataaagaacaatcatttgaatcaagcaattcatgaggagcgcgaggccatcatcgagctgcgcgtgcagctgcggctgctccagatgcagcgagccaaggccgagcagcaggcgcaggaggacgaggagcctgagtggcgcgggggtgccgtccagccgcccagagacggcgtccttgagccaaaagcagctaaagagcagccaaaggcaggcaaggagccggcaaagccatcgcccagcagggataggaaggagacgtccatctgagcagcctgcgtggccgtctggagtccgtgagactgaaaggacccgtgcatcttactgtaacccgggggccaggccggctctctcgctgtacattctgtaaaggtgtcttctcttctcagactcttcctctgtcacacgtctgactccttcacgtcaggctcaggttccatgggaggacgaagcagtggacgcattgtgggctttagggacagatgagttttccagatagtgtcagcttatttgaagattaattttctttgttaacttaaaataactattttaacccttgagtggcttctttttaaaccaaaaaccgtctttctttgcttttttatcacagcagaatcaggatctctttctcattcaaggggggaaccaccccaggtcagcgctgcgcctgctgtggccgccgcgagccacgccctctgggatctctggtaccgtcactcttgcttgtgccttccacaccttctcggtgcagatccctatgggggagctgcctcacgttctctgactggtcagagcagcgcctggtgggtgttccctggcccactctcctctctccttctgcagttctaaaccacagtctataagcccgagtcaccaggacggcctgtctggccacagacaggggctgcctgtggagcctgcccaccggcccccggcagtgcagtccagcggggaggaggctgcccgttcctgccagttcctcactgcggggaccagcaaaggccttctcactgggttggtcaaaggtagtcaccttggcctggtgcatccacagaggatgttgttcaaaccagaaatcttttaaacgactgaccttccttaaaaacagaatgactccgattgcttgcttgggctagaatgtacacgtctccttgcctgaataagccatatatatgctcttaaacaaaagtttgaaattatccatatcatctcagtgaacctactggtggactcccaattgacaagattgagcaatagaaaaaaattcctttcctttgaatgatagctgtgattcaccccaccccattttcttgtttctggtccatccgatgagacggatgctctgatgctctgaggcttctgggaggctgggccctggaggcaacgtgctgcaggcgcactctgtcagagtgaacagcaccgcgagacaggccaggctcgtggctcggaagacaaaccccacacacactcaaggggtcgaaaacaaaccccacacgagggctctcacctccttctcctaggtagtatttattttcagcacctgtttgatgcagtttttaatcctctacctattgcactgttgtgactcgttggccattatttgatttttgtacgaaaaaaagctttgttatagaaatcagcatactatttttttaaatctggagagaagatattctggtgactgaaagtatggtcgggtgtcagatataaatgtgcaaatgccttcttgctgtcctgtcggtctcagtacgttcactttatagctgctggcaatatcgaaggttccttttttgtttgtgtaaactctaatttctatcaaggtgtcatggatttttaaaattagtatttcattacaaatgtctcagcattggttaactaatttttgccaggaccattattgatcaagcaaataaattcaacagccatttgggaaaaagaaaagcttctagtttttttgtacacattctttctgtgaggagattgagtactctgcagctggcgaggagttggttgaggcacttcttcaaggccaagggggaacacagtgttttgtttccagctcactttgtacccctcacctctgcagacacggggagaaccccggacccctggcatgcatgctggcggcggcatgcctcccttccacaagcccatgctgctgcagagggagcctgtgtttgcaaaacccagtggactgggctgggtctgctgtctgagcagctcctggctccggtgggaactgcacacaagtccactggcctggcttggccccaggcattgcaattgacagacatttgcatttcatacggtaaatgaggactcagcacagccaaccataatcagcatgtctgggatagactggtctagaataaaaatgaagtttccattgctttgtttgctttaaaaattccacaattaaaatatctgtcattgaaagcttagacaaa

SEQ ID NO: 173798 - DNA, 4224 bp, Homo sapiens
  Payload ID: 14129
  Gene Symbol: RALBP1
  Gene Name: ralA binding protein 1
  Uniprot ID: Q15311
  ENST ID: ENST00000383432
  CDS Start-End: 78-2045
ggtcgcgcggcggcaggcacaggtgtaatggataggtaacagagaagacctcgtcccttcctagtcagggcatcagcatgactgagtgcttcctgccccccaccagcagccccagtgaacaccgcagggtggagcatggcagcgggcttacccggacccccagctctgaagagatcagccctactaagtttcctggattgtaccgcactggcgagccctcacctccccatgacatcctccatgagcctcctgatgtagtgtctgatgatgagaaagatcatgggaagaaaaaagggaaatttaagaaaaaggaaaagaggactgaaggctatgcagcctttcaggaagatagctctggagatgaggcagaaagtccttctaaaatgaagaggtccaagggaatccatgttttcaagaagcccagcttttctaaaaagaaggaaaaggattttaaaataaaagagaaacccaaagaagaaaagcataaagaagaaaagcacaaagaagaaaaacataaagagaagaagtcaaaagacttgacagcagctgatgttgttaaacagtggaaggaaaagaagaaaaagaaaaagccaattcaggagccagaggtgcctcagattgatgttccaaatctcaaacccatttttggaattcctttggctgatgcagtagagaggaccatgatgtatgatggcattcggctgccagccgttttccgtgaatgtatagattacgtagagaagtatggcatgaagtgtgaaggcatctacagagtatcaggaattaaatcaaaggtggatgagctaaaagcagcctatgaccgggaggagtctacaaacttggaagactatgagcctaacactgtagccagtttgctgaagcagtatttgcgagaccttccagagaatttgcttaccaaagagcttatgcccagatttgaagaggcttgtgggaggaccacggagactgagaaagtgcaggaattccagcgtttactcaaagaactgccagaatgtaactatcttctgatttcttggctcattgtgcacatggaccatgtcattgcaaaggaactggaaacaaaaatgaatatacagaacatttctatagtgctcagcccaactgtgcagatcagcaatcgagtcctgtatgtgtttttcacacatgtgcaagaactctttggaaatgtggtactaaagcaagtgatgaaacctctgcgatggtctaacatggccacgatgcccacgctgccagagacccaggcgggcatcaaggaggagatcaggagacaggagtttcttttgaattgtttacatcgagatctgcagggtgggataaaggatttgtctaaagaagaaagattatgggaagtacaaagaattttgacagccctcaaaagaaaactgagagaagctaaaagacaggagtgtgaaaccaagattgcacaagagatagccagtctttcaaaagaggatgtttccaaagaagagatgaatgaaaatgaagaagttataaatattctccttgctcaggagaatgagatcctgactgaacaggaggagctcctggccatggagcagtttctgcgccggcagattgcctcagaaaaagaagagattgaacgcctcagagctgagattgctgaaattcagagtcgccagcagcacggccgaagtgagactgaggagtactcctccgagagcgagagcgagagtgaggatgaggaggagctgcagatcattctggaagacttacagagacagaacgaagagctggaaataaagaacaatcatttgaatcaagcaattcatgaggagcgcgaggccatcatcgagctgcgcgtgcagctgcggctgctccagatgcagcgagccaaggccgagcagcaggcgcaggaggacgaggagcctgagtggcgcgggggtgccgtccagccgcccagagacggcgtccttgagccaaaagcagctaaagagcagccaaaggcaggcaaggagccggcaaagccatcgcccagcagggataggaaggagacgtccatctgagcagcctgcgtggccgtctggagtccgtgagactgaaaggacccgtgcatcttactgtaacccgggggccaggccggctctctcgctgtacattctgtaaaggtgtcttctcttctcagactcttcctctgtcacacgtctgactccttcacgtcaggctcaggttccatgggaggacgaagcagtggacgcattgtgggctttagggacagatgagttttccagatagtgtcagcttatttgaagattaattttctttgttaacttaaaataactattttaacccttgagtggcttctttttaaaccaaaaaccgtctttctttgcttttttatcacagcagaatcaggatctctttctcattcaaggggggaaccaccccaggtcagcgctgcgcctgctgtggccgccgcgagccacgccctctgggatctctggtaccgtcactcttgcttgtgccttccacaccttctcggtgcagatccctatgggggagctgcctcacgttctctgactggtcagagcagcgcctggtgggtgttccctggcccactctcctctctccttctgcagttctaaaccacagtctataagcccgagtcaccaggacggcctgtctggccacagacaggggctgcctgtggagcctgcccaccggcccccggcagtgcagtccagcggggaggaggctgcccgttcctgccagttcctcactgcggggaccagcaaaggccttctcactgggttggtcaaaggtagtcaccttggcctggtgcatccacagaggatgttgttcaaaccagaaatcttttaaacgactgaccttccttaaaaacagaatgactccgattgcttgcttgggctagaatgtacacgtctccttgcctgaataagccatatatatgctcttaaacaaaagtttgaaattatccatatcatctcagtgaacctactggtggactcccaattgacaagattgagcaatagaaaaaaattcctttcctttgaatgatagctgtgattcaccccaccccattttcttgtttctggtccatccgatgagacggatgctctgatgctctgaggcttctgggaggctgggccctggaggcaacgtgctgcaggcgcactctgtcagagtgaacagcaccgcgagacaggccaggctcgtggctcggaagacaaaccccacacacactcaaggggtcgaaaacaaaccccacacgagggctctcacctccttctcctaggtagtatttattttcagcacctgtttgatgcagtttttaatcctctacctattgcactgttgtgactcgttggccattatttgatttttgtacgaaaaaaagctttgttatagaaatcagcatactatttttttaaatctggagagaagatattctggtgactgaaagtatggtcgggtgtcagatataaatgtgcaaatgccttcttgctgtcctgtcggtctcagtacgttcactttatagctgctggcaatatcgaaggttccttttttgtttgtgtaaactctaatttctatcaaggtgtcatggatttttaaaattagtatttcattacaaatgtctcagcattggttaactaatttttgccaggaccattattgatcaagcaaataaattcaacagccatttgggaaaaagaaaagcttctagtttttttgtacacattctttctgtgaggagattgagtactctgcagctggcgaggagttggttgaggcacttcttcaaggccaagggggaacacagtgttttgtttccagctcactttgtacccctcacctctgcagacacggggagaaccccggacccctggcatgcatgctggcggcggcatgcctcccttccacaagcccatgctgctgcagagggagcctgtgtttgcaaaacccagtggactgggctgggtctgctgtctgagcagctcctggctccggtgggaactgcacacaagtccactggcctggcttggccccaggcattgcaattgacagacatttgcatttcatacggtaaatgaggactcagcacagccaaccataatcagcatgtctgggatagactggtctagaataaaaatgaagtttccattgctttgtttgctttaaaaattccacaattaaaatatctgtcattgaaagcttagacaaaca

SEQ ID NO: 173799 - DNA, 836 bp, Homo sapiens
  Payload ID: 14129
  Gene Symbol: RALBP1
  Gene Name: ralA binding protein 1
  ENST ID: ENST00000458039
  CDS Start-End: 216-836
ctcctggtgtcgcccaccgctggcactgagcagtgggcgcctttgggtgctgcgatccttccttcaggtttcagtgggaatggacagacagatctgaagttgaaaattcttttcacaactcatgttcaactatgtgtgttgtcagaatgctcttaatgaggtgtaatggataggtaacagagaagacctcgtcccttcctagtcagggcatcagcatgactgagtgcttcctgccccccaccagcagccccagtgaacaccgcagggtggagcatggcagcgggcttacccggacccccagctctgaagagatcagccctactaagtttcctggattgtaccgcactggcgagccctcacctccccatgacatcctccatgagcctcctgatgtagtgtctgatgatgagaaagatcatgggaagaaaaaagggaaatttaagaaaaaggaaaagaggactgaaggctatgcagcctttcaggaagatagctctggagatgaggcagaaagtccttctaaaatgaagaggtccaagggaatccatgttttcaagaagcccagcttttctaaaaagaaggaaaaggattttaaaataaaagagaaacccaaagaagaaaagcataaagaagaaaagcacaaagaagaaaaacataaagagaagaagtcaaaagacttgacagcagctgatgttgttaaacagtggaaggaaaagaagaaaaagaaaaagccaattcaggagccagaggtgcctcagattgatgttccaaatctcaaacccatttttggaattcctttggctgatgcagtagagaggaccatgatgtatgatggcatt

SEQ ID NO: 173800 - DNA, 503 bp, Homo sapiens
  Payload ID: 14129
  Gene Symbol: RALBP1
  Gene Name: ralA binding protein 1
  ENST ID: ENST00000577221
  CDS Start-End: 493-503
gtcgcccaccgctggcactgagcagtgggcgcctttgggtgctgcgatccttccttcaggtttcagtgggaatggacagacagatctgaagttgaaaattcttttcacaactcatgttcaactatgtgtgttgtcagaatgctcttaatgaggttggagtgcaatggcatgatctcagctcaccacagcctctgcctcctgggttcaaacgattctgctgcctcagcctcctgaggggattacaggcatgcgccatcacgcccggctaattttatatttttagtagagacattttctccatgttggtcaggctggtcttgaactcccgacctcaggtgatctgcccgcctaggcctcccaaagcgctgggattacaggcgtgtgccaccgcgccctgccaacagtagtagcttttgagaagtgactctttaaacaaggtgtaatggataggtaacagagaagacctcgtcccttcctagtcagggcatcagcatgactgagtg

SEQ ID NO: 173801 - DNA, 777 bp, Homo sapiens
  Payload ID: 14129
  Gene Symbol: RALBP1
  Gene Name: ralA binding protein 1
  ENST ID: ENST00000585015
  CDS Start-End: 220-777
gcggcggcagcgtgagcgcgaggaggcggaggctgcggcggggcggacggtcgcgcggcggcaggcacagagatggagttttgctgtgttgcccaggctggtcttaaactttgagctcaggcagtccaccctcctcggcctcctaaagtgctgggattacacgtgtgtaatggataggtaacagagaagacctcgtcccttcctagtcagggcatcagcatgactgagtgcttcctgccccccaccagcagccccagtgaacaccgcagggtggagcatggcagcgggcttacccggacccccagctctgaagagatcagccctactaagtttcctggattgtaccgcactggcgagccctcacctccccatgacatcctccatgagcctcctgatgtagtgtctgatgatgagaaagatcatgggaagaaaaaagggaaatttaagaaaaaggaaaagaggactgaaggctatgcagcctttcaggaagatagctctggagatgaggcagaaagtccttctaaaatgaagaggtccaagggaatccatgttttcaagaagcccagcttttctaaaaagaaggaaaaggattttaaaataaaagagaaacccaaagaagaaaagcataaagaagaaaagcacaaagaagaaaaacataaagagaagaagtcaaaagacttgacagcagctgatgttgttaaacagtggaaggaaaagaagaaaaagaaaaagccaattcaggagccagaggtgcctcagattgatgttccaaatctc

SEQ ID NO: 173802 - DNA, 3161 bp, Homo sapiens
  Payload ID: 14130
  Gene Symbol: REPS1
  Gene Name: RALBP1 associated Eps domain containing 1
  Uniprot ID: Q96D71
  ENST ID: ENST00000258062
  CDS Start-End: 580-2967
ccgccgctgtcactgttggtgcgggcgcgtcggggccgggccggggcactgtaaatggcggcggagggaggcggagcggcggccacgctcagcccagatcccccgaaactttaggttcgaagccccacaactttccgggaagcgctgccgctccggaggcgtggacggaaggggaagccgaggcgggaagtctgggggaatcggcagggagccggggagactcgaacccgcggcgggggcggagtccgccagtgcctcgcgcctccgcggcccccgcctctttctctgcaccctccccgcggccggagccggagccggagccggagccgtagtcgcagccgcagccgcagccgcgcgccgggcctcgcaggcagcggcgcggcgagcgcagccgggccccctcctcgcgacctccgggccctgttgctcgggcgcacctggcgcgtgtgaggccggggccggcgttttcgggaagctagcaggaggccgggccacgcgcagcccctgccggcccaggttcctggggccgggccccgagtagtgcatgcggggcggggcggccgtgagccggaggcgaagatggaaggcttaacgctgagcgatgcggagcagaaatactattcagatctcttctcctactgcgacattgagagcaccaagaaggtggtggtcaacgggcgggtgctggagctgttccgggccgcgcagctgccgaacgacgtggtcctacagatcatggagctttgtggtgcaacaagacttggttattttggaagaagtcagttctacattgctttgaaacttgtagctgttgcccagtctggtttccctttaagagtggaaagtataaatacagtaaaggaccttcctctgccaagatttgttgcttcaaagaatgaacaggaatctcgccatgcagcctcatattcttcagattctgaaaatcaagggtcgtattctggtgtaattcccccaccacctggcagggggcaagtgaaaaagggatccgtaagccatgatacggttcagcctcgtacatctgcagatgcacaggaacctgcatccccagtagtttcaccacagcaatccccaccaacttctccacacacatggaggaagcacagccgtcatcccagcggtgggaatagtgagaggcctctcgcgggacctgggccattttggtctccctttggtgaagcacaatcaggttcttctgctggtgatgcagtgtggtcagggcattccccacctccacctcaagaaaactgggtcagttttgcagatactccaccaaccagtactcttttaaccatgcatcctgcttctgtccaggaccagacaacagtacgaactgtagcatcagctacaactgccattgaaattcgtaggcaatccagtagttatgatgatccctggaaaataacagatgaacaaagacagtattatgtaaatcagtttaaaaccattcagcctgatctaaacggatttattccaggatctgcagctaaagagttttttacaaaatcaaaacttcctattcttgaactttctcatatttgggaactctcagactttgataaagatggtgcattgacactggatgagttttgtgctgcttttcatctggtggttgctaggaagaatggctatgatttaccagaaaaacttcctgaaagcttaatgcccaaactgattgatttggaagattcagcagatgttggggatcagccaggtgaggtaggttattcaggctctcctgctgaagctcctccaagcaagtcaccatcgatgccatcactaaaccagacatggcctgagctgaatcagagcagtgagcagtgggagacatttagtgaacgctcttcaagctcacaaactctgacccaatttgattctaacattgcaccagctgatcctgatactgctattgttcatccagttcccattcgtatgactccaagcaaaatccacatgcaggaaatggaacttaaaagaactggcagcgatcatacaaatcccactagcccattacttgtgaaaccatctgaccttttagaagaaaataagataaattcatcggtgaaattcgcttctggtaatactgtagatggttacagtagttcagactcttttacttctgacccagaacagatcgggagcaatgtaactcgtcaaaggtctcattcaggaacgtcgcctgataacactgcaccaccacctccccctccaaggccacagccctctcattctagatcatcatctttagatatgaatcggacctttacagtcaccacaggacaacaacaggctggagttgttgcccatcctcctgcagtgcctccaagaccacagccctcacaggctcctggtcctgctgtgcatcgcccagtggatgccgatggcctcataactcacactagtacctcacctcagcagataccagagcaaccaaattttgcagatttcagtcagtttgaagtatttgctgcatcaaatgtaaacgacgaacaagatgatgaagccgagaaacatccagaagtcctgccggctgaaaaagcttctgatcctgcaagttctcttcgagttgccaaaacagatagtaaaactgaagaaaagacagctgctagtgctcctgccaatgtgagcaaaggcacaacaccacttgctccaccacctaaacctgttcgaagaagattaaaatcagaagatgaattaaggccagaagttgatgaacatacacaaaagacgggtgtcttagctgctgttcttgcatcacaaccttctattcccagatctgttgggaaagataagaaagctattcaggcatcaattagacgtaataaggaaaccaacaccgttttggccagattgaatagcgaattgcagcaacaattaaaggatgttcttgaggagagaatttccctggaagttcaactggaacaacttcgaccattctctcacctataagccaattgccgttaactgtgaacatacttgtttttaagtggttttgggttcaaagccaatttggagacctagacattcagctcactgcttaactcaacattaaattttatgattctgttttgccctatatgttcaccgttgtatttaagtatcttttattttttaatttcgacaataaaaaggtcaggatggcg

SEQ ID NO: 173803 - DNA, 2607 bp, Homo sapiens
  Payload ID: 14130
  Gene Symbol: REPS1
  Gene Name: RALBP1 associated Eps domain containing 1
  Uniprot ID: Q96D71
  ENST ID: ENST00000367663
  CDS Start-End: 94-2403
ccgggccacgcgcagcccctgccggcccaggttcctggggccgggccccgagtagtgcatgcggggcggggcggccgtgagccggaggcgaagatggaaggcttaacgctgagcgatgcggagcagaaatactattcagatctcttctcctactgcgacattgagagcaccaagaaggtggtggtcaacgggcgggtgctggagctgttccgggccgcgcagctgccgaacgacgtggtcctacagatcatggagctttgtggtgcaacaagacttggttattttggaagaagtcagttctacattgctttgaaacttgtagctgttgcccagtctggtttccctttaagagtggaaagtataaatacagtaaaggaccttcctctgccaagatttgttgcttcaaagaatgaacaggaatctcgccatgcagcctcatattcttcagattctgaaaatcaagggtcgtattctggtgtaattcccccaccacctggcagggggcaagtgaaaaagggatccgtaagccatgatacggttcagcctcgtacatctgcagatgcacaggaacctgcatccccagtagtttcaccacagcaatccccaccaacttctccacacacatggaggaagcacagccgtcatcccagcggtgggaatagtgagaggcctctcgcgggacctgggccattttggtctccctttggtgaagcacaatcaggttcttctgctggtgatgcagtgtggtcagggcattccccacctccacctcaagaaaactgggtcagttttgcagatactccaccaaccagtactcttttaaccatgcatcctgcttctgtccaggaccagacaacagtacgaactgtagcatcagctacaactgccattgaaattcgtaggcaatccagtagttatgatgatccctggaaaataacagatgaacaaagacagtattatgtaaatcagtttaaaaccattcagcctgatctaaacggatttattccaggatctgcagctaaagagttttttacaaaatcaaaacttcctattcttgaactttctcatatttgggaactctcagactttgataaagatggtgcattgacactggatgagttttgtgctgcttttcatctggtggttgctaggaagaatggctatgatttaccagaaaaacttcctgaaagcttaatgcccaaactgattgatttggaagattcagcagatgttggggatcagccaggtgaggtaggttattcaggctctcctgctgaagctcctccaagcaagtcaccatcgatgccatcactaaaccagacatggcctgagctgaatcagagcagtgaggatactgctattgttcatccagttcccattcgtatgactccaagcaaaatccacatgcaggaaatggaacttaaaagaactggcagcgatcatacaaatcccactagcccattacttgtgaaaccatctgaccttttagaagaaaataagataaattcatcggtgaaattcgcttctggtaatactgtagcagatggttacagtagttcagactcttttacttctgacccagaacagatcgggagcaatgtaactcgtcaaaggtctcattcaggaacgtcgcctgataacactgcaccaccacctccccctccaaggccacagccctctcattctagatcatcatctttagatatgaatcggacctttacagtcaccacaggacaacaacaggctggagttgttgcccatcctcctgcagtgcctccaagaccacagccctcacaggctcctggtcctgctgtgcatcgcccagtggatgccgatggcctcataactcacactagtacctcacctcagcagataccagagcaaccaaattttgcagatttcagtcagtttgaagtatttgctgcatcaaatgtaaacgacgaacaagatgatgaagccgagaaacatccagaagtcctgccggctgaaaaagcttctgatcctgcaagttctcttcgagttgccaaaacagatagtaaaactgaagaaaagacagctgctagtgctcctgccaatgtgagcaaaggcacaacaccacttgctccaccacctaaacctgttcgaagaagattaaaatcagaagatgaattaaggccagaagttgatgaacatacacaaaagacgggtgtcttagctgctgttcttgcatcacaaccttctattcccagatctgttgggaaagataagaaagctattcaggcatcaattagacgtaataaggaaaccaacaccgttttggccagattgaatagcgaattgcagcaacaattaaaggatgttcttgaggagagaatttccctggaagttcaactggaacaacttcgaccattctctcacctataagccaattgccgttaactgtgaacatacttgtttttaagtggttttgggttcaaagccaatttggagacctagacattcagctcactgcttaactcaacattaaattttatgattctgttttgccctatatgttcaccgttgtatttaagtatcttttattttttaatttcgacaataaaaaggtcaggatggcgttttctggag

SEQ ID NO: 173804 - DNA, 2511 bp, Homo sapiens
  Payload ID: 14130
  Gene Symbol: REPS1
  Gene Name: RALBP1 associated Eps domain containing 1
  Uniprot ID: Q96D71
  ENST ID: ENST00000409812
  CDS Start-End: 200-2317
ggcgagcgcagccgggccccctcctcgcgacctccgggccctgttgctcgggcgcacctggcgcgtgtgaggccggggccggcgttttcgggaagctagcaggaggccgggccacgcgcagcccctgccggcccaggttcctggggccgggccccgagtagtgcatgcggggcggggcggccgtgagccggaggcgaagatggaaggcttaacgctgagcgatgcggagcagaaatactattcagatctcttctcctactgcgacattgagagcaccaagaaggtggtggtcaacgggcgggtgctggagctgttccgggccgcgcagctgccgaacgacgtggtcctacagatcatggagctttgtggtgcaacaagacttggttattttggaagaagtcagttctacattgctttgaaacttgtagctgttgcccagtctggtttccctttaagagtggaaagtataaatacagtaaaggaccttcctctgccaagatttgttgcttcaaagaatgaacaggaatctcgccatgcagcctcatattcttcagattctgaaaatcaagggtcgtattctggtgtaattcccccaccacctggcagggggcaagtgaaaaagggatccgtaagccatgatacggttcagcctcgtacatctgcagatgcacaggaacctgcatccccagtagtttcaccacagcaatccccaccaacttctccacacacatggaggaagcacagccgtcatcccagcggtgggaatagtgagaggcctctcgcgggacctgggccattttggtctccctttggtgaagcacaatcaggttcttctgctggtgatgcagtgtggtcagggcattccccacctccacctcaagaaaactgggtcagttttgcagatactccaccaaccagtactcttttaaccatgcatcctgcttctgtccaggaccagacaacagtacgaactgtagcatcagctacaactgccattgaaattcgtaggcaatccagtagttatgatgatccctggaaaataacagatgaacaaagacagtattatgtaaatcagtttaaaaccattcagcctgatctaaacggatttattccaggatctgcagctaaagagttttttacaaaatcaaaacttcctattcttgaactttctcatatttgggaactctcagactttgataaagatggtgcattgacactggatgagttttgtgctgcttttcatctggtggttgctaggaagaatggctatgatttaccagaaaaacttcctgaaagcttaatgcccaaactgattgatttggaagattcagcagatgttggggatcagccaggtgaggtaggttattcaggctctcctgctgaagctcctccaagcaagtcaccatcgatgccatcactaaaccagacatggcctgagctgaatcagagcagtgaggatactgctattgttcatccagttcccattcgtatgactccaagcaaaatccacatgcaggaaatggaacttaaaagaactggcagcgatcatacaaatcccactagcccattacttgtgaaaccatctgaccttttagaagaaaataagataaattcatcggtgaaattcgcttctggtaatactgtaggacaacaacaggctggagttgttgcccatcctcctgcagtgcctccaagaccacagccctcacaggctcctggtcctgctgtgcatcgcccagtggatgccgatggcctcataactcacactagtacctcacctcagcagataccagagcaaccaaattttgcagatttcagtcagtttgaagtatttgctgcatcaaatgtaaacgacgaacaagatgatgaagccgagaaacatccagaagtcctgccggctgaaaaagcttctgatcctgcaagttctcttcgagttgccaaaacagatagtaaaactgaagaaaagacagctgctagtgctcctgccaatgtgagcaaaggcacaacaccacttgctccaccacctaaacctgttcgaagaagattaaaatcagaagatgaattaaggccagaagttgatgaacatacacaaaagacgggtgtcttagctgctgttcttgcatcacaaccttctattcccagatctgttgggaaagataagaaagctattcaggcatcaattagacgtaataaggaaaccaacaccgttttggccagattgaatagcgaattgcagcaacaattaaaggatgttcttgaggagagaatttccctggaagttcaactggaacaacttcgaccattctctcacctataagccaattgccgttaactgtgaacatacttgtttttaagtggttttgggttcaaagccaatttggagacctagacattcagctcactgcttaactcaacattaaattttatgattctgttttgccctatatgttcaccgttgtatttaagtatcttttattttttaatttcgacaataaaaaggtcaggatggcg

SEQ ID NO: 173805 - DNA, 4537 bp, Homo sapiens
  Payload ID: 14130
  Gene Symbol: REPS1
  Gene Name: RALBP1 associated Eps domain containing 1
  Uniprot ID: Q96D71
  ENST ID: ENST00000450536
  CDS Start-End: 576-2966
cgctgtcactgttggtgcgggcgcgtcggggccgggccggggcactgtaaatggcggcggagggaggcggagcggcggccacgctcagcccagatcccccgaaactttaggttcgaagccccacaactttccgggaagcgctgccgctccggaggcgtggacggaaggggaagccgaggcgggaagtctgggggaatcggcagggagccggggagactcgaacccgcggcgggggcggagtccgccagtgcctcgcgcctccgcggcccccgcctctttctctgcaccctccccgcggccggagccggagccggagccggagccgtagtcgcagccgcagccgcagccgcgcgccgggcctcgcaggcagcggcgcggcgagcgcagccgggccccctcctcgcgacctccgggccctgttgctcgggcgcacctggcgcgtgtgaggccggggccggcgttttcgggaagctagcaggaggccgggccacgcgcagcccctgccggcccaggttcctggggccgggccccgagtagtgcatgcggggcggggcggccgtgagccggaggcgaagatggaaggcttaacgctgagcgatgcggagcagaaatactattcagatctcttctcctactgcgacattgagagcaccaagaaggtggtggtcaacgggcgggtgctggagctgttccgggccgcgcagctgccgaacgacgtggtcctacagatcatggagctttgtggtgcaacaagacttggttattttggaagaagtcagttctacattgctttgaaacttgtagctgttgcccagtctggtttccctttaagagtggaaagtataaatacagtaaaggaccttcctctgccaagatttgttgcttcaaagaatgaacaggaatctcgccatgcagcctcatattcttcagattctgaaaatcaagggtcgtattctggtgtaattcccccaccacctggcagggggcaagtgaaaaagggatccgtaagccatgatacggttcagcctcgtacatctgcagatgcacaggaacctgcatccccagtagtttcaccacagcaatccccaccaacttctccacacacatggaggaagcacagccgtcatcccagcggtgggaatagtgagaggcctctcgcgggacctgggccattttggtctccctttggtgaagcacaatcaggttcttctgctggtgatgcagtgtggtcagggcattccccacctccacctcaagaaaactgggtcagttttgcagatactccaccaaccagtactcttttaaccatgcatcctgcttctgtccaggaccagacaacagtacgaactgtagcatcagctacaactgccattgaaattcgtaggcaatccagtagttatgatgatccctggaaaataacagatgaacaaagacagtattatgtaaatcagtttaaaaccattcagcctgatctaaacggatttattccaggatctgcagctaaagagttttttacaaaatcaaaacttcctattcttgaactttctcatatttgggaactctcagactttgataaagatggtgcattgacactggatgagttttgtgctgcttttcatctggtggttgctaggaagaatggctatgatttaccagaaaaacttcctgaaagcttaatgcccaaactgattgatttggaagattcagcagatgttggggatcagccaggtgaggtaggttattcaggctctcctgctgaagctcctccaagcaagtcaccatcgatgccatcactaaaccagacatggcctgagctgaatcagagcagtgagcagtgggagacatttagtgaacgctcttcaagctcacaaactctgacccaatttgattctaacattgcaccagctgatcctgatactgctattgttcatccagttcccattcgtatgactccaagcaaaatccacatgcaggaaatggaacttaaaagaactggcagcgatcatacaaatcccactagcccattacttgtgaaaccatctgaccttttagaagaaaataagataaattcatcggtgaaattcgcttctggtaatactgtagcagatggttacagtagttcagactcttttacttctgacccagaacagatcgggagcaatgtaactcgtcaaaggtctcattcaggaacgtcgcctgataacactgcaccaccacctccccctccaaggccacagccctctcattctagatcatcatctttagatatgaatcggacctttacagtcaccacaggacaacaacaggctggagttgttgcccatcctcctgcagtgcctccaagaccacagccctcacaggctcctggtcctgctgtgcatcgcccagtggatgccgatggcctcataactcacactagtacctcacctcagcagataccagagcaaccaaattttgcagatttcagtcagtttgaagtatttgctgcatcaaatgtaaacgacgaacaagatgatgaagccgagaaacatccagaagtcctgccggctgaaaaagcttctgatcctgcaagttctcttcgagttgccaaaacagatagtaaaactgaagaaaagacagctgctagtgctcctgccaatgtgagcaaaggcacaacaccacttgctccaccacctaaacctgttcgaagaagattaaaatcagaagatgaattaaggccagaagttgatgaacatacacaaaagacgggtgtcttagctgctgttcttgcatcacaaccttctattcccagatctgttgggaaagataagaaagctattcaggcatcaattagacgtaataaggaaaccaacaccgttttggccagattgaatagcgaattgcagcaacaattaaaggatgttcttgaggagagaatttccctggaagttcaactggaacaacttcgaccattctctcacctataagccaattgccgttaactgtgaacatacttgtttttaagtggttttgggttcaaagccaatttggagacctagacattcagctcactgcttaactcaacattaaattttatgattctgttttgccctatatgttcaccgttgtatttaagtatcttttattttttaatttcgacaataaaaaggtcaggatggcgttttctggagggtagattgtgtttgttggcacacccaccttttctgttccctagcatctgggatatgcaatgcttctatggctaataccacacaccaatttaatttatagaatgggctcctcatttacatctcagtcacagactcagaaataaattgtcagtttgtccttttatgtttaatattttacataaagcatctattctataaaaatctttagaaagagtttcccatttaattttgattttaaagaattatattggataaggtggttttcaccataagctaatttactctctgcagccgtctacattcttcacaaatcatgtggtacattgaagcctcttttacatgtcaacttgtgacaaatacaaacatgtgagattttatattttccttgtggaaatgtgatcaacttcatcagcgacttcgaactattttatgagattcaataattcagcagtcatgtaaacttatgaaataggtatgagtaatggcctttcttaatttttttaagtattgttttaaaacttctgaggatatcagttattcccagaataaagggaaattccttaggatttctagtttacctttagccatcttgtcactcattcttttgctatacagacaagtttttcctattaatgagtttctggagtatgccttattcaggacaatatgctgttttagattttgtttaatattaaatgatatatacatttcgatccattgctaacagcagatattccctttaagatttattctgtctataggatcatagattttaaactgcatggatatatcttggcagaatcagaagtgtggttttacaccaataaaacagcataatattttaacttttgttcatctttttaacaagatttaaagttttaagaaatagaagattttgtattttcatttctgaaagaaaaaatgtttaaatactatagattcacagtcctaaactgcaccgatagactttgttactgtaaacaagaatttgaagaacaagggaaactgacaacctcaagcttccaagattaatacaatttttacctgacaatatctaggtaaaaatatacatcagctgaagtttccaagtggctttcagtatggctttagttgttaaataataaatttaaagcattaaaggcccaggaaactactcaacacctgtttttctgagtgtctttgttttcaaagaaacatttttactcagctgtatttcattacaagcaagttttgctgtttccatttagttttgttttttaaaatatgctttttaaaaatagccttctaatttaacaatgtcaaaaatatttgttaaagcttcttagaatttagccttccaataaataacacttaaaaattatagaaaa

SEQ ID NO: 173806 - DNA, 2424 bp, Homo sapiens
  Payload ID: 14130
  Gene Symbol: REPS1
  Gene Name: RALBP1 associated Eps domain containing 1
  ENST ID: ENST00000415951
  CDS Start-End: 39-2252
tgcatgcggggcggggcggccgtgagccggaggcgaagatggaaggcttaacgctgagcgatgcggagcagaaatactattcagatctcttctcctactgcgacattgagagcaccaagaaggtggtggtcaacgggcgggtgctggagctgttccgggccgcgcagctgccgaacgacgtggtcctacagatcatggagctttgtggtgcaacaagacttggttattttggaagaagtcagttctacattgctttgaaacttgtagctgttgcccagtctggtttccctttaagagtggaaagtataaatacagtaaaggaccttcctctgccaagatttgttgcttcaaagaatgaacaggaatctcgccatgcagcctcatattcttcagattctgaaaatcaagggtcgtattctggtgtaattcccccaccacctggcagggggcaagtgaaaaagggatccgtaagccatgatacggttcagcctcgtacatctgcagatgcacaggaacctgcatccccagtagtttcaccacagcaatccccaccaacttctccacacacatggaggaagcacagccgtcatcccagcggtgggaatagtgagaggcctctcgcgggacctgggccattttggtctccctttggtgaagcacaatcaggttcttctgctggtgatgcagtgtggtcagggcattccccacctccacctcaagaaaactgggtcagttttgcagatactccaccaaccagtactcttttaaccatgcatcctgcttctgtccaggaccagacaacagtacgaactgtagcatcagctacaactgccattgaaattcgtaggcaatccagtagttatgatgatccctggaaaataacagatgaacaaagacagtattatgtaaatcagtttaaaaccattcagcctgatctaaacggatttattccaggatctgcagctaaagagttttttacaaaatcaaaacttcctattcttgaactttctcatatttgggaactctcagactttgataaagatggtgcattgacactggatgagttttgtgctgcttttcatctggtggttgctaggaagaatggctatgatttaccagaaaaacttcctgaaagcttaatgcccaaactgattgatttggaagattcagcagatgttggggatcagccaggtgaggtaggttattcaggctctcctgctgaagctcctccaagcaagtcaccatcgatgccatcactaaaccagacatggcctgagctgaatcagagcagtgaggatactgctattgttcatccagttcccattcgtatgactccaagcaaaatccacatgcaggaaatggaacttaaaagaactggcagcgatcatacaaatcccactagcccattacttgtgaaaccatctgaccttttagaagaaaataagataaattcatcggtgaaattcgcttctggtaatactgtagcagatggttacagtagttcagactcttttacttctgacccagaacagatcgggagcaatgtaactcgtcaaaggtctcattcaggaacgtcgcctgataacactgcaccaccacctccccctccaaggccacagccctctcattctagatcatcatctttagatatgaatcggacctttacagtcaccacaggacaacaacaggctggagttgttgcccatcctcctgcagtgcctccaagaccacagccctcacaggctcctggtcctgctgtgcatcgcccagtggatgccgatggcctcataactcacactagtacctcacctcagcagataccagagcaaccaaattttgcagatttcagtcagtttgaagtatttgctgcatcaaatgtaaacgacgaacaagatgatgaagccgagaaacatccagaagtcctgccgagcaaaggcacaacaccacttgctccaccacctaaacctgttcgaagaagattaaaatcagaagatgaattaaggccagaagttgatgaacatacacaaaagacgggtgtcttagctgctgttcttgcatcacaaccttctattcccagatctgttgggaaagataagaaagctattcaggcatcaattagacgtaataaggaaaccaacaccgttttggccagattgaatagcgaattgcagcaacaattaaaggatgttcttgaggagagaatttccctggaagttcaactggaacaacttcgaccattctctcacctataagccaattgccgttaactgtgaacatacttgtttttaagtggttttgggttcaaagccaatttggagacctagacattcagctcactgcttaactcaacattaaattttatgattctgttttgccctatatgttcaccgttgtatttaagtatcttttattttttaatttcga

SEQ ID NO: 173807 - DNA, 2690 bp, Homo sapiens
  Payload ID: 14130
  Gene Symbol: REPS1
  Gene Name: RALBP1 associated Eps domain containing 1
  ENST ID: ENST00000445570
  CDS Start-End: 530-1192
gtaaatggcggcggagggaggcggagcggcggccacgctcagcccagatcccccgaaactttaggttcgaagccccacaactttccgggaagcgctgccgctccggaggcgtggacggaaggggaagccgaggcgggaagtctgggggaatcggcagggagccggggagactcgaacccgcggcgggggcggagtccgccagtgcctcgcgcctccgcggcccccgcctctttctctgcaccctccccgcggccggagccggagccggagccggagccgtagtcgcagccgcagccgcagccgcgcgccgggcctcgcaggcagcggcgcggcgagcgcagccgggccccctcctcgcgacctccgggccctgttgctcgggcgcacctggcgcgtgtgaggccggggccggcgttttcgggaagctagcaggaggccgggccacgcgcagcccctgccggcccaggttcctggggccgggccccgagtagtgcatgcggggcggggcggccgtgagccggaggcgaagatggaaggcttaacgctgagcgatgcggagcagaaatactattcagatctcttctcctactgcgacattgagagcaccaagaaggtggtggtcaacgggcgggtgctggagctgttccgggccgcgcagctgccgaacgacgtggtcctacagatcatggagctttgtggtgcaacaagacttggttattttggaagaagtcagttctacattgctttgaaacttgtagctgttgcccagtctggtttccctttaagagtggaaagtataaatacagtaaaggaccttcctctgccaagatttgttgcttcaaagaatgaacaggaatctcgccatgcagcctcatattcttcagattctgaaaatcaagggtcgtattctggtgtaattcccccaccacctggcagggggcaagtgaaaaagggatccgtaagccatgatacggttcagcctcgtacatctgcagatgcacaggaacctgcatccccagtagtttcaccacagcaatccccaccaacttctccacacacatggaggaagcacagccgtcatcccagcggtgggaatagtgagaggcctctcgcgggacctgggccattttggtctccctttggtgaagcacaatcagggaactctcagactttgataaagatggtgcattgacactggatgagttttgtgctgcttttcatctggtggttgctaggaagaatggctatgatttaccagaaaaacttcctgaaagcttaatgcccaaactgattgatttggaagattcagcagatgttggggatcagccaggtgaggtaggttattcaggctctcctgctgaagctcctccaagcaagtcaccatcgatgccatcactaaaccagacatggcctgagctgaatcagagcagtgaggatactgctattgttcatccagttcccattcgtatgactccaagcaaaatccacatgcaggaaatggaacttaaaagaactggcagcgatcatacaaatcccactagcccattacttgtgaaaccatctgaccttttagaagaaaataagataaattcatcggtgaaattcgcttctggtaatactgtagcagatggttacagtagttcagactcttttacttctgacccagaacagatcgggagcaatgtaactcgtcaaaggtctcattcaggaacgtcgcctgataacactgcaccaccacctccccctccaaggccacagccctctcattctagatcatcatctttagatatgaatcggacctttacagtcaccacaggacaacaacaggctggagttgttgcccatcctcctgcagtgcctccaagaccacagccctcacaggctcctggtcctgctgtgcatcgcccagtggatgccgatggcctcataactcacactagtacctcacctcagcagataccagagcaaccaaattttgcagatttcagtcagtttgaagtatttgctgcatcaaatgtaaacgacgaacaagatgatgaagccgagaaacatccagaagtcctgccggctgaaaaagcttctgatcctgcaagttctcttcgagttgccaaaacagatagtaaaactgaagaaaagacagctgctagtgctcctgccaatgtgagcaaaggcacaacaccacttgctccaccacctaaacctgttcgaagaagattaaaatcagaagatgaattaaggccagaagttgatgaacatacacaaaagacgggtgtcttagctgctgttcttgcatcacaaccttctattcccagatctgttgggaaagataagaaagctattcaggcatcaattagacgtaataaggaaaccaacaccgttttggccagattgaatagcgaattgcagcaacaattaaaggatgttcttgaggagagaatttccctggaagttcaactggaacaacttcgaccattctctcacctataagccaattgccgttaactgtgaacatacttgtttttaagtggttttgggttcaaagccaatttggagacctagacattcagctcactgcttaactcaacattaaattttatgattctgttttgccctatatgttcaccgttgtatttaagtatcttttattttttaatttcgacaataaaaaggtcaggatggcgttttctgga

SEQ ID NO: 173808 - DNA, 838 bp, Homo sapiens
  Payload ID: 14130
  Gene Symbol: REPS1
  Gene Name: RALBP1 associated Eps domain containing 1
  ENST ID: ENST00000431346
  CDS Start-End: 1-444
actccaccaaccagtactcttttaaccatgcatcctgcttctgtccaggaccagacaacagtacgaactgtagcatcagctacaactgccattgaaattcgtaggcaatccagtagttatgatgatccctggaaaataacagatgaacaaagacagtattatgtaaatcagtttaaaaccattcagcctgatctaaacggatttattccaggatctgcagctaaagagttttttacaaaatcaaaacttcctattcttgaactttctcatatttgggaactctcagactttgataaagatggtgcattgacactggatgagttttgtgctgcttttcatctggtggttgctaggaagaatggctatgatttaccagaaaaacttcctgaaagcttaatgcccaaactgattgatttggaagattcagcagccctgatgctctgatgatgtcaggggcagagcagaacccacaggagggaggcagggttgacacagtgttccagcaggaggctaggttggaacactgcatcagatgttggggatcagccaggtgaggtaggttattcaggctctcctgctgaagctcctccaagcaagtcaccatcgatgccatcactaaaccagacatggcctgagctgaatcagagcagtgagcagtgggagacatttagtgaacgctcttcaagctcacaaactctgacccaatttgattctaacattgcaccagctgatcctgatactgctattgttcatccagttcccattcgtatgactccaagcaaaatccacatgcaggaaatggaacttaaaagaactggcagcgatcatacaaatccca

SEQ ID NO: 173809 - DNA, 578 bp, Homo sapiens
  Payload ID: 14130
  Gene Symbol: REPS1
  Gene Name: RALBP1 associated Eps domain containing 1
  ENST ID: ENST00000414243
  CDS Start-End: 1-307
aacagatgaacaaagacagtattatgtaaatcagtttaaaaccattcagcctgatctaaacggatttattccaggatctgcagctaaagagttttttacaaaatcaaaacttcctattcttgaactttctcatatttgggaactctcagactttgataaagatggtgcattgacactggatgagttttgtgctgcttttcatctggtggttgctaggaagaatggctatgatttaccagaaaaacttcctgaaagcttaatgcccaaactgattgatttggaagattcagcagccctgatgctctgatgatgtcaggggcagagcagaacccacaggagggaggcagggttgacacagtgttccagcaggaggctaggttggaacactgcatcagatgttggggatcagccaggtgaggtaggttattcaggctctcctgctgaagctcctccaagcaagtcaccatcgatgccatcactaaaccagacatggcctgagctgaatcagagcagtgaggatactgctattgttcatccagttcccattcgtatgactccaagcaaaatccacatgcagg

SEQ ID NO: 173810 - DNA, 523 bp, Homo sapiens
  Payload ID: 14130
  Gene Symbol: REPS1
  Gene Name: RALBP1 associated Eps domain containing 1
  ENST ID: ENST00000530575
  CDS Start-End: 1-365
gacctgggccattttggtctccctttggtgaagcacaatcaggttcttctgctggtgatgcagtgtggtcagggcattccccacctccacctcaagaaaactgggtcagttttgcagatactccaccaaccagtactcttttaaccatgcatcctgcttctgtccaggaccagacaacagtacgaactgtagcatcagctacaactgccattgaaattcgtaggcaatccagtagttatgatgatccctggaaaataacagatgaacaaagacagtattatgtaaatcagtttaaaaccattcagcctgatctaaacggatttattccagggaactctcagactttgataaagatggtgcattgacactggatgagttttgtgctgcttttcatctggtggttgctaggaagaatggctatgatttaccagaaaaacttcctgaaagcttaatgcccaaactgattgatttggaagattcagcagccctgatgctctgatgatgtcaggggcagagcagaacc

SEQ ID NO: 173811 - DNA, 619 bp, Homo sapiens
  Payload ID: 14130
  Gene Symbol: REPS1
  Gene Name: RALBP1 associated Eps domain containing 1
  ENST ID: ENST00000478483
  CDS Start-End: 1-458
cagagcaaccaaattttgcagatttcagtcagtttgaagtatttgctgcatcaaatgtaaacgacgaacaagatgatgaagccgagaaacatccagaagtcctgccggctgaaaaagcttctgatcctgcaagttctcttcgagttgccaaaacagatagtaaaactgaagaaaagacagctgctagtgctcctgccaatgtgagcaaaggcacaacaccacttgctccaccacctaaacctgttcgaagaagattaaaatcagaagatgaattaaggccagaagttgatgaacatacacaaaagacgggtgtcttagctgctgttcttgcatcacaaccttctattcccaggatgttcttgaggagagaatttccctggaagttcaactggaacaacttcgaccattctctcacctataagccaattgccgttaactgtgaacatacttgtttttaagtggttttgggttcaaagccaatttggagacctagacattcagctcactgcttaactcaacattaaattttatgattctgttttgccctatatgttcaccgttgtatttaagtatcttttattttttaatttcgacaataaaaaggtcaggatggcgtttt

SEQ ID NO: 173812 - DNA, 2468 bp, Homo sapiens
  Payload ID: 14130
  Gene Symbol: REPS1
  Gene Name: RALBP1 associated Eps domain containing 1
  ENST ID: ENST00000529597
  CDS Start-End: 1-2265
tcagatctcttctcctactgcgacattgagagcaccaagaaggtggtggtcaacgggcgggtgctggagctgttccgggccgcgcagctgccgaacgacgtggtcctacagatcatggagctttgtggtgcaacaagacttggttattttggaagaagtcagttctacattgctttgaaacttgtagctgttgcccagtctggtttccctttaagagtggaaagtataaatacagtaaaggaccttcctctgccaagatttgttgcttcaaagaatgaacaggaatctcgccatgcagcctcatattcttcagattctgaaaatcaagggtcgtattctggtgtaattcccccaccacctggcagggggcaagtgaaaaagggatccgtaagccatgatacggttcagcctcgtacatctgcagatgcacaggaacctgcatccccagtagtttcaccacagcaatccccaccaacttctccacacacatggaggaagcacagccgtcatcccagcggtgggaatagtgagaggcctctcgcgggacctgggccattttggtctccctttggtgaagcacaatcaggttcttctgctggtgatgcagtgtggtcagggcattccccacctccacctcaagaaaactgggtcagttttgcagatactccaccaaccagtactcttttaaccatgcatcctgcttctgtccaggaccagacaacagtacgaactgtagcatcagctacaactgccattgaaattcgtaggcaatccagtagttatgatgatccctggaaaataacagatgaacaaagacagtattatgtaaatcagtttaaaaccattcagcctgatctaaacggatttattccaggatctgcagctaaagagttttttacaaaatcaaaacttcctattcttgaactttctcatatttgggaactctcagactttgataaagatggtgcattgacactggatgagttttgtgctgcttttcatctggtggttgctaggaagaatggctatgatttaccagaaaaacttcctgaaagcttaatgcccaaactgattgatttggaagattcagcagatgttggggatcagccaggtgaggtaggttattcaggctctcctgctgaagctcctccaagcaagtcaccatcgatgccatcactaaaccagacatggcctgagctgaatcagagcagtgaggatactgctattgttcatccagttcccattcgtatgactccaagcaaaatccacatgcaggaaatggaacttaaaagaactggcagcgatcatacaaatcccactagcccattacttgtgaaaccatctgaccttttagaagaaaataagataaattcatcggtgaaattcgcttctggtaatactgtagatggttacagtagttcagactcttttacttctgacccagaacagatcgggagcaatgtaactcgtcaaaggtctcattcaggaacgtcgcctgataacactgcaccaccacctccccctccaaggccacagccctctcattctagatcatcatctttagatatgaatcggacctttacagtcaccacaggacaacaacaggctggagttgttgcccatcctcctgcagtgcctccaagaccacagccctcacaggctcctggtcctgctgtgcatcgcccagtggatgccgatggcctcataactcacactagtacctcacctcagcagataccagagcaaccaaattttgcagatttcagtcagtttgaagtatttgctgcatcaaatgtaaacgacgaacaagatgatgaagccgagaaacatccagaagtcctgccggctgaaaaagcttctgatcctgcaagttctcttcgagttgccaaaacagatagtaaaactgaagaaaagacagctgctagtgctcctgccaatgtgagcaaaggcacaacaccacttgctccaccacctaaacctgttcgaagaagattaaaatcagaagatgaattaaggccagaagttgatgaacatacacaaaagacgggtgtcttagctgctgttcttgcatcacaaccttctattcccagatctgttgggaaagataagaaagctattcaggcatcaattagacgtaataaggaaaccaacaccgttttggccagattgaatagcgaattgcagcaacaattaaaggatgttcttgaggagagaatttccctggaagttcaactggaacaacttcgaccattctctcacctataagccaattgccgttaactgtgaacatacttgtttttaagtggttttgggttcaaagccaatttggagacctagacattcagctcactgcttaactcaacattaaattttatgattctgttttgccctatatgttcaccgttgtatttaagtatcttttattttttaatttcgacaataaaaaggtcaggatggcgttttctgga

SEQ ID NO: 173813 - DNA, 439 bp, Homo sapiens
  Payload ID: 14130
  Gene Symbol: REPS1
  Gene Name: RALBP1 associated Eps domain containing 1
  ENST ID: ENST00000530255
  CDS Start-End: 1-439
gagctgaatcagagcagtgagtgggagacatttagtgaacgctcttcaagctcacaaactctgacccaatttgattctaacattgcaccagctgatcctgatactgctattgttcatccagttcccattcgtatgactccaagcaaaatccacatgcaggaaatggaacttaaaagaactggcagcgatcatacaaatcccactagcccattacttgtgaaaccatctgaccttttagaagaaaataagataaattcatcggtgaaattcgcttctggtaatactgtaggacaacaacaggctggagttgttgcccatcctcctgcagtgcctccaagaccacagccctcacaggctcctggtcctgctgtgcatcgcccagtggatgccgatggcctcataactcacactagtacctcacctcagcagataccagagc

SEQ ID NO: 173814 - DNA, 299 bp, Homo sapiens
  Payload ID: 14130
  Gene Symbol: REPS1
  Gene Name: RALBP1 associated Eps domain containing 1
  ENST ID: ENST00000526022
  CDS Start-End: 1-185
aagttgatgaacatacacaaaagacgggtgtcttagctgctgttcttgcatcacaaccttctattcccagatctgttgggaaagataagaaagctattcaggcatcaattagacgtaataaggaaaccaacaccgttttggccagattgaatagcgaattgcagcaacaattaaaggtaatatagtttctgaatctttataatgttccttatcttagtaaagaaacctaaagagaaggaatgtgacctcagatacctccaagatcacatatatggttctcttctctaattttctagatg

SEQ ID NO: 173815 - DNA, 6069 bp, Homo sapiens
  Payload ID: 14130
  Gene Symbol: REPS1
  Gene Name: RALBP1 associated Eps domain containing 1
  ENST ID: ENST00000483468
  CDS Start-End: 320-982
gcctccgcggcccccgcctctttctctgcaccctccccgcggccggagccggagccggagccggagccgtagtcgcagccgcagccgcagccgcgcgccgggcctcgcaggcagcggcgcggcgagcgcagccgggccccctcctcgcgacctccgggccctgttgctcgggcgcacctggcgcgtgtgaggccggggccggcgttttcgggaagctagcaggaggccgggccacgcgcagcccctgccggcccaggttcctggggccgggccccgagtagtgcatgcggggcggggcggccgtgagccggaggcgaagatggaaggcttaacgctgagcgatgcggagcagaaatactattcagatctcttctcctactgcgacattgagagcaccaagaaggtggtggtcaacgggcgggtgctggagctgttccgggccgcgcagctgccgaacgacgtggtcctacagatcatggagctttgtggtgcaacaagacttggttattttggaagaagtcagttctacattgctttgaaacttgtagctgttgcccagtctggtttccctttaagagtggaaagtataaatacagtaaaggaccttcctctgccaagatttgttgcttcaaagaatgaacaggaatctcgccatgcagcctcatattcttcagattctgaaaatcaagggtcgtattctggtgtaattcccccaccacctggcagggggcaagtgaaaaagggatccgtaagccatgatacggttcagcctcgtacatctgcagatgcacaggaacctgcatccccagtagtttcaccacagcaatccccaccaacttctccacacacatggaggaagcacagccgtcatcccagcggtgggaatagtgagaggcctctcgcgggacctgggccattttggtctccctttggtgaagcacaatcagggaactctcagactttgataaagatggtgcattgacactggatgagttttgtgctgcttttcatctggtggttgctaggaagaatggctatgatttaccagaaaaacttcctgaaagcttaatgcccaaactgattgatttggaagattcagcagatgttggggatcagccaggtgaggtaggttattcaggctctcctgctgaagctcctccaagcaagtcaccatcgatgccatcactaaaccagacatggcctgagctgaatcagagcagtgaggttagcaaagctttccttttctttcattaaaagttaactcttttaaggtaagatgttccaaagagggcaatttcagtctgtctcttccagcatgcatgcataattgagagaacatatcagatatactatgataaatgtttgtaattatgtgactttttcgaggttttcaaagtatatattctgtcatttgatttccaccacttatccccattaaaaccttgtgagtttagagaggcagattcagaaagtttaaccatcaaaaggtaaatgacttggccaagatctcatatccagtgagggacgagagctaggatttgaacgtaagtcctttgatatctagtcaactgccacatccactgtgtcacactgccttctcagtcctgtaaacaaggtatgtaatagtacatttgggatcttagcattggaaatgataaaataagtgactgattcagtttccatatgaagaaagtatgttttacaacctgaaaactctgtataattagttttcttcaatatagaatgtttagccatattaactgcattaagatgtgtcatatatgaccaagcacagtatgcaaaatggaatttgggacacatgcactgttccccaatttatttgaaattccattatgtaaagcatcaaaagggccactgatcagaataagggaagaggacctgaggccctgcctcccctaaaacacctgcttaggcccctctgttaaattttagtgccctggagagctccatttggaaaccattgctgtagcctattagagcagttttctttgtgaacaagttacgtttttttcttattttttttctttttgtagcatgtaggaaatgctaaaaatacaaaagtttgttcactttcaggaagaaattttaagcttctgtcctttccatgccttttaaagccagaaaaatgctggattaaagagcatgctagatattaataattttggacagttggaaaacagaactaactggtggttttatactatttcctgctttatgacataattgcagccaggatacttgtgtctgagacattataacatcacaccatccatcctactattggatgcaaaaccattaatacaagtgtttttctagatgaagggattacaccttgaaagaatttgctaatagagagggtttatggaaagtaaggtaattgttgagacactactatttttgctgcatctattcatcttgtgtcttttttaaaaaccagtattacattaaaagaatatttgtattccattgatatcagtttgtaaataaaaacattctttctaaagcatctcaaatctaaagcccatgttcattctaaataaaatcgtatgtgatcattagagacagaaatggaagtcccttctaaattcaggtagtagtacttgcattttccctacttaaatattcccataaagttttatttatagtatttggtaatgaggtcatgaatgtcataattttttttcgatatgtgaaaaatcaaaatgttaataaatcattgattttgagacatctaatgatatttctaaaaatatctagttaggatatggaatttagattacattttaattgtcttccagaaagcactagtaatctttcaacatagatttatttagcacctgtggttacggataagacagtataggagatgaccctaataatctctaacctttatggagcacttttgatatgtcagttctgtttaaaaaacaatacaaaaacaaactctttatatatattaactcctttagtcctctgaacaatcttatgaggtagataatatgttacagatggagaaactgaagcacagagaagttatacaacttgcccaagtttgcacagcgtaactgggattccagtagtctggttccacagctgtgagcccttaaaaattaagtatgaagatgataagagagtccctttgtcctccaggtaacttacatgcagtcttgtgaaacaaagttaaacttcatgccacccaaatgaggtacacaagtaaataccttctttttggcaaaaatcttctgtaaacttttctccacagttagttaattaggattttaaaacttccttctgtgtccctgtaacaataattattgaggaaaaaactaattatattaacagatattgataagtaactttcctgaagtgatgccgcatgataaaagtaattattgtgggattcttaattcatgaaatactttggatcagtatttctcagaatatcttaattttcatatgaaaactaatctgtaggaaaagtcgttgaattattgtattagccgtttttgtaggtaattttcaccagtgtgctcatttgctaatatttaatttttacatatcttctcaacttaaatgtcactattttaaatagtaagttgaactttgaagcataaaaatgtatactttcccaaagaggattttggtttatggggtagttttgtctttgtgtaaatattcgtgtgtatacattgtatgtgtgtagatgttttttcctctttagaggataactgataattcttaagaatcagatttaaatgataattttaatgcaattttaatgtaaaaattctataccattttattactaagatctccaaaacaaatggaatttactgtaattaatattgacttatcactccacctgttttaagaggtatgattttttttgtgtacctcttttagaagagtagtatttcatatcaaaatacatctgtatataactcatgctcagatgcttgatttgctctcattgtggccgcattctgatttttctagcatggggtagggagtggggaagcgggggtgtctgattggcagttctgtcttgtggtctggcatggccctgtttgtagtgctgattgcaggggttgacttgctacagattgacataagctctacatatattaattccagaattctttgcattttatctcaattatattttattaaatatctatacatatgtgtaaaatatgtgcacgtacataatagaatcatctttcaggggtcgcactggcaagtcgcactgacttgctttgttttgaacaaaactttgattcattaggatcacaaaatcagtacattaacatttgaatgttcaaagaagaatttgatgttattctttctttctttagtcaaggcatgcctctttagcatttttacttggtggacatttatatcacttagactttgctcctgtattgtgttttattttaactctgtaaggctttaaatctcttccatagagattgcaataaatcattactatacttttgattgtgaactcctcaccttacattacaagtgacccagaataaatataaaatgttgacggaaaaatagaaattactgaattttgttaaacctatgaaacacaacttgcagtgcaacctctgaattactttgctaaatcttctccagtgatcttttactccatctttctcatcatgctgacttgtctctcctctgtctgttcagcagtgggagacatttagtgaacgctcttcaagctcacaaactctgacccaatttgattctaacattgcaccagctgatcctgatactgctattgttcatccagttcccattcgtatgactccaagcaaaatccacatgcaggaaatggaacttaaaagaactggcagcgatcatacaaatcccactagcccattacttgtgaaaccatctgaccttttagaagaaaataagataaattcatcggtgaaattcgcttctggtaatactgtaggacatatcccatttatcagcagatggttacagtagttcagactcttttacttctgacccagaacagatcgggagcaatgtaactcgtcaaaggtctcattcaggaacgtcgcctgataacactgcaccaccacctccccctccaaggccacagccctctcattctagatcatcatctttagatatgaatcggacctttacagtcaccacaggacaacaacaggctggagttgttgcccatcctcctgcagtgcctccaagaccacagccctcacaggctcctggtcctgctgtgcatcgcccagtggatgccgatggcctcataactcacactagtacctcacctcagcagataccagagcaaccaaattttgcagatttcagtcagtttgaagtatttgctgcatcaaatgtaaacgacgaacaagatgatgaagccgagaaacatccagaagtcctgccggctgaaaaagcttctgatcctgcaagttctcttcgagttgccaaaacagatagtaaaactgaagaaaagacagctgctagtgctcctgccaatgtgagcaaaggcacaacaccacttgctccaccacctaaacctgttcgaagaagattaaaatcagaagatgaattaaggccagaagttgatgaacatacacaaaagacgggtgtcttagctgctgttcttgcatcacaaccttctattcccagatctgttgggaaagataagaaagctattcaggcatcaattagacgtaataaggaaaccaacaccgttttggccagattgaatagcgaattgcagcaacaattaaaggatgttcttgaggagagaatttccctggaagttcaactggaacaacttcgaccattctctcacctataagccaattgccgttaactgtgaacatacttgtttttaagtggttttgggttcaaagccaatttggagacctagacattcagctcactgcttaactcaacattaaattttatgattctgttttgccctatatgttcaccgttgtatttaagtatcttttattttttaatttcgacaataaaaaggtcaggatggcgttt

SEQ ID NO: 173816 - DNA, 3665 bp, Homo sapiens
  Payload ID: 14130
  Gene Symbol: REPS1
  Gene Name: RALBP1 associated Eps domain containing 1
  ENST ID: ENST00000626459
  CDS Start-End: 580-1242
ccgccgctgtcactgttggtgcgggcgcgtcggggccgggccggggcactgtaaatggcggcggagggaggcggagcggcggccacgctcagcccagatcccccgaaactttaggttcgaagccccacaactttccgggaagcgctgccgctccggaggcgtggacggaaggggaagccgaggcgggaagtctgggggaatcggcagggagccggggagactcgaacccgcggcgggggcggagtccgccagtgcctcgcgcctccgcggcccccgcctctttctctgcaccctccccgcggccggagccggagccggagccggagccgtagtcgcagccgcagccgcagccgcgcgccgggcctcgcaggcagcggcgcggcgagcgcagccgggccccctcctcgcgacctccgggccctgttgctcgggcgcacctggcgcgtgtgaggccggggccggcgttttcgggaagctagcaggaggccgggccacgcgcagcccctgccggcccaggttcctggggccgggccccgagtagtgcatgcggggcggggcggccgtgagccggaggcgaagatggaaggcttaacgctgagcgatgcggagcagaaatactattcagatctcttctcctactgcgacattgagagcaccaagaaggtggtggtcaacgggcgggtgctggagctgttccgggccgcgcagctgccgaacgacgtggtcctacagatcatggagctttgtggtgcaacaagacttggttattttggaagaagtcagttctacattgctttgaaacttgtagctgttgcccagtctggtttccctttaagagtggaaagtataaatacagtaaaggaccttcctctgccaagatttgttgcttcaaagaatgaacaggaatctcgccatgcagcctcatattcttcagattctgaaaatcaagggtcgtattctggtgtaattcccccaccacctggcagggggcaagtgaaaaagggatccgtaagccatgatacggttcagcctcgtacatctgcagatgcacaggaacctgcatccccagtagtttcaccacagcaatccccaccaacttctccacacacatggaggaagcacagccgtcatcccagcggtgggaatagtgagaggcctctcgcgggacctgggccattttggtctccctttggtgaagcacaatcagggaactctcagactttgataaagatggtgcattgacactggatgagttttgtgctgcttttcatctggtggttgctaggaagaatggctatgatttaccagaaaaacttcctgaaagcttaatgcccaaactgattgatttggaagattcagcagatgttggggatcagccaggtgaggtaggttattcaggctctcctgctgaagctcctccaagcaagtcaccatcgatgccatcactaaaccagacatggcctgagctgaatcagagcagtgagcagtgggagacatttagtgaacgctcttcaagctcacaaactctgacccaatttgattctaacattgcaccagctgatcctgatactgctattgttcatccagttcccattcgtatgactccaagcaaaatccacatgcaggaaatggaacttaaaagaactggcagcgatcatacaaatcccactagcccattacttgtgaaaccatctgaccttttagaagaaaataagataaattcatcggtgaaattcgcttctggtaatactgtagcagatggttacagtagttcagactcttttacttctgacccagaacagatcgggagcaatgtaactcgtcaaaggtctcattcaggaacgtcgcctgataacactgcaccaccacctccccctccaaggccacagccctctcattctagatcatcatctttagatatgaatcggacctttacagtcaccacaggacaacaacaggctggagttgttgcccatcctcctgcagtgcctccaagaccacagccctcacaggctcctggtcctgctgtgcatcgcccagtggatgccgatggcctcataactcacactagtacctcacctcagcagataccagagcaaccaaattttgcagatttcagtcagtttgaagtatttgctgcatcaaatgtaaacgacgaacaagatgatgaagccgagaaacatccagaagtcctgccggctgaaaaagcttctgatcctgcaagttctcttcgagttgccaaaacagatagtaaaactgaagaaaagacagctgctagtgctcctgccaatgtgagcaaaggcacaacaccacttgctccaccacctaaacctgttcgaagaagattaaaatcagaagatgaattaaggccagaagttgatgaacatacacaaaagacgggtgtcttagctgctgttcttgcatcacaaccttctattcccagatctgttgggaaagataagaaagctattcaggcatcaattagacgtaataaggaaaccaacaccgttttggccagattgaatagcgaattgcagcaacaattaaaggatgttcttgaggagagaatttccctggaagttcaactggaacaacttcgaccattctctcacctataagccaattgccgttaactgtgaacatacttgtttttaagtggttttgggttcaaagccaatttggagacctagacattcagctcactgcttaactcaacattaaattttatgattctgttttgccctatatgttcaccgttgtatttaagtatcttttattttttaatttcgacaataaaaaggtcaggatggcgttttctggagggtagattgtgtttgttggcacacccaccttttctgttccctagcatctgggatatgcaatgcttctatggctaataccacacaccaatttaatttatagaatgggctcctcatttacatctcagtcacagactcagaaataaattgtcagtttgtccttttatgtttaatattttacataaagcatctattctataaaaatctttagaaagagtttcccatttaattttgattttaaagaattatattggataaggtggttttcaccataagctaatttactctctgcagccgtctacattcttcacaaatcatgtggtacattgaagcctcttttacatgtcaacttgtgacaaatacaaacatgtgagattttatattttccttgtggaaatgtgatcaacttcatcagcgacttcgaactattttatgagattcaataattcagcagtcatgtaaacttatgaaataggtatgagtaatggcctttcttaatttttttaagtattgttttaaaacttctgaggatatcagttattcccagaataaagggaaattccttaggatttctagtttacctttagccatcttgtcactcattcttttgctatacagacaagtttttcctattaatgagtttctggagtatgccttattcaggacaatatgctgttttagattttgtttaatattaaatgatatatacatttcgatccattgctaacagcagatattccctttaagatttattctgtctataggatcatagattttaaactgcatggatatatcttggcagaatcagaagtgtggttttacaccaataaaacagcataatatttt

SEQ ID NO: 173817 - DNA, 7771 bp, Homo sapiens
  Payload ID: 14131
  Gene Symbol: REPS2
  Gene Name: RALBP1 associated Eps domain containing 2
  Uniprot ID: Q8NFH8
  ENST ID: ENST00000303843
  CDS Start-End: 1-1980
atggaggcggcagcggcggcggcggcggcggcagcggcagcggcagcggcgggcgggggctgtggctccgggccgccgccgctgctgctgagcgagggcgagcagcagtgctactccgagctcttcgcgcgctgtgccggcgccgcgggcgggggccccgggtctgggccccccgaggccgccagagtcgcccccggcacggccactgcggccgccggccccgtggctgacctgtttcgggcatcgcagctgcccgccgagacgctgcaccagatcacagaactgtgtggtgcaaagcgggttggttattttggtccaacacagttttacattgccctgaaattaattgctgcagcacaatctggcctcccggtacggatagagagtattaaatgtgaattgcctctgcctcgctttatgatgtcaaagaatgatggtgagatacgatttgggaacccagctgagctgcatggaactaaggttcagattccatatttaactacagaaaaaaattccttcaaaagaatggacgatgaggataaacaggaaacacagtctcccacgatgtcacccctcgcctcccctccttcttccccgcctcattaccagagggtgcccttgagccatggctacagcaaactgcggagcagcgcagaacagatgcatccagcaccttatgaagctaggcagccccttgtccagcccgagggatcctcatcagggggcccaggaaccaagccccttcggcatcaggcttcccttatccggtccttttcagtggagagggaactacaggataacagcagttaccccgacgaaccctggaggataacagaagaacagcgcgagtactatgtcaatcagttccgatcccttcagccagacccaagctctttcatttcaggttctgtggccaagaacttcttcaccaaatcaaagctttccattccagaactctcctatatatgggagcttagtgatgctgactgtgatggagccctgaccctgcctgagttctgtgctgcgtttcatctcattgtggctcggaagaacggctacccattgcctgagggcctccctccaactctgcagccagaatacctgcaggcagcttttcctaagcccaaatgggactgtcaattatttgattcttattctgagtcactgccggcaaatcaacaacctcgtgacttgaatcggatggagaagacatctgttaaagacatggctgaccttcctgtccctaaccaggatgtaactagtgatgacaaacaagctttgaaaagtactatcaatgaagccttaccaaaggacgtgtctgaggatccagcaactcccaaggattccaacagtctcaaagcaagaccaagatccagatcttactctagcacctccatagaagaggccatgaaaaggggcgaggaccctcccaccccgccacctcggccacagaaaacccattccagagcctcctccttggatctgaataaagtcttccagcccagtgtgccagctaccaagtcaggattgttacccccaccacctgcgctccctccaagaccttgtccatcacagtctgaacaagtgtcggaggccgagttactcccacagctgagcagagccccatcccaggctgcagaaagtagtccagcaaagaaggatgtactgtattctcagccaccatcaaagcccattcgtaggaaattcagaccagaaaaccaagctacagaaaaccaagagccttccactgctgcaagtgggccagcttctgcggcaaccatgaaaccgcatccaacagtccaaaagcagtcttccaaacagaagaaggccattcaaactgctatccgcaaaaataaagaggcaaacgcagtgctggctcggctgaacagtgagctccagcagcagctcaaggaggttcatcaagaacgaattgcattggaaaaccaattggaacaacttcgtccggtcactgtgttgtgacccccccatggttcaagtgacagtgggtgaccttgtctgccaagatctttcttttgaatgttttgaacccaactacttgtcatagatgtttgactgtgtcaaaagctgtgagcagcaaaatataatccatatgaccttttctcttgcacttcacttgtatgttttactgtggtggaaaaaatacttcaactgattatcacacttgaaatgctaattatcagtggaatttgtctcctattcttaagtacttctgcaaggtattagatgctgctccttaccaaaaatcagtcttctagcaaataaaaataacttagagcattatttatttaaagaatttatgttttctataaaaccttataaccaagaaccttcaggatgcttgtaaccaagtactttcaggatgctttttgtatgtatatcacatagagtaggttggtttcctgagtaattgggattccaactagatagtcattggtgtgaccataataaaaacaaaagctaaaataaaagcatcagatttagactggcgctgtgccctctaccactatatgccaaaaattgcttctctagtgccattttgatattatatctagctataaataatacatgactatcgttttctattgaatgtcaaagacttactgggtctttacacctctgtaaagtggaggttttggcaatgagctgtttaacttggccaagctaggctgtcaacccagacaactcagtcctttcatgtaaatttttgggcaagagaagtctgctttgactgccttgcctgaccaaattaaataaatagttgccagatctctacttttatcctgcatgggataatatatctgtaaatgcatgagtttggaaaccacccatcaaatatgaaaggctgatgagactgttaggattgataaacatttgttgtttgaacccagctatccaaactggggaagaaggggaaatggttgttaccaacaatctctagtagttattttaatctttattttaacctggattgcaaatgtatggggtatgaggagataatgaaagaaaagtggtcctcatgctggatatgtgactgttttgttctctgtaaagtgtattcttgggaagtgattggtttatatcagattcagaggagcccaattaactccagtgtaggtaatgtaaaacagtaagctcaaattgcagaagccagtatcctacagaaatttaagtagctactgcttctcctgaaagcccaagttgaaaatgggaccacaggggcacagggctactgaccctcacagggcatgccagcgttaacaccactttgagagaccaatggcaagaaatgctgtctcttgtgcattttactaatttccccattcttagggtagcagggtgggggtgtatagggtctttttgaagcagttttggataggtttgcaatatgtgggattcagcctttgatttcaatagagctgagagcttttagaacaagcaggcatttatttaatgtttccttagtccattggcaagctttatcaatagcttaatggcagaggataaaggctcaaacagatgatgttttttccacagaaaaacaaattgttgaatctattccgtgcatatttaaggattttgaattgattttgaaaatcatgaaacttgaactatttttctattccctttttttcttccccatttgctgccttttttgtttttgtgggggaagggttgggagtaagtttaaactcttccgaagattatgaatgggtcagcacaaatttttaggcaactgctttttccatgttctgagatctacgggctacaacaaattttatcagcagtgttttttgtttttttgagatggagacttgctctgtcgcccaggctggagcgcagtggcgcaatctcggctcactgcaacctccacctcctgggttcaagcaattcttgtgcctcagcctcccgagtagctgggattacaggcacccaccaccacgctcagctaatttttgtatttttagtagagatgggattttgtcatgttggctaggctagtctcgaattcctgacctcaagtgatccacccgccttggcctctcgaagtgctgggattacaggcgtgagccacccgcccggctatcagcactgttctgattgcagacgtttcacagcatgtttggcttttggtaaattcaatccaggaaagactagcatgtgcactttatctcataatcttccagtacatatgctctcagttgggatagcagttcatttccattaggcagacgtataaactaaggaatgttagtctgcagtattcattttaaaaatattgacatgcttttcccctcccctccatgaagtcagtgccagagtgagccagattgggaggttggggttttgtttggttggcttggttttcattaagggaaaaaacttgcattggacaatcaaattcccctgagtttcataatctcatcaatattttaagataggcgagcacacactaataatatctatgcctaccttcttgggtggactcaactgtaaccacagtttattagttgcttagaagtggatttttaaaaaacagttaaatgtgtgtgcataacacacaagtaatgacacactactattattattacctaagtagtgctcatcctctctttctgtgttttcttaggatgtgcactttaatttaggattgtaacgcctaataatatttctgtgagcctttaatgtgatttataagatggccgaattactgaaatcaccattatacctcttccataaaacgactccaaagttagacctgcctgttggggagaattctatagacagaaggtcaatgttgtccccatccataggggttgaattaccttgctgttaagtggtcttcccccattgggatcctacagtcccacagatgaaagcacagtagtagctgacagctggcttatttggtccctcggcatctctcgtatgtggcatattgcttttgccactttcctatccagcagacatcaaagcaaaactaaaaggtagatatctggaatgaatgtatatgttgtaattgaggcagatatttgccttaattggaaggatctaactgctttacaaatattaaacaagtgcttgggcatgattgggagaggaggcagcttagctggaagctgtgcccatcttactgtcactggagaataggatgtcagagctgggcaggactggtacccatcatttgcagtttgcatgtggggaaaccaaagccctaagaaacaacagttcctggcccaaaaaatccatagaaagaggtaactagtggcagatttggggcgccaacctgattttatggattttgagttagattctctaccctctatcaatactaaaaatagattaggagggtttttttttctgtttatcatgttgaatttcattgacttaattagtctttaaatttgaaaacatgttttagggagtttagttctagaaatttctcttagattgaagtgacagaatctgaaagaaaagaatatgattgagctatttgttttcctgaacacctcaccttttatgatgcaataagttactctgagtttcttggcagagtttttgacagctgttgctttcaatggattccattcctgtattccttatgggaggttgtttttaaaatagactactgcgattgaaatgaactcaatatgtagttaagttatagttttcttcaatgtatttttagttacttgggtcacaaatgttcaatttcagcatattttagggtgagtaatcaaaaatgtgaatttgcctttgatttcctaccactgtctgagctatcataaagcattctctttagttgtgatttgattctatagtctgtttctaaatgacatttgtctgtttcttaaatgatctcacagccatggtaataatagatgtgtactcagaagatcaataaggtaatattggaattcatgtgttttttgcaattaaggcaggcatttgccaatgtcttcttttaagcagtagttggaaacatctcaattacagtgtaacaccttagagctaaaaacatttgttcaacacaaactagaatcacaccttctcactagatatcaccaagggaatgtggttttaaaaataaaaagaaaacaatataacgtatcatggcaaccagagcttcccatattattgacaagtagggatcattaggttctggtttgaacattctgaatgtgaacaaaatgaaatagtagttaagaggtgttttcccactgtgtttaaagagaacactagtaattctggtttttctttctaactgctttactgtttcaagggtattcttttaaaactctgatttcaaaggatcagttgaatttatactttagttatgggtgttttgttactttttttttttttgtatcatgactcagtatggttcaatttcctagtaagaagtggggatttgtgtttttggagtcctcagctcacatgtcttgttcctccttcagcacaagctaggggagatcctaccaacactgataggtcagtcattgatggcaatttgaatgtgggtattactctgtgagccaccctgcttcgcttgtttgtaaggagaaatgcatctggttatgtgaatttcccgagagcagcagacatggagggccagactttaaaagcaacgcaagcagattcgaagagctgttgccctcttctaaaaaaggcttttggaggctgtgttacatgcatgccctaaagcagtcagtctgttagtatgagcaagacatctgaagtacacagttgcttttaggcttgtatagttattttctacacatgccaacacacatgatgataaaggaaccttttctaggaggcattgcagggtttcaatacacaggacatgttctagttacagaagccttgctctgctgtcaacaattgggaaatgctcattttttcatgttttgtgaatactctggtcttgctgtaagctaatgtcatggctgtgggatattagagaagtgggtttatgactctgaagaccagcagacaccagactttaaaagtgcttaaattggaatttggaaactacagtaaagaaaccttcagataccagttccatcctgaagccctctgttgaacaacagggccagatcctaaagctctttcagggagctcttctctggggctggaacagttgattatgcaaccccattgtgtggagattggatcaactgagttgtgttatttttgttttaagtcaccttgtgcgagaacctcaaccgcacctatcttgggaaccgggtatacccttttctttagcactgctatcctttttgtcttcagcacaaataagatgttcaagtgagccagaagcaagaagagccattttagtcttcatagctattggctaagagagataatgagctgatggtctattttaaccttgaaagtaaaaatgtatattttttcactacaagtacattgaacagtaaaaagtgtaacagcaaagtatatatttgatgccttctgtcttttcatgataatgtgctaacaagttgtgttaatattttactcagccagagtctcattcatttgctaagcattgggaacattatgtatattgaccttaaacataggtgtcctatatttggattgtgacttgtagactcaagctaaccttactgcctctttttcacacttgttgaaaagtctgtgaagaacatagttaaagatctccaactttggaaaatatacatgatgtgaaactggggtgctatgttaaaaataaatgtatgataactaa

SEQ ID NO: 173818 - DNA, 7953 bp, Homo sapiens
  Payload ID: 14131
  Gene Symbol: REPS2
  Gene Name: RALBP1 associated Eps domain containing 2
  Uniprot ID: Q8NFH8
  ENST ID: ENST00000357277
  CDS Start-End: 172-2154
ccgggaggaagcggccgcgcggcagctgcggggcgtgggggtggtggtggcggcggcggtggtggcggcggcggcggcggcggcagctgaggccgaggaggcggtggctgtggcggacgcagcagcaccccagctagggacagggctccgccgcgcccccttgctggccccatggaggcggcagcggcggcggcggcggcggcagcggcagcggcagcggcgggcgggggctgtggctccgggccgccgccgctgctgctgagcgagggcgagcagcagtgctactccgagctcttcgcgcgctgtgccggcgccgcgggcgggggccccgggtctgggccccccgaggccgccagagtcgcccccggcacggccactgcggccgccggccccgtggctgacctgtttcgggcatcgcagctgcccgccgagacgctgcaccagatcacagaactgtgtggtgcaaagcgggttggttattttggtccaacacagttttacattgccctgaaattaattgctgcagcacaatctggcctcccggtacggatagagagtattaaatgtgaattgcctctgcctcgctttatgatgtcaaagaatgatggtgagatacgatttgggaacccagctgagctgcatggaactaaggttcagattccatatttaactacagaaaaaaattccttcaaaagaatggacgatgaggataaacagcaggaaacacagtctcccacgatgtcacccctcgcctcccctccttcttccccgcctcattaccagagggtgcccttgagccatggctacagcaaactgcggagcagcgcagaacagatgcatccagcaccttatgaagctaggcagccccttgtccagcccgagggatcctcatcagggggcccaggaaccaagccccttcggcatcaggcttcccttatccggtccttttcagtggagagggaactacaggataacagcagttaccccgacgaaccctggaggataacagaagaacagcgcgagtactatgtcaatcagttccgatcccttcagccagacccaagctctttcatttcaggttctgtggccaagaacttcttcaccaaatcaaagctttccattccagaactctcctatatatgggagcttagtgatgctgactgtgatggagccctgaccctgcctgagttctgtgctgcgtttcatctcattgtggctcggaagaacggctacccattgcctgagggcctccctccaactctgcagccagaatacctgcaggcagcttttcctaagcccaaatgggactgtcaattatttgattcttattctgagtcactgccggcaaatcaacaacctcgtgacttgaatcggatggagaagacatctgttaaagacatggctgaccttcctgtccctaaccaggatgtaactagtgatgacaaacaagctttgaaaagtactatcaatgaagccttaccaaaggacgtgtctgaggatccagcaactcccaaggattccaacagtctcaaagcaagaccaagatccagatcttactctagcacctccatagaagaggccatgaaaaggggcgaggaccctcccaccccgccacctcggccacagaaaacccattccagagcctcctccttggatctgaataaagtcttccagcccagtgtgccagctaccaagtcaggattgttacccccaccacctgcgctccctccaagaccttgtccatcacagtctgaacaagtgtcggaggccgagttactcccacagctgagcagagccccatcccaggctgcagaaagtagtccagcaaagaaggatgtactgtattctcagccaccatcaaagcccattcgtaggaaattcagaccagaaaaccaagctacagaaaaccaagagccttccactgctgcaagtgggccagcttctgcggcaaccatgaaaccgcatccaacagtccaaaagcagtcttccaaacagaagaaggccattcaaactgctatccgcaaaaataaagaggcaaacgcagtgctggctcggctgaacagtgagctccagcagcagctcaaggaggttcatcaagaacgaattgcattggaaaaccaattggaacaacttcgtccggtcactgtgttgtgacccccccatggttcaagtgacagtgggtgaccttgtctgccaagatctttcttttgaatgttttgaacccaactacttgtcatagatgtttgactgtgtcaaaagctgtgagcagcaaaatataatccatatgaccttttctcttgcacttcacttgtatgttttactgtggtggaaaaaatacttcaactgattatcacacttgaaatgctaattatcagtggaatttgtctcctattcttaagtacttctgcaaggtattagatgctgctccttaccaaaaatcagtcttctagcaaataaaaataacttagagcattatttatttaaagaatttatgttttctataaaaccttataaccaagaaccttcaggatgcttgtaaccaagtactttcaggatgctttttgtatgtatatcacatagagtaggttggtttcctgagtaattgggattccaactagatagtcattggtgtgaccataataaaaacaaaagctaaaataaaagcatcagatttagactggcgctgtgccctctaccactatatgccaaaaattgcttctctagtgccattttgatattatatctagctataaataatacatgactatcgttttctattgaatgtcaaagacttactgggtctttacacctctgtaaagtggaggttttggcaatgagctgtttaacttggccaagctaggctgtcaacccagacaactcagtcctttcatgtaaatttttgggcaagagaagtctgctttgactgccttgcctgaccaaattaaataaatagttgccagatctctacttttatcctgcatgggataatatatctgtaaatgcatgagtttggaaaccacccatcaaatatgaaaggctgatgagactgttaggattgataaacatttgttgtttgaacccagctatccaaactggggaagaaggggaaatggttgttaccaacaatctctagtagttattttaatctttattttaacctggattgcaaatgtatggggtatgaggagataatgaaagaaaagtggtcctcatgctggatatgtgactgttttgttctctgtaaagtgtattcttgggaagtgattggtttatatcagattcagaggagcccaattaactccagtgtaggtaatgtaaaacagtaagctcaaattgcagaagccagtatcctacagaaatttaagtagctactgcttctcctgaaagcccaagttgaaaatgggaccacaggggcacagggctactgaccctcacagggcatgccagcgttaacaccactttgagagaccaatggcaagaaatgctgtctcttgtgcattttactaatttccccattcttagggtagcagggtgggggtgtatagggtctttttgaagcagttttggataggtttgcaatatgtgggattcagcctttgatttcaatagagctgagagcttttagaacaagcaggcatttatttaatgtttccttagtccattggcaagctttatcaatagcttaatggcagaggataaaggctcaaacagatgatgttttttccacagaaaaacaaattgttgaatctattccgtgcatatttaaggattttgaattgattttgaaaatcatgaaacttgaactatttttctattccctttttttcttccccatttgctgccttttttgtttttgtgggggaagggttgggagtaagtttaaactcttccgaagattatgaatgggtcagcacaaatttttaggcaactgctttttccatgttctgagatctacgggctacaacaaattttatcagcagtgttttttgtttttttgagatggagacttgctctgtcgcccaggctggagcgcagtggcgcaatctcggctcactgcaacctccacctcctgggttcaagcaattcttgtgcctcagcctcccgagtagctgggattacaggcacccaccaccacgctcagctaatttttgtatttttagtagagatgggattttgtcatgttggctaggctagtctcgaattcctgacctcaagtgatccacccgccttggcctctcgaagtgctgggattacaggcgtgagccacccgcccggctatcagcactgttctgattgcagacgtttcacagcatgtttggcttttggtaaattcaatccaggaaagactagcatgtgcactttatctcataatcttccagtacatatgctctcagttgggatagcagttcatttccattaggcagacgtataaactaaggaatgttagtctgcagtattcattttaaaaatattgacatgcttttcccctcccctccatgaagtcagtgccagagtgagccagattgggaggttggggttttgtttggttggcttggttttcattaagggaaaaaacttgcattggacaatcaaattcccctgagtttcataatctcatcaatattttaagataggcgagcacacactaataatatctatgcctaccttcttgggtggactcaactgtaaccacagtttattagttgcttagaagtggatttttaaaaaacagttaaatgtgtgtgcataacacacaagtaatgacacactactattattattacctaagtagtgctcatcctctctttctgtgttttcttaggatgtgcactttaatttaggattgtaacgcctaataatatttctgtgagcctttaatgtgatttataagatggccgaattactgaaatcaccattatacctcttccataaaacgactccaaagttagacctgcctgttggggagaattctatagacagaaggtcaatgttgtccccatccataggggttgaattaccttgctgttaagtggtcttcccccattgggatcctacagtcccacagatgaaagcacagtagtagctgacagctggcttatttggtccctcggcatctctcgtatgtggcatattgcttttgccactttcctatccagcagacatcaaagcaaaactaaaaggtagatatctggaatgaatgtatatgttgtaattgaggcagatatttgccttaattggaaggatctaactgctttacaaatattaaacaagtgcttgggcatgattgggagaggaggcagcttagctggaagctgtgcccatcttactgtcactggagaataggatgtcagagctgggcaggactggtacccatcatttgcagtttgcatgtggggaaaccaaagccctaagaaacaacagttcctggcccaaaaaatccatagaaagaggtaactagtggcagatttggggcgccaacctgattttatggattttgagttagattctctaccctctatcaatactaaaaatagattaggagggtttttttttctgtttatcatgttgaatttcattgacttaattagtctttaaatttgaaaacatgttttagggagtttagttctagaaatttctcttagattgaagtgacagaatctgaaagaaaagaatatgattgagctatttgttttcctgaacacctcaccttttatgatgcaataagttactctgagtttcttggcagagtttttgacagctgttgctttcaatggattccattcctgtattccttatgggaggttgtttttaaaatagactactgcgattgaaatgaactcaatatgtagttaagttatagttttcttcaatgtatttttagttacttgggtcacaaatgttcaatttcagcatattttagggtgagtaatcaaaaatgtgaatttgcctttgatttcctaccactgtctgagctatcataaagcattctctttagttgtgatttgattctatagtctgtttctaaatgacatttgtctgtttcttaaatgatctcacagccatggtaataatagatgtgtactcagaagatcaataaggtaatattggaattcatgtgttttttgcaattaaggcaggcatttgccaatgtcttcttttaagcagtagttggaaacatctcaattacagtgtaacaccttagagctaaaaacatttgttcaacacaaactagaatcacaccttctcactagatatcaccaagggaatgtggttttaaaaataaaaagaaaacaatataacgtatcatggcaaccagagcttcccatattattgacaagtagggatcattaggttctggtttgaacattctgaatgtgaacaaaatgaaatagtagttaagaggtgttttcccactgtgtttaaagagaacactagtaattctggtttttctttctaactgctttactgtttcaagggtattcttttaaaactctgatttcaaaggatcagttgaatttatactttagttatgggtgttttgttactttttttttttttgtatcatgactcagtatggttcaatttcctagtaagaagtggggatttgtgtttttggagtcctcagctcacatgtcttgttcctccttcagcacaagctaggggagatcctaccaacactgataggtcagtcattgatggcaatttgaatgtgggtattactctgtgagccaccctgcttcgcttgtttgtaaggagaaatgcatctggttatgtgaatttcccgagagcagcagacatggagggccagactttaaaagcaacgcaagcagattcgaagagctgttgccctcttctaaaaaaggcttttggaggctgtgttacatgcatgccctaaagcagtcagtctgttagtatgagcaagacatctgaagtacacagttgcttttaggcttgtatagttattttctacacatgccaacacacatgatgataaaggaaccttttctaggaggcattgcagggtttcaatacacaggacatgttctagttacagaagccttgctctgctgtcaacaattgggaaatgctcattttttcatgttttgtgaatactctggtcttgctgtaagctaatgtcatggctgtgggatattagagaagtgggtttatgactctgaagaccagcagacaccagactttaaaagtgcttaaattggaatttggaaactacagtaaagaaaccttcagataccagttccatcctgaagccctctgttgaacaacagggccagatcctaaagctctttcagggagctcttctctggggctggaacagttgattatgcaaccccattgtgtggagattggatcaactgagttgtgttatttttgttttaagtcaccttgtgcgagaacctcaaccgcacctatcttgggaaccgggtatacccttttctttagcactgctatcctttttgtcttcagcacaaataagatgttcaagtgagccagaagcaagaagagccattttagtcttcatagctattggctaagagagataatgagctgatggtctattttaaccttgaaagtaaaaatgtatattttttcactacaagtacattgaacagtaaaaagtgtaacagcaaagtatatatttgatgccttctgtcttttcatgataatgtgctaacaagttgtgttaatattttactcagccagagtctcattcatttgctaagcattgggaacattatgtatattgaccttaaacataggtgtcctatatttggattgtgacttgtagactcaagctaaccttactgcctctttttcacacttgttgaaaagtctgtgaagaacatagttaaagatctccaactttggaaaatatacatgatgtgaaactggggtgctatgttaaaaataaatgtatgataactaagtgtgggt

SEQ ID NO: 173819 - DNA, 1789 bp, Homo sapiens
  Payload ID: 14132
  Gene Symbol: RALY
  Gene Name: RALY heterogeneous nuclear ribonucleoprotein
  Uniprot ID: Q9UKM9
  ENST ID: ENST00000246194
  CDS Start-End: 503-1423
ggctgcagactcctcgtgctcgtgtcaccgtgtccttcccaggagacagagaaggaggagagcccggaaccagggccggagcggcgggcggagccgagctgcggggagccgctccgggtgcccccacccccgcgcgcctcagtggtgccggccgagggcagggctcgcggttgcggggctcgcgccgctgtcagtgcggcggggcgcgcgagcggcgccagctcggggcagcggaacccagagaagctgagggggcggtagcggcggcgacggcgacgacgacgactcccgcgcgtgtgcccagcctcttcccgccgcagccgcccttttcctccctcccttacgtccccgagtgcggcagtaccgcctccttcccagccgcgcggcttcctccagacctctcggcgcgggtgagccctattcccagaggcaggtggtgctgaccctgtaacccaaaggaggaaacagctggctaagctcatcattgttactggtgggcaccatgtccttgaagcttcaggcaagcaatgtaaccaacaagaatgaccccaagtccatcaactctcgagtcttcattggaaacctcaacacagctctggtgaagaaatcagatgtggagaccatcttctctaagtatggccgtgtggccggctgttctgtgcacaagggctatgcctttgttcagtactccaatgagcgccatgcccgggcagctgtgctgggagagaatgggcgggtgctggccgggcagaccctggacatcaacatggctggagagcctaagcctgacagacccaaggggctaaagagagcagcatctgccatatacagtggctacatctttgactatgattactaccgggacgacttctacgacaggctcttcgactaccggggccgtctgtcgcccgtgccagtgcccagggcggtccctgtgaagcgaccccgggtcacagtccctttggtccggcgtgtcaaaactaacgtacctgtcaagctctttgcccgctccacagctgtcaccaccagctcagccaagatcaagttaaagagcagtgagctgcaggccatcaagacggagctgacacagatcaagtccaatatcgatgccctgctgagccgcttggagcagatcgctgcggagcaaaaggccaatccagatggcaagaagaagggtgatggaggtggcgccggcggcggcggcggtggtggtggcagcggtggcggtggcagtggtggtggcggtggcggtggcagcagccggccaccagccccccaagagaacacaacttctgaggcaggcctgccccagggggaagcacggacccgagacgacggcgatgaggaagggctcctgacacacagcgaggaagagctggaacacagccaggacacagacgcggatgatggggccttgcagtaagcagcctgacaggagcaatggccaccagcaggtgaagggcatcgctgccccaggcctcaagccgggcacccaaccctggatgccaccccccagcgggtaccagaggaaagctggcagcaggcgcctcctcccccaacgcatcccagccagtgccatgtcctctgcaggtggagttactggcctactccttccccatgagccctccctgtctgcactgcccaggccagagggtagagcacaggggtttccccatactacctcccctccccaggacactcccaggcttgggttttttctataggtttggcggggggccacagggaggggaccctgacaataaagagattggatcccaacctgttctga

SEQ ID NO: 173820 - DNA, 786 bp, Homo sapiens
  Payload ID: 14132
  Gene Symbol: RALY
  Gene Name: RALY heterogeneous nuclear ribonucleoprotein
  ENST ID: ENST00000333552
  CDS Start-End: 272-786
cggaacccagagaagctgagggggcggtagcggcggcgacggcgacgacgacgactcccgcgcgtgtgcccagcctcttcccgccgcagccgcccttttcctccctcccttacgtccccgagtgcggcagtaccgcctccttcccagccgcgcggcttcctccagacctctcggcgcgggtgagccctattcccagaggcaggtggtgctgaccctgtaacccaaaggaggaaacagctggctaagctcatcattgttactggtgggcaccatgtccttgaagcttcaggcaagcaatgtaaccaacaagaatgaccccaagtccatcaactctcgagtcttcattggaaacctcaacacagctctggtgaagaaatcagatgtggagaccatcttctctaatggctacatctttgactatgattactaccgggacgacttctacgacaggctcttcgactaccggggccgtctgtcgcccgtgccagtgcccagggcggtccctgtgaagcgaccccgggtcacagtccctttggtccggcgtgtcaaaactaacgtacctgtcaagctctttgcccgctccacagctgtcaccaccagctcagccaagatcaagttaaagagcagtgagctgcaggccatcaagacggagctgacacagatcaagtccaatatcgatgccctgctgagccgcttggagcagatcgctgcggagcaaaaggccaatccagatggcaagaagaagggtgatggaggtggcgccggcggcggcggcggtggtggtgg

SEQ ID NO: 173821 - DNA, 6430 bp, Homo sapiens
  Payload ID: 14132
  Gene Symbol: RALY
  Gene Name: RALY heterogeneous nuclear ribonucleoprotein
  Uniprot ID: Q9UKM9
  ENST ID: ENST00000375114
  CDS Start-End: 579-1451
tctggacctttccaaagccaggctgagagggtggggagagcccatgcgcctgggaagccgggctgtttctgggcggggctgcagactcctcgtgctcgtgtcaccgtgtccttcccaggagacagagaaggaggagagcccggaaccagggccggagcggcgggcggagccgagctgcggggagccgctccgggtgcccccacccccgcgcgcctcagtggtgccggccgagggcagggctcgcggttgcggggctcgcgccgctgtcagtgcggcggggcgcgcgagcggcgccagctcggggcagcggaacccagagaagctgagggggcggtagcggcggcgacggcgacgacgacgactcccgcgcgtgtgcccagcctcttcccgccgcagccgcccttttcctccctcccttacgtccccgagtgcggcagtaccgcctccttcccagccgcgcggcttcctccagacctctcggcgcgggtgagccctattcccagaggcaggtggtgctgaccctgtaacccaaaggaggaaacagctggctaagctcatcattgttactggtgggcaccatgtccttgaagcttcaggcaagcaatgtaaccaacaagaatgaccccaagtccatcaactctcgagtcttcattggaaacctcaacacagctctggtgaagaaatcagatgtggagaccatcttctctaagtatggccgtgtggccggctgttctgtgcacaagggctatgcctttgttcagtactccaatgagcgccatgcccgggcagctgtgctgggagagaatgggcgggtgctggccgggcagaccctggacatcaacatggctggagagcctaagcctgacagacccaaggggctaaagagagcagcatctgccatatacaggctcttcgactaccggggccgtctgtcgcccgtgccagtgcccagggcggtccctgtgaagcgaccccgggtcacagtccctttggtccggcgtgtcaaaactaacgtacctgtcaagctctttgcccgctccacagctgtcaccaccagctcagccaagatcaagttaaagagcagtgagctgcaggccatcaagacggagctgacacagatcaagtccaatatcgatgccctgctgagccgcttggagcagatcgctgcggagcaaaaggccaatccagatggcaagaagaagggtgatggaggtggcgccggcggcggcggcggtggtggtggcagcggtggcggtggcagtggtggtggcggtggcggtggcagcagccggccaccagccccccaagagaacacaacttctgaggcaggcctgccccagggggaagcacggacccgagacgacggcgatgaggaagggctcctgacacacagcgaggaagagctggaacacagccaggacacagacgcggatgatggggccttgcagtaagcagcctgacaggagcaatggccaccagcaggtgaagggcatcgctgccccaggcctcaagccgggcacccaaccctggatgccaccccccagcgggtaccagaggaaagctggcagcaggcgcctcctcccccaacgcatcccagccagtgccatgtcctctgcaggtggagttactggcctactccttccccatgagccctccctgtctgcactgcccaggccagagggtagagcacaggggtttccccatactacctcccctccccaggacactcccaggcttgggttttttctataggtttggcggggggccacagggaggggaccctgacaataaagagattggatcccaacctgttctgagatgggatggtttgtgttttctcatgaagatatcccggcccctctgccaaccaaaaagctggtctagggtgcctaatactgatccatctggaccttagtgtcctcagtggtgattaaaatggccagtggggccactggggagggttggatatgctggcccatgagcatcttgctggctgaagtgtcaagcagttgtgacccacttggtttaccccatagtaggtcaagaccttatctctttccccagcttctaagtctggtctttcccagctcttaaaaggattctagagtctgccagtctctaccttctctcttctggcttaggacactataattttttcatttggacgttgtcctcccaccagcctcccagtcttctgcctctgccctgtaccatctcccagcagccacgcagtctttctgaaacgtatcccttccctgcctaaaatccctttactgactcttcatcatcaggacaaaaccctacctcctgaatgtagggtgtaagatcctgcttactccagcctctcctgtttcttgtcaccacccctttcctgcccctgacacaaaccctacatctcagtctcacaaaacacacaagttcttcacactccgggcaggtttggtagcaaggaatagagcgtactccagtgacagcaatcagtaggaagtttgcatccggagacacgcagcctgtctgcccctgtcttgggccacccgtctagacatttgttctctaacaatcagccgggttccttcaaacgtgtgctgcttatacatgctcattgtgtactgctaatgtcacctacttcccccttcattccccacaatgaatggatccattttccccatgttcaagttcccaagagagaatcgactgccactgtaattttttttcctaatcactcataggttacaagtacctaccctggtccagtgaactgcgggattcatatgtggccacttaggctggtctcgttggtatggagctgtgggagggcagcacccagaaataggctttgttccaggcctggcacgtactcctcctgctcctactttctctacctgggaaatagccgctcaggacgaagctgctgctgtggtgtcgccacctctgagaagtctcccagaccctccgactgctctttaattgcctgttctctcctctggaagccttcccccaacacagaaaaattcaatcccatcatcaaaaagggctttaggttttccctccatctttacgtgttgatcaaagtttgcagatctgctggaatccttattgaaaactccccatttcaaaccaacccggtctacagcctccagggaagcttcctcctgggctttggctccatgttttggtagagggtggaggctttgggcagtgctcaaactccaccgggaagtctctctcactgagcagccctcctgcctgtcatcctgggcaggcgagcactctgaggccccagtgtagctctgtgctttgatattcccaagctctgctggggcctgactaggccagccccaaggtggccagagttctggcttcatacctgagccaaaagccccaatccatgcttggccattgcctgagtattagctgccccagggggatcacggtccccatatatttgcttgccatggaccctgggcagcagggagagagtagagatttgtcaagagcccatggtggaggctgaggccctgaggccatgagatgcaggcatggggtgagaaacaggccccttggaattgggctgggccttggcccagcttagtcaaatcaaaaggcttctatttggagagctgaagagggtgtacagaggaaggggctaggtctgcaaggagtgcctcatctccctgaagagctctcagtggaacatacttcacccatccatgtacccacatctttccttgcccagaaggcgagagccagctataacagacccatttcaataccctggcaagtcattactgcccttagctcttggtgtccccatctgtgaaacatgggggacagctgctagcctggattggaacttgggcaaagtccaaagaatgggatttagagctgaatgaacctcacactgagggcacaatagcactaggcactgcccccagagcctagtgctatatgcctgctgcaggtcctacccaagcatgctttactgaggaactcaacgtttcagagcttgagggtcaggttgatcatgggcttgtgaccataggcttccttagtatgccaggcttggagaaccgtgagaaaagcagggaagataccttcaagggtagcaggcatcagctctactcaccttggcccataaggctttgcctggtcatgctggcaccgggtcatatgctggacagggagaacgagagtcccatcctggaactccagaaaagcccctggatgctccagcccctgggaaagcacacagccaggcccttgggtgggaggttggcttctaacagtgcatacacatgcccttcctctgagtcggggcagcaaaaacatccattccgctgcgcaacagttgtcatttttctaacatctgaaaactccagaaggagatggtgataaatgtggtaccggattctgcctaaaggatcagtctttagatgttttcagattgaaagcctcatttgtgatcctcacagccatcttgaaagaatagagcagccagtgggtatactggattgtgagctaagaggcctgggactttccccctgttgctgccagccaggttgatgaccctgggcaagtctttttccttaccaggtctcagtttcctcagctgtaaaatgagaggttgatctggatcagggatagtaaatgggcctttgttcagttactgactgttgtataacaaaccacccccaaatttagtagccttaataaacatttattagctcctgagtgagtggcttggcagtttgggctgtgttcagtgtggtggttcttatctcatctgggccctcgtgtggctgaagtgagctggcagatcagctggggactggctggtctcagatggcctcgcccgcctgtcaggtggttggctgggcaactgggccacacgttccagcatctagcaggctgacccaggattctagacatcatggctgagttccaaaaaccgcaagagaagacaagcccagtatgcgagtgctcttgaggatattgctatgacgtatcttttggccaaagtaagtcacatggctaagcccaaattcttcttaacaggaggagcttcaaaatatggccatatttaaaaaatctacctcaggactcatttcacttgccaactcagaacttttagtagcagctgcctggagtgccttttgaggatctgcagcaattttcagactgtttggaaatactgacatgatagtttggcagtttctcttatgagcatggaattcaagtgtgggcacgtgagcgtcaggtatttgccatccctggccaggttgacccgtaaggtcataacctgccccataggatgttatatgcagtaggcctgtctgacaagaccacagaaatagagaaggcaaagcagagcaaaagattctgagccaggcatccttggttttcatcccaaccagatcattgattgattgaggttttaggcaaatcaaaatccctccaccagtagccagattcttcataataaacttcctccataacagtaaaccatttcctgaacacctgctgttaaaaagcacattttacatttacttaatctccacaaccaccctcagtaggtgtagtaaggacttctggttacaagttacagaaactgaattcagtcctgcttagtgggaggaagtttattggctcacaaattgtaaagtccagggatcttcagacatggggacttgggttcaaaagctgccatcgagaatccggttagccaggcatggtgacacgtgcctgtagtccccgctacttgggggactacagtgggagatcatttgcacctaggaggttaatgctgcggtgagccatgatcctgccgctgcactccagcctgggtgacaaagcgagaccccaactcaaggggaaaaaatctggttttcgggcaggttccaagaagtggtagagcatggccatagggcctgtgagaatagagggacagaggggagaatccccaaaaggagagcaaggcttggctaacaaaaacaggcatccactgtgtggttatgtctattctatagattttgtagatgaggtttaaaagcatggccccaagtaaaggtggcatctctatcctatcctcgcctttatctaaactctgtgaccgatcaatagcatatgatggtggtggtgctctgccagtctcccagtcccagactgaagcactagcagcttccacttattatctcttgggactctagctcttgggacccaaccaccatgctgtgaagcagcccaggccacacagagaggccacgtgtacatgttcagctgacagcagtatcaaatgtcagacatgagagaggaaggcttcaagatgactccagcccagccaccgtctgagaacaaagtaagaactgcctcactgatgccattcaaagcccagcaccatgagagataataaaacgttgtttgaagatgctaa

SEQ ID NO: 173822 - DNA, 766 bp, Homo sapiens
  Payload ID: 14132
  Gene Symbol: RALY
  Gene Name: RALY heterogeneous nuclear ribonucleoprotein
  ENST ID: ENST00000413297
  CDS Start-End: 499-766
gcggcgggcggagccgagctgcggggagccgctccgggtgcccccacccccgcgcgcctcagtggtgccggccgagggcagggctcgcggttgcggggctcgcgccgctgtcagtgcggcggggcgcgcgagcggcgccagctcggggcagcggaacccagagaagctgagggggcggtagcggcggcgacggcgacgacgacgactcccgcgcgtgtgcccagcctcttcccgccgcagccgcccttttcctccctcccttacgtccccgagtgcggcagtaccgcctccttcccagccgcgcggcttcctccagacctctcggcgcgggtgagccctattcccagaggcaggtggtgctgaccctgtaacccaaaggaggaaacagctggctaagctcatcattgttactgtcttcatttccctatttgtaaagttggagtgcctccctgtcccctcacgtctcatgtgtgtactcctaccatgcaggtgggcaccatgtccttgaagcttcaggcaagcaatgtaaccaacaagaatgaccccaagtccatcaactctcgagtcttcattggaaacctcaacacagctctggtgaagaaatcagatgtggagaccatcttctctaagtatggccgtgtggccggctgttctgtgcacaagggctatgcctttgttcagtactccaatgagcgccatgcccgggcagctgtgctgggagagaatgggcgggtgctggccgggcagaccctggacatcaacatgg

SEQ ID NO: 173823 - DNA, 1204 bp, Homo sapiens
  Payload ID: 14132
  Gene Symbol: RALY
  Gene Name: RALY heterogeneous nuclear ribonucleoprotein
  ENST ID: ENST00000448364
  CDS Start-End: 662-1204
ggagagcccatgcgcctgggaagccgggctgtttctgggcggggctgcagactcctcgtgctcgtgtcaccgtgtccttcccaggagacagagaaggaggagagcccggaaccagggccggagcggcgggcggagccgagctgcggggagccgctccgggtgcccccacccccgcgcgcctcagtggtgccggccgagggcagggctcgcggttgcggggctcgcgccgctgtcagtgcggcggggcgcgcgagcggcgccagctcggggcagcggaacccagagaagctgagggggcggtagcggcggcgacggcgacgacgacgactcccgcgcgtgtgcccagcctcttcccgccgcagccgcccttttcctccctcccttacgtccccgagtgcggcagtaccgcctccttcccagccgcgcggcttcctccagacctctcggcgcgggtgagccctattcccagaggcaggtggtgctgaccctgtaacccaaaggaggaaacagctggctaagctcatcattgttactggttcccagagagggggcttcttgaaaagcaagtagagcagaagactggtgagcacggtgtttcccagcatctccacagtgccagcacagaggaggacactcaagaaatgtttgttaagtgggcaccatgtccttgaagcttcaggcaagcaatgtaaccaacaagaatgaccccaagtccatcaactctcgagtcttcattggaaacctcaacacagctctggtgaagaaatcagatgtggagaccatcttctctaagtatggccgtgtggccggctgttctgtgcacaagggctatgcctttgttcagtactccaatgagcgccatgcccgggcagctgtgctgggagagaatgggcgggtgctggccgggcagaccctggacatcaacatggctggagagcctaagcctgacagacccaaggggctaaagagagcagcatctgccatatacagtggctacatctttgactatgattactaccgggacgacttctacgacaggctcttcgactaccggggccgtctgtcgcccgtgccagtgcccagggcggtccctgtgaagcgaccccgggtcacagtccctttggtccggcgtgtcaaaactaacgtacctgtcaagctctttgcccgctccacagctgtcaccaccagctcagccaagatcaag

SEQ ID NO: 173824 - DNA, 871 bp, Homo sapiens
  Payload ID: 14132
  Gene Symbol: RALY
  Gene Name: RALY heterogeneous nuclear ribonucleoprotein
  ENST ID: ENST00000442805
  CDS Start-End: 160-871
gcaactttcattccctctgaaataaaacagtgcttaggccagtacctagtctgtttccaactgtgcggtgagccctattcccagaggcaggtggtgctgaccctgtaacccaaaggaggaaacagctggctaagctcatcattgttactggtgggcaccatgtccttgaagcttcaggcaagcaatgtaaccaacaagaatgaccccaagtccatcaactctcgagtcttcattggaaacctcaacacagctctggtgaagaaatcagatgtggagaccatcttctctaagtatggccgtgtggccggctgttctgtgcacaagggctatgcctttgttcagtactccaatgagcgccatgcccgggcagctgtgctgggagagaatgggcgggtgctggccgggcagaccctggacatcaacatggctggagagcctaagcctgacagacccaaggggctaaagagagcagcatctgccatatacaggctcttcgactaccggggccgtctgtcgcccgtgccagtgcccagggcggtccctgtgaagcgaccccgggtcacagtccctttggtccggcgtgtcaaaactaacgtacctgtcaagctctttgcccgctccacagctgtcaccaccagctcagccaagatcaagttaaagagcagtgagctgcaggccatcaagacggagctgacacagatcaagtccaatatcgatgccctgctgagccgcttggagcagatcgctgcggagcaaaaggccaatccagatggcaagaagaagggtgatggaggtggcgccggcggcggcggcggtggtggtggcagcggtggcggtggcagtggtggtggcggtggcggtggcagcagcc

SEQ ID NO: 173825 - DNA, 595 bp, Homo sapiens
  Payload ID: 14133
  Gene Symbol: RALYL
  Gene Name: RALY RNA binding protein-like
  ENST ID: ENST00000522613
  CDS Start-End: 340-595
agatctagggaggagggaacagcagaggcaaaggcagcttgggagggatgggaaatggaaaatcagggaaacaaacaaacaaacaaacaaaatgaatgagtgaatgtgggcttgaatagtaaaacttccagagagaagacgatgggatctctccccaggtaactacctgtagatgaaaaatagatgaaatacacaaggaagtggcaagcaacaactttgagtggaaggtttttctggaaaaaaaaaaatgaagtgcggtttggtttccttgtcaacggaggatgaagtgaacagctgagcagctcgcagagagcaggattaaagcaaggagagccaatcatgactggcaaaacacagaccagcaacgtcaccaataagaatgaccccaagtccatcaactcccgtgttttcatcggcaatctaaatacggcaattgtcaagaaagttgacattgaagccattttttcaaagtatggaaaaatagttggatgttccgttcacaaaggttatgcatttgtacagtacatgagtgagcgacatgcaagagctgcagtggctggagaaaatgccagagtcatcgccggccaaccacttg

SEQ ID NO: 173826 - DNA, 1457 bp, Homo sapiens
  Payload ID: 14133
  Gene Symbol: RALYL
  Gene Name: RALY RNA binding protein-like
  ENST ID: ENST00000521376
  CDS Start-End: 89-529
cagtcttactgcaaagcaggagcacaacccgtctctttgtctccgtggtcaaatcaattacttcttagaaagtctaatttttttcaaaatgaccatgtacaagagcaaacgcagacatcagagatatatcaacatggcaggagagcccaaaccatacagaccaaaacctggaaacaagaggcccctttctgcactttacagacttgaatcaaaggaacctttcctgtctgttgggttatttgattaccacgggcgtgtgcctccacctccccgtgcagtaattccgctgaagcgtcccagagtggcagtcacaacgactcgcagggggaaaggagtcttttccatgaaaggtggatcgagatctactgccagtgggtcaacaggttctaaattgaaatcagatgagttacagaccatcaagaaagaattaacccagatcaaaactaaaattgactccttgctagggcgcctggagaagattgagaaacagcagaaggcggaggcagtttctacagataaagtgatctgaaataacgcatgatgccacaaagcagaaaagagaaactgtgacaacccccagaaatgtgaaaggaggtttcttactggacagcagcatctttggttcaatttatataaaaacccaaataaataaaatggacagtattgctcagttttagaaattccatttcttctatgttttaagctgtacaattgtcaggtttttatggtttaaattgtaaatgtgttttcccctttgctaattatgttttttttttcagtcttaaaatgtgaaaggcatttatgaatggtaagggaaacactatatacaaatgtatatttgtaaaagctatttttatgattagcatgtttcactgttgatcatatataaagtcaggtgatattgcaattctgtatttaaagcttatttccaacaatgtcatgtaagaaaagatgcatcttatgctagtttttataatttatttataatttatagtttaaagtacttcagatcataatgataaaatacttgaaaaagttatatttctgccctgtataagcaccctttttattaataaagaatgcagatatttcagatgtgatataatagttaaagaactgttggtttgatctgtgattaagttgagcatgctccgctctactgaactaaatgatccaattattacttcagtctgggtatgagattccatggacaagtaaggactagattgccaaggaaaagactgtcttgcccttggatccaaaagtttaaattagtgcatacatcatgtcatttcacctcctgttcctaggaactctccattcccaagcattgccagtgttttccagataatcttagctgttgtcttgtgctgtggaaatggaagaaaccatcttcacagaccgtaggagaattcaacatataatttcttaataaatactgtttcttttaaaacaaa

SEQ ID NO: 173827 - DNA, 1924 bp, Homo sapiens
  Payload ID: 14133
  Gene Symbol: RALYL
  Gene Name: RALY RNA binding protein-like
  Uniprot ID: Q86SE5
  ENST ID: ENST00000521695
  CDS Start-End: 329-1204
acagcgaaggcagcctcgccgcgagctgccgctgccgctgctgccgccactggtgttgccgctctcaggcgccaggctccccgtcgccgccgccgccgcctcgccagccagagttgggctccgtgggcttcccccctcgcagcctcggtccttccccgctgcctgcaagtcagcctggctccgagtcacgtgtcagtgcctgaggcagagactgcgagaaaaaaacgcgcttcattccttcttccaccgccatactgtattttatactaaatctcatttttattccaacattttactcccgctcggattaaagcaaggagagccaatcatgactggcaaaacacagaccagcaacgtcaccaataagaatgaccccaagtccatcaactcccgtgttttcatcggcaatctaaatacggcaattgtcaagaaagttgacattgaagccattttttcaaagtatggaaaaatagttggatgttccgttcacaaaggttatgcatttgtacagtacatgagtgagcgacatgcaagagctgcagtggctggagaaaatgccagagtcatcgccggccaaccacttgatatcaacatggcaggagagcccaaaccatacagaccaaaacctggaaacaagaggcccctttctgcactttacagacttgaatcaaaggaacctttcctgtctgttggcggttatgtctttgactatgattactacagagatgatttctacaatcggttatttgattaccacgggcgtgtgcctccacctccccgtgcagtaattccgctgaagcgtcccagagtggcagtcacaacgactcgcagggggaaaggagtcttttccatgaaaggtggatcgagatctactgccagtgggtcaacaggttctaaattgaaatcagatgagttacagaccatcaagaaagaattaacccagatcaaaactaaaattgactccttgctagggcgcctggagaagattgagaaacagcagaaggcggaggcagaagctcagaagaagcaattggaagagagtctagtgctgatccaagaggaatgtgtgtcagagattgcagatcactctacagaggagcctgctgaaggagggccagatgccgatggagaagagatgacagatgggatagaggaggacttcgatgaagatgggggtcatgagctgtttctacagataaagtgatctgaaataacgcatgatgccacaaagcagaaaagagaaactgtgacaacccccagaaatgtgaaaggaggtttcttactggacagcagcatctttggttcaatttatataaaaacccaaataaataaaatggacagtattgctcagttttagaaattccatttcttctatgttttaagctgtacaattgtcaggtttttatggtttaaattgtaaatgtgttttcccctttgctaattatgttttttttttcagtcttaaaatgtgaaaggcatttatgaatggtaagggaaacactatatacaaatgtatatttgtaaaagctatttttatgattagcatgtttcactgttgatcatatataaagtcaggtgatattgcaattctgtatttaaagcttatttccaacaatgtcatgtaagaaaagatgcatcttatgctagtttttataatttatttataatttatagtttaaagtacttcagatcataatgataaaatacttgaaaaagttatatttctgccctgtataagcaccctttttattaataaagaatgcagatatttcagatgtgatataatagttaaagaactgttggtttgatctgtgattaagttgagcatgctccgctctactgaactaaatgatccaattattacttcagtctgggtatgagattccatggacaagtaaggactagattgccaaggaaaagactg

SEQ ID NO: 173828 - DNA, 571 bp, Homo sapiens
  Payload ID: 14133
  Gene Symbol: RALYL
  Gene Name: RALY RNA binding protein-like
  ENST ID: ENST00000517988
  CDS Start-End: 256-511
aaaaaaccgagataattttatgatagatatcctgatatctatatctatattgtcccttatttctcccccttccctccccgtaaatcaattttcaaatgatggcagtggaaggtttttctggaaaaaaaaaaatgaagtgcggtttggtttccttgtcaacggaggatgaagtgaacagctgagcagctcgcagagagcagatatagcccttggcgaggtgcctggctccatagattaaagcaaggagagccaatcatgactggcaaaacacagaccagcaacgtcaccaataagaatgaccccaagtccatcaactcccgtgttttcatcggcaatctaaatacggcaattgtcaagaaagttgacattgaagccattttttcaaagtatggaaaaatagttggatgttccgttcacaaaggttatgcatttgtacagtacatgagtgagcgacatgcaagagctgcagtggctggagaaaatgccagagtcatcgccggccaaccacttgatatcaacatggcaggagagcccaaaccatacagaccaaaacctggaaacaagaggcccc

SEQ ID NO: 173829 - DNA, 1684 bp, Homo sapiens
  Payload ID: 14133
  Gene Symbol: RALYL
  Gene Name: RALY RNA binding protein-like
  Uniprot ID: Q86SE5
  ENST ID: ENST00000523850
  CDS Start-End: 98-754
agtgagcaacagtcttactgcaaagcaggagcacaacccgtctctttgtctccgtggtcaaatcaattacttcttagaaagtctaatttttttcaaaatgaccatgtacaagagcaaacgcagacatcagagatatatcaacatggcaggagagcccaaaccatacagaccaaaacctggaaacaagaggcccctttctgcactttacagacttgaatcaaaggaacctttcctgtctgttggcggttatgtctttgactatgattactacagagatgatttctacaatcggttatttgattaccacgggcgtgtgcctccacctccccgtgcagtaattccgctgaagcgtcccagagtggcagtcacaacgactcgcagggggaaaggagtcttttccatgaaaggtggatcgagatctactgccagtgggtcaacaggttctaaattgaaatcagatgagttacagaccatcaagaaagaattaacccagatcaaaactaaaattgactccttgctagggcgcctggagaagattgagaaacagcagaaggcggaggcagaagctcagaagaagcaattggaagagagtctagtgctgatccaagaggaatgtgtgtcagagattgcagatcactctacagaggagcctgctgaaggagggccagatgccgatggagaagagatgacagatgggatagaggaggacttcgatgaagatgggggtcatgagctgtttctacagataaagtgatctgaaataacgcatgatgccacaaagcagaaaagagaaactgtgacaacccccagaaatgtgaaaggaggtttcttactggacagcagcatctttggttcaatttatataaaaacccaaataaataaaatggacagtattgctcagttttagaaattccatttcttctatgttttaagctgtacaattgtcaggtttttatggtttaaattgtaaatgtgttttcccctttgctaattatgttttttttttcagtcttaaaatgtgaaaggcatttatgaatggtaagggaaacactatatacaaatgtatatttgtaaaagctatttttatgattagcatgtttcactgttgatcatatataaagtcaggtgatattgcaattctgtatttaaagcttatttccaacaatgtcatgtaagaaaagatgcatcttatgctagtttttataatttatttataatttatagtttaaagtacttcagatcataatgataaaatacttgaaaaagttatatttctgccctgtataagcaccctttttattaataaagaatgcagatatttcagatgtgatataatagttaaagaactgttggtttgatctgtgattaagttgagcatgctccgctctactgaactaaatgatccaattattacttcagtctgggtatgagattccatggacaagtaaggactagattgccaaggaaaagactgtcttgcccttggatccaaaagtttaaattagtgcatacatcatgtcatttcacctcctgttcctaggaactctccattcccaagcattgccagtgttttccagataatcttagctgttgtcttgtgctgtggaaatggaagaaaccatcttcacagaccgtaggagaattcaacatataatttcttaataaatactgtttcttttaaaac

SEQ ID NO: 173830 - DNA, 459 bp, Homo sapiens
  Payload ID: 14133
  Gene Symbol: RALYL
  Gene Name: RALY RNA binding protein-like
  ENST ID: ENST00000522647
  CDS Start-End: 317-459
agagccttgaggatggcaccggccctcgcacgctcaactcctgctcctcctcttcgcaatgagtaaacgacgcagtaggtcctacccagcctattttgctttaccaaagggctttgctttcttagggatgctgtctttggatcttttttttccctgttgtgttgcgttggttttaagtgcctgctggtgtcgtcttccaggggatggggaaatagtttcttataagatgatcacttgggtttaatgttgaggacgacgctgttagtttgcagtaatgaccctacacctctaaggattaaagcaaggagagccaatcatgactggcaaaacacagaccagcaacgtcaccaataagaatgaccccaagtccatcaactcccgtgttttcatcggcaatctaaatacggcaattgtcaagaaagttgacattgaagccattttttcaaagtatggaaaaat

SEQ ID NO: 173831 - DNA, 2682 bp, Homo sapiens
  Payload ID: 14133
  Gene Symbol: RALYL
  Gene Name: RALY RNA binding protein-like
  ENST ID: ENST00000518566
  CDS Start-End: 915-1757
tttatactaaatctcatttttattccaacattttactcccgctcggtgagtaccttctcagtggcattcttgtcctattcttttttttgtccttttttttggttttttgttttttttgtttttgttttttttctttttttccacttctttgattattgtttatatttgggaaagctggaggagcatggttttgagccttttcctgaatccaagtttttctagcatgcgatcgttctgtagacaaggcgctgtgtctcggagtccgcggcgaccgtgcccgctgggagcgtctcccaagtccagcaaaatgtgcaactggttttatggaaaaagcgatgtgaagtatggtgcctatttttttcctttgtaaaaataaaaagcatgtttctaactctttttttgcatactctttttctgataacatttttgtataggtgggattttacggcagtgtttacaagtttgtggtcttgcaatactggtgcaaaccactgagcaaagacattaattttatattttttgtgccctttttggaagccggtgaaaacaaattcgttttttttccctcctgtttttgatacccattgataacatgaaacttttcttacagctggtgattgggatcatttttaagcaaaatacttttttcctcctttaaattaactatgacttttgcacatttgacttttttaaaaaaccgagataattttatgatagatatcctgatatctatatctatattgtcccttatttctcccccttccctccccgtaaatcaattttcaaatgatggcagtggaaggtttttctggaaaaaaaaaaatgaagtgcggtttggtttccttgtcaacggaggatgaagtgaacagctgagcagctcgcagagagcaggattaaagcaaggagagccaatcatgactggcaaaacacagaccagcaacgtcaccaataagaatgaccccaagtccatcaactcccgtgttttcatcggcaatctaaatacggcaattgtcaagaaagttgacattgaagccattttttcaaagtatggaaaaatagttggatgttccgttcacaaaggttatgcatttgtacagtacatgagtgagcgacatgcaagagctgcagtggctggagaaaatgccagagtcatcgccggccaaccacttgatatcaacatggcaggagagcccaaaccatacagaccaaaacctggaaacaagaggcccctttctgcactttacagcggttatgtctttgactatgattactacagagatgatttctacaatcggttatttgattaccacgggcgtgtgcctccacctccccgtgcagtaattccgctgaagcgtcccagagtggcagtcacaacgactcgcagggggaaaggagtcttttccatgaaaggtggatcgagatctactgccagtgggtcaacaggttctaaattgaaatcagatgagttacagaccatcaagaaagaattaacccagatcaaaactaaaattgactccttgctagggcgcctggagaagattgagaaacagcagaaggcggaggcagaagctcagaagaagcaattggaagagagtctagtgctgatccaagaggaatgtgtgtcagagattgcagatcactctacagaggagcctgctgaaggagggccagatgccgatggagaagagatgacagatgggatagaggaggacttcgatgaagatgggggtcatgagctgtttctacagataaagtgatctgaaataacgcatgatgccacaaagcagaaaagagaaactgtgacaacccccagaaatgtgaaaggaggtttcttactggacagcagcatctttggttcaatttatataaaaacccaaataaataaaatggacagtattgctcagttttagaaattccatttcttctatgttttaagctgtacaattgtcaggtttttatggtttaaattgtaaatgtgttttcccctttgctaattatgttttttttttcagtcttaaaatgtgaaaggcatttatgaatggtaagggaaacactatatacaaatgtatatttgtaaaagctatttttatgattagcatgtttcactgttgatcatatataaagtcaggtgatattgcaattctgtatttaaagcttatttccaacaatgtcatgtaagaaaagatgcatcttatgctagtttttataatttatttataatttatagtttaaagtacttcagatcataatgataaaatacttgaaaaagttatatttctgccctgtataagcaccctttttattaataaagaatgcagatatttcagatgtgatataatagttaaagaactgttggtttgatctgtgattaagttgagcatgctccgctctactgaactaaatgatccaattattacttcagtctgggtatgagattccatggacaagtaaggactagattgccaaggaaaagactgtcttgcccttggatccaaaagtttaaattagtgcatacatcatgtcatttcacctcctgttcctaggaactctccattcccaagcattgccagtgttttccagataatcttagctgttgtcttgtgctgtggaaatggaagaaaccatcttcacagaccgtaggagaattcaacatataatttcttaataaatactgtttctttt

SEQ ID NO: 173832 - DNA, 1972 bp, Homo sapiens
  Payload ID: 14133
  Gene Symbol: RALYL
  Gene Name: RALY RNA binding protein-like
  Uniprot ID: Q86SE5
  ENST ID: ENST00000517638
  CDS Start-End: 125-1039
ggcagagaccgcatattccggaggggctggctccaggccacgcgagccggagctggagacatttccagagccttgaggatggcaccggccctcgcacgctcaactcctgctcctcctcttcgcaatgagtaaacgacgcagattaaagcaaggagagccaatcatgactggcaaaacacagaccagcaacgtcaccaataagaatgaccccaagtccatcaactcccgtgttttcatcggcaatctaaatacggcaattgtcaagaaagttgacattgaagccattttttcaaagtatggaaaaatagttggatgttccgttcacaaaggttatgcatttgtacagtacatgagtgagcgacatgcaagagctgcagtggctggagaaaatgccagagtcatcgccggccaaccacttgatatcaacatggcaggagagcccaaaccatacagaccaaaacctggaaacaagaggcccctttctgcactttacagacttgaatcaaaggaacctttcctgtctgttggcggttatgtctttgactatgattactacagagatgatttctacaatcggttatttgattaccacgggcgtgtgcctccacctccccgtgcagtaattccgctgaagcgtcccagagtggcagtcacaacgactcgcagggggaaaggagtcttttccatgaaaggtggatcgagatctactgccagtgggtcaacaggttctaaattgaaatcagatgagttacagaccatcaagaaagaattaacccagatcaaaactaaaattgactccttgctagggcgcctggagaagattgagaaacagcagaaggcggaggcagaagctcagaagaagcaattggaagagagtctagtgctgatccaagaggaatgtgtgtcagagattgcagatcactctacagaggagcctgctgaaggagggccagatgccgatggagaagagatgacagatgggatagaggaggacttcgatgaagatgggggtcatgagctgtttctacagataaagtgatctgaaataacgcatgatgccacaaagcagaaaagagaaactgtgacaacccccagaaatgtgaaaggaggtttcttactggacagcagcatctttggttcaatttatataaaaacccaaataaataaaatggacagtattgctcagttttagaaattccatttcttctatgttttaagctgtacaattgtcaggtttttatggtttaaattgtaaatgtgttttcccctttgctaattatgttttttttttcagtcttaaaatgtgaaaggcatttatgaatggtaagggaaacactatatacaaatgtatatttgtaaaagctatttttatgattagcatgtttcactgttgatcatatataaagtcaggtgatattgcaattctgtatttaaagcttatttccaacaatgtcatgtaagaaaagatgcatcttatgctagtttttataatttatttataatttatagtttaaagtacttcagatcataatgataaaatacttgaaaaagttatatttctgccctgtataagcaccctttttattaataaagaatgcagatatttcagatgtgatataatagttaaagaactgttggtttgatctgtgattaagttgagcatgctccgctctactgaactaaatgatccaattattacttcagtctgggtatgagattccatggacaagtaaggactagattgccaaggaaaagactgtcttgcccttggatccaaaagtttaaattagtgcatacatcatgtcatttcacctcctgttcctaggaactctccattcccaagcattgccagtgttttccagataatcttagctgttgtcttgtgctgtggaaatggaagaaaccatcttcacagaccgtaggagaattcaacatataatttcttaataaatactgtttcttttaaaacaaa

SEQ ID NO: 173833 - DNA, 2701 bp, Homo sapiens
  Payload ID: 14133
  Gene Symbol: RALYL
  Gene Name: RALY RNA binding protein-like
  Uniprot ID: Q86SE5
  ENST ID: ENST00000521268
  CDS Start-End: 1106-1981
cgccaggctccccgtcgccgccgccgccgcctcgccagccagagttgggctccgtgggcttcccccctcgcagcctcggtccttccccgctgcctgcaagtcagcctggctccgagtcacgtgtcagtgcctgaggcagagactgcgagaaaaaaacgcgcttcattccttcttccaccgccatactgtattttatactaaatctcatttttattccaacattttactcccgctcggtgagtaccttctcagtggcattcttgtcctattcttttttttgtccttttttttggttttttgttttttttgtttttgttttttttctttttttccacttctttgattattgtttatatttgggaaagctggaggagcatggttttgagccttttcctgaatccaagtttttctagcatgcgatcgttctgtagacaaggcgctgtgtctcggagtccgcggcgaccgtgcccgctgggagcgtctcccaagtccagcaaaatgtgcaactggttttatggaaaaagcgatgtgaagtatggtgcctatttttttcctttgtaaaaataaaaagcatgtttctaactctttttttgcatactctttttctgataacatttttgtataggtgggattttacggcagtgtttacaagtttgtggtcttgcaatactggtgcaaaccactgagcaaagacattaattttatattttttgtgccctttttggaagccggtgaaaacaaattcgttttttttccctcctgtttttgatacccattgataacatgaaacttttcttacagctggtgattgggatcatttttaagcaaaatacttttttcctcctttaaattaactatgacttttgcacatttgacttttttaaaaaaccgagataattttatgatagatatcctgatatctatatctatattgtcccttatttctcccccttccctccccgtaaatcaattttcaaatgatggcagtggaaggtttttctggaaaaaaaaaaatgaagtgcggtttggtttccttgtcaacggaggatgaagtgaacagctgagcagctcgcagagagcaggattaaagcaaggagagccaatcatgactggcaaaacacagaccagcaacgtcaccaataagaatgaccccaagtccatcaactcccgtgttttcatcggcaatctaaatacggcaattgtcaagaaagttgacattgaagccattttttcaaagtatggaaaaatagttggatgttccgttcacaaaggttatgcatttgtacagtacatgagtgagcgacatgcaagagctgcagtggctggagaaaatgccagagtcatcgccggccaaccacttgatatcaacatggcaggagagcccaaaccatacagaccaaaacctggaaacaagaggcccctttctgcactttacagacttgaatcaaaggaacctttcctgtctgttggcggttatgtctttgactatgattactacagagatgatttctacaatcggttatttgattaccacgggcgtgtgcctccacctccccgtgcagtaattccgctgaagcgtcccagagtggcagtcacaacgactcgcagggggaaaggagtcttttccatgaaaggtggatcgagatctactgccagtgggtcaacaggttctaaattgaaatcagatgagttacagaccatcaagaaagaattaacccagatcaaaactaaaattgactccttgctagggcgcctggagaagattgagaaacagcagaaggcggaggcagaagctcagaagaagcaattggaagagagtctagtgctgatccaagaggaatgtgtgtcagagattgcagatcactctacagaggagcctgctgaaggagggccagatgccgatggagaagagatgacagatgggatagaggaggacttcgatgaagatgggggtcatgagctgtttctacagataaagtgatctgaaataacgcatgatgccacaaagcagaaaagagaaactgtgacaacccccagaaatgtgaaaggaggtttcttactggacagcagcatctttggttcaatttatataaaaacccaaataaataaaatggacagtattgctcagttttagaaattccatttcttctatgttttaagctgtacaattgtcaggtttttatggtttaaattgtaaatgtgttttcccctttgctaattatgttttttttttcagtcttaaaatgtgaaaggcatttatgaatggtaagggaaacactatatacaaatgtatatttgtaaaagctatttttatgattagcatgtttcactgttgatcatatataaagtcaggtgatattgcaattctgtatttaaagcttatttccaacaatgtcatgtaagaaaagatgcatcttatgctagtttttataatttatttataatttatagtttaaagtacttcagatcataatgataaaatacttgaaaaagttatatttctgccctgtataagcaccctttttattaataaagaatgcagatatttcagatgtgatataatagttaaagaactgttggtttgatctgtgattaagttgagcatgctccgctctactgaactaaatgatccaattattacttcagtctgggtatgagattccatggacaagtaaggactagattgccaaggaaaagactg

SEQ ID NO: 173834 - DNA, 2168 bp, Homo sapiens
  Payload ID: 14133
  Gene Symbol: RALYL
  Gene Name: RALY RNA binding protein-like
  Uniprot ID: Q86SE5
  ENST ID: ENST00000522455
  CDS Start-End: 368-1243
tgggctcacagcgaaggcagcctcgccgcgagctgccgctgccgctgctgccgccactggtgttgccgctctcaggcgccaggctccccgtcgccgccgccgccgcctcgccagccagagttgggctccgtgggcttcccccctcgcagcctcggtccttccccgctgcctgcaagtcagcctggctccgagtcacgtgtcagtgcctgaggcagagactgcgagaaaaaaacgcgcttcattccttcttccaccgccatactgtattttatactaaatctcatttttattccaacattttactcccgctcgatatagcccttggcgaggtgcctggctccatagattaaagcaaggagagccaatcatgactggcaaaacacagaccagcaacgtcaccaataagaatgaccccaagtccatcaactcccgtgttttcatcggcaatctaaatacggcaattgtcaagaaagttgacattgaagccattttttcaaagtatggaaaaatagttggatgttccgttcacaaaggttatgcatttgtacagtacatgagtgagcgacatgcaagagctgcagtggctggagaaaatgccagagtcatcgccggccaaccacttgatatcaacatggcaggagagcccaaaccatacagaccaaaacctggaaacaagaggcccctttctgcactttacagacttgaatcaaaggaacctttcctgtctgttggcggttatgtctttgactatgattactacagagatgatttctacaatcggttatttgattaccacgggcgtgtgcctccacctccccgtgcagtaattccgctgaagcgtcccagagtggcagtcacaacgactcgcagggggaaaggagtcttttccatgaaaggtggatcgagatctactgccagtgggtcaacaggttctaaattgaaatcagatgagttacagaccatcaagaaagaattaacccagatcaaaactaaaattgactccttgctagggcgcctggagaagattgagaaacagcagaaggcggaggcagaagctcagaagaagcaattggaagagagtctagtgctgatccaagaggaatgtgtgtcagagattgcagatcactctacagaggagcctgctgaaggagggccagatgccgatggagaagagatgacagatgggatagaggaggacttcgatgaagatgggggtcatgagctgtttctacagataaagtgatctgaaataacgcatgatgccacaaagcagaaaagagaaactgtgacaacccccagaaatgtgaaaggaggtttcttactggacagcagcatctttggttcaatttatataaaaacccaaataaataaaatggacagtattgctcagttttagaaattccatttcttctatgttttaagctgtacaattgtcaggtttttatggtttaaattgtaaatgtgttttcccctttgctaattatgttttttttttcagtcttaaaatgtgaaaggcatttatgaatggtaagggaaacactatatacaaatgtatatttgtaaaagctatttttatgattagcatgtttcactgttgatcatatataaagtcaggtgatattgcaattctgtatttaaagcttatttccaacaatgtcatgtaagaaaagatgcatcttatgctagtttttataatttatttataatttatagtttaaagtacttcagatcataatgataaaatacttgaaaaagttatatttctgccctgtataagcaccctttttattaataaagaatgcagatatttcagatgtgatataatagttaaagaactgttggtttgatctgtgattaagttgagcatgctccgctctactgaactaaatgatccaattattacttcagtctgggtatgagattccatggacaagtaaggactagattgccaaggaaaagactgtcttgcccttggatccaaaagtttaaattagtgcatacatcatgtcatttcacctcctgttcctaggaactctccattcccaagcattgccagtgttttccagataatcttagctgttgtcttgtgctgtggaaatggaagaaaccatcttcacagaccgtaggagaattcaacatataatttcttaataaatactgtttctttt

SEQ ID NO: 173835 - DNA, 837 bp, Homo sapiens
  Payload ID: 14134
  Gene Symbol: RANBP1
  Gene Name: RAN binding protein 1
  Uniprot ID: P43487
  ENST ID: ENST00000331821
  CDS Start-End: 103-708
gccggcgccagacgcggagggaaggagctacgagtagccgccgagaggccgcggagccagcgacgaccgacccagccgagccgccgccgccgccgcgcccccatggcggccgccaaggacactcatgaggaccatgatacttccactgagaatacagacgagtccaaccatgaccctcagtttgagccaatagtttctcttcctgagcaagaaattaaaacactggaagaagatgaagaggaactttttaaaatgcgggcaaaactgttccgatttgcctctgagaacgatctcccagaatggaaggagcgaggcactggtgacgtcaagctcctgaagcacaaggagaaaggggccatccgcctcctcatgcggagggacaagaccctgaagatctgtgccaaccactacatcacgccgatgatggagctgaagcccaacgcaggtagcgaccgtgcctgggtctggaacacccacgctgacttcgccgacgagtgccccaagccagagctgctggccatccgcttcctgaatgctgagaatgcacagaaattcaaaacaaagtttgaagaatgcaggaaagagatcgaagagagagaaaagaaagcaggatcaggcaaaaatgatcatgccgaaaaagtggcggaaaagctagaagctctctcggtgaaggaggagaccaaggaggatgctgaggagaagcaataaatcgtcttattttattttcttttcctctctttcctttcctttttttaaaaaattttaccctgcccctctttttcggtttgtttttattctttcatttttacaagggacgttatataaagaactgaactc

SEQ ID NO: 173836 - DNA, 1132 bp, Homo sapiens
  Payload ID: 14134
  Gene Symbol: RANBP1
  Gene Name: RAN binding protein 1
  Uniprot ID: P43487
  ENST ID: ENST00000402752
  CDS Start-End: 227-829
gagtgtccgcctcctgagccaataaagctgtactggttttgaatcgcggcgcgtttcccgccgctggggtcaggggtcgaggttcgggtcgtggggcggagggaagagcgggcgggcgggaggcgccggcgccagacgcggagggaaggagctacgagtagccgccgagaggccgcggagccagcgacgaccgacccagccgagccgccgccgccgccgcgcccccatggcggccgccaaggacactcatgaggaccatgatacttccactgagaatacagacgagtccaaccatgaccctcagtttgagccaatagtttctcttcctgagcaagaaattaaaacactggaagaagatgaagaggaactttttaaaatgcgggcaaaactgttccgatttgcctctgagaacgatctcccagaatggaaggagcgaggcactggtgacgtcaagctcctgaagcacaaggagaaaggggccatccgcctcctcatgcggagggacaagaccctgaagatctgtgccaaccactacatcacgccgatgatggagctgaagcccaacgcaggtagcgaccgtgcctgggtctggaacacccacgctgacttcgccgacgagtgccccaagccagagctgctggccatccgcttcctgaatgctgagaatgcacagaaattcaaaacaaagtttgaagaatgcaggaaagagatcgaagagagagaaaagaaaggatcaggcaaaaatgatcatgccgaaaaagtggcggaaaagctagaagctctctcggtgaaggaggagaccaaggaggatgctgaggagaagcaataaatcgtcttattttattttcttttcctctctttcctttcctttttttaaaaaattttaccctgcccctctttttcggtttgtttttattctttcatttttacaagggacgttatataaagaactgaactcaacattcaggttgttttttttttttgtttctaagtttttgccctattgaagatgacttcagaaaatccattccccagtcatgaaaatgtactgtgctaactttcttttccatagtggaaacacttatttatagtcatcaaaaatagtgaataaaaaacacatttggaacctggg

SEQ ID NO: 173837 - DNA, 1879 bp, Homo sapiens
  Payload ID: 14134
  Gene Symbol: RANBP1
  Gene Name: RAN binding protein 1
  ENST ID: ENST00000435265
  CDS Start-End: 248-469
agatcctgtgctgggcctcccaactggtgcatggacaggctgaggaagcacaggccgggcagagccctggccaagaggggcgtcttgcgcccacactcacttggcaagtttctgcagcacctgctcgcactccagctgcttccgctcaagctgctcagcatagggcactgtccatagaggggtcaccacgtcggccactcgtgttactggtggctcactctcaccctcctgtcgcctcctcctggccatggggtcggccttgggccgggccaggcgcacactgagtgggcggcctttccagagggcaccatgcaaaacgcgcagggccttgtccctctctgcagcgctgcggaatgtcacaaaggcgcagggtggttgcccaaagagtttggttttgtggggctgcagaccaaagcggcccaggaagcgccggacgtcgctgaagctggcgtggcgaggacactcatgaggaccatgatacttccactgagaatacagacgagtccaaccatgaccctcagtttgagccaatagtttctcttcctgagcaagaaattaaaacactggaagaagatgaagaggaactttttaaaatgcgggcaaaactgttccgatttgcctctgagaacgatctcccagaatggaaggagcgaggcactggtgacgtcaagctcctgaagcacaaggagaaaggggccatccgcctcctcatgcggagggacaagaccctgaagatctgtgccaaccactacaacgtgcctctgaactcagagcaggcccgcagcgaagcttagagcacacgggggtgtggagtcagccagacgggccctgatgggaggacgcagcgcccaggctgggctcgggacgaggatcacgccgatgatggagctgaagcccaacgcaggtagcgaccgtgcctgggtctggaacacccacgctgacttcgccgacgagtgccccaagccagagctgctggccatccgcttcctgaatgctgagaatgcacagaaattcaaaacaaagtttgaagaatgcaggaaagagatcgaagagagagaaaagaaaggtgacgtggtgccatgggttggggggcttctttgcagactcactctgcatctgactatacttccaggcgggtgctttttctgtctgccagataaacattccagggtgctgtggccgcctcacgtatccagagtgatgcagctccctggggacacaggtgcttcctggggagccctgagcacttgtcagtgttgctggcctcagtccaattgggcaggcattggagtccgggcactgcctggagctcaccagaaggtgctttatgatggtcctcggtttgtctctcagagggcttggtcacctctgccatgaggctggactgcagctgtggtggcaagtgaccagatgtcactgagcagcctgaccatggtctaggcagtgcttgagtgcatccacctggcttcctttcgtcactgaatttcaagaagacagactccaggaggcggcttggccaggcaggagtctgtcccgagggcgggcaagccgctgtgggtgggtgacggcacttgggaccagcctggcgagggccatgtgcttgaatgcaccgtgcttctgttttctcactgtgctgcttgtgtttttagcaggatcaggcaaaaatgatcatgccgaaaaagtggcggaaaagctagaagctctctcggtgaaggaggagaccaaggaggatgctgaggagaagcaataaatcgtcttattttattttcttttcctctctttcctttcctttttttaaaaaattttaccctgcccctctttttcggtttgtttttattctttcatttttacaagggacgttatataaagaactgaactc

SEQ ID NO: 173838 - DNA, 584 bp, Homo sapiens
  Payload ID: 14134
  Gene Symbol: RANBP1
  Gene Name: RAN binding protein 1
  ENST ID: ENST00000411892
  CDS Start-End: 94-584
agacgcggagggaaggagctacgagtagccgccgagaggccgcggagccagcgacgaccgacccagccgagccgccgccgccgccgcgcccccatggcggccgccaaggacactcatgaggaccatgatacttccactgagaatacagacgagtccaaccatgaccctcagtttgagccaatagtttctcttcctgagcaagaaattaaaacactggaagaagatgaagaggaactttttaaaatgcgggcaaaactgttccgatttgcctctgagaacgatctcccagaatggaaggagcgaggcactggtgacgtcaagctcctgaagcacaaggagaaaggggccatccgcctcctcatgcggagggacaagaccctgaagatctgtgccaaccactacatcacgccgatgatggagctgaagcccaacgcaggtagcgaccgtgcctgggtctggaacacccacgctgacttcgccgacgagtgccccaagccagagctgctggccatccgcttcctgaatgctgagagtgagccaagggccctggggacctgcctgacttggggctcacctgcgtggca

SEQ ID NO: 173839 - DNA, 333 bp, Homo sapiens
  Payload ID: 14134
  Gene Symbol: RANBP1
  Gene Name: RAN binding protein 1
  ENST ID: ENST00000421656
  CDS Start-End: 174-333
gaggcctgggggctgcagggcccccgcgtgaccttggggacactcatgaggaccatgatacttccactgagaatacagacgagtccaaccatgaccctcagtttgagccaatagtttctcttcctgagcaagaaattaaaacactggaagaagatgaagaggaactttttaaaatgcgggcaaaactgttccgatttgcctctgagaacgatctcccagaatggaaggagcgaggcactggtgacgtcaagctcctgaagcacaaggagaaaggggccatccgcctcctcatgcggagggacaagaccctgaagatctgtgccaaccactaca

SEQ ID NO: 173840 - DNA, 1389 bp, Homo sapiens
  Payload ID: 14134
  Gene Symbol: RANBP1
  Gene Name: RAN binding protein 1
  ENST ID: ENST00000430524
  CDS Start-End: 248-1084
agatcctgtgctgggcctcccaactggtgcatggacaggctgaggaagcacaggccgggcagagccctggccaagaggggcgtcttgcgcccacactcacttggcaagtttctgcagcacctgctcgcactccagctgcttccgctcaagctgctcagcatagggcactgtccatagaggggtcaccacgtcggccactcgtgttactggtggctcactctcaccctcctgtcgcctcctcctggccatggggtcggccttgggccgggccaggcgcacactgagtgggcggcctttccagagggcaccatgcaaaacgcgcagggccttgtccctctctgcagcgctgcggaatgtcacaaaggcgcagggtggttgcccaaagagtttggttttgtggggctgcagaccaaagcggcccaggaagcgccggacgtcgctgaagctggcgtggcgaggcacgttctgcagctccagtttaaagatctcagaggacactcatgaggaccatgatacttccactgagaatacagacgagtccaaccatgaccctcagtttgagccaatagtttctcttcctgagcaagaaattaaaacactggaagaagatgaagaggaactttttaaaatgcgggcaaaactgttccgatttgcctctgagaacgatctcccagaatggaaggagcgaggcactggtgacgtcaagctcctgaagcacaaggagaaaggggccatccgcctcctcatgcggagggacaagaccctgaagatctgtgccaaccactacatcacgccgatgatggagctgaagcccaacgcaggtagcgaccgtgcctgggtctggaacacccacgctgacttcgccgacgagtgccccaagccagagctgctggccatccgcttcctgaatgctgagaatgcacagaaattcaaaacaaagtttgaagaatgcaggaaagagatcgaagagagagaaaagaaagcaggatcaggcaaaaatgatcatgccgaaaaagtggcggaaaagctagaagctctctcggtgaaggaggagaccaaggaggatgctgaggagaagcaataaatcgtcttattttattttcttttcctctctttcctttcctttttttaaaaaattttaccctgcccctctttttcggtttgtttttattctttcatttttacaagggacgttatataaagaactgaactcaacattcaggttgttttttttttttgtttctaagtttttgccctattgaagatgacttcagaaaatccattccccagtcatgaaaatgtactgtgctaactttcttttccatagtggaaacacttatttatagtcatcaaaaatagtgaataaaaaacacatttggaacctgggcc

SEQ ID NO: 173841 - DNA, 645 bp, Homo sapiens
  Payload ID: 14134
  Gene Symbol: RANBP1
  Gene Name: RAN binding protein 1
  ENST ID: ENST00000416427
  CDS Start-End: 486-645
tctgctgggcctcggtggcgcggagtcggggcgcgtggggtttgggggctcgaggcctgcggagttggggcgtttgggggtgcaggctctgcagaggcctgggggctgcagggcccccgcgtgaccttggggtgggttggggagcggccgtcgccacgcgggacggccccagcctccaggaactggtgcgggcggcgggtttcctccggctcggcccacttggggctccccactagtacggtgcatttattctttccgtcgcccacgcagcacttcattcattcggttcttacgtctggaaccgccactggcctctgtggcagaagctcgcgttccagcgtggggcacaggacactcatgaggaccatgatacttccactgagaatacagacgagtccaaccatgaccctcagtttgagccaatagtttctcttcctgagcaagaaattaaaacactggaagaagatgaagaggaactttttaaaatgcgggcaaaactgttccgatttgcctctgagaacgatctcccagaatggaaggagcgaggcactggtgacgtcaagctcctgaagcacaaggagaaaggggccatccgcctcctcatgcggagggacaagaccctgaagatctgtgccaaccactaca

SEQ ID NO: 173842 - DNA, 832 bp, Homo sapiens
  Payload ID: 14134
  Gene Symbol: RANBP1
  Gene Name: RAN binding protein 1
  ENST ID: ENST00000423859
  CDS Start-End: 219-832
gccacgcgggacggccccagcctccaggaactggtgcgggcggcgggtttcctccggctcggcccacttggggctccccactagacactcatgaggaccatgatacttccactgagaatacagacgagtccaaccatgaccctcagtttgagccaatagtttctcttcctgagcaagaaattaaaacactggaagaagatgaagaggaactttttaaaatgcgggcaaaactgttccgatttgcctctgagaacgatctcccagaatggaaggagcgaggcactggtgacgtcaagctcctgaagcacaaggagaaaggggccatccgcctcctcatgcggagggacaagaccctgaagatctgtgccaaccactacatcacgccgatgatggagctgaagcccaacgcaggtagcgaccgtgcctgggtctggaacacccacgctgacttcgccgacgagtgccccaagccagagctgctggccatccgcttcctgaatgctgagaatgcacagaaattcaaaacaaagtttgaagaatgcaggaaagagatcgaagagagagaaaagaaaggtgacgtggtgccatgggttggggggcttctttgcagactcactctgcatctgactatacttccaggcgggtgctttttctgtctgccagataaacattccagggtgctgtggccgcctcacgtatccagagtgatgcagctccctggggacacaggtgcttcctggggagccctgagcacttgtcagtgttgctggcctcagtccaattgggcaggcattggagtccgggcactgcctggagctcaccagaaggtgct

SEQ ID NO: 173843 - DNA, 744 bp, Homo sapiens
  Payload ID: 14134
  Gene Symbol: RANBP1
  Gene Name: RAN binding protein 1
  ENST ID: ENST00000432879
  CDS Start-End: 248-744
agatcctgtgctgggcctcccaactggtgcatggacaggctgaggaagcacaggccgggcagagccctggccaagaggggcgtcttgcgcccacactcacttggcaagtttctgcagcacctgctcgcactccagctgcttccgctcaagctgctcagcatagggcactgtccatagaggggtcaccacgtcggccactcgtgttactggtggctcactctcaccctcctgtcgcctcctcctggccatggggtcggccttgggccgggccaggcgcacactgagtgggcggcctttccagagggcaccatgcaaaacgcgcagggccttgtccctctctgcagcgctgcggaatgtcacaaaggcgcagggtggttgcccaaagagtttggttttgtggggctgcagaccaaagcggcccaggaagcgccggacgtcgctgaagctggcgtggcgaggcacgttctgcagctccagtttaaagatctcagaggacactcatgaggaccatgatacttccactgagaatacagacgagtccaaccatgaccctcagtttgagccaatagtttctcttcctgagcaagaaattaaaacactggaagaagatgaagaggaactttttaaaatgcgggcaaaactgttccgatttgcctctgagaacgatctcccagaatggaaggagcgaggcactggtgacgtcaagctcctgaagcacaaggagaaaggggccatccgcctcct

SEQ ID NO: 173844 - DNA, 932 bp, Homo sapiens
  Payload ID: 14134
  Gene Symbol: RANBP1
  Gene Name: RAN binding protein 1
  ENST ID: ENST00000418705
  CDS Start-End: 497-932
gcctccaggaactggtgcgggcggcgggtttcctccggctcggcccacttggggctccccactagtacggtgcatttattctttccgtcgcccacgcagcacttcattcattcggttcttacgtctggaaccgccactggcctctgtggcagaagctcgcgttccagcgtggggcacaggtcctagatgcgccgacccaggcggcggctttgttggctgcggtgtctggttgagtgcgggccgctgcagagccgcagtgctgtggggaacagtgaagagcagcgaaaagcttatgttttcttttccagtttgagtctagtggtgaagtcttgggtctcttacggacttctgggtgaccaaggacactcatgaggaccatgatacttccactgagaatacagacgagtccaaccatgaccctcagtttgagccaatagtttctcttcctgagcaagaaattaaaacactggaagaagatgaagaggaactttttaaaatgcgggcaaaactgttccgatttgcctctgagaacgatctcccagaatggaaggagcgaggcactggtgacgtcaagctcctgaagcacaaggagaaaggggccatccgcctcctcatgcggagggacaagaccctgaagatctgtgccaaccactacatcacgccgatgatggagctgaagcccaacgcaggtagcgaccgtgcctgggtctggaacacccacgctgacttcgccgacgagtgccccaagccagagctgctggccatccgcttcctgaatgctgagaatgcacagaaattcaaaacaaagtttgaagaatgcaggaaagagatcgaagagagagaaaagaaaggatcaggcaaaaatgatcatgccgaaaaagtggcggaaaagctagaagctctctcggtgaaggaggagaccaaggaggatg

SEQ ID NO: 173845 - DNA, 5341 bp, Homo sapiens
  Payload ID: 14135
  Gene Symbol: RANBP10
  Gene Name: RAN binding protein 10
  Uniprot ID: Q6VN20
  ENST ID: ENST00000317506
  CDS Start-End: 117-1979
ggactcggactcggtttccctgcggcccagggaggctcacgggccattggctgagcggggcggatctggtcccgctcctccccgcccccagtgacacaatagtagctccctccaagatggcggcagcgacggcagacccgggagctgggaacccgcagcctggggactcctccggcgggggcgctgggggcgggctgccgtcccctggggagcaggagctgagccggcgcttgcagcgcctgtatcccgcggtcaaccagcaagagactccgctgccgcgctcctggagccccaaggacaaatacaactacattggtctctcccagggcaacctccgcgtccactacaaaggtcatggcaaaaatcacaaagatgcggcctcagtgcgtgccacccaccccatacctgctgcctgtggcatttattactttgaagtgaagattgtcagcaaaggaagagatggttacatgggaataggactctcggctcaaggcgtcaacatgaacagacttcctggttgggacaaacattcctatggttaccatggtgatgatgggcattcgttctgctcctcggggactggccagccctatggtcccacattcaccacaggagacgtgatcggctgctgtgtcaacctcatcaatggcacctgcttctacaccaagaatggccacagccttggtatagccttcacagacctcccggccaacctctaccccaccgtaggcctgcagacacctggggagattgtggacgccaactttgggcagcagcccttcctgtttgacattgaggactacatgcgggagtggcgtgccaaggtccagggcacggtccactgcttccccatcagtgcccggcttggcgagtggcaggcagtgctgcagaacatggtttcatcttacctcgtgcatcatgggtattgtgccacagccacggcttttgctcgaatgactgaaaccccgattcaggaagaacaggcgtccataaagaacagacaaaagatccagaagctggtgctggagggccgtgtgggcgaggccatcgagaccacccagcgcttctacccagggctgctggagcacaaccccaacctcctcttcatgctcaagtgccggcagtttgtggagatggtgaatgggacggacagtgaggtccgaagtttgagctcccgaagccccaagtcccaggacagctaccctggctcccccagcctcagtccccgacatggccccagtagttcccacatgcacaacacaggagcagacagtcccagctgtagcaatggcgtcgcgtccaccaagagcaaacagaaccacagtaaataccctgcacccagctcctcatcctcgtcctcctcctcctcctcgtcctcttccccatcctccgtcaattactccgagtccaactcaacagactccaccaagtcccagcaccacagcagtaccagtaaccaggagaccagcgacagtgagatggagatggaggcagagcactaccccaacggtgtgctaggaagcatgtccacacgcattgttaatggtgcctacaagcatgaggacctgcagacggatgagtccagcatggatgacaggcatcctcggcggcagctctgcgggggcaaccaggctgccacagaaaggatcattctgtttggccgcgagttgcaggcattgagtgagcagttgggccgggagtacggcaagaatttggcccacacagagatgctgcaggatgccttcagcctgctggcatactcagacccctggagctgcccagttggccagcagcttgaccccatccagagggaacctgtgtgtgctgccctcaacagcgccattttagagtcccagaacctgccaaagcagccccctctgatgctcgccctgggccaggcatctgagtgtctccggctcatggcccgagcaggcctgggttcttgctcctttgccagagttgatgactacttgcactagctgactgtgctggctggctctggctggccctccactggccccagggctggagctgccctgccctccataggcaactggtgcagggactgggaaaccatagacagagtccactcctcctgcctggcctttccccctctccctttccttccttccttcctttctctgcccaccaccccgctcagtctctctctctctccccttcacgtgcagcggcctgtaacacagtattggctggttactctcatgtagcgccttctattttgaaaggggggttttgttttgaggaggggttggggtttttaaatttttttctcctgactgagccaccagtatttatctctggagagtttgtgctgagctggtttctgctaatttagtgatgaagcctatccaagttggtgatagcttattattttcataagtaaaaaacaaatgagattatatatatatatataaaaatatatatattaaaaaaaaagacagtatttatcgtagcattagtggtccagcacctcttgggtgaggctgtccaggcaccatgttttctttgagtccaactcattaaaaaagaagaatctctgtcacctcagccaagtgatttattttttgctcccccttttttgagtcacaggccgagctgcagcctaggaaacccaaatagggtttggtgggccacttagtgggcatggttacattggtttatagcatcccaagaactgtagatccctaggcccctgagagctggacagagcagagaactacagggccaagggtccagagaagtgataacttggcccagggccacacagcagaggtagagggtccttggccagcacactatctaccactctaccccacctcccactgcctgccttgctcccctttcctcccttttcaataccctatcttcccttgttgttaagatggccaaataatacatttactctaaattgattgcctggaaactacctgccttcgtcctgagagcttctgtgtgtcaggctgctggaaagaagactccattcccaggacagaggcccttgagtacaggggctgctttcttcctgcctagatcttcaccatctctgcacagctctgagagaatggatgctttctgttgagaaaccagtaccttgtggaggcaggttcttgggctgctactccagggagtggatggaatccttggtcccctaggccagacttcactgccactgtgccagacagctccctgcagctgggccctagccactcttaggaaagactattgggagtatttgctggccagagaatgggactctatcagctttacacatgtcccaccagctgtttcagatagatccttacagctggcagagtaaaagtggtcccgctaccattggggaatcaggaaaggaaagactgagatggttgccaggacttggggtggcccacctgtggagaggactggctgccctggaggaggaaagggaggaagtctacacagaggagcaccaggacggctggaatttccatatgtgcttcacattgtgaggggagtgcacaagccgcccatgcaaagagtagggtcagccatggcaaggccggaagttgaactttcagtccctgcctgaatctgggctttgcaagctcctgctccatattggtggacatgggaatggttggtgtggcctgagatacccattgctcaccaggcctcactgggcccacagctgggcaacaagaaaaatgtttgaattggaccaactgctggtgatggggccagggccctgggccctgtgctgtcagaattctgccttgggaaatgatcctatagctgctgctttttcttggtccttggggctggcagacccatagaccatggcctgttaggaggcgtcctgtctgtaaaggaaattcatctcttgtgacagcctggggctacctagctcccaaacccagaagttggagacatcaggctgtttaaatgatcatagcctagcaggattggattaaaaccacaggcttttgcagctggaatggggttcagtgaacatctcccccattcctctcttgctacaaataaggaaacaggcccaggagattaagtgacttggctaaagtcacatagcaaattagtagcagagccgggactatcccttatccctgtgggttgggcaacactatttagtcctgaaaccgaatggcagataaaccccatgaggggtcaggctgatgtgccctccagcagtatctgagaagctgctaccttcaggggtgtgtcagggatgaggacgggtgcctgagcttaggttgtggagtggctgagagggcccaggagggctcgggacagctgtgtgctgcatggggttgggtgtctgcctggctcgcacttggtacccatggccacctccccattttctgtgccttatctcactgtttcagctgagtccaagttgtttactctgttcctctccagaggggctctctgtcccagttgggcagctcacctttgggacataagcctttgccccacaagctgtggagagggccaaaaccaagctgcttgagcccactctcttgctgagagtccaggcctgcctgcctgccagccagaggtgccccttatgcacatccagtcctaccagcctgcttccaggagcctagagtgggaaaggcacctgggggagccctggtgaagggctggacctgacccatggaggcaggaggaagacctggctttcttggtttgtccggccctggggagcagccttccctactcactttccccttgcggcaccaaatggtcactccttccagagcaaaaactggcactcatagcaagccagaacccccatccccatcctcatgggtctgtggctgggtgcaggccatcaaaatggacaccacgagacagaagtggggactgcctggccacctagcgccttcccactccttaagcaagcacaaagaagatgaggcagagaattgtcagagctgaaagttcctttggttgctcacaactcaggtatgcacccatgtggcagccaggcagcggagccctactagactgccagtctcatgcacccagacctgtggccagattgtggcctctggctgcctcaggcattttcctctttgcattgggttttcctgcattagtaactacagctgcaacagacatcctccacattgtgcacactggttttgcctttgtcctcaagagttgatacttggcattagcatgaaacttgtgggtgtgggaggatggagagagaactctaacacaaaacatcttattaaaattgtacttgagagacaaaaaaaaaactctgttgtattttgacagaattatttttattaaaatacacatccatgagcagtca

SEQ ID NO: 173846 - DNA, 2232 bp, Homo sapiens
  Payload ID: 14135
  Gene Symbol: RANBP10
  Gene Name: RAN binding protein 10
  Uniprot ID: Q6VN20
  ENST ID: ENST00000448631
  CDS Start-End: 25-1809
gacacaatagtagctccctccaagatggcggcagcgacggcagacccgggagctgggaacccgcagcctggggactcctccggcgggggcgctgggggcgggctgccgtcccctggggagcaggagctgagccggcgcttgcagcgcctgtatcccgcggtcaaccagcaagagactccgctgccgcgctcctggagccccaaggacaaatacaactacattggtctctcccagggcaacctccgcgtccactacaaaggtcatggcaaaaatcacaaagatgcggcctcagtgcgtgccacccaccccatacctgctgcctgtggcatttattactttgaagtgaagattgtcagcaaaggaagagatggttacatgggaataggactctcggctcaaggcgtcaacatgaacagacttcctggtatagccttcacagacctcccggccaacctctaccccaccgtaggcctgcagacacctggggagattgtggacgccaactttgggcagcagcccttcctgtttgacattgaggactacatgcgggagtggcgtgccaaggtccagggcacggtccactgcttccccatcagtgcccggcttggcgagtggcaggcagtgctgcagaacatggtttcatcttacctcgtgcatcatgggtattgtgccacagccacggcttttgctcgaatgactgaaaccccgattcaggaagaacaggcgtccataaagaacagacaaaagatccagaagctggtgctggagggccgtgtgggcgaggccatcgagaccacccagcgcttctacccagggctgctggagcacaaccccaacctcctcttcatgctcaagtgccggcagtttgtggagatggtgaatgggacggacagtgaggtccgaagtttgagctcccgaagccccaagtcccaggacagctaccctggctcccccagcctcagtccccgacatggccccagtagttcccacatgcacaacacaggagcagacagtcccagctgtagcaatggcgtcgcgtccaccaagagcaaacagaaccacagtaaataccctgcacccagctcctcatcctcgtcctcctcctcctcctcgtcctcttccccatcctccgtcaattactccgagtccaactcaacagactccaccaagtcccagcaccacagcagtaccagtaaccaggagaccagcaacccatggctacagcttgaaaggaggcccaaccaggctgctccaaccacaccccctgggccaactcccacctcaacccctccccacagcgacagtgagatggagatggaggcagagcactaccccaacggtgtgctaggaagcatgtccacacgcattgttaatggtgcctacaagcatgaggacctgcagacggatgagtccagcatggatgacaggcatcctcggcggcagctctgcgggggcaaccaggctgccacagaaaggatcattctgtttggccgcgagttgcaggcattgagtgagcagttgggccgggagtacggcaagaatttggcccacacagagatgctgcaggatgccttcagcctgctggcatactcagacccctggagctgcccagttggccagcagcttgaccccatccagagggaacctgtgtgtgctgccctcaacagcgccattttagagtcccagaacctgccaaagcagccccctctgatgctcgccctgggccaggcatctgagtgtctccggctcatggcccgagcaggcctgggttcttgctcctttgccagagttgatgactacttgcactagctgactgtgctggctggctctggctggccctccactggccccagggctggagctgccctgccctccataggcaactggtgcagggactgggaaaccatagacagagtccactcctcctgcctggcctttccccctctccctttccttccttccttcctttctctgcccaccaccccgctcagtctctctctctctccccttcacgtgcagcggcctgtaacacagtattggctggttactctcatgtagcgccttctattttgaaaggggggttttgttttgaggaggggttggggtttttaaatttttttctcctgactgagccaccagtatttatctctggagagtttgtgctgagctggtttctgctaatttagtgatgaagcctatccaagttggtgatagcttattattttcataagt

SEQ ID NO: 173847 - DNA, 577 bp, Homo sapiens
  Payload ID: 14135
  Gene Symbol: RANBP10
  Gene Name: RAN binding protein 10
  ENST ID: ENST00000602815
  CDS Start-End: 25-273
gacacaatagtagctccctccaagatggcggcagcgacggcagacccgggagctgggaacccgcagcctggggactcctccggcgggggcgctgggggcgggctgccgtcccctggggagcaggagctgagccggcgcttgcagcgcctgtatcccgcggtcaaccagcaagagactccgctgccgcgctcctggagccccaaggacaaatacaactacattggtctctcccagggcaacctccgcgtccactacaaagttacatgggaataggactctcggctcaaggcgtcaacatgaacagacttcctggttgggacaaacattcctatggttaccatggtgatgatgggcattcgttctgctcctcggggactggccagccctatggtcccacattcaccacaggagacgtgatcggctgctgtgtcaacctcatcaatggcacctgcttctacaccaagaatggccacagccttggtatagccttcacagacctcccggccaacctctaccccaccgtaggcctgcagacacctggggagattgtggacgccaactttgggcagcagccctt

SEQ ID NO: 173848 - DNA, 2374 bp, Homo sapiens
  Payload ID: 14135
  Gene Symbol: RANBP10
  Gene Name: RAN binding protein 10
  ENST ID: ENST00000602677
  CDS Start-End: 25-1977
gacacaatagtagctccctccaagatggcggcagcgacggcagacccgggagctgggaacccgcagcctggggactcctccggcgggggcgctgggggcgggctgccgtcccctggggagcaggagctgagccggcgcttgcagcgcctgtatcccgcggtcaaccagcaagagactccgctgccgcgctcctggagccccaaggacaaatacaactacattggtctctcccagggcaacctccgcgtccactacaaaggtcatggcaaaaatcacaaagatgcggcctcagtgcgtgccacccaccccatacctgctgcctgtggcatttattactttgaagtgaagattgtcagcaaaggaagagatggttacatgggaataggactctcggctcaaggcgtcaacatgaacagacttcctggttgggacaaacattcctatggttaccatggtgatgatgggcattcgttctgctcctcggggactggccagccctatggtcccacattcaccacaggagacgtgatcggctgctgtgtcaacctcatcaatggcacctgcttctacaccaagaatggccacagccttggtatagccttcacagacctcccggccaacctctaccccaccgtaggcctgcagacacctggggagattgtggacgccaactttgggcagcagcccttcctgtttgacattgaggactacatgcgggagtggcgtgccaaggtccagggcacggtccactgcttccccatcagtgcccggcttggcgagtggcaggcagtgctgcagaacatggtttcatcttacctcgtgcatcatgggtattgtgccacagccacggcttttgctcgaatgactgaaaccccgattcaggaagaacaggcgtccataaagaacagacaaaagatccagaagctggtgctggagggccgtgtgggcgaggccatcgagaccacccagcgcttctacccagggctgctggagcacaaccccaacctcctcttcatgctcaagtgccggcagtttgtggagatggtgaatgggacggacagtgaggtccgaagtttgagctcccgaagccccaagtcccaggacagctaccctggctcccccagcctcagtccccgacatggccccagtagttcccacatgcacaacacaggagcagacagtcccagctgtagcaatggcgtcgcgtccaccaagagcaaacagaaccacagtaaataccctgcacccagctcctcatcctcgtcctcctcctcctcctcgtcctcttccccatcctccgtcaattactccgagtccaactcaacagactccaccaagtcccagcaccacagcagtaccagtaaccaggagaccagcaacccatggctacagcttgaaaggaggcccaaccaggctgctccaaccacaccccctgggccaactcccacctcaacccctccccacagcgacagtgagatggagatggaggcagagcactaccccaacggtgtgctaggaagcatgtccacacgcattgttaatggtgcctacaagcatgaggacctgcagacggatgagtccagcatggatgacaggcatcctcggcggcagctctgcgggggcaaccaggctgccacagaaaggatcattctgtttggccgcgagttgcaggcattgagtgagcagttgggccgggagtacggcaagaatttggcccacacagagatgctgcaggatgccttcagcctgctggcatactcagacccctggagctgcccagttggccagcagcttgaccccatccagagggaacctgtgtgtgctgccctcaacagcgccattttagagtcccagaacctgccaaagcagccccctctgatgctcgccctgggccaggcatctgagtgtctccggctcatggcccgagcaggcctgggttcttgctcctttgccagagttgatgactacttgcactagctgactgtgctggctggctctggctggccctccactggccccagggctggagctgccctgccctccataggcaactggtgcagggactgggaaaccatagacagagtccactcctcctgcctggcctttccccctctccctttccttccttccttcctttctctgcccaccaccccgctcagtctctctctctctccccttcacgtgcagcggcctgtaacacagtattggctggttactctcatgtagcgccttctattttgaaaggggggttttgttttgaggaggggttggggtttttaaatttttttctcctgactgagccaccagtatttatctctggagagtttgtgctgagctggtttctgctaatttagtgatgaagcctatccaagtt

SEQ ID NO: 173849 - DNA, 2756 bp, Homo sapiens
  Payload ID: 14135
  Gene Symbol: RANBP10
  Gene Name: RAN binding protein 10
  ENST ID: ENST00000602506
  CDS Start-End: 22-471
acaatagtagctccctccaagatggcggcagcgacggcagacccgggagctgggaacccgcagcctggggactcctccggcgggggcgctgggggcgggctgccgtcccctggggagcaggagctgagccggcgcttgcagcgcctgtatcccgcggtcaaccagcaagagactccgctgccgcgctcctggagccccaaggacaaatacaactacattggtctctcccagggcaacctccgcgtccactacaaaggtcatggcaaaaatcacaaagatgcggcctcagtgcgtgccacccaccccatacctgctgcctgtggcatttattactttgaagtgaagattgtcagcaaaggaagagatggttacatgggaataggactctcggctcaaggcgtcaacatgaacagacttcctgatcccacttccagaaacctgagttctttgctccaggtccaacagaggtgaacccacttgccccagactggggttattttcctgcaaaaaccggatcctcgtgtgttccccatctctgctgacagccactgtccaccttggcccccaggactaagtgtcattgaatccactcctgactcacatttggtcatatggggaaatagacatcaagggctgtggtcagctggtggagcagagcatggattctggagctataccacctgcatttgcatcctggcggctgtgttacctggacctgggacccatgttacagctgacagtccctgcagtgtccaccattaacaccacctctctctggagcatctttcaccttgggatctacagtacttcacaggggtctgctgtggggcagccaggtccctctgtgagggaagccatgcttcttccgagctgggttgggacaaacattcctatggttaccatggtgatgatgggcattcgttctgctcctcggggactggccagccctatggtcccacattcaccacaggagacgtgatcggctgctgtgtcaacctcatcaatggcacctgcttctacaccaagaatggccacagccttggtatagccttcacagacctcccggccaacctctaccccaccgtaggcctgcagacacctggggagattgtggacgccaactttgggcagcagcccttcctgtttgacattgaggactacatgcgggagtggcgtgccaaggtccagggcacggtccactgcttccccatcagtgcccggcttggcgagtggcaggcagtgctgcagaacatggtttcatcttacctcgtgcatcatgggtattgtgccacagccacggcttttgctcgaatgactgaaaccccgattcaggaagaacaggcgtccataaagaacagacaaaagatccagaagctggtgctggagggccgtgtgggcgaggccatcgagaccacccagcgcttctacccagggctgctggagcacaaccccaacctcctcttcatgctcaagtgccggcagtttgtggagatggtgaatgggacggacagtgaggtccgaagtttgagctcccgaagccccaagtcccaggacagctaccctggctcccccagcctcagtccccgacatggccccagtagttcccacatgcacaacacaggagcagacagtcccagctgtagcaatggcgtcgcgtccaccaagagcaaacagaaccacagtaaataccctgcacccagctcctcatcctcgtcctcctcctcctcctcgtcctcttccccatcctccgtcaattactccgagtccaactcaacagactccaccaagtcccagcaccacagcagtaccagtaaccaggagaccagcgacagtgagatggagatggaggcagagcactaccccaacggtgtgctaggaagcatgtccacacgcattgttaatggtgcctacaagcatgaggacctgcagacggatgagtccagcatggatgacaggcatcctcggcggcagctctgcgggggcaaccaggctgccacagaaaggatcattctgtttggccgcgagttgcaggcattgagtgagcagttgggccgggagtacggcaagaatttggcccacacagagatgctgcaggatgccttcagcctgctggcatactcagacccctggagctgcccagttggccagcagcttgaccccatccagagggaacctgtgtgtgctgccctcaacagcgccattttagagtcccagaacctgccaaagcagccccctctgatgctcgccctgggccaggcatctgagtgtctccggctcatggcccgagcaggcctgggttcttgctcctttgccagagttgatgactacttgcactagctgactgtgctggctggctctggctggccctccactggccccagggctggagctgccctgccctccataggcaactggtgcagggactgggaaaccatagacagagtccactcctcctgcctggcctttccccctctccctttccttccttccttcctttctctgcccaccaccccgctcagtctctctctctctccccttcacgtgcagcggcctgtaacacagtattggctggttactctcatgtagcgccttctattttgaaaggggggttttgttttgaggaggggttggggtttttaaatttttttctcctgactgagccaccagtatttatctctggagagtttgtgctgagctggtttctgctaatttagtgatgaagcctatccaagttggtgatagcttattattttcat

SEQ ID NO: 173850 - DNA, 1248 bp, Homo sapiens
  Payload ID: 14135
  Gene Symbol: RANBP10
  Gene Name: RAN binding protein 10
  ENST ID: ENST00000602638
  CDS Start-End: 25-405
gacacaatagtagctccctccaagatggcggcagcgacggcagacccgggagctgggaacccgcagcctggggactcctccggcgggggcgctgggggcgggctgccgtcccctggggagcaggagctgagccggcgcttgcagcgcctgtatcccgcggtcaaccagcaagagactccgctgccgcgctcctggagccccaaggacaaatacaactacattggtctctcccagggcaacctccgcgtccactacaaaggtcatggcaaaaatcacaaagatgcggcctcagtgcgtgccacccaccccatacctgctgcctgtggcatttattactttgaagtgaagattgtcagcaaaggaagagatgggttgggacaaacattcctatggttaccatggtgatgatgggcattcgttctgctcctcggggactggccagccctatggtcccacattcaccacaggagacgtgatcggctgctgtgtcaacctcatcaatggcacctgcttctacaccaagaatggccacagccttggtatagccttcacagacctcccggccaacctctaccccaccgtaggcctgcagacacctggggagattgtggacgccaactttgggcagcagcccttcctgtttgacattgaggactacatgcgggagtggcgtgccaaggtccagggcacggtccactgcttccccatcagtgcccggcttggcgagtggcaggcagtgctgcagaacatggtttcatcttacctcgtgcatcatgggtattgtgccacagccacggcttttgctcgaatgactgaaaccccgattcaggaagaacaggcgtccataaagaacagacaaagtaaggtttattctactttcccctttcccttcctcacctgtccctaactctgctctctggctcatgtcaaccctggttaacctgtcaggagtccattcagctctggtcctcatgaccagcttgcagctcgaggccatgttcctgtcccaccttcaagatggcactgcccagatggacagttggcaggatggagacgtctcagggcagcctccctaatgcacattctgaaggctgggcgcaggccaggccctggcatggctggttccattcctccatttcctccctgcttgtttccttccccctgaatcctggattcctctcaacctcctgttcatggtcttccaggaaggctgtttgcctgccttagtagttctgcttattcctagcc

SEQ ID NO: 173851 - DNA, 5305 bp, Homo sapiens
  Payload ID: 14135
  Gene Symbol: RANBP10
  Gene Name: RAN binding protein 10
  ENST ID: ENST00000630626
  CDS Start-End: 117-1979
ggactcggactcggtttccctgcggcccagggaggctcacgggccattggctgagcggggcggatctggtcccgctcctccccgcccccagtgacacaatagtagctccctccaagatggcggcagcgacggcagacccgggagctgggaacccgcagcctggggactcctccggcgggggcgctgggggcgggctgccgtcccctggggagcaggagctgagccggcgcttgcagcgcctgtatcccgcggtcaaccagcaagagactccgctgccgcgctcctggagccccaaggacaaatacaactacattggtctctcccagggcaacctccgcgtccactacaaaggtcatggcaaaaatcacaaagatgcggcctcagtgcgtgccacccaccccatacctgctgcctgtggcatttattactttgaagtgaagattgtcagcaaaggaagagatggttacatgggaataggactctcggctcaaggcgtcaacatgaacagacttcctggttgggacaaacattcctatggttaccatggtgatgatgggcattcgttctgctcctcggggactggccagccctatggtcccacattcaccacaggagacgtgatcggctgctgtgtcaacctcatcaatggcacctgcttctacaccaagaatggccacagccttggtgtgtgcataagggaccttggagccaacctctaccccaccgtaggcctgcagacacctggggagattgtggacgccaactttgggcagcagcccttcctgtttgacattgaggactacatgcgggagtggcgtgccaaggtccagggcacggtccactgcttccccatcagtgcccggcttggcgagtggcaggcagtgctgcagaacatggtttcatcttacctcgtgcatcatgggtattgtgccacagccacggcttttgctcgaatgactgaaaccccgattcaggaagaacaggcgtccataaagaacagacaaaagatccagaagctggtgctggagggccgtgtgggcgaggccatcgagaccacccagcgcttctacccagggctgctggagcacaaccccaacctcctcttcatgctcaagtgccggcagtttgtggagatggtgaatgggacggacagtgaggtccgaagtttgagctcccgaagccccaagtcccaggacagctaccctggctcccccagcctcagtccccgacatggccccagtagttcccacatgcacaacacaggagcagacagtcccagctgtagcaatggcgtcgcgtccaccaagagcaaacagaaccacagtaaataccctgcacccagctcctcatcctcgtcctcctcctcctcctcgtcctcttccccatcctccgtcaattactccgagtccaactcaacagactccaccaagtcccagcaccacagcagtaccagtaaccaggagaccagcgacagtgagatggagatggaggcagagcactaccccaacggtgtgctaggaagcatgtccacacgcattgttaatggtgcctacaagcatgaggacctgcagacggatgagtccagcatggatgacaggcatcctcggcggcagctctgcgggggcaaccaggctgccacagaaaggatcattctgtttggccgcgagttgcaggcattgagtgagcagttgggccgggagtacggcaagaatttggcccacacagagatgctgcaggatgccttcagcctgctggcatactcagacccctggagctgcccagttggccagcagcttgaccccatccagagggaacctgtgtgtgctgccctcaacagcgccattttagagtcccagaacctgccaaagcagccccctctgatgctcgccctgggccaggcatctgagtgtctccggctcatggcccgagcaggcctgggttcttgctcctttgccagagttgatgactacttgcactagctgactgtgctggctggctctggctggccctccactggccccagggctggagctgccctgccctccataggcaactggtgcagggactgggaaaccatagacagagtccactcctcctgcctggcctttccccctctccctttccttccttccttcctttctctgcccaccaccccgctcagtctctctctctctccccttcacgtgcagcggcctgtaacacagtattggctggttactctcatgtagcgccttctattttgaaaggggggttttgttttgaggaggggttggggtttttaaatttttttctcctgactgagccaccagtatttatctctggagagtttgtgctgagctggtttctgctaatttagtgatgaagcctatccaagttggtgatagcttattattttcataagtaaaaaacaaatgagattatatatatatatataaaaatatatatattaaaaaaaaagacagtatttatcgtagcattagtggtccagcacctcttgggtgaggctgtccaggcaccatgttttctttgagtccaactcattaaaaaagaagaatctctgtcacctcagccaagtgatttattttttgctcccccttttttgagtcacaggccgagctgcagcctaggaaacccaaatagggtttggtgggccacttagtgggcatggttacattggtttatagcatcccaagaactgtagatccctaggcccctgagagctggacagagcagagaactacagggccaagggtccagagaagtgataacttggcccagggccacacagcagaggtagagggtccttggccagcacactatctaccactctaccccacctcccactgcctgccttgctcccctttcctcccttttcaataccctatcttcccttgttgttaagatggccaaataatacatttactctaaattgattgcctggaaactacctgccttcgtcctgagagcttctgtgtgtcaggctgctggaaagaagactccattcccaggacagaggcccttgagtacaggggctgctttcttcctgcctagatcttcaccatctctgcacagctctgagagaatggatgctttctgttgagaaaccagtaccttgtggaggcaggttcttgggctgctactccagggagtggatggaatccttggtcccctaggccagacttcactgccactgtgccagacagctccctgcagctgggccctagccactcttaggaaagactattgggagtatttgctggccagagaatgggactctatcagctttacacatgtcccaccagctgtttcagatagatccttacagctggcagagtaaaagtggtcccgctaccattggggaatcaggaaaggaaagactgagatggttgccaggacttggggtggcccacctgtggagaggactggctgccctggaggaggaaagggaggaagtctacacagaggagcaccaggacggctggaatttccatatgtgcttcacattgtgaggggagtgcacaagccgcccatgcaaagagtagggtcagccatggcaaggccggaagttgaactttcagtccctgcctgaatctgggctttgcaagctcctgctccatattggtggacatgggaatggttggtgtggcctgagatacccattgctcaccaggcctcactgggcccacagctgggcaacaagaaaaatgtttgaattggaccaactgctggtgatggggccagggccctgggccctgtgctgtcagaattctgccttgggaaatgatcctatagctgctgctttttcttggtccttggggctggcagacccatagaccatggcctgttaggaggcgtcctgtctgtaaaggaaattcatctcttgtgacagcctggggctacctagctcccaaacccagaagttggagacatcaggctgtttaaatgatcatagcctagcaggattggattaaaaccacaggcttttgcagctggaatggggttcagtgaacatctcccccattcctctcttgctacaaataaggaaacaggcccaggagattaagtgacttggctaaagtcacatagcaaattagtagcagagccgggactatcccttatccctgtgggttgggcaacactatttagtcctgaaaccgaatggcagataaaccccatgaggggtcaggctgatgtgccctccagcagtatctgagaagctgctaccttcaggggtgtgtcagggatgaggacgggtgcctgagcttaggttgtggagtggctgagagggcccaggagggctcgggacagctgtgtgctgcatggggttgggtgtctgcctggctcgcacttggtacccatggccacctccccattttctgtgccttatctcactgtttcagctgagtccaagttgtttactctgttcctctccagaggggctctctgtcccagttgggcagctcacctttgggacataagcctttgccccacaagctgtggagagggccaaaaccaagctgcttgagcccactctcttgctgagagtccaggcctgcctgcctgccagccagaggtgccccttatgcacatccagtcctaccagcctgcttccaggagcctagagtgggaaaggcacctgggggagccctggtgaagggctggacctgacccatggaggcaggaggaagacctggctttcttggtttgtccggccctggggagcagccttccctactcactttccccttgcggcaccaaatggtcactccttccagagcaaaaactggcactcatagcaagccagaacccccatccccatcctcatgggtctgtggctgggtgcaggccatcaaaatggacaccacgagacagaagtggggactgcctggccacctagcgccttcccactccttaagcaagcacaaagaagatgaggcagagaattgtcagagctgaaagttcctttggttgctcacaactcaggtatgcacccatgtggcagccaggcagcggagccctactagactgccagtctcatgcacccagacctgtggccagattgtggcctctggctgcctcaggcattttcctctttgcattgggttttcctgcattagtaactacagctgcaacagacatcctccacattgtgcacactggttttgcctttgtcctcaagagttgatacttggcattagcatgaaacttgtgggtgtgggaggatggagagagaactctaacacaaaacatcttattaaaattgtacttgagagacaaaaaaaaaactctgttgtattttgacaga

SEQ ID NO: 173852 - DNA, 3653 bp, Homo sapiens
  Payload ID: 14136
  Gene Symbol: RANBP17
  Gene Name: RAN binding protein 17
  Uniprot ID: Q9H2T7
  ENST ID: ENST00000389118
  CDS Start-End: 103-1833
gaccccgcgggcgtctggggcttccgcggcgcccgcctctgctccctcccctcgggcgctgggtgccgaccggccggctggccggcgccgcctcctgggaagatggcgctgcacttccagagtttggctgaattggaagtgttatgtactcatctctacatagggactgatcttacacaaagaatagaggctgagaaagcactcttggaacttattgacagtccagaatgtctcagcaagtgtcaacttttattagaacaaggaacaacatcctatgctcagctccttgcagcaacatgtctttcaaaacttgtcagccgagtcagtcctttacctgttgagcagaggatggacatcagaaactacattctgaattacgtggcatcacagcccaagctggctccctttgtcatccaagctcttattcaagtcattgctaaaatcactaagttggggtggtttgaggttcagaaagaccaatttgtcttcagagaaattattgctgatgtgaagaagtttctccagggtactgtggaacactgcataataggagtaataatcctttctgaattgactcaggaaatgaacctggttgattattctagaccttcagcaaaacacaggaaaatagctacctcatttcgtgatacttctctcaaagacgttttagtgctagcatgctctcttttaaaagaggtgtttgccaaacctttaaatcttcaggatcaatgtcagcaaaatctggtaatgcaggtcttgaaactggtccttaactgccttaactttgacttcattggcagttcagcagatgaatctgcagatgatctttgcacggtgcagattccaacaacttggagaacaattttcctggaaccagaaacattggatcttttcttcaatttgtatcattcacttccaccactactatctcagttagcactttcatgtttagttcagtttgcttcgacaagaaggtccttatttaacagtcctgaacgtgccaagtaccttggtaatttaattaagggagtaaaaaggatacttgaaaaccctcagggtttgtctgatccaggtaattatcatgaattttgtcgatttttggctcgtttaaagacaaattatcagctgggagaattagttatggtgaaggaatatcctgaagttattagattgattgctaattttaccattactagcctacagcactgggaatttgctcctaacagtgttcattatttattaactctgtggcaaaggatggtagcatctgttccttttgtgaaatcaactgaaccccacctattagacacttatgcaccagaaatcacgaaggcctttatcacttctcggttggactctgttgccatagttgtgagagatcacttagatgatccactggatgatactgccactgtgtttcagcagttggagcagttgtgcacggtcagcagatgtgaatatgaaaagacatgtgctcttcttgtgcagttattcgaccaaaatgcacagaattaccaaaaacttctgcatccatattctggtgtaactgtggacatcaccattcaggaaggacgtcttgcatggctggtatacttagttgggacagttgtaggaggaagattaacatataccagtacagatgagcatgatgctatggatggagaattatcctgtcgagtttttcagcttatatctttaatggataccggattgcctcgatgttgtaatgagaaaatagagcttgcaattctgtggttcttggatcagtttcgtaaaacatatgttggtgatcaacttcaaagaacctcaaagaagacagacatcttcctgtgaagggcttgtggcaaacctatccaactcgggtttcttcttccttgagaacgatctgattcatcatcatctgaaccagggatcacagtctaaggtccaggtatatgctcgtatgtcagaagtcttaggaataacagatgacaaccacgttctagagacgttcatgacaaaaattgttacaaaccttaaatactggggaagatatgagcctgtaatttcaaggactcttcagttcctaaatgacctttctgttggttatatccttttaaaaaaacttgtgaagatagatgctgtgaaattcatgctaaaaaaccacacgagtgaacacttcccttttcttggcatcagtgacaatcatagtctcagcgacttcaggtgtcgaacaaccttctacacagcgctcactcgccttctgatggtagatctgggtgaagatgaggatgaatttgagaatttcatgctgcctcttacagttgcttttgaaacagtattacaaatattcaacaacaactttaaacaagaagatgtaaagcgtatgttgatcgggctggcaagagatcttcgagggattgcctttgcactgaacacaaagaccagctacaccatgctgtttgactggatgtacccaacgtaccttccccttcttcagaatgctgttgaacggtggtatggagagccaacatgtacaactcccatcttgaaacttatggcagaacttatgcaaaacagatcccagcgtttgaattttgatgtatcatctcctaatggaattcttctcttcagagaagctagtaaaatggtttgcacttatggtaatcagatcctgtcccttgggagcctctcaaaagatcagatttatccaatgaaactcaagggcatctccatctgctattcagctctcaagtctgccttgtgtggaaattatgtcagctttggcgtcttcaagttgtatggggacaaccattttgacaatgtactccaggcttttgtcaaaatgctgctgtcagtgtcccacagtgacttgctacaataccggaaactgagccagtcttattatccactcctggaatgtctcactcaggaccatatgagcttcatcatcaacttagagcctcctgtactcatgtatgttctcacatctatctcagagggactcactactcttgatacagttgtctcctccagctgctgtaccagtttagactacatcgtcacctacctcttcaagcacatagcaaaagagggcaagaagccacttcgatgcagagaggctacccaggctggtcagagactattacattttatgcagcaaaacccagatgtcctgcagcaggtggagtttcaccatgtttcccaggctggtctcgaactcctgaactcaagcaatctgcccaccttggcctccaaagtgctgggattacagacgtgagccacgcgcccagcctgaggccatgttcctaaagctctgaatttatccacagcttcagtatgtttctaagatgatgtctgtcctcatgaacaccattgtctttgaagactgtcggaaccagtggtcagtatccaggcctctcctggggctcatcctgctcaatgagaagtatttcagtgaactgagagcaagtttgataaacagccagcccctccccaagcaggaggtccttgcccagtgcttcagaaacctaatggaaggagtggagcagaacctgtccgtcaagaacagagacaggttcacccaaaatctgtctgtattcagaagagatgtggcagaggcgttgcgcagtgatggcaacactgaaccatgcagtctcgacatgatgagctga

SEQ ID NO: 173853 - DNA, 4588 bp, Homo sapiens
  Payload ID: 14136
  Gene Symbol: RANBP17
  Gene Name: RAN binding protein 17
  Uniprot ID: Q9H2T7
  ENST ID: ENST00000523189
  CDS Start-End: 165-3431
ctccagcgcttcgaatgcggacgcgaagcctggctgaggctgcgaaggacgagcggcgcagggaccccgcgggcgtctggggcttccgcggcgcccgcctctgctccctcccctcgggcgctgggtgccgaccggccggctggccggcgccgcctcctgggaagatggcgctgcacttccagagtttggctgaattggaagtgttatgtactcatctctacatagggactgatcttacacaaagaatagaggctgagaaagcactcttggaacttattgacagtccagaatgtctcagcaagtgtcaacttttattagaacaaggaacaacatcctatgctcagctccttgcagcaacatgtctttcaaaacttgtcagccgagtcagtcctttacctgttgagcagaggatggacatcagaaactacattctgaattacgtggcatcacagcccaagctggctccctttgtcatccaagctcttattcaagtcattgctaaaatcactaagttggggtggtttgaggttcagaaagaccaatttgtcttcagagaaattattgctgatgtgaagaagtttctccagggtactgtggaacactgcataataggagtaataatcctttctgaattgactcaggaaatgaacctggttgattattctagaccttcagcaaaacacaggaaaatagctacctcatttcgtgatacttctctcaaagacgttttagtgctagcatgctctcttttaaaagaggtgtttgccaaacctttaaatcttcaggatcaatgtcagcaaaatctggtaatgcaggtcttgaaactggtccttaactgccttaactttgacttcattggcagttcagcagatgaatctgcagatgatctttgcacggtgcagattccaacaacttggagaacaattttcctggaaccagaaacattggatcttttcttcaatttgtatcattcacttccaccactactatctcagttagcactttcatgtttagttcagtttgcttcgacaagaaggtccttatttaacagtcctgaacgtgccaagtaccttggtaatttaattaagggagtaaaaaggatacttgaaaaccctcagggtttgtctgatccaggtaattatcatgaattttgtcgatttttggctcgtttaaagacaaattatcagctgggagaattagttatggtgaaggaatatcctgaagttattagattgattgctaattttaccattactagcctacagcactgggaatttgctcctaacagtgttcattatttattaactctgtggcaaaggatggtagcatctgttccttttgtgaaatcaactgaaccccacctattagacacttatgcaccagaaatcacgaaggcctttatcacttctcggttggactctgttgccatagttgtgagagatcacttagatgatccactggatgatactgccactgtgtttcagcagttggagcagttgtgcacggtcagcagatgtgaatatgaaaagacatgtgctcttcttgtgcagttattcgaccaaaatgcacagaattaccaaaaacttctgcatccatattctggtgtaactgtggacatcaccattcaggaaggacgtcttgcatggctggtatacttagttgggacagttgtaggaggaagattaacatataccagtacagatgagcatgatgctatggatggagaattatcctgtcgagtttttcagcttatatctttaatggataccggattgcctcgatgttgtaatgagaaaatagagcttgcaattctgtggttcttggatcagtttcgtaaaacatatgttggtgatcaacttcaaagaacctcaaaggtatatgctcgtatgtcagaagtcttaggaataacagatgacaaccacgttctagagacgttcatgacaaaaattgttacaaaccttaaatactggggaagatatgagcctgtaatttcaaggactcttcagttcctaaatgacctttctgttggttatatccttttaaaaaaacttgtgaagatagatgctgtgaaattcatgctaaaaaaccacacgagtgaacacttcccttttcttggcatcagtgacaatcatagtctcagcgacttcaggtgtcgaacaaccttctacacagcgctcactcgccttctgatggtagatctgggtgaagatgaggatgaatttgagaatttcatgctgcctcttacagttgcttttgaaacagtattacaaatattcaacaacaactttaaacaagaagatgtaaagcgtatgttgatcgggctggcaagagatcttcgagggattgcctttgcactgaacacaaagaccagctacaccatgctgtttgactggatgtacccaacgtaccttccccttcttcagaatgctgttgaacggtggtatggagagccaacatgtacaactcccatcttgaaacttatggcagaacttatgcaaaacagatcccagcgtttgaattttgatgtatcatctcctaatggaattcttctcttcagagaagctagtaaaatggtttgcacttatggtaatcagatcctgtcccttgggagcctctcaaaagatcagatttatccaatgaaactcaagggcatctccatctgctattcagctctcaagtctgccttgtgtggaaattatgtcagctttggcgtcttcaagttgtatggggacaaccattttgacaatgtactccaggcttttgtcaaaatgctgctgtcagtgtcccacagtgacttgctacaataccggaaactgagccagtcttattatccactcctggaatgtctcactcaggaccatatgagcttcatcatcaacttagagcctcctgtactcatgtatgttctcacatctatctcagagggactcactactcttgatacagttgtctcctccagctgctgtaccagtttagactacatcgtcacctacctcttcaagcacatagcaaaagagggcaagaagccacttcgatgcagagaggctacccaggctggtcagagactattacattttatgcagcaaaacccagatgtcctgcagcagatgatgtctgtcctcatgaacaccattgtctttgaagactgtcggaaccagtggtcagtatccaggcctctcctggggctcatcctgctcaatgagaagtatttcagtgaactgagagcaagtttgataaacagccagcccctccccaagcaggaggtccttgcccagtgcttcagaaacctaatggaaggagtggagcagaacctgtccgtcaagaacagagacaggttcacccaaaatctgtctgtattcagaagagatgtggcagaggcgttgcgcagtgatggcaacactgaaccatgcagtctcgacatgatgagctgacccgacttttctgaccatgtgcggagcagcctttatcaagagactcctgaaggtctgggtctcaggacagtgatgttggctagcccaggggaatgtatttttcaaaacatacaagcaacagcaaaagccctaacttcttatacgtctagcctaattataagaatttctaacagtaccagtgtaaattcagtcttttctctgaaaagcaaaggatgtgttttcagtctttctatcaaatattatctttgttctcctaatgctctgaaaggatgtagaaacaatatttaaccaaagaacgtaataaaccaggtttgcacctaagtgtgtactagtttatggttctgcagtcaaggttgtcaatttgttggagatgcagccttcaccatggatcctggattgagacgaatgccattggaacctgttaaatgagtagtttgttatgtgtctggaagaagcagcgttagggactttgggctgtgagcatttagaacgagcctggaagcactacagagcatcccacaggaccacacgcaggcctccctgcctcagctgcatctgataaagttgagagacagtaacacaattaaatgacttagaaacaatgtttgcttttcactggcataaatctgaagtggttcagtctagaagaattaagctgtgcaattactgcctgcagagatatttcttcaggaggagtcatgtagccccagtcagaagttctgggtggtgccagcacccagtcctctgcctccatttaatttttaagagaaggtgaaggtaactattagaatataatatttgaagcagctctgccttcttagggctacccaaaacagttctaggtgctaaaattcagattttcagaggatgagaaatagctggtttccaactctccacaaaaactcttattactgttgggacttgggattctgactcaccccaaacccagaacatgaagaagacctttacagtttgtgctctactgttactaggctattaatttgagatcgtccactgtcaagtgttttactatctcactgctgtttttatgattcaggcttataacaaatattgtatcctttatttctgataagacatgaaaggttggccttactgttgaacaataagtaaatccacaggctcctgttgtaatctca

SEQ ID NO: 173854 - DNA, 296 bp, Homo sapiens
  Payload ID: 14136
  Gene Symbol: RANBP17
  Gene Name: RAN binding protein 17
  ENST ID: ENST00000518492
  CDS Start-End: 1-143
tatctttaatggataccggattgcctcgatgttgtaatgagaaaatagagcttgcaattctgtggttcttggatcagtttcgtaaaacatatgttggtgatcaacttcaaagaacctcaaagaagacagacatcttcctgtgaagggcttgtggcaaacctatccaactcgggtttcttcttccttgagaacgatctgattcatcatcatctgaaccagggatcacagtctaaggtccaggatgcacctaaactattgatgattaatcaccttattaaatgattccattctgtgta

SEQ ID NO: 173855 - DNA, 3375 bp, Homo sapiens
  Payload ID: 14136
  Gene Symbol: RANBP17
  Gene Name: RAN binding protein 17
  Uniprot ID: Q9H2T7
  ENST ID: ENST00000519256
  CDS Start-End: 17-1747
gccgcctcctgggaagatggcgctgcacttccagagtttggctgaattggaagtgttatgtactcatctctacatagggactgatcttacacaaagaatagaggctgagaaagcactcttggaacttattgacagtccagaatgtctcagcaagtgtcaacttttattagaacaaggaacaacatcctatgctcagctccttgcagcaacatgtctttcaaaacttgtcagccgagtcagtcctttacctgttgagcagaggatggacatcagaaactacattctgaattacgtggcatcacagcccaagctggctccctttgtcatccaagctcttattcaagtcattgctaaaatcactaagttggggtggtttgaggttcagaaagaccaatttgtcttcagagaaattattgctgatgtgaagaagtttctccagggtactgtggaacactgcataataggagtaataatcctttctgaattgactcaggaaatgaacctggttgattattctagaccttcagcaaaacacaggaaaatagctacctcatttcgtgatacttctctcaaagacgttttagtgctagcatgctctcttttaaaagaggtgtttgccaaacctttaaatcttcaggatcaatgtcagcaaaatctggtaatgcaggtcttgaaactggtccttaactgccttaactttgacttcattggcagttcagcagatgaatctgcagatgatctttgcacggtgcagattccaacaacttggagaacaattttcctggaaccagaaacattggatcttttcttcaatttgtatcattcacttccaccactactatctcagttagcactttcatgtttagttcagtttgcttcgacaagaaggtccttatttaacagtcctgaacgtgccaagtaccttggtaatttaattaagggagtaaaaaggatacttgaaaaccctcagggtttgtctgatccaggtaattatcatgaattttgtcgatttttggctcgtttaaagacaaattatcagctgggagaattagttatggtgaaggaatatcctgaagttattagattgattgctaattttaccattactagcctacagcactgggaatttgctcctaacagtgttcattatttattaactctgtggcaaaggatggtagcatctgttccttttgtgaaatcaactgaaccccacctattagacacttatgcaccagaaatcacgaaggcctttatcacttctcggttggactctgttgccatagttgtgagagatcacttagatgatccactggatgatactgccactgtgtttcagcagttggagcagttgtgcacggtcagcagatgtgaatatgaaaagacatgtgctcttcttgtgcagttattcgaccaaaatgcacagaattaccaaaaacttctgcatccatattctggtgtaactgtggacatcaccattcaggaaggacgtcttgcatggctggtatacttagttgggacagttgtaggaggaagattaacatataccagtacagatgagcatgatgctatggatggagaattatcctgtcgagtttttcagcttatatctttaatggataccggattgcctcgatgttgtaatgagaaaatagagcttgcaattctgtggttcttggatcagtttcgtaaaacatatgttggtgatcaacttcaaagaacctcaaagaagacagacatcttcctgtgaagggcttgtggcaaacctatccaactcgggtttcttcttccttgagaacgatctgattcatcatcatctgaaccagggatcacagtctaaggtccaggccttgcgtggctccccagcgccagtatcccttgctttactgaatagatgtgtttaagcaagttggctttgaaacaagtttctcctatgtgaattgcattttctggttgacacccattacaaaattggaaatgcatttccatggaaaatctcctatgcccagttgtacgcctgaggagtgatgtacccagagttccagagaaggcttggaaaatagttaaggtatatgctcgtatgtcagaagtcttaggaataacagatgacaaccacgttctagagacgttcatgacaaaaattgttacaaaccttaaatactggggaagatatgagcctgtaatttcaaggactcttcagttcctaaatgacctttctgttggttatatccttttaaaaaaacttgtgaagatagatgctgtgaaattcatgctaaaaaaccacacgagtgaacacttcccttttcttggcatcagtgacaatcatagtctcagcgacttcaggtgtcgaacaaccttctacacagcgctcactcgccttctgatggtagatctgggtgaagatgaggatgaatttgagaatttcatgctgcctcttacagttgcttttgaaacagtattacaaatattcaacaacaactttaaacaagaagatgtaaagcgtatgttgatcgggctggcaagagatcttcgagggattgcctttgcactgaacacaaagaccagctacaccatgctgtttgactggatgtacccaacgtaccttccccttcttcagaatgctgttgaacggtggtatggagagccaacatgtacaactcccatcttgaaacttatggcagaacttatgcaaaacagatcccagcgtttgaattttgatgtatcatctcctaatggaattcttctcttcagagaagctagtaaaatggtttgcacttatggtaatcagatcctgtcccttgggagcctctcaaaagatcagatttatccaatgaaactcaagggcatctccatctgctattcagctctcaagtctgccttgtgtggaaattatgtcagctttggcgtcttcaagttgtatggggacaaccattttgacaatgtactccaggcttttgtcaaaatgctgctgtcagtgtcccacagtgacttgctacaataccggaaactgagccagtcttattatccactcctggaatgtctcactcaggaccatatgagcttcatcatcaacttagagcctcctgtactcatgtatgttctcacatctatctcagagggactcactactcttggtaaggatcatagaggacattgtttccataggaaaaacttgattatgggcttttaatgtatgtgattattgagactatcatcctacaaagggggaaaagatattgtgaacccaaactgaaagattataattattacttgcaagtgggaaaaatgtatttcttcatattttgatacatagtcagttatgttttaatcagctttactgaggtataatttacatacaataaaattcagtgactttaa

SEQ ID NO: 173856 - DNA, 542 bp, Homo sapiens
  Payload ID: 14136
  Gene Symbol: RANBP17
  Gene Name: RAN binding protein 17
  ENST ID: ENST00000519944
  CDS Start-End: 429-542
atgtagtaagcccgacacattaccttttgacttcatgccatttctaagggtcctcaggtcaaaataatgtattaccactttagtaaatatgccctctgggaaattttcacaggaagaatcttacaaggaggatttatggattgtaaataggtaatcagatgttcacagagcccgagtaaatcttgagagtaaattaaaagagtttggctgaattggaagtgttatgtactcatctctacatagggactgatcttacacaaagaatagaggctgagaaagcactcttggaacttattgacagtccagaatgtctcagcaagtgtcaacttttattagaacaaggaacaacatcctatgctcagctccttgcagcaacatgtctttcaaaacttgtcagccgagtcagtcctttacctgttgagcagaggatggacatcagaaactacattctgaattacgtggcatcacagcccaagctggctccctttgtcatccaagctcttattcaagtcattgctaaaatcactaagttggggtggttt

SEQ ID NO: 173857 - DNA, 4573 bp, Homo sapiens
  Payload ID: 14136
  Gene Symbol: RANBP17
  Gene Name: RAN binding protein 17
  ENST ID: ENST00000520864
  CDS Start-End: 1-1664
tggcgctgcacttccagagtttggctgaattggaagtgttatgtactcatctctacatagggactgatcttacacaaagaatagaggctgagaaagcactcttggaacttattgacagtccagaatgtctcagcaagtgtcaacttttattagaacaaggaacaacatcctatgctcagctccttgcagcaacatgtctttcaaaacttgtcagccgagtcagtcctttacctgttgagcagaggatggacatcagaaactacattctgaattacgtggcatcacagcccaagctggctccctttgtcatccaagctcttattcaagtcattgctaaaatcactaagttggggtggtttgaggttcagaaagaccaatttgtcttcagagaaattattgctgatgtgaagaagtttctccaggttgattattctagaccttcagcaaaacacaggaaaatagctacctcatttcgtgatacttctctcaaagacgttttagtgctagcatgctctcttttaaaagaggtgtttgccaaacctttaaatcttcaggatcaatgtcagcaaaatctggtaatgcaggtcttgaaactggtccttaactgccttaactttgacttcattggcagttcagcagatgaatctgcagatgatctttgcacggtgcagattccaacaacttggagaacaattttcctggaaccagaaacattggatcttttcttcaatttgtatcattcacttccaccactactatctcagttagcactttcatgtttagttcagtttgcttcgacaagaaggtccttatttaacagtcctgaacgtgccaagtaccttggtaatttaattaagggagtaaaaaggatacttgaaaaccctcagggtttgtctgatccaggtaattatcatgaattttgtcgatttttggctcgtttaaagacaaattatcagctgggagaattagttatggtgaaggaatatcctgaagttattagattgattgctaattttaccattactagcctacagcactgggaatttgctcctaacagtgttcattatttattaactctgtggcaaaggatggtagcatctgttccttttgtgaaatcaactgaaccccacctattagacacttatgcaccagaaatcacgaaggcctttatcacttctcggttggactctgttgccatagttgtgagagatcacttagatgatccactggatgatactgccactgtgtttcagcagttggagcagttgtgcacggtcagcagatgtgaatatgaaaagacatgtgctcttcttgtgcagttattcgaccaaaatgcacagaattaccaaaaacttctgcatccatattctggtgtaactgtggacatcaccattcaggaaggacgtcttgcatggctggtatacttagttgggacagttgtaggaggaagattaacatataccagtacagatgagcatgatgctatggatggagaattatcctgtcgagtttttcagcttatatctttaatggataccggattgcctcgatgttgtaatgagaaaatagagcttgcaattctgtggttcttggatcagtttcgtaaaacatatgttggtgatcaacttcaaagaacctcaaagaagacagacatcttcctgtgaagggcttgtggcaaacctatccaactcgggtttcttcttccttgagaacgatctgattcatcatcatctgaaccagggatcacagtctaaggtccaggtatatgctcgtatgtcagaagtcttaggaataacagatgacaaccacgttctagagacgttcatgacaaaaattgttacaaaccttaaatactggggaagatatgagcctgtaatttcaaggactcttcagttcctaaatgacctttctgttggttatatccttttaaaaaaacttgtgaagatagatgctgtgaaattcatgctaaaaaaccacacgagtgaacacttcccttttcttggcatcagtgacaatcatagtctcagcgacttcaggtgtcgaacaaccttctacacagcgctcactcgccttctgatggtagatctgggtgaagatgaggatgaatttgagaatttcatgctgcctcttacagttgcttttgaaacagtattacaaatattcaacaacaactttaaacaagaagatgtaaagcgtatgttgatcgggctggcaagagatcttcgagggattgcctttgcactgaacacaaagaccagctacaccatgctgtttgactggatgtatccttattacactgtgacaataccagctctgtgcacagagggatgccaggcccctcgctttcgtttaatagtatggcacagtagggaagaggaaacaaagctaaatgaactaatgtgtaatcagctaaaaattacagcacagtggcagcagagcagataactgagcacagtatttggagacccagctcagagaagtcacttttttggtgccgttaaatattgataacttaaaaatgacttcccccaaatgattgtttatgttggagttgaagggataatctggctaacatctttagggatcaatgaatcctaccatttgacatttttgaggggagatttgaatctccatctcaattagcaaggctgggaagatcattttatctcttcaaggcctaacccatcatgccacagtttttcattatcatgaagataatgaatggacatggaaagggaaaaataaataagtcaaggtttgtcatttggtgtaaaatttgaattgacctttgccaagggttagtacagacaggaaaaaaaaaaaaaaccccccacagaaatgccttatcatgtaagagttaaaagagcatagactttggtgatagacagacccggcttaaaatcccagctcttcatttactgtgttgtgaaccttggcaagtcatttcacctgtctgagtcttggttttctcatttgaaaacagatacaattcagtatcatggtatattgtaaccattaaaataggtaaagtgtactctgtataatgtctggcacatttttggtagttgtaaatggtcgttaatattgttctaatagtgttgtatgacttatgtttgatcccagcaggaagtgatattgtatgcaagtcatctaagtgttatataatgctttcatgtcttttatgcatgaaaccatcagagcatgtgaaaaaaattatataatctgaaagctaatttactttttaatctaaactatttctcagttactttttttaaaccctccttatccaaagtttcctgtaaattaaattgcaatagaaacttcttaaaggtaactgtcaactactatgccacagttatggccaaaaatataactaataggggatctaggcatgttttagggagaactctacatattataaaaatttttaaacattaatttgatactgacatatctttaattattattaaaatatacttcatcagatttatgtacccagagaagggttacagataaaatttttatgtcattgagtaatcatgcacatggtttttatctacatataatatgtacagagattatgaaatttcaacatggaaagtcttaaaattctcttaacagtgacagttaaactggaattatatatgacccttttatttctgccttttttttaatttttaagatacggggtcttgtatgttgctcaggctggactcaaactcctgggctcaagcgatcctcccacctcagcctcctgactagctgggactgtggtgctacaggtgtgctccactgcacccagcttgactcttttatttctctaaacataaagagcaactctcaaaatcaaaattttcattatttgaaaaataataaaagtctactttgggcactgtaatatcgatggtgatcttgaaaccagtctacaactctaggctatctagtgattaacatttcatgtttttctcttcaacagtttcaaccaagagtcaaggtcagaaaccttcccctcagtgtcaaagaagaactatctgccgtaattgatactgcccaaaatttagagaagatactgtattgttttccatttccttatttagctcctttgggggtagcgggggaacctttctgaaatgaaacttttgtccagcagatggcagaaaatagcaaacggaaaatcttgggacttaatgttttcttgtgaactagaaacctttgtctcctccatttgaccatagatgttgaagttatcagggtcaggggcggagagaagtgtcagttatgccagaagctgtgttagattgccaaatggggtggtttggtactggcgttgcttataataattgagtttcagtagcaaatcagcttccttgggaaaaggccaagggcttttcataattgtattgacaacaaaatgaatatgataaatggtgttcattcagttgagacaagatttatagttttcctttgggcgagggatgaagagcaaatatttataataatagtaaaatttgtttaaaagttatattatttgataattcaaaaagctttattaaaatattttgaaatactttaa

SEQ ID NO: 173858 - DNA, 4618 bp, Homo sapiens
  Payload ID: 14136
  Gene Symbol: RANBP17
  Gene Name: RAN binding protein 17
  Uniprot ID: Q9H2T7
  ENST ID: ENST00000519949
  CDS Start-End: 17-1747
gccgcctcctgggaagatggcgctgcacttccagagtttggctgaattggaagtgttatgtactcatctctacatagggactgatcttacacaaagaatagaggctgagaaagcactcttggaacttattgacagtccagaatgtctcagcaagtgtcaacttttattagaacaaggaacaacatcctatgctcagctccttgcagcaacatgtctttcaaaacttgtcagccgagtcagtcctttacctgttgagcagaggatggacatcagaaactacattctgaattacgtggcatcacagcccaagctggctccctttgtcatccaagctcttattcaagtcattgctaaaatcactaagttggggtggtttgaggttcagaaagaccaatttgtcttcagagaaattattgctgatgtgaagaagtttctccagggtactgtggaacactgcataataggagtaataatcctttctgaattgactcaggaaatgaacctggttgattattctagaccttcagcaaaacacaggaaaatagctacctcatttcgtgatacttctctcaaagacgttttagtgctagcatgctctcttttaaaagaggtgtttgccaaacctttaaatcttcaggatcaatgtcagcaaaatctggtaatgcaggtcttgaaactggtccttaactgccttaactttgacttcattggcagttcagcagatgaatctgcagatgatctttgcacggtgcagattccaacaacttggagaacaattttcctggaaccagaaacattggatcttttcttcaatttgtatcattcacttccaccactactatctcagttagcactttcatgtttagttcagtttgcttcgacaagaaggtccttatttaacagtcctgaacgtgccaagtaccttggtaatttaattaagggagtaaaaaggatacttgaaaaccctcagggtttgtctgatccaggtaattatcatgaattttgtcgatttttggctcgtttaaagacaaattatcagctgggagaattagttatggtgaaggaatatcctgaagttattagattgattgctaattttaccattactagcctacagcactgggaatttgctcctaacagtgttcattatttattaactctgtggcaaaggatggtagcatctgttccttttgtgaaatcaactgaaccccacctattagacacttatgcaccagaaatcacgaaggcctttatcacttctcggttggactctgttgccatagttgtgagagatcacttagatgatccactggatgatactgccactgtgtttcagcagttggagcagttgtgcacggtcagcagatgtgaatatgaaaagacatgtgctcttcttgtgcagttattcgaccaaaatgcacagaattaccaaaaacttctgcatccatattctggtgtaactgtggacatcaccattcaggaaggacgtcttgcatggctggtatacttagttgggacagttgtaggaggaagattaacatataccagtacagatgagcatgatgctatggatggagaattatcctgtcgagtttttcagcttatatctttaatggataccggattgcctcgatgttgtaatgagaaaatagagcttgcaattctgtggttcttggatcagtttcgtaaaacatatgttggtgatcaacttcaaagaacctcaaagaagacagacatcttcctgtgaagggcttgtggcaaacctatccaactcgggtttcttcttccttgagaacgatctgattcatcatcatctgaaccagggatcacagtctaaggtccaggttgtacgcctgaggagtgatgtacccagagttccagagaaggcttggaaaatagttaaggtatatgctcgtatgtcagaagtcttaggaataacagatgacaaccacgttctagagacgttcatgacaaaaattgttacaaaccttaaatactggggaagatatgagcctgtaatttcaaggactcttcagttcctaaatgacctttctgttggttatatccttttaaaaaaacttgtgaagatagatgctgtgaaattcatgctaaaaaaccacacgagtgaacacttcccttttcttggcatcagtgacaatcatagtctcagcgacttcaggtgtcgaacaaccttctacacagcgctcactcgccttctgatggtagatctgggtgaagatgaggatgaatttgagaatttcatgctgcctcttacagttgcttttgaaacagtattacaaatattcaacaacaactttaaacaagaagatgtaaagcgtatgttgatcgggctggcaagagatcttcgagggattgcctttgcactgaacacaaagaccagctacaccatgctgtttgactggatgtacccaacgtaccttccccttcttcagaatgctgttgaacggtggtatggagagccaacatgtacaactcccatcttgaaacttatggcagaacttatgcaaaacagatcccagcgtttgaattttgatgtatcatctcctaatggaattcttctcttcagagaagctagtaaaatggtttgcacttatggtaatcagatcctgtcccttgggagcctctcaaaagatcagatttatccaatgaaactcaagggcatctccatctgctattcagctctcaagtctgccttgtgtggaaattatgtcagctttggcgtcttcaagttgtatggggacaaccattttgacaatgtactccaggcttttgtcaaaatgctgctgtcagtgtcccacagtgacttgctacaataccggaaactgagccagtcttattatccactcctggaatgtctcactcaggaccatatgagcttcatcatcaacttagagcctcctgtactcatgtatgttctcacatctatctcagagggactcactactcttgatacagttgtctcctccagctgctgtaccagtttagactacatcgtcacctacctcttcaagcacatagcaaaagagggcaagaagccacttcgatgcagagaggctacccaggctggtcagagactattacattttatgcagcaaaacccagatgtcctgcagcagatgatgtctgtcctcatgaacaccattgtctttgaagactgtcggaaccagtggtcagtatccaggcctctcctggggctcatcctgctcaatgagaagtatttcagtgaactgagagcaagtttgataaacagccagcccctccccaagcaggaggtccttgcccagtgcttcagaaacctaatggaaggagtggagcagaacctgtccgtcaagaacagagacaggttcacccaaaatctgtctgtattcagaagagatgtggcagaggcgttgcgcagtgatggcaacactgaaccatgcagtctcgacatgatgagctgacccgacttttctgaccatgtgcggagcagcctttatcaagagactcctgaaggtctgggtctcaggacagtgatgttggctagcccaggggaatgtatttttcaaaacatacaagcaacagcaaaagccctaacttcttatacgtctagcctaattataagaatttctaacagtaccagtgtaaattcagtcttttctctgaaaagcaaaggatgtgttttcagtctttctatcaaatattatctttgttctcctaatgctctgaaaggatgtagaaacaatatttaaccaaagaacgtaataaaccaggtttgcacctaagtgtgtactagtttatggttctgcagtcaaggttgtcaatttgttggagatgcagccttcaccatggatcctggattgagacgaatgccattggaacctgttaaatgagtagtttgttatgtgtctggaagaagcagcgttagggactttgggctgtgagcatttagaacgagcctggaagcactacagagcatcccacaggaccacacgcaggcctccctgcctcagctgcatctgataaagttgagagacagtaacacaattaaatgacttagaaacaatgtttgcttttcactggcataaatctgaagtggttcagtctagaagaattaagctgtgcaattactgcctgcagagatatttcttcaggaggagtcatgtagccccagtcagaagttctgggtggtgccagcacccagtcctctgcctccatttaatttttaagagaaggtgaaggtaactattagaatataatatttgaagcagctctgccttcttagggctacccaaaacagttctaggtgctaaaattcagattttcagaggatgagaaatagctggtttccaactctccacaaaaactcttattactgttgggacttgggattctgactcaccccaaacccagaacatgaagaagacctttacagtttgtgctctactgttactaggctattaatttgagatcgtccactgtcaagtgttttactatctcactgctgtttttatgattcaggcttataacaaatattgtatcctttatttctgataagacatgaaaggttggccttactgttgaacaataagtaaatccacaggctcctgttgtaatctca

SEQ ID NO: 173859 - DNA, 525 bp, Homo sapiens
  Payload ID: 14136
  Gene Symbol: RANBP17
  Gene Name: RAN binding protein 17
  ENST ID: ENST00000522734
  CDS Start-End: 1-525
cttgaaactggtccttaactgccttaactttgacttcattggcagttcagcagatgaatctgcagatgatctttgcacggtgcagattccaacaacttggagaacaattttcctggaaccagaaacattggatcttttcttcaatttgtatcattcacttccaccactactatctcagttagcactttcatgtttagttcagtttgcttcgacaagaaggtccttatttaacagtcctgaacgtgccaagtaccttggtaatttaattaagggagtaaaaaggatacttgaaaaccctcagcactgggaatttgctcctaacagtgttcattatttattaactctgtggcaaaggatggtagcatctgttccttttgtgaaatcaactgaaccccacctattagacacttatgcaccagaaatcacgaaggcctttatcacttctcggttggactctgttgccatagttgtgagagatcacttagatgatccactggatgatactgccactgtgtttcagcagtt

SEQ ID NO: 173860 - DNA, 4558 bp, Homo sapiens
  Payload ID: 14136
  Gene Symbol: RANBP17
  Gene Name: RAN binding protein 17
  Uniprot ID: Q9H2T7
  ENST ID: ENST00000522533
  CDS Start-End: 17-1747
gccgcctcctgggaagatggcgctgcacttccagagtttggctgaattggaagtgttatgtactcatctctacatagggactgatcttacacaaagaatagaggctgagaaagcactcttggaacttattgacagtccagaatgtctcagcaagtgtcaacttttattagaacaaggaacaacatcctatgctcagctccttgcagcaacatgtctttcaaaacttgtcagccgagtcagtcctttacctgttgagcagaggatggacatcagaaactacattctgaattacgtggcatcacagcccaagctggctccctttgtcatccaagctcttattcaagtcattgctaaaatcactaagttggggtggtttgaggttcagaaagaccaatttgtcttcagagaaattattgctgatgtgaagaagtttctccagggtactgtggaacactgcataataggagtaataatcctttctgaattgactcaggaaatgaacctggttgattattctagaccttcagcaaaacacaggaaaatagctacctcatttcgtgatacttctctcaaagacgttttagtgctagcatgctctcttttaaaagaggtgtttgccaaacctttaaatcttcaggatcaatgtcagcaaaatctggtaatgcaggtcttgaaactggtccttaactgccttaactttgacttcattggcagttcagcagatgaatctgcagatgatctttgcacggtgcagattccaacaacttggagaacaattttcctggaaccagaaacattggatcttttcttcaatttgtatcattcacttccaccactactatctcagttagcactttcatgtttagttcagtttgcttcgacaagaaggtccttatttaacagtcctgaacgtgccaagtaccttggtaatttaattaagggagtaaaaaggatacttgaaaaccctcagggtttgtctgatccaggtaattatcatgaattttgtcgatttttggctcgtttaaagacaaattatcagctgggagaattagttatggtgaaggaatatcctgaagttattagattgattgctaattttaccattactagcctacagcactgggaatttgctcctaacagtgttcattatttattaactctgtggcaaaggatggtagcatctgttccttttgtgaaatcaactgaaccccacctattagacacttatgcaccagaaatcacgaaggcctttatcacttctcggttggactctgttgccatagttgtgagagatcacttagatgatccactggatgatactgccactgtgtttcagcagttggagcagttgtgcacggtcagcagatgtgaatatgaaaagacatgtgctcttcttgtgcagttattcgaccaaaatgcacagaattaccaaaaacttctgcatccatattctggtgtaactgtggacatcaccattcaggaaggacgtcttgcatggctggtatacttagttgggacagttgtaggaggaagattaacatataccagtacagatgagcatgatgctatggatggagaattatcctgtcgagtttttcagcttatatctttaatggataccggattgcctcgatgttgtaatgagaaaatagagcttgcaattctgtggttcttggatcagtttcgtaaaacatatgttggtgatcaacttcaaagaacctcaaagaagacagacatcttcctgtgaagggcttgtggcaaacctatccaactcgggtttcttcttccttgagaacgatctgattcatcatcatctgaaccagggatcacagtctaaggtccaggtatatgctcgtatgtcagaagtcttaggaataacagatgacaaccacgttctagagacgttcatgacaaaaattgttacaaaccttaaatactggggaagatatgagcctgtaatttcaaggactcttcagttcctaaatgacctttctgttggttatatccttttaaaaaaacttgtgaagatagatgctgtgaaattcatgctaaaaaaccacacgagtgaacacttcccttttcttggcatcagtgacaatcatagtctcagcgacttcaggtgtcgaacaaccttctacacagcgctcactcgccttctgatggtagatctgggtgaagatgaggatgaatttgagaatttcatgctgcctcttacagttgcttttgaaacagtattacaaatattcaacaacaactttaaacaagaagatgtaaagcgtatgttgatcgggctggcaagagatcttcgagggattgcctttgcactgaacacaaagaccagctacaccatgctgtttgactggatgtacccaacgtaccttccccttcttcagaatgctgttgaacggtggtatggagagccaacatgtacaactcccatcttgaaacttatggcagaacttatgcaaaacagatcccagcgtttgaattttgatgtatcatctcctaatggaattcttctcttcagagaagctagtaaaatggtttgcacttatggtaatcagatcctgtcccttgggagcctctcaaaagatcagatttatccaatgaaactcaagggcatctccatctgctattcagctctcaagtctgccttgtgtggaaattatgtcagctttggcgtcttcaagttgtatggggacaaccattttgacaatgtactccaggcttttgtcaaaatgctgctgtcagtgtcccacagtgacttgctacaataccggaaactgagccagtcttattatccactcctggaatgtctcactcaggaccatatgagcttcatcatcaacttagagcctcctgtactcatgtatgttctcacatctatctcagagggactcactactcttgatacagttgtctcctccagctgctgtaccagtttagactacatcgtcacctacctcttcaagcacatagcaaaagagggcaagaagccacttcgatgcagagaggctacccaggctggtcagagactattacattttatgcagcaaaacccagatgtcctgcagcagatgatgtctgtcctcatgaacaccattgtctttgaagactgtcggaaccagtggtcagtatccaggcctctcctggggctcatcctgctcaatgagaagtatttcagtgaactgagagcaagtttgataaacagccagcccctccccaagcaggaggtccttgcccagtgcttcagaaacctaatggaaggagtggagcagaacctgtccgtcaagaacagagacaggttcacccaaaatctgtctgtattcagaagagatgtggcagaggcgttgcgcagtgatggcaacactgaaccatgcagtctcgacatgatgagctgacccgacttttctgaccatgtgcggagcagcctttatcaagagactcctgaaggtctgggtctcaggacagtgatgttggctagcccaggggaatgtatttttcaaaacatacaagcaacagcaaaagccctaacttcttatacgtctagcctaattataagaatttctaacagtaccagtgtaaattcagtcttttctctgaaaagcaaaggatgtgttttcagtctttctatcaaatattatctttgttctcctaatgctctgaaaggatgtagaaacaatatttaaccaaagaacgtaataaaccaggtttgcacctaagtgtgtactagtttatggttctgcagtcaaggttgtcaatttgttggagatgcagccttcaccatggatcctggattgagacgaatgccattggaacctgttaaatgagtagtttgttatgtgtctggaagaagcagcgttagggactttgggctgtgagcatttagaacgagcctggaagcactacagagcatcccacaggaccacacgcaggcctccctgcctcagctgcatctgataaagttgagagacagtaacacaattaaatgacttagaaacaatgtttgcttttcactggcataaatctgaagtggttcagtctagaagaattaagctgtgcaattactgcctgcagagatatttcttcaggaggagtcatgtagccccagtcagaagttctgggtggtgccagcacccagtcctctgcctccatttaatttttaagagaaggtgaaggtaactattagaatataatatttgaagcagctctgccttcttagggctacccaaaacagttctaggtgctaaaattcagattttcagaggatgagaaatagctggtttccaactctccacaaaaactcttattactgttgggacttgggattctgactcaccccaaacccagaacatgaagaagacctttacagtttgtgctctactgttactaggctattaatttgagatcgtccactgtcaagtgttttactatctcactgctgtttttatgattcaggcttataacaaatattgtatcctttatttctgataagacatgaaaggttggccttactgttgaacaataagtaaatccacaggctcctgttgtaatctca

SEQ ID NO: 173861 - DNA, 4739 bp, Homo sapiens
  Payload ID: 14136
  Gene Symbol: RANBP17
  Gene Name: RAN binding protein 17
  ENST ID: ENST00000522066
  CDS Start-End: 17-1759
gccgcctcctgggaagatggcgctgcacttccagagtttggctgaattggaagtgttatgtactcatctctacatagggactgatcttacacaaagaatagaggctgagaaagcactcttggaacttattgacagtccagaatgtctcagcaagtgtcaacttttattagaacaaggaacaacatcctatgctcagctccttgcagcaacatgtctttcaaaacttgtcagccgagtcagtcctttacctgttgagcagaggatggacatcagaaactacattctgaattacgtggcatcacagcccaagctggctccctttgtcatccaagctcttattcaagtcattgctaaaatcactaagttggggtggtttgaggttcagaaagaccaatttgtcttcagagaaattattgctgatgtgaagaagtttctccagggtactgtggaacactgcataataggagtaataatcctttctgaattgactcaggaaatgaacctggttgattattctagaccttcagcaaaacacaggaaaatagctacctcatttcgtgatacttctctcaaagacgttttagtgctagcatgctctcttttaaaagaggtgtttgccaaacctttaaatcttcaggatcaatgtcagcaaaatctggtaatgcaggtcttgaaactggtccttaactgccttaactttgacttcattggcagttcagcagatgaatctgcagatgatctttgcacggtgcagattccaacaacttggagaacaattttcctggaaccagaaacattggatcttttcttcaatttgtatcattcacttccaccactactatctcagttagcactttcatgtttagttcagtttgcttcgacaagaaggtccttatttaacagtcctgaacgtgccaagtaccttggtaatttaattaagggagtaaaaaggatacttgaaaaccctcagggtttgtctgatccaggtaattatcatgaattttgtcgatttttggctcgtttaaagacaaattatcagctgggagaattagttatggtgaaggaatatcctgaagttattagattgattgctaattttaccattactagcctacagcactgggaatttgctcctaacagtgttcattatttattaactctgtggcaaaggatggtagcatctgttccttttgtgaaatcaactgaaccccacctattagacacttatgcaccagaaatcacgaaggcctttatcacttctcggttggactctgttgccatagttgtgagagatcacttagatgatccactggatgatactgccactgtgtttcagcagttggagcagttgtgcacggtcagcagatgtgaatatgaaaagacatgtgctcttcttgtgcagttattcgaccaaaatgcacagaattaccaaaaacttctgcatccatattctggtgtaactgtggacatcaccattcaggaaggacgtcttgcatggctggtatacttagttgggacagttgtaggaggaagattaacatataccagtacagatgagcatgatgctatggatggagaattatcctgtcgagtttttcagcttatatctttaatggataccggattgcctcgatgttgtaatgagaaaatagagcttgcaattctgtggttcttggatcagtttcgtaaaacatatgttggtgatcaacttcaaagaacctcaaaggaagttgctggagactgtatactactcaattaaaaaagtaaaccaagaaaagaggaagaagggagagatgggatctgagaatcagaggatcaaacacaggagagaggctaagggaagctctcggataacagctgtgcctcaggccttgagagcaaccagttcaaactggagcagatggaagaagacagacatcttcctgtgaagggcttgtggcaaacctatccaactcgggtttcttcttccttgagaacgatctgattcatcatcatctgaaccagggatcacagtctaaggtccaggtatatgctcgtatgtcagaagtcttaggaataacagatgacaaccacgttctagagacgttcatgacaaaaattgttacaaaccttaaatactggggaagatatgagcctgtaatttcaaggactcttcagttcctaaatgacctttctgttggttatatccttttaaaaaaacttgtgaagatagatgctgtgaaattcatgctaaaaaaccacacgagtgaacacttcccttttcttggcatcagtgacaatcatagtctcagcgacttcaggtgtcgaacaaccttctacacagcgctcactcgccttctgatggtagatctgggtgaagatgaggatgaatttgagaatttcatgctgcctcttacagttgcttttgaaacagtattacaaatattcaacaacaactttaaacaagaagatgtaaagcgtatgttgatcgggctggcaagagatcttcgagggattgcctttgcactgaacacaaagaccagctacaccatgctgtttgactggatgtacccaacgtaccttccccttcttcagaatgctgttgaacggtggtatggagagccaacatgtacaactcccatcttgaaacttatggcagaacttatgcaaaacagatcccagcgtttgaattttgatgtatcatctcctaatggaattcttctcttcagagaagctagtaaaatggtttgcacttatggtaatcagatcctgtcccttgggagcctctcaaaagatcagatttatccaatgaaactcaagggcatctccatctgctattcagctctcaagtctgccttgtgtggaaattatgtcagctttggcgtcttcaagttgtatggggacaaccattttgacaatgtactccaggcttttgtcaaaatgctgctgtcagtgtcccacagtgacttgctacaataccggaaactgagccagtcttattatccactcctggaatgtctcactcaggaccatatgagcttcatcatcaacttagagcctcctgtactcatgtatgttctcacatctatctcagagggactcactactcttgatacagttgtctcctccagctgctgtaccagtttagactacatcgtcacctacctcttcaagcacatagcaaaagagggcaagaagccacttcgatgcagagaggctacccaggctggtcagagactattacattttatgcagcaaaacccagatgtcctgcagcagatgatgtctgtcctcatgaacaccattgtctttgaagactgtcggaaccagtggtcagtatccaggcctctcctggggctcatcctgctcaatgagaagtatttcagtgaactgagagcaagtttgataaacagccagcccctccccaagcaggaggtccttgcccagtgcttcagaaacctaatggaaggagtggagcagaacctgtccgtcaagaacagagacaggttcacccaaaatctgtctgtattcagaagagatgtggcagaggcgttgcgcagtgatggcaacactgaaccatgcagtctcgacatgatgagctgacccgacttttctgaccatgtgcggagcagcctttatcaagagactcctgaaggtctgggtctcaggacagtgatgttggctagcccaggggaatgtatttttcaaaacatacaagcaacagcaaaagccctaacttcttatacgtctagcctaattataagaatttctaacagtaccagtgtaaattcagtcttttctctgaaaagcaaaggatgtgttttcagtctttctatcaaatattatctttgttctcctaatgctctgaaaggatgtagaaacaatatttaaccaaagaacgtaataaaccaggtttgcacctaagtgtgtactagtttatggttctgcagtcaaggttgtcaatttgttggagatgcagccttcaccatggatcctggattgagacgaatgccattggaacctgttaaatgagtagtttgttatgtgtctggaagaagcagcgttagggactttgggctgtgagcatttagaacgagcctggaagcactacagagcatcccacaggaccacacgcaggcctccctgcctcagctgcatctgataaagttgagagacagtaacacaattaaatgacttagaaacaatgtttgcttttcactggcataaatctgaagtggttcagtctagaagaattaagctgtgcaattactgcctgcagagatatttcttcaggaggagtcatgtagccccagtcagaagttctgggtggtgccagcacccagtcctctgcctccatttaatttttaagagaaggtgaaggtaactattagaatataatatttgaagcagctctgccttcttagggctacccaaaacagttctaggtgctaaaattcagattttcagaggatgagaaatagctggtttccaactctccacaaaaactcttattactgttgggacttgggattctgactcaccccaaacccagaacatgaagaagacctttacagtttgtgctctactgttactaggctattaatttgagatcgtccactgtcaagtgttttactatctcactgctgtttttatgattcaggcttataacaaatattgtatcctttatttctgataagacatgaaaggttggccttactgttgaacaataagtaaatccacaggctcctgttgtaatctca

SEQ ID NO: 173862 - DNA, 1557 bp, Homo sapiens
  Payload ID: 14136
  Gene Symbol: RANBP17
  Gene Name: RAN binding protein 17
  ENST ID: ENST00000616486
  CDS Start-End: 1-1557
gtatatgctcgtatgtcagaagtcttaggaataacagatgacaaccacgttctagagacgttcatgacaaaaattgttacaaaccttaaatactggggaagatatgagcctgtaatttcaaggactcttcagttcctaaatgacctttctgttggatatccttttcactcccgctgtgttcaaatagatgctgtgaaattcatgctaaaaaaccacacgagtgaacacttcccttttcttggcatcagtgacaatcatagtctcagcgacttcaggtgtcgaacaaccttctacacagcgctcactcgccttctgatggtagatctgggtgaagatgaggatgaatttgagaatttcatgctgcctcttacagttgcttttgaaacagtattacaaatattcaacaacaactttaaacaagaagatgtaaagcgtatgttgatcgggctggcaagagatcttcgagggattgcctttgcactgaacacaaagaccagctacaccatgctgtttgactggatgtacccaacgtaccttccccttcttcagaatgctgttgaacggtggtatggagagccaacatgtacaactcccatcttgaaacttatggcagaacttatgcaaaacagatcccagcgtttgaattttgatgtatcatctcctaatggaattcttctcttcagagaagctagtaaaatggtttgcacttatggtaatcagatcctgtcccttgggagcctctcaaaagatcagatttatccaatgaaactcaagggcatctccatctgctattcagctctcaagtctgccttgtgtggaaattatgtcagctttggcgtcttcaagttgtatggggacaaccattttgacaatgtactccaggcttttgtcaaaatgctgctgtcagtgtcccacagtgacttgctacaataccggaaactgagccagtcttattatccactcctggaatgtctcactcaggaccatatgagcttcatcatcaacttagagcctcctgtactcatgtatgttctcacatctatctcagagggactcactactcttgatacagttgtctcctccagctgctgtaccagtttagactacatcgtcacctacctcttcaagcacatagcaaaagagggcaagaagccacttcgatgcagagaggctacccaggctggtcagagactattacattttatgcagcaaaacccagatgtcctgcagcagatgatgtctgtcctcatgaacaccattgtctttgaagactgtcggaaccagtggtcagtatccaggcctctcctggggctcatcctgctcaatgagaagtatttcagtgaactgagagcaagtttgataaacagccagcccctccccaagcaggaggtccttgcccagtgcttcagaaacctaatggaaggagtggagcagaacctgtccgtcaagaacagagacaggttcacccaaaatctgtctgtattcagaagagatgtggcagaggcgttgcgcagtgatggcaacactgaaccatgcagtctcgacatgatgagctga

SEQ ID NO: 173863 - DNA, 11711 bp, Homo sapiens
  Payload ID: 14137
  Gene Symbol: RANBP2
  Gene Name: RAN binding protein 2
  Uniprot ID: P49792
  ENST ID: ENST00000283195
  CDS Start-End: 127-9801
cacagtggtcctccgccggctacggcgctgcgtcactggtttgcaggcgctttcctcttggaagtggcgactgctgcgggcctgagcgctggtctcacgcgcctcgggagccaggttggcggcgcgatgaggcgcagcaaggctgacgtggagcggtacatcgcctcggtgcagggctccaccccgtcgcctcgacagaagtcaatgaaaggattctattttgcaaagctgtattatgaagctaaagaatatgatcttgctaaaaaatacatatgtacttacattaatgtgcaagagagggatcccaaagctcacagatttctgggtcttctttatgaattggaagaaaacacagacaaagccgttgaatgttacaggcgttcagtggaattaaacccaacacaaaaagatcttgtgttgaagattgcagaattgctttgtaaaaatgatgttactgatggaagagcaaaatactggcttgaaagagcagccaaacttttcccaggaagtcctgcaatttataaactaaaggaacagcttctagattgtgaaggtgaagatggatggaataaactttttgacttgattcagtcagaactttatgtaagacctgatgacgtccatgtgaacatccggctagtggaggtgtatcgctcaactaaaagattgaaggatgctgtggcccactgccatgaggcagagaggaacatagctttgcgttcaagtttagaatggaattcgtgtgttgtacagacccttaaggaatatctggagtctttacagtgtttggagtctgataaaagtgactggcgagcaaccaatacagacttactgctggcctatgctaatcttatgcttcttacgctttccactagagatgtgcaggaaagtagagaattactgcaaagttttgatagtgctcttcagtctgtgaaatctttgggtggaaatgatgaactgtcagctactttcttagaaatgaaaggacatttctacatgcatgctggttctctgcttttgaagatgggtcagcatagtagtaatgttcaatggcgagctctttctgagctggctgcattgtgctatctcatagcatttcaggttccaagaccaaagattaaattaataaaaggtgaagctggacaaaatctgctggaaatgatggcctgtgaccgactgagccaatcagggcacatgttgctaaacttaagtcgtggcaagcaagattttttaaaagagattgttgaaacttttgccaacaaaagcgggcagtctgcattatatgatgctctgttttctagtcagtcacctaaggatacatcttttcttggtagcgatgatattggaaacattgatgtacgagaaccagagcttgaagatttgactagatacgatgttggtgctattcgagcacataatggtagtcttcagcaccttacttggcttggcttacagtggaattcattgcctgctttacctggaatccgaaaatggctaaaacagcttttccatcatttgccccatgaaacctcaaggcttgaaacaaatgcacctgaatcaatatgtattttagatcttgaagtatttctccttggagtagtatataccagccacttacaattaaaggagaaatgtaattctcaccacagctcctatcagccgttatgcctgccccttcctgtgtgtaaacagctttgtacagaaagacaaaaatcttggtgggatgcggtttgtactctgattcacagaaaagcagtacctggaaacgtagcaaaattgagacttctagttcagcatgaaataaacactctaagagcccaggaaaaacatggccttcaacctgctctgcttgtacattgggcagaatgccttcagaaaacgggcagcggtcttaattctttttatgatcaacgagaatacatagggagaagtgttcattattggaagaaagttttgccattgttgaagataataaaaaagaagaacagtattcctgaacctattgatcctctgtttaaacattttcatagtgtagacattcaggcatcagaaattgttgaatatgaagaagacgcacacataacttttgctatattggatgcagtaaatggaaatatagaagatgctgtgactgcttttgaatctataaaaagtgttgtttcttattggaatcttgcactgatttttcacaggaaggcagaagacattgaaaatgatgccctttctcctgaagaacaagaagaatgcaaaaattatctgagaaagaccagggactacctaataaagattatagatgacagtgattcaaatctttcagtggtcaagaaattgcctgtgcccctggagtctgtaaaagagatgcttaattcagtcatgcaggaactcgaagactatagtgaaggaggtcctctctataaaaatggttctttgcgaaatgcagattcagaaataaaacattctacaccgtctcctaccagatattcactatcaccaagtaaaagttacaagtattctcccaaaacaccacctcgatgggcagaagatcagaattctttactgaaaatgatttgccaacaagtagaggccattaagaaagaaatgcaggagttgaaactaaatagcagtaactcagcatcccctcatcgttggcccacagagaattatggaccagactcagtgcctgatggatatcaggggtcacagacatttcatggggctccactaacagttgcaactactggcccttcagtatattatagtcagtcaccagcatataattcccagtatcttctcagaccagcagctaatgttactcccacaaagggcccagtctatggcatgaataggcttccaccccaacagcatatttatgcctatccgcaacagatgcacacaccgccagtgcaaagctcatctgcttgtatgttctctcaggagatgtatggtcctcctgcattgcgttttgagtctcctgcaacgggaattctatcgcccaggggtgatgattactttaattacaatgttcaacagacaagcacaaatccacctttgccagaaccaggatatttcacaaaacctccgattgcagctcatgcttcaagatctgcagaatctaagactatagaatttgggaaaactaattttgttcagcccatgccgggtgaaggattaaggccatctttgccaacacaagcacacacaacacagccaactccttttaaatttaactcaaatttcaaatcaaatgatggtgacttcacgttttcctcaccacaggttgtgacacagccccctcctgcagcttacagtaacagtgaaagccttttaggtctcctgacttcagataaacccttgcaaggagatggctatagtggagccaaaccaattcctggtggtcaaaccattgggcctcgaaatacattcaattttggaagcaaaaatgtgtctggaatttcatttacagaaaacatggggtcgagtcagcaaaagaattctggttttcggcgaagtgatgatatgtttactttccatggtccagggaaatcagtatttggaacacccactttagagacagcaaacaagaatcatgagacagatggaggaagtgcccatggggatgatgatgatgacggtcctcactttgagcctgtagtacctcttcctgataagattgaagtaaaaactggtgaggaagatgaagaagaattcttttgcaaccgcgcgaaattgtttcgtttcgatgtagaatccaaagaatggaaagaacgtgggattggcaatgtaaaaatactgaggcataaaacatctggtaaaattcgccttctaatgagacgagagcaagtattgaaaatctgtgcaaatcattacatcagtccagatatgaaattgacaccaaatgctggatcagacagatcttttgtatggcatgcccttgattatgcagatgagttgccaaaaccagaacaacttgctattaggttcaaaactcctgaggaagcagcactttttaaatgcaagtttgaagaagcccagagcattttaaaagccccaggaacaaatgtagccatggcgtcaaatcaggctgtcagaattgtaaaagaacccacaagtcatgataacaaggatatttgcaaatctgatgctggaaacctgaattttgaatttcaggttgcaaagaaagaagggtcttggtggcattgtaacagctgctcattaaagaatgcttcaactgctaagaaatgtgtatcatgccaaaatctaaacccaagcaataaagagctcgttggcccaccattagctgaaactgtttttactcctaaaaccagcccagagaatgttcaagatcgatttgcattggtgactccaaagaaagaaggtcactgggattgtagtatttgtttagtaagaaatgaacctactgtatctaggtgcattgcgtgtcagaatacaaaatctgctaacaaaagtggatcttcatttgttcatcaagcttcatttaaatttggccagggagatcttcctaaacctattaacagtgatttcagatctgttttttctacaaaggaaggacagtgggattgcagtgcatgtttggtacaaaatgaggggagctctacaaaatgtgctgcttgtcagaatccgagaaaacagagtctacctgctacttctattccaacacctgcctcttttaagtttggtacttcagagacaagtaaaactctaaaaagtggatttgaagacatgtttgctaagaaggaaggacagtgggattgcagttcatgcttagtgcgaaatgaagcaaatgctacaagatgtgttgcttgtcagaatccggataaaccaagtccatctacttctgttccagctcctgcctcttttaagtttggtacttcagagacaagcaaggctccaaagagcggatttgagggaatgttcactaagaaggagggacagtgggattgcagtgtgtgcttagtaagaaatgaagccagtgctaccaaatgtattgcttgtcagaatccaggtaaacaaaatcaaactacttctgcagtttcaacacctgcctcttcagagacaagcaaggctccaaagagcggatttgagggaatgttcactaagaaggagggacagtgggattgcagtgtgtgcttagtaagaaatgaagccagtgctaccaaatgtattgcttgtcagaatccaggtaaacaaaatcaaactacttctgcagtttcaacacctgcctcttcagagacaagcaaggctccaaagagcggatttgagggaatgttcactaagaaggaaggacagtgggattgcagtgtgtgcttagtaagaaatgaagccagtgctaccaaatgtattgcttgtcagtgtccaagtaaacaaaatcaaacaactgcaatttcaacacctgcctcttcggagataagcaaggctccaaagagtggatttgaaggaatgttcatcaggaaaggacagtgggattgtagtgtttgctgtgtacaaaatgagagttcttccttaaaatgtgtggcttgtgatgcctctaaaccaactcataaacctattgcagaagctccttcagctttcacactgggctcagaaatgaagttgcatgactcttctggaagtcaggtgggaacaggatttaaaagtaatttctcagaaaaagcttctaagtttggcaatacagagcaaggattcaaatttgggcatgtggatcaagaaaattcaccttcatttatgtttcagggttcttctaatacagaatttaagtcaaccaaagaaggattttccatccctgtgtctgctgatggatttaaatttggcatttcggaaccaggaaatcaagaaaagaaaagtgaaaagcctcttgaaaatggtactggcttccaggctcaggatattagtggccagaagaatggccgtggtgtgatttttggccaaacaagtagcacttttacatttgcagatcttgcaaaatcaacttcaggagaaggatttcagtttggcaaaaaagaccccaatttcaagggattttcaggtgctggagaaaaattattctcatcacaatacggtaaaatggccaataaagcaaacacttccggtgactttgagaaagatgatgatgcctataagactgaggacagcgatgacatccattttgaaccagtagttcaaatgcccgaaaaagtagaacttgtaacaggagaagaagatgaaaaagttctgtattcacagcgggtaaaactatttagatttgatgctgaggtaagtcagtggaaagaaaggggcttggggaacttaaaaattctcaaaaacgaggtcaatggcaaactaagaatgctgatgcgaagagaacaagtactaaaagtgtgtgctaatcattggataacgactacgatgaacctgaagcctctctctggatcagatagagcatggatgtggttagccagtgatttctctgatggtgatgccaaactagagcagttggcagcaaaatttaaaacaccagagctggctgaagaattcaagcagaaatttgaggaatgccagcggcttctgttagacataccacttcaaactccccataaacttgtagatactggcagagctgccaagttaatacagagagctgaagaaatgaagagtggactgaaagatttcaaaacatttttgacaaatgatcaaacaaaagtcactgaggaagaaaataagggttcaggtacaggtgcggccggtgcctcagacacaacaataaaacccaatcctgaaaacactgggcccacattagaatgggataactatgatttaagggaagatgctttggatgatagtgtcagtagtagctcagtacatgcttctccattggcaagtagccctgtgagaaaaaatcttttccgttttggtgagtcaacaacaggatttaacttcagttttaaatctgctttgagtccatctaagtctcctgccaagttgaatcagagtgggacttcagttggcactgatgaagaatctgatgttactcaagaagaagagagagatggacagtactttgaacctgttgttcctttacctgatctagttgaagtatccagtggtgaggaaaatgaacaagttgtttttagtcacagggcaaaactctacagatatgataaagatgttggtcaatggaaagaaaggggcattggtgatataaagattttacagaattatgataataagcaagttcgtatagtgatgagaagggaccaagtattaaaactttgtgccaatcacagaataactccagacatgactttgcaaaatatgaaagggacagaaagagtatggttgtggactgcatgtgattttgcagatggagaaagaaaagtagagcatttagctgttcgttttaaactacaggatgttgcagactcgtttaagaaaatttttgatgaagcaaaaacagcccaggaaaaagattctttgataacacctcatgtttctcggtcaagcactcccagagagtcaccatgtggcaaaattgctgtagctgtattagaagaaaccacaagagagaggacagatgttattcagggtgatgatgtagcagatgcaacttcagaagttgaagtgtctagcacatctgaaacaacaccaaaagcagtggtttctcctccaaagtttgtatttggttcagagtctgttaaaagcatttttagtagtgaaaaatcaaaaccatttgcattcggcaacagttcagccactgggtctttgtttggatttagttttaatgcacctttgaaaagtaacaatagtgaaactagttcagtagcccagagtggatctgaaagcaaagtggaacctaaaaaatgtgaactgtcaaagaactctgatatcgaacagtcttcagatagcaaagtcaaaaatctctttgcttcctttccaacggaagaatcttcaatcaactacacatttaaaacaccagaaaaggcaaaagagaagaaaaaacctgaagattctccctcagatgatgatgttctcattgtatatgaactaactccaaccgctgagcagaaagcccttgcaaccaaacttaaacttcctccaactttcttctgctacaagaatagaccagattatgttagtgaagaagaggaggatgatgaagatttcgaaacagctgtcaagaaacttaatggaaaactatatttggatggctcagaaaaatgtagacccttggaagaaaatacagcagataatgagaaagaatgtattattgtttgggaaaagaaaccaacagttgaagagaaggcaaaagcagatacgttaaaacttccacctacatttttttgtggagtctgtagtgatactgatgaagacaatggaaatggggaggactttcaatcagagcttcaaaaagttcaggaagctcaaaaatctcagacagaagaaataactagcacaactgacagtgtatatacaggtgggactgaagtgatggtaccttctttctgtaaatctgaagaacctgattctattaccaaatccattagttcaccatctgtttcctctgaaactatggacaaacctgtagatttgtcaactagaaaggaaattgatacagattctacaagccaaggggaaagcaagatagtttcatttggatttggaagtagcacagggctctcatttgcagacttggcttccagtaattctggagattttgcttttggttctaaagataaaaatttccaatgggcaaatactggagcagctgtgtttggaacacagtcagtcggaacccagtcagccggtaaagttggtgaagatgaagatggtagtgatgaagaagtagttcataatgaagatatccattttgaaccaatagtgtcactaccagaggtagaagtaaaatctggagaagaagatgaagaaattttgtttaaagagagagccaaactttatagatgggatcgggatgtcagtcagtggaaggagcgcggtgttggagatataaagattctttggcatacaatgaagaattattaccggatcctaatgagaagagaccaggtttttaaagtgtgtgcaaaccacgttattactaaaacaatggaattaaagcccttaaatgtttcaaataatgctttagtttggactgcctcagattatgctgatggagaagcaaaagtagaacagcttgcagtgagatttaaaactaaagaagtagctgattgtttcaagaaaacatttgaagaatgtcagcagaatttaatgaaactccagaaaggacatgtatcactggcagcagaattatcaaaggagaccaatcctgtggtgttttttgatgtttgtgcggacggtgaacctctagggcggataactatggaattattttcaaacattgttcctcggactgctgagaacttcagagcactatgcactggagagaaaggctttggtttcaagaattccatttttcacagagtaattccagattttgtttgccaaggaggagatatcaccaaacatgatggaacaggcggacagtccatttatggagacaaatttgaagatgaaaattttgatgtgaaacatactggtcctggtttactatccatggccaatcaaggccagaataccaataattctcaatttgttataacactgaagaaagcagaacatttggactttaagcatgtagtatttgggtttgttaaggatggcatggatactgtgaaaaagattgaatcatttggttctcccaaagggtctgtttgtcgaagaataactatcacagaatgtggacagatataaaatcattgttgttcatagaaaatttcatctgtataagcagttggattgaagcttagctattacaatttgatagttatgttcagcttttgaaaatggacgtttccgatttacaaatgtaaaattgcagcttatagctgttgtcactttttaatgtgttataattgaccttgcatggtgtgaaataaaagtttaaacactggtgtatttcaggtgtacttgtgtttatgtactcctgacgtattaaaatggaataatactaatcttgttaaaagcaatagacctcaaactattgaaggaatatgatatatgcaatttaattttaattccttttaagatatttggacttcctgcatggatatacttaccatttgaataaagggaccacaacttggataatttaattttaggtttgaaatatatttggtaatcttaactattggtgtactcatttatgcatagagactcgtttatgaatgggtagagccacagaacgtatagagttaaccaaagtgctcttctctagaatctttacacctcctgtgtggttacaagttaactttgtaagtagcgtaccttccttccttaaaatatctagcttcctgtgccctttcatagatattcgattaatttttacattttaaacaagttgactatttcctttaggggttttgtttcaaacttttctgtcatctgtctctactacctcagaaactgcagcttggttctgatgatagaaattgaatttttccttgtagttattgtgataaagtatgaatatttttagaaagtctataccatgttctttcgttaaagatttgctttatacaagattgttgcagtacctttttctggtaaattttgtagcagaaataaaatgacaattcctaagagccactgacatccaaaaaattcattacttacgcttcgggttcattctaaagtaaggaagacaatttaaaggcagtaaattcaaactgctgcataatttccagagctcctagtttctcaagtttgatacacaccaaaaacgtatttggaaatggcttgtatcaaatgttaggcaaattgctaaagaaaagaggatgttcttattggcctactcaatatggaactacaaagaatccaggtagaacacaaaattttgtatattgcaattatgaatattgactgtcttccacccatctgtgttctttcgggtgaaattacctcattttatttagtgaggaaagacaggtttattccctgttacatggggatttggaaattgggtatcctaaagcaagtaactgttcaaccaccagtcaaaagaggggagggatgttgtgcgagtaatgagtgatggtataccatcaccattccactcggccacaaagccagatacttgaaataaacctactccaaatgtatcagttcagtcttgaaccatggattacatatgtttacactaaatatttcaaattggcttatttggaaatctatgtaatataaactgatgtaaagtgtgttgtaacttttcagctgagacagttgatgccttcgtcatgattttagaataaattcttaagttaatgcaagtgctttttaagagactttttacagatttgtatgctttcctaaagcactaaagttacaaattaaaaagctttaaaaactttgaccaaaaatttgacaaaatgacatgtaaactgacttttcccgtattagtattccaaagatgcttaaaagtggcttgtggcatttatgagaaagtctttgtgtcacatttcaggaaaggactttgatttctctttgttatttaatcactgatgtggtctaaacccacgataatatgtatctttccttttaaactggattttatgttgtctcattaaaatctgcttaaagatagaataaaattcattatttgtaca

SEQ ID NO: 173864 - DNA, 367 bp, Homo sapiens
  Payload ID: 14137
  Gene Symbol: RANBP2
  Gene Name: RAN binding protein 2
  ENST ID: ENST00000425282
  CDS Start-End: 55-210
gctgcgggcctgagcgctggtctcacgcgcctcgggagccaggttggcggcgcgatgaggcgcagcaaggctgacgtggagcggtacatcgcctcggtgcagggctccaccccgtcgcctcgacagaagtcaatgaaaggattctattttgcaaagctgtattatgaagctaaagaatatgatcttgctaaaaacgttcagtggaattaaacccaacacaaaaagatcttgtgttgaagattgcagaattgctttgtaaaaatgatgttactgatggaagagcaaaatactggcttgaaagagcagccaaacttttcccaggaagtcctgcaatttataaactaaaggaacagcttctagattgtga

SEQ ID NO: 173865 - DNA, 156 bp, Homo sapiens
  Payload ID: 14137
  Gene Symbol: RANBP2
  Gene Name: RAN binding protein 2
  ENST ID: ENST00000629728
  CDS Start-End: 1-156
atgaggcgcagcaaggctgacgtggagcggtacatcgcctcggtgcagggctccaccccgtcgcctcgacagaagtcaatgaaaggattctattttgcaaagctgtattatgaagctaaagaatatgatcttgctaaaaacgttcagtggaattaa

SEQ ID NO: 173866 - DNA, 1762 bp, Homo sapiens
  Payload ID: 14138
  Gene Symbol: RANBP3
  Gene Name: RAN binding protein 3
  Uniprot ID: Q9H6Z4
  ENST ID: ENST00000034275
  CDS Start-End: 5-1504
taaaatggcggacctggcgaacgaagaaaagcctgccattgctccgcccgtctttgtgtttcagaaggataaaggacaaaagaggtcagctggcggctccagtcctgaaggcggagaagattctgacagagaagatggaaattactgccctcctgtcaagcgagaaagaacatcctctttaacccagttcccaccctcacagtcagaggaaaggagcagtggcttccggttgaagccaccaacgctgatccacggccaagcccccagcgcaggtctgccaagccagaagcccaaggagcagcagcggagcgtgcttcgcccggcagtgttacaagctccgcagccaaaggcgctgtcccagactgtccccagcagtggcaccaacggggtcagcctcccagcagactgcacgggggcagtgcccgcagcatcccctgacactgctgcatggagaagtccttccgaagctgccgatgaggtgtgtgcacttgaggagaaagagccccagaaaaatgagtccagcaatgcctctgaagaggaagcctgtgagaaaaaagaccccgccacacagcaagcctttgtatttgggcagaacttgagggacagagttaagctgataaatgagagcgtggacgaagccgacatggagaatgctggacaccccagcgcagacacgccaaccgcaacgaactatttcctccagtatatcagttccagtttagagaactcaaccaatagtgccgacgcctccagcaacaaatttgtatttggccagaacatgagcgagcgagttttgagccccccaaaattaaacgaggtcagttcagatgccaacagggaaaatgcagctgccgagtcagggtctgagtcctcgtcccaggaggccacccctgagaaagagtccctggctgagtcggcagccgcctacaccaaggcaacagcgcggaagtgtttgttggaaaaagtggaagtcatcaccggggaggaggcggagagcaatgtgttacagatgcagtgcaagctgtttgtctttgacaagacctcacagtcctgggtggagagaggccgggggctgctcagactcaatgacatggcgtccaccgatgacggcacactacagtcccgactagtgatgcggacccaggggagcctgcgactgatcctcaacaccaagctgtgggcccagatgcagatcgacaaggccagcgagaagagcattcgcatcacagccatggacaccgaggaccagggcgtgaaggtcttcctgatctcggccagctccaaggacacaggtcagttgtatgcagccctgcaccaccgcatcctggccctgcgcagccgcgtggagcaggagcaggaggccaagatgcccgcgcctgagcctggggcagccccatccaacgaggaggacgacagcgacgatgacgatgtcctggctccttcaggggccaccgcagctggtgctggtgacgaaggggacgggcagacgaccgggagcacatagcggccgggagcccggctgcacaccaggctgctgctttgtccgtctatccacccgcccacccgcccccaccccaccggcagcgtccaggtgcggggccgggaaccacacaccccactgggccggccacagtctggacccgcacgtcctgttcaaaagcagactcgggaactgcctgaatgtggtttgggacacgagacctcatcatattgatgagcgaacaaacaagaacatttcctccctcccctcctttgaattgaa

SEQ ID NO: 173867 - DNA, 3233 bp, Homo sapiens
  Payload ID: 14138
  Gene Symbol: RANBP3
  Gene Name: RAN binding protein 3
  Uniprot ID: Q9H6Z4
  ENST ID: ENST00000340578
  CDS Start-End: 59-1762
agaaagcaggcgagcctgggccggcgcggggccttgtgggagggcttaaggaagtaaaatggcggacctggcgaacgaagaaaagcctgccattgctccgcccgtctttgtgtttcagaaggataaaggacaaaagtcccctgcagagcaaaaaaacttgtcggattcgggagaggagcctcggggggaggctgaggccccccaccatggcacgggtcaccccgagtcagctggcgagcatgccctagaacctcctgcccctgctggcgcctcagccagcactcctccgcctcccgctcctgaagcccagcttcctccttttccgcgagaactggcagggaggtcagctggcggctccagtcctgaaggcggagaagattctgacagagaagatggaaattactgccctcctgtcaagcgagaaagaacatcctctttaacccagttcccaccctcacagtcagaggaaaggagcagtggcttccggttgaagccaccaacgctgatccacggccaagcccccagcgcaggtctgccaagccagaagcccaaggagcagcagcggagcgtgcttcgcccggcagtgttacaagctccgcagccaaaggcgctgtcccagactgtccccagcagtggcaccaacggggtcagcctcccagcagactgcacgggggcagtgcccgcagcatcccctgacactgctgcatggagaagtccttccgaagctgccgatgaggtgtgtgcacttgaggagaaagagccccagaaaaatgagtccagcaatgcctctgaagaggaagcctgtgagaaaaaagaccccgccacacagcaagcctttgtatttgggcagaacttgagggacagagttaagctgataaatgagagcgtggacgaagccgacatggagaatgctggacaccccagcgcagacacgccaaccgcaacgaactatttcctccagtatatcagttccagtttagagaactcaaccaatagtgccgacgcctccagcaacaaatttgtatttggccagaacatgagcgagcgagttttgagccccccaaaattaaacgaggtcagttcagatgccaacagggaaaatgcagctgccgagtcagggtctgagtcctcgtcccaggaggccacccctgagaaagagtccctggctgagtcggcagccgcctacaccaaggcaacagcgcggaagtgtttgttggaaaaagtggaagtcatcaccggggaggaggcggagagcaatgtgttacagatgcagtgcaagctgtttgtctttgacaagacctcacagtcctgggtggagagaggccgggggctgctcagactcaatgacatggcgtccaccgatgacggcacactacagtcccgactagtgatgcggacccaggggagcctgcgactgatcctcaacaccaagctgtgggcccagatgcagatcgacaaggccagcgagaagagcattcgcatcacagccatggacaccgaggaccagggcgtgaaggtcttcctgatctcggccagctccaaggacacaggtcagttgtatgcagccctgcaccaccgcatcctggccctgcgcagccgcgtggagcaggagcaggaggccaagatgcccgcgcctgagcctggggcagccccatccaacgaggaggacgacagcgacgatgacgatgtcctggctccttcaggggccaccgcagctggtgctggtgacgaaggggacgggcagacgaccgggagcacatagcggccgggagcccggctgcacaccaggctgctgctttgtccgtctatccacccgcccacccgcccccaccccaccggcagcgtccaggtgcggggccgggaaccacacaccccactgggccggccacagtctggacccgcacgtcctgttcaaaagcagactcgggaactgcctgaatgtggtttgggacacgagacctcatcatattgatgagcgaacaaacaagaacatttcctccctcccctcctttgaattgaaatggcacattaagacttgtcacggcttctcactgggactggagacctcgttccttcaccccgcgtgtcgccagcctctgggtccagccagagcccctggcttctccgccacccacacccttcccaccctgctgtggggccctgcctttgtggggagcagccagccctctgcccctgcccagggctccccaactataggcctgggacccccgcccagcttggggggctgctcgtacgagtgtagacactgggcccattggacgtgctgttaactactatcttcatttcccacttcccctctctgattgggggtgtatattttacatctttttttctttttattttcgaaggctttgttttggtttcttaggttaagatgctctcgagcgttgagcaggcacagctctgtcgaggtccctgtcccccacctgtggttctggcctctgaggttgggggactacttgtttcccaccccaggttcctccaggccaagtcatggggtgatgaggagttggggccctgtctgtcctaggcctggagagtgcctgtctgggaaaaggtcactggacctggaagggtccccagggtcccctgactcccgtctccatctgtcacgtggttcaccatcatcaggcaccaggcgcaaactgcttcccgctgttggccatcccttccccagccacaggtgtccctgcccccaggacagtccagggccaggggcttctgtgagaggcagagggggaccctcaccaaatcttggtggaagagcccaggggctggtcccagaacaggcagtctcacaagcacgcagcacactggagtggacgcctgtgcccacccgagcctggagcatggccaagagccagcttgcaccacccacctgggaggccgaggaggaggtcccctgggcacagggcctctttgggacttcagaggaaatctcccagtcccactctcggagggttaagagaaggcctcctgcagctgtgccgtccacacctctaggtcgccagagccctggcccccagcccccagcaagcctgagcccgggaagaaccagaggccctcccgagagacccagtcacacgtctctgctttaagccttagccagctagtgacgagtacaacgagataacgcccatgtgttttggaacatttatgtaagattgtcatatgaaatgtatttgggaactacattaaacttttaactaaaa

SEQ ID NO: 173868 - DNA, 3186 bp, Homo sapiens
  Payload ID: 14138
  Gene Symbol: RANBP3
  Gene Name: RAN binding protein 3
  Uniprot ID: Q9H6Z4
  ENST ID: ENST00000439268
  CDS Start-End: 27-1715
cttgtgggagggcttaaggaagtaaaatggcggacctggcgaacgaagaaaagcctgccattgctccgcccgtctttgtgtttcagaaggataaaggacaaaagtcccctgcagagcaaaaaaacttgtcggattcgggagaggagcctcggggggaggctgaggccccccaccatggcacgggtcaccccgagtcagctggcgagcatgccctagaacctcctgcccctgctggcgcctcagccagcactcctccgcctcccgctcctgaagcccagcttcctccttttccgcgagaactggcagggaggtcagctggcggctccagtcctgaaggcggagaagattctgacagagaagatggaaattactgccctcctgtcaagcgagaaagaacatcctctttaacccagttcccaccctcacagtcagaggaaaggagcagtggcttccggttgaagccaccaacgctgatccacggccaagcccccagcgcaggtctgccaagccagaagcccaaggagcagcagcggagcgtgcttcgcccggcagtgttacaagctccgcagccaaaggcgctgtcccagactgtccccagcagtggcaccaacggggtcagcctcccagcagactgcacgggggcagtgcccgcagcatcccctgacactgctgcatggagaagtccttccgaagctgccgatgaggagaaagagccccagaaaaatgagtccagcaatgcctctgaagaggaagcctgtgagaaaaaagaccccgccacacagcaagcctttgtatttgggcagaacttgagggacagagttaagctgataaatgagagcgtggacgaagccgacatggagaatgctggacaccccagcgcagacacgccaaccgcaacgaactatttcctccagtatatcagttccagtttagagaactcaaccaatagtgccgacgcctccagcaacaaatttgtatttggccagaacatgagcgagcgagttttgagccccccaaaattaaacgaggtcagttcagatgccaacagggaaaatgcagctgccgagtcagggtctgagtcctcgtcccaggaggccacccctgagaaagagtccctggctgagtcggcagccgcctacaccaaggcaacagcgcggaagtgtttgttggaaaaagtggaagtcatcaccggggaggaggcggagagcaatgtgttacagatgcagtgcaagctgtttgtctttgacaagacctcacagtcctgggtggagagaggccgggggctgctcagactcaatgacatggcgtccaccgatgacggcacactacagtcccgactagtgatgcggacccaggggagcctgcgactgatcctcaacaccaagctgtgggcccagatgcagatcgacaaggccagcgagaagagcattcgcatcacagccatggacaccgaggaccagggcgtgaaggtcttcctgatctcggccagctccaaggacacaggtcagttgtatgcagccctgcaccaccgcatcctggccctgcgcagccgcgtggagcaggagcaggaggccaagatgcccgcgcctgagcctggggcagccccatccaacgaggaggacgacagcgacgatgacgatgtcctggctccttcaggggccaccgcagctggtgctggtgacgaaggggacgggcagacgaccgggagcacatagcggccgggagcccggctgcacaccaggctgctgctttgtccgtctatccacccgcccacccgcccccaccccaccggcagcgtccaggtgcggggccgggaaccacacaccccactgggccggccacagtctggacccgcacgtcctgttcaaaagcagactcgggaactgcctgaatgtggtttgggacacgagacctcatcatattgatgagcgaacaaacaagaacatttcctccctcccctcctttgaattgaaatggcacattaagacttgtcacggcttctcactgggactggagacctcgttccttcaccccgcgtgtcgccagcctctgggtccagccagagcccctggcttctccgccacccacacccttcccaccctgctgtggggccctgcctttgtggggagcagccagccctctgcccctgcccagggctccccaactataggcctgggacccccgcccagcttggggggctgctcgtacgagtgtagacactgggcccattggacgtgctgttaactactatcttcatttcccacttcccctctctgattgggggtgtatattttacatctttttttctttttattttcgaaggctttgttttggtttcttaggttaagatgctctcgagcgttgagcaggcacagctctgtcgaggtccctgtcccccacctgtggttctggcctctgaggttgggggactacttgtttcccaccccaggttcctccaggccaagtcatggggtgatgaggagttggggccctgtctgtcctaggcctggagagtgcctgtctgggaaaaggtcactggacctggaagggtccccagggtcccctgactcccgtctccatctgtcacgtggttcaccatcatcaggcaccaggcgcaaactgcttcccgctgttggccatcccttccccagccacaggtgtccctgcccccaggacagtccagggccaggggcttctgtgagaggcagagggggaccctcaccaaatcttggtggaagagcccaggggctggtcccagaacaggcagtctcacaagcacgcagcacactggagtggacgcctgtgcccacccgagcctggagcatggccaagagccagcttgcaccacccacctgggaggccgaggaggaggtcccctgggcacagggcctctttgggacttcagaggaaatctcccagtcccactctcggagggttaagagaaggcctcctgcagctgtgccgtccacacctctaggtcgccagagccctggcccccagcccccagcaagcctgagcccgggaagaaccagaggccctcccgagagacccagtcacacgtctctgctttaagccttagccagctagtgacgagtacaacgagataacgcccatgtgttttggaacatttatgtaagattgtcatatgaaatgtatttgggaactacattaaacttttaactaaaa

SEQ ID NO: 173869 - DNA, 568 bp, Homo sapiens
  Payload ID: 14138
  Gene Symbol: RANBP3
  Gene Name: RAN binding protein 3
  ENST ID: ENST00000588010
  CDS Start-End: 12-233
aaggaagtaaaatggcggacctggcgaacgaagaaaagcctgccattgctccgcccgtctttgtgtttcagaaggataaaggacaaaagaggtcagctggcggctccagtcctgaaggcggagaagattctgacagagaagatggaaattactgccctcctgtcaagcgagaaagaacatcctctttaacccagttcccaccctcacagtcaggcgccttccaggcctgctgatcggacgagacttctgttgtaatttggaaatgttctccctggttctccaggcccgaagtcactgaggccaagaccatagtcctctcctgcccttgccccccaggcccagccccagcccaggcaggcctgctgttgatattttgtcttgtgcttttagaggaaaggagcagtggcttccggttgaagccaccaacgctgatccacggccaagcccccagcgcaggtctgccaagccagaagcccaaggagcagcagcggagcgtgcttcgcccggcagtgttacaagctccgcagccaaaggcgctgtcccagactgtccccagcagtggcaccaa

SEQ ID NO: 173870 - DNA, 547 bp, Homo sapiens
  Payload ID: 14138
  Gene Symbol: RANBP3
  Gene Name: RAN binding protein 3
  ENST ID: ENST00000587479
  CDS Start-End: 83-547
gcagaaagcaggcgagcctgggccggcgcggggccttgtgggagggcttaaggaagtaaaatggcggacctggcgaacgaagatgcagtgcaagctgtttgtctttgacaagacctcacagtcctgggtggagagaggccgggggctgctcagactcaatgacatggcgtccaccgatgacggcacactacagtcccgactagtgatgcggacccaggggagcctgcgactgatcctcaacaccaagctgtgggcccagatgcagatcgacaaggccagcgagaagagcattcgcatcacagccatggacaccgaggaccagggcgtgaaggtcttcctgatctcggccagctccaaggacacaggtcagttgtatgcagccctgcaccaccgcatcctggccctgcgcagccgcgtggagcaggagcaggaggccaagatgcccgcgcctgagcctggggcagccccatccaacgaggaggacgacagcgacgatgacgatgtcctggctccttcaggggccaccgcagctggtgctggtgacgaa

SEQ ID NO: 173871 - DNA, 562 bp, Homo sapiens
  Payload ID: 14138
  Gene Symbol: RANBP3
  Gene Name: RAN binding protein 3
  ENST ID: ENST00000592133
  CDS Start-End: 33-278
agtaaaatggcggacctggcgaacgaagggttatgctgcattgtaggctgacatcaggatttgaaggcagagttttgtccctggcaaaggtaaagaagactggaaagaggaaaagcctgccattgctccgcccgtctttgtgtttcagaaggataaaggacaaaagtcccctgcagagcaaaaaaacttgtcggattcgggagaggagcctcggggggaggctgaggccccccaccatggcacgggtcaccccgagtcagctggcgagcatgccctagaacctcctgcccctgctggcgcctcagccagcactcctccgcctcccgctcctgaagcccagcttcctccttttccgcgagaactggcagggaggtcagctggcggctccagtcctgaaggcggagaagattctgacagagaagatggaaattactgccctcctgtcaagcgagaaagaacatcctctttaacccagttcccaccctcacagtcagaggaaaggagcagtggcttccggttgaagccaccaacgctgatccacggccaagcccccagcgcaggt

SEQ ID NO: 173872 - DNA, 1783 bp, Homo sapiens
  Payload ID: 14138
  Gene Symbol: RANBP3
  Gene Name: RAN binding protein 3
  ENST ID: ENST00000591092
  CDS Start-End: 12-1496
aaggaagtaaaatggcggacctggcgaacgaagaaaagcctgccattgctccgcccgtctttgtgtttcagaaggataaaggacaaaagaggtcagctggcggctccagtcctgaaggcggagaagattctgacagagaagatggaaattactgccctcctgtcaagcgagaaagaacatcctctttaacccagttcccaccctcacagtcagaggaaaggagcagtggcttccggttgaagccaccaacgctgatccacggccaagcccccagcgcaggtctgccaagccagaagcccaaggagcagcagcggagcgtgcttcgcccggcagtgttacaagctccgcagccaaaggcgctgtcccagactgtccccagcagtggcaccaacggggtcagcctcccagcagactgcacgggggcagtgcccgcagcatcccctgacactgctgcatggagaagtccttccgaagctgccgatgaggagaaagagccccagaaaaatgagtccagcaatgcctctgaagaggaagcctgtgagaaaaaagaccccgccacacagcaagcctttgtatttgggcagaacttgagggacagagttaagctgataaatgagagcgtggacgaagccgacatggagaatgctggacaccccagcgcagacacgccaaccgcaacgaactatttcctccagtatatcagttccagtttagagaactcaaccaatagtgccgacgcctccagcaacaaatttgtatttggccagaacatgagcgagcgagttttgagccccccaaaattaaacgaggtcagttcagatgccaacagggaaaatgcagctgccgagtcagggtctgagtcctcgtcccaggaggccacccctgagaaagagtccctggctgagtcggcagccgcctacaccaaggcaacagcgcggaagtgtttgttggaaaaagtggaagtcatcaccggggaggaggcggagagcaatgtgttacagatgcagtgcaagctgtttgtctttgacaagacctcacagtcctgggtggagagaggccgggggctgctcagactcaatgacatggcgtccaccgatgacggcacactacagtcccgactagtgatgcggacccaggggagcctgcgactgatcctcaacaccaagctgtgggcccagatgcagatcgacaaggccagcgagaagagcattcgcatcacagccatggacaccgaggaccagggcgtgaaggtcttcctgatctcggccagctccaaggacacaggtcagttgtatgcagccctgcaccaccgcatcctggccctgcgcagccgcgtggagcaggagcaggaggccaagatgcccgcgcctgagcctggggcagccccatccaacgaggaggacgacagcgacgatgacgatgtcctggctccttcaggggccaccgcagctggtgctggtgacgaaggggacgggcagacgaccgggagcacatagcggccgggagcccggctgcacaccaggctgctgctttgtccgtctatccacccgcccacccgcccccaccccaccggcagcgtccaggtgcggggccgggaaccacacaccccactgggccggccacagtctggacccgcacgtcctgttcaaaagcagactcgggaactgcctgaatgtggtttgggacacgagacctcatcatattgatgagcgaacaaacaagaacatttcctccctcccctcctttgaattgaaatggcacattaagacttgtcacggcttct

SEQ ID NO: 173873 - DNA, 786 bp, Homo sapiens
  Payload ID: 14138
  Gene Symbol: RANBP3
  Gene Name: RAN binding protein 3
  ENST ID: ENST00000590623
  CDS Start-End: 634-786
cttaaggaagtaaaatggcggacctggcgaacgaagcctgccattgctccgcccgtctttgtgtttcagaaggataaaggacaaaagaggtcagctggcggctccagtcctgaaggcggagaagattctgacagagaagatggaaattactgccctcctgtcaagcgagaaagaacatcctctttaacccagttcccaccctcacagtcagaggaaaggagcagtggcttccggttgaagccaccaacgctgatccacggccaagcccccagcgcaggtctgccaagccagaagcccaaggagcagcagcggagcgtgcttcgcccggcagtgttacaagctccgcagccaaaggcgctgtcccagactgtccccagcagtggcaccaacggggtcagcctcccagcagactgcacgggggcagtgcccgcagcatcccctgacactgctgcatggagaagtccttccgaagctgccgatgaggagaaagagccccagaaaaatgagtccagcaatgcctctgaagaggaagcctgtgagaaaaaagaccccgccacacagcaagcctttgtatttgggcagaacttgagggacagagttaagctgataaatgagagcgtggacgaagccgacatggagaatgctggacaccccagcgcagacacgccaaccgcaacgaactatttcctccagtatatcagttccagtttagagaactcaaccaatagtgccgacgcctccagcaacaaatttgtatttggccagaacatgagcgagcgagttttg

SEQ ID NO: 173874 - DNA, 557 bp, Homo sapiens
  Payload ID: 14138
  Gene Symbol: RANBP3
  Gene Name: RAN binding protein 3
  ENST ID: ENST00000591333
  CDS Start-End: 139-557
aaggaagtaaaatggcggacctggcgaacgaaggatgttggtgtaagccacctcctaaggtggttgtggagattaggtgacatgatgcagataaaacctaacacataaagaagtgctcgaagaacgctggccacgtatatgaaaccatcacgcgtctgggagaccccatttgtggatgcctttgctgtgcatatcatggcagaaactaagataagtctaagagaaaagcctgccattgctccgcccgtctttgtgtttcagaaggataaaggacaaaagtcccctgcagagcaaaaaaacttgtcggattcgggagaggagcctcggggggaggctgaggccccccaccatggcacgggtcaccccgagtcagctggcgagcatgccctagaacctcctgcccctgctggcgcctcagccagcactcctccgcctcccgctcctgaagcccagcttcctccttttccgcgagaactggcagggaggtcagctggcggctccagtcctgaaggcggagaagattctgacagagaagatggaaattactgccctcctgt

SEQ ID NO: 173875 - DNA, 573 bp, Homo sapiens
  Payload ID: 14138
  Gene Symbol: RANBP3
  Gene Name: RAN binding protein 3
  ENST ID: ENST00000591736
  CDS Start-End: 59-573
agaaagcaggcgagcctgggccggcgcggggccttgtgggagggcttaaggaagtaaaatggcggacctggcgaacgaagaggaaaggagcagtggcttccggttgaagccaccaacgctgatccacggccaagcccccagcgcaggtctgccaagccagaagcccaaggagcagcagcggagcgtgcttcgcccggcagtgttacaagctccgcagccaaaggcgctgtcccagactgtccccagcagtggcaccaacggggtcagcctcccagcagactgcacgggggcagtgcccgcagcatcccctgacactgctgcatggagaagtccttccgaagctgccgatgaggtgtgtgcacttgaggagaaagagccccagaaaaatgagtccagcaatgcctctgaagaggaagcctgtgagaaaaaagaccccgccacacagcaagcctttgtatttgggcagaacttgagggacagagttaagctgataaatgagagcgtggacgaagccgacatggagaatgctggacaccccagcgcagacacgccaaccgcaacgaactatttcct

SEQ ID NO: 173876 - DNA, 1937 bp, Homo sapiens
  Payload ID: 14138
  Gene Symbol: RANBP3
  Gene Name: RAN binding protein 3
  ENST ID: ENST00000592771
  CDS Start-End: 4-228
aaaatggcggacctggcgaacgaagaaaagcctgccattgctccgcccgtctttgtgtttcagaaggataaaggacaaaagaggtcagctggcggctccagtcctgaaggcggagaagattctgacagagaagatggaaattactgccctcctgtcaagcgagaaagaacatcctctttaacccagttcccaccctcacagtcagaagaaaatttctggaaggaatgagaagagaccacccttgttttcgtggagcagggcctgtgacagggacctccagattttggctacccctggagcacgccttgtctgtctgcagctctggagagggccacgctctgggcctagcactagtggcagaggaaaggagcagtggcttccggttgaagccaccaacgctgatccacggccaagcccccagcgcaggtctgccaagccagaagcccaaggagcagcagcggagcgtgcttcgcccggcagtgttacaagctccgcagccaaaggcgctgtcccagactgtccccagcagtggcaccaacggggtcagcctcccagcagactgcacgggggcagtgcccgcagcatcccctgacactgctgcatggagaagtccttccgaagctgccgatgaggagaaagagccccagaaaaatgagtccagcaatgcctctgaagaggaagcctgtgagaaaaaagaccccgccacacagcaagcctttgtatttgggcagaacttgagggacagagttaagctgataaatgagagcgtggacgaagccgacatggagaatgctggacaccccagcgcagacacgccaaccgcaacgaactatttcctccagtatatcagttccagtttagagaactcaaccaatagtgccgacgcctccagcaacaaatttgtatttggccagaacatgagcgagcgagttttgagccccccaaaattaaacgaggtcagttcagatgccaacagggaaaatgcagctgccgagtcagggtctgagtcctcgtcccaggaggccacccctgagaaagagtccctggctgagtcggcagccgcctacaccaaggcaacagcgcggaagtgtttgttggaaaaagtggaagtcatcaccggggaggaggcggagagcaatgtgttacagatgcagtgcaagctgtttgtctttgacaagacctcacagtcctgggtggagagaggccgggggctgctcagactcaatgacatggcgtccaccgatgacggcacactacagtcccgactagtgatgcggacccaggggagcctgcgactgatcctcaacaccaagctgtgggcccagatgcagatcgacaaggccagcgagaagagcattcgcatcacagccatggacaccgaggaccagggcgtgaaggtcttcctgatctcggccagctccaaggacacaggtcagttgtatgcagccctgcaccaccgcatcctggccctgcgcagccgcgtggagcaggagcaggaggccaagatgcccgcgcctgagcctggggcagccccatccaacgaggaggacgacagcgacgatgacgatgtcctggctccttcaggggccaccgcagctggtgctggtgacgaaggggacgggcagacgaccgggagcacatagcggccgggagcccggctgcacaccaggctgctgctttgtccgtctatccacccgcccacccgcccccaccccaccggcagcgtccaggtgcggggccgggaaccacacaccccactgggccggccacagtctggacccgcacgtcctgttcaaaagcagactcgggaactgcctgaatgtggtttgggacacgagacctcatcatattgatgagcgaacaaacaagaacatttcctccctcccctcctttgaattgaaatggcacattaagacttgtcacggcttctcactggg

SEQ ID NO: 173877 - DNA, 461 bp, Homo sapiens
  Payload ID: 14138
  Gene Symbol: RANBP3
  Gene Name: RAN binding protein 3
  ENST ID: ENST00000587463
  CDS Start-End: 59-247
agaaagcaggcgagcctgggccggcgcggggccttgtgggagggcttaaggaagtaaaatggcggacctggcgaacgaagaaaagcctgccattgctccgcccgtctttgtgtttcagaaggataaaggacaaaaggtaaggggccgaggtcagctggcggctccagtcctgaaggcggagaagattctgacagagaagatggaaattactgccctcctgtcaagcgagaaagaacatcctctttaacccagttcccaccctcacagtcagaggaaaggagcagtggcttccggttgaagccaccaacgctgatccacggccaagcccccagcgcaggtctgccaagccagaagcccaaggagcagcagcggagcgtgcttcgcccggcagtgttacaagctccgcagccaaaggcgctgtcccagactgtccccagcagtggcaccaacggggtcagcct

SEQ ID NO: 173878 - DNA, 579 bp, Homo sapiens
  Payload ID: 14138
  Gene Symbol: RANBP3
  Gene Name: RAN binding protein 3
  ENST ID: ENST00000587263
  CDS Start-End: 12-338
aaggaagtaaaatggcggacctggcgaacgaagaaaagcctgccattgctccgcccgtctttgtgtttcagaaggataaaggacaaaagtcccctgcagagcaaaaaaacttgtcggattcgggagaggagcctcggggggaggctgaggccccccaccatggcacgggtcaccccgagtcagctggcgagcatgccctagaacctcctgcccctgctggcgcctcagccagcactcctccgcctcccgctcctgaagcccagcttcctccttttccgcgagaactggcaggggaagaagaaaagactcttcctttgaacccagaaggaatcccctgagccctttatctttgtattaagaagccttttgaagattataggtggagaagattgtgaactctcaagaacaagaaatgtcttgggtttttgaagtttgataaattgggaaagaggtcagctggcggctccagtcctgaaggcggagaagattctgacagagaagatggaaattactgccctcctgtcaagcgagaaagaacatcctctttaacccagttcccaccctcacagtcagaggaaa

SEQ ID NO: 173879 - DNA, 566 bp, Homo sapiens
  Payload ID: 14138
  Gene Symbol: RANBP3
  Gene Name: RAN binding protein 3
  ENST ID: ENST00000585339
  CDS Start-End: 12-128
aaggaagtaaaatggcggacctggcgaacgaagacggggtttcaccatgttggccaggatggtctccatctcctgacctcgtgatctgcccgcctcggcctcccaaagtgctgggattacaggcgtgagccaccgcacccggctgctacatctctttttttaagataaaggagcccatggagggttgcagcattccaactcatgagatctagttacagagggactggaaaagcctgccattgctccgcccgtctttgtgtttcagaaggataaaggacaaaagaggtcagctggcggctccagtcctgaaggcggagaagattctgacagagaagatggaaattactgccctcctgtcaagcgagaaagaacatcctctttaacccagttcccaccctcacagtcagaggaaaggagcagtggcttccggttgaagccaccaacgctgatccacggccaagcccccagcgcaggtctgccaagccagaagcccaaggagcagcagcggagcgtgcttcgcccggcagtgttacaagctccgcagccaaaggcgctgtcccagactg

SEQ ID NO: 173880 - DNA, 490 bp, Homo sapiens
  Payload ID: 14138
  Gene Symbol: RANBP3
  Gene Name: RAN binding protein 3
  ENST ID: ENST00000589353
  CDS Start-End: 38-271
aaggaagtaaaatggcggacctggcgaacgaagggttatgctgcattgtaggctgacatcaggatttgaaggcagagttttgtccctggcaaaggtaaagaagactggaaagaggaaaagcctgccattgctccgcccgtctttgtgtttcagaaggataaaggacaaaagaggtcagctggcggctccagtcctgaaggcggagaagattctgacagagaagatggaaattactgccctcctgtcaagcgagaaagaacatcctctttaacccagttcccaccctcacagtcagaggaaaggagcagtggcttccggttgaagccaccaacgctgatccacggccaagcccccagcgcaggtctgccaagccagaagcccaaggagcagcagcggagcgtgcttcgcccggcagtgttacaagctccgcagccaaaggcgctgtcccagactgtccccagcagtggcaccaacggggtcagcctcccag

SEQ ID NO: 173881 - DNA, 818 bp, Homo sapiens
  Payload ID: 14138
  Gene Symbol: RANBP3
  Gene Name: RAN binding protein 3
  ENST ID: ENST00000592621
  CDS Start-End: 453-818
gcggacctggcgaacgaagaggtcagctggcggctccagtcctgaaggcggagaagattctgacagagaagatggaaattactgccctcctgtcaagcgagaaagaacatcctctttaacccagttcccaccctcacagtcagaggaaaggagcagtggcttccggttgaagccaccaacgctgatccacggccaagcccccagcgcaggtctgccaagccagaagcccaaggagcagcagcggagcgtgcttcgcccggcagtgttacaagctccgcagccaaaggcgctgtcccagactggagaaagagccccagaaaaatgagtccagcaatgcctctgaagaggaagcctgtgagaaaaaagaccccgccacacagcaagcctttgtatttgggcagaacttgagggacagagttaagctgataaatgagagcgtggacgaagccgacatggagaatgctggacaccccagcgcagacacgccaaccgcaacgaactatttcctccagtatatcagttccagtttagagaactcaaccaatagtgccgacgcctccagcaacaaatttgtatttggccagaacatgagcgagcgagttttgagccccccaaaattaaacgaggtcagttcagatgccaacagggaaaatgcagctgccgagtcagggtctgagtcctcgtcccaggaggccacccctgagaaagagtccctggctgagtcggcagccgcctacaccaaggcaacagcgcggaagtgtttgttggaaaaagtggaagtcatcaccggggaggaggcggagagcaatgtgttacag

SEQ ID NO: 173882 - DNA, 3104 bp, Homo sapiens
  Payload ID: 14139
  Gene Symbol: RANBP3L
  Gene Name: RAN binding protein 3-like
  Uniprot ID: Q86VV4
  ENST ID: ENST00000296604
  CDS Start-End: 487-1884
acagagggtaactcagatcaggcttagaaatcacttgacttaactcagcagcactttttcttttctttgtgtctgtattattttagcagccttctctaaatactggaggcattggatttcatgtcgccaaaaggaatttaaaaatgacaaaagtgtaatctgttagaaatagttaatttgtagaattttactctataaggaggtttagtttcaatttgttttgaaatgaaggaattaagttgtgtttttaaccaaatgaattggcatctttatatttaggagaagtaacattggtgattatttatttcaagaatcatgactggaaaaagcttggaagtttagtagaggagtatatgttgtacatgcaaagacaagatctgcatgaatctatgtatttctgggtgtctggtgaaggccactttaggtgactggccagagaaggaggtgccctagtgatccttgagtcacagccatactgctaggaccatgactaccataccaagaaaaggcagcagccacctgcctggcagtttgcacacctgtaaactgaagctgcaggaggaccggcgacagcaagaaaaatctgtcattgctcaacccatatttgtttttgaaaagggagaacaaacttttaagagacctgcagaagacaccctgtatgaagcagcagaaccagaatgtaatggttttccaacaaagcgtgtacggtcttcatcttttacttttcatattacagattctcagtcccagggagtgaggaaaaacaatgtttttatgacatcagctcttgtgcaaagtagtgttgatataaagagtgctgaacaaggtcctgtgaaacattctaaacatgttattagacctgctattttgcagctacctcaagctcgaagttgtgcaaaagtaagaaaaacatttggacacaaggcactggaatcttgcaagactaaagaaaaaacaaataataagatttctgagggaaattcctatttgttaagtgaaaatttatcaagggctagaatttcagtccagctgtctactaaccaggactttttaggtgcaacatcagtaggatgtcaaccaaatgaagataaatgttcttttaaaagctgcagttccaattttgtttttggagaaaacatggtagaaagagttttgggtactcaaaaactcacccagcctcaacttgaaaatgattcatatgccaaggaaaaaccattcaaatccattccgaaatttcctgtcaactttttaagttcaagaacagactctattaaaaatacttccctaattgaatcagctgctgcattctcttcccaaccatcacgaaaatgcttgctggagaaaattgatgttataacaggggaggaaacagaacataatgtgttaaagataaactgcaagcttttcatattcaacaaaacaacacaatcctggattgaaaggggcagaggaacgttgagactgaatgacacagcaagcactgactgtggaacattacagtcaagactaattatgcgcaatcaaggcagtctaaggctgatcctcaacagcaaactctgggcccaaatgaagattcaaagagcaaaccacaaaaatgtacgaataacagctactgatttagaagactatagcatcaaaatatttttaattcaggccagtgcccaagatacagcatatttgtatgcagcaatacatcatcgtcttgttgcacttcaaagcttcaataagcagagagatgtcaatcaagctgaaagcctgtcagaaacagcccaacaattgaactgcgaaagctgtgatgagaatgaggatgatttcatccaagtcactaaaaatggatcagatccttctagttggactcacagacagtcggttgcctgttcatgaatactacctactataaacatgacatctacaaaaagaggggtcaccctactgaaaatactaaaccaccctaactaatgagaagattctattcattccttgaagagtttttatagaaaagtttaagaaatgtaatttgttgcaattaacatttttatgttttacattttacattttgattattgtgcagaaactgacagaatttaaaaaaatggacttcagaagttcaaaatttatcatttttgaagaagtttatttagaataggattttataactaatttggactcttcatcacattgatggatataatacttagaattataaattgctagatttgataaatacctaacaaaatgtttatttttttcagtcatacttgaccacaaaacaaatattttactaaatttccagagtcatttctctgaaaaatagtataatggcatgataacatttcactaaatcctatttatcttctgggaaatattttaatttagcttttggatttcctaatatgataagcttatatattcatggtatgaattcctttaaaaagagcatctgctcttggacttgtatctgttgcatcttgtcaatgtttgactcatggtcagcatccaatagttgttaaatgaataaataaaatataatacattacctatgtatcaaaaagcatgtgtaagaaagccaaatatgttaactgttctactttatttatgtaattatattttcattagtattttagtagatggggctgtatagaaaaacaaatgtatcatatgtagccaaatgaatctttttcttaaatgatattattatagtaggctacagtaatttcaacaattttacaatagagttttgatcctcttctttgcgatttgtttcagagacacctcatgaatcacacaagaaaattagtctcagtacttatagccctatttcatttttcaattcagttttatcacaccatggcttcgaagtgactttgattgtgacccctaagcaattatctgattaggggataaaaattcataattccaagatgtttctgaaaatgttctgaacaatgacaacatatttggaatgagggcgtaatttcactaagtgatgcttcgaagaacaatattcatttggatatgcaaacacacattttcaaaagttatattactgtgttaccatacctgttataaaataataaaaatatataagtatttattaagtcaaa

SEQ ID NO: 173883 - DNA, 1532 bp, Homo sapiens
  Payload ID: 14139
  Gene Symbol: RANBP3L
  Gene Name: RAN binding protein 3-like
  Uniprot ID: Q86VV4
  ENST ID: ENST00000515759
  CDS Start-End: 485-1450
agagggtaactcagatcaggcttagaaatcacttgacttaactcagcagcactttttcttttctttgtgtctgtattattttagcagccttctctaaatactggaggcattggatttcatgtcgccaaaaggaatttaaaaatgacaaaagtgtaatctgttagaaatagttaatttgtagaattttactctataaggaggtttagtttcaatttgttttgaaatgaaggaattaagttgtgtttttaaccaaatgaattggcatctttatatttaggagaagtaacattggtgattatttatttcaagaatcatgactggaaaaagcttggaagtttagtagaggagtatatgttgtacatgcaaagacaagatctgcatgaatctatgtatttctgggtgtctggtgaaggccactttaggtgactggccagagaaggaggtgccctagtgatccttgagtcacagccatactgctaggaccatgactaccataccaagaaaaggcagcagccacctgcctggcagtttgcacacctgtaaactgaagctgcaggaggaccggcgacagcaagaaaaatctgtcattgctcaacccatatttgtttttgaaaagggagaacaaacttttaagagacctgcagaagacaccctgtatgaagcagcagaaccagaatgtaatggttttccaacaaagcgtgtacggtcttcatcttttacttttcatattacagattctcagtcccagggagtgaggaaaaacaatgtttttatgacatcagctcttgtgcaaagtagtgttgatataaagagtgctgaacaaggtcctgtgaaacattctaaacatgttattagacctgctattttgcagctacctcaagctcgaagttgtgcaaaagtaagaaaaacatttggacacaaggcactggaatcttgcaagactaaagaaaaaacaaataataagatttctgagggaaattcctatttgttaagtgaaaatttatcaagggctagaatttcagtccagctgtctactaaccaggactttttaggtgcaacatcagtaggatgtcaaccaaatgaagataaatgttcttttaaaagctgcagttccaattttgtttttggagaaaacatggtagaaagagttttgggtactcaaaaactcacccagcctcaacttgaaaatgattcatatgccaaggaaaaaccattcaaatccattccgaaatttcctgtcaactttttaagttcaagaacagactctattaaaaatacttccctaattgaatcagctgctgcattctcttcccaaccatcacgaaaatgcttgctggagaaaattgatgttataacaggggaggaaacagaacataatgtgttaaaggtctgtatatcatgttttactctttctggtagcatttacatacttggaataaagttaacatgagaagaggcatctttaaaaatacagacagaagtatagttttcatggagactaagttgcttaaataaaaatgttggatgctctc

SEQ ID NO: 173884 - DNA, 2278 bp, Homo sapiens
  Payload ID: 14139
  Gene Symbol: RANBP3L
  Gene Name: RAN binding protein 3-like
  Uniprot ID: Q86VV4
  ENST ID: ENST00000502994
  CDS Start-End: 485-1957
agagggtaactcagatcaggcttagaaatcacttgacttaactcagcagcactttttcttttctttgtgtctgtattattttagcagccttctctaaatactggaggcattggatttcatgtcgccaaaaggaatttaaaaatgacaaaagtgtaatctgttagaaatagttaatttgtagaattttactctataaggaggtttagtttcaatttgttttgaaatgaaggaattaagttgtgtttttaaccaaatgaattggcatctttatatttaggagaagtaacattggtgattatttatttcaagaatcatgactggaaaaagcttggaagtttagtagaggagtatatgttgtacatgcaaagacaagatctgcatgaatctatgtatttctgggtgtctggtgaaggccactttaggtgactggccagagaaggaggtgccctagtgatccttgagtcacagccatactgctaggaccatgactaccataccaagaaaaggcagcagccacctgcctggcagtttgcacacctgtaaactgaagctgcaggaggaccggcgacagcaagaaaaatctgtcattgctcaacccatatttgtttttgaaaagggagaacaaacttttaagagacctgcagaagacaccctgtatgaagcagcagaaccagaatgtaatggttttccaacaaagcgtgtacggtcttcatcttttacttttcatattacagattctcagtcccagggagtgtcaaccttgtctcagaagcaaatgagatgttcatccgtcactaacctcccaaccttcccccattctgggccagtgaggaaaaacaatgtttttatgacatcagctcttgtgcaaagtagtgttgatataaagagtgctgaacaaggtcctgtgaaacattctaaacatgttattagacctgctattttgcagctacctcaagctcgaagttgtgcaaaagtaagaaaaacatttggacacaaggcactggaatcttgcaagactaaagaaaaaacaaataataagatttctgagggaaattcctatttgttaagtgaaaatttatcaagggctagaatttcagtccagctgtctactaaccaggactttttaggtgcaacatcagtaggatgtcaaccaaatgaagataaatgttcttttaaaagctgcagttccaattttgtttttggagaaaacatggtagaaagagttttgggtactcaaaaactcacccagcctcaacttgaaaatgattcatatgccaaggaaaaaccattcaaatccattccgaaatttcctgtcaactttttaagttcaagaacagactctattaaaaatacttccctaattgaatcagctgctgcattctcttcccaaccatcacgaaaatgcttgctggagaaaattgatgttataacaggggaggaaacagaacataatgtgttaaagataaactgcaagcttttcatattcaacaaaacaacacaatcctggattgaaaggggcagaggaacgttgagactgaatgacacagcaagcactgactgtggaacattacagtcaagactaattatgcgcaatcaaggcagtctaaggctgatcctcaacagcaaactctgggcccaaatgaagattcaaagagcaaaccacaaaaatgtacgaataacagctactgatttagaagactatagcatcaaaatatttttaattcaggccagtgcccaagatacagcatatttgtatgcagcaatacatcatcgtcttgttgcacttcaaagcttcaataagcagagagatgtcaatcaagctgaaagcctgtcagaaacagcccaacaattgaactgcgaaagctgtgatgagaatgaggatgatttcatccaagtcactaaaaatggatcagatccttctagttggactcacagacagtcggttgcctgttcatgaatactacctactataaacatgacatctacaaaaagaggggtcaccctactgaaaatactaaaccaccctaactaatgagaagattctattcattccttgaagagtttttatagaaaagtttaagaaatgtaatttgttgcaattaacatttttatgttttacattttacattttgattattgtgcagaaactgacagaatttaaaaaaatggacttcagaagttcaaaatttatcatttttgaagaagtttatttagaataggattttataactaatttggactcttcatcacattgatggatataatacttagaattata

SEQ ID NO: 173885 - DNA, 572 bp, Homo sapiens
  Payload ID: 14139
  Gene Symbol: RANBP3L
  Gene Name: RAN binding protein 3-like
  ENST ID: ENST00000505865
  CDS Start-End: 247-572
agcttgcattttaattacaaacaaagtagcagaaatcaggagaagtaacattggtgattatttatttcaagaatcatgactggaaaaagcttggaagtttagtagaggagtatatgttgtacatgcaaagacaagatctgcatgaatctatgtatttctgggtgtctggtgaaggccactttaggtgactggccagagaaggaggtgccctagtgatccttgagtcacagccatactgctaggaccatgactaccataccaagaaaaggcagcagccacctgcctggcagtttgcacacctgtaaactgaagctgcaggaggaccggcgacagcaagaaaaatctgtcattgctcaacccatatttgtttttgaaaagggagaacaaacttttaagagacctgcagaagacaccctgtatgaagcagcagaaccagaatgtaatggttttccaacaaagcgtgtacggtcttcatcttttacttttcatattacagattctcagtcccagggagtgaggaaaaacaatgtttttatgacatcagctcttgtgcaaagtagtgttgatataaa

SEQ ID NO: 173886 - DNA, 4576 bp, Homo sapiens
  Payload ID: 14140
  Gene Symbol: RANBP6
  Gene Name: RAN binding protein 6
  Uniprot ID: O60518
  ENST ID: ENST00000259569
  CDS Start-End: 12-3329
gacagagcgcaatggcggcaaccgcgtctgcaggggtgccggcgaccgtgtcagaaaagcaagagttttaccagcttctgaagaacctgatcaatccaagctgtatggtgcggaggcaagcagaggaaatctatgaaaatatcccaggtctgtgtaagactaccttcctcttagatgccgtcagaaatagaagagcaggttatgaggtgagacaaatggctgccgcactgctacgacggcttttgtcctctgggtttgaggaggtttatccaaatctgcctgctgatgttcagagagatgtcaagattgaactgattctggctgttaagttagaaacacatgctagcatgaggaaaaaactttgtgatatttttgcagtgctggccaggaatttgatagatgaggatggcactaaccactggccggaaggtctgaagtttcttattgattcaatctactccaaaaatgtggttctatgggaagttgcacttcacgttttctggcactttcctgggatttttgggacccaagagcggcatgatttggatatcatcaaacggttgttggaccagtgtattcaagatcaagaacatccagcaatcaggacattatccgctagagctgcagctgcatttgtacttgctaatgagaataatattgctcttttcaaagactttgcagacttgcttcctggaatcttacaggctgtgaatgactcatgctaccaggatgatgattcagtgctagaatcccttgttgagattgcagataccgtacctaagtacttgggtccttatttagaagatactctacagttgagtttgaagttatgtggagactctaggcttagtaatctgcagcgccagctggccctcgaagttatagtgaccttgtctgaaactgccactccgatgttgaaaaaacatacaaatattattgcacaggcagttcctcatatattagcaatgatggttgatctacaagatgatgaggactgggtaaatgctgatgaaatggaagaagatgattttgacagcaatgcagttgctgcggagagtgcactagacagactggcttgtgggcttggtggaaaagttgttttaccaatgaccaaggagcatatcatgcagatgcttcagagccctgactggaagtatcgacatgctggattaatggccttatctgccattggagaaggatgccatcaacaaatggaatcaattctagatgaaacagttaactccgttttgctttttcttcaggatcctcatccaagggtgagggctgcagcctgtactacacttggacagatggctacagattttgcacctaatttccaaaagaaatttcatgaaacagtgattgcagctctgttacgtaccatggaaaatcaaggtaatcagcgtgtgcaatcacatgcagcttctgctcttattatttttattgaagactgccctaaatcattgctagttctatatgtggatagtatggtgaaaaatctacattccgtcttggtgattaaacttcaagagttgattcggaatggaactaagttggctttggaacaacttgtgacaaccattgcatcagttgcagatacaatagaagaaaaatttgtcccatattatgatatattcatgccctcactaaagcacattgttgagcttgctgttcagaaggaactcaagcttctgagaggaaaaactatcgagtgcattagccatattggtcttgctgttgggaaggaaaaatttatgcaagatgcatcaaatgtgatgcagctgttgttgaagacacaatcagacttaaataatatggaagatgatgaccctcagacctcttacatggtttcagcatgggctagaatgtgtaaaattcttggaaaagattttcaacagtaccttccactggttatcgagcctcttattaagactgcttcagctaaacctgatgttgctctcttagacacacaggatgtggaaaatatgagtgacgatgatggctggcaatttgtaaatcttggagaccagcagagttttggaattaaaacttcaggacttgaagcaaaagcaactgcttgccaaatgttggtttactatgctaaggagttaagggaagggtttgtggaatatacagaacaagttgtgaagctgatggttcctttactgaaattttatttccatgacaatgttcgagtggcagcagcagagtccatgccttttctcctggaatgtgcaagaattcgtggcccagagtatcttgcacagatgtggcaattcatatgtgaccccttaatcaaggctattggtactgaaccagatacagatgtgctctcagaaataatgaattcttttgcaaagtccattgaagttatgggagatggttgccttaatgatgaacacttggaagaactgggaggaatactgaaagcaaaacttgaagggcactttaaaaaccaagaattgagacaggtgaaaagacaggaagaaaactatgatcaacaggttgagatgtctctgcaagatgaggatgaatgtgatgtttatattctgaccaaagtatcagatattttgcactcattatttagtacttataaggaaaagattttaccatggtttgaacaactacttccattaattgtaaatctaatttgttcaagtaggccatggccagacagacagtggggattgtgcatatttgatgacatcatagagcactgcagtccaacttcatttaaatatgtagaatattttcggtggccaatgctactaaatatgcgagataacaaccctgaagtcaggcaagctgctgcttatggcctgggtgtcatggcacagtttggtggagatgattatcgttctttatgttcagaagctgttccacttctggtaaaagttattaagtgtgcaaattccaaaaccaaaaaaaatgtcattgctacagagaactgtatctcagcaatagggaagattttgaagtttaagcctaactgtgtaaatgtagatgaagttcttccacactggttatcatggcttccactgcatgaagataaagaggaagctattcagactttgagttttctctgtgacctaattgaaagtaaccacccagttgtaattggtccaaataattccaatcttcccaaaataatcagtataattgcagaaggaaaaattaatgagactattaactatgaggatccttgtgccaaacgcctagctaatgtcgtgcgtcaggtacagacttctgaagatttatggttggaatgtgtatcacaacttgatgatgaacagcaggaagccttacaggagttgctaaattttgcttgaagcactttaatataacttgaatattatctattataaaagtaactacaaataagtgttgtgaatagattttattataaatcagagaactgttttctccctgctaagcagtttatagttcttctccatgtttctccagaattaatcagtgttagtcctctgtttatctcgcatgttttatcttccaaacacagaccttggtgataacctgtgcttcaaactgtcttaaacaatgtttgtcacctttcccctagttgatgtaaagtatataaattgttgctatttgtttgaactattattgatgctagccaagcagtatacttgatgtgaagatgtcatgctatcacaatatgctaagagctcacaaaaataagatagaatttccaggacaaacatctttggaattgtgagtgaaggatatagtggcaggcttgtccctctttaattaatactcttggtatttgtggtgatgggaggatgctgttactaggagagttttgagatactgcagtggatgtgggatgtatatgaacttcttcataatgtactcctgggaactgggtaggacatatccatattgtagttcccaaggtgtctggttgagagttagagaacttttaaatttctttagccagacaggtctctatttttttaagttatccaggactccaagaaccatagttactgaaaagggagtcctgatacatctaatattggtagcatgtaacagtgtttgacaaagagtaagtaagcagtattcttgggagtcagtgttatgtgtttcagcagagtattattttgtatatgtatgccattttctccctgcaaagcagctcaacaagagaaaaagctctagttatagggcttaaattgatttctatttcaaataatttcctaagagattctagagtagaactgaagagtattctattggaaaagtgaaaggaaagaaatgtaattttctttgaacatgaaaaagaaaacaactttgagagtagtcatttagcagtagatgtgcattattatgagaaaacagttctataagtccagggttaattatattaattggaatgtcagtctttaatgtcgagcttattgtagggtagaaaagagctttctactcagctaacgattactcattgatccaaaacttaaatacatctataatttcctggggctattgtgagtactgtgtatgtatttagcaaatatttaagacctagtaagtgctcaataaattgtagctgtta

SEQ ID NO: 173887 - DNA, 1000 bp, Homo sapiens
  Payload ID: 14140
  Gene Symbol: RANBP6
  Gene Name: RAN binding protein 6
  ENST ID: ENST00000485372
  CDS Start-End: 6-212
gcgcaatggcggcaaccgcgtctgcaggggtgccggcgaccgtgtcagaaaagcaagagttttaccagcttctgaagaacctgatcaatccaagctgtatggtgcggaggcaagcagaggaaatctatgaaaatatcccaggatcctcatccaagggtgagggctgcagcctgtactacacttggacagatggctacagattttgcacctaatttccaaaagaaatttcatgaaacagtgattgcagctctgttacgtaccatggaaaatcaaggtaatcagcgtgtgcaatcacatgcagcttctgctcttattatttttattgaagactgccctaaatcattgctagttctatatgtggatagtatggtgaaaaatctacattccgtcttggtgattaaacttcaagagttgattcggaatggaactaagttggctttggaacaacttgtgacaaccattgcatcagttgcagatacaatagaagaaaaatttgtcccatattatgatatattcatgccctcactaaagcacattgttgagcttgctgttcagaaggaactcaagcttctgagaggaaaaactatcgagtgcattagccatattggtcttgctgttgggaaggaaaaatttatgcaagatgcatcaaatgtgatgcagctgttgttgaagacacaatcagacttaaataatatggaagatgatgaccctcagacctcttacatggtttcagcatgggctagaatgtgtaaaattcttggaaaagattttcaacagtaccttccactggttatcgagcctcttattaagactgcttcagctaaacctgatgttgctctcttagacacacaggatgtggaaaatatgagtgacgatgatggctggcaatttgtaaatcttggagaccagcagagttttggaattaaaacttcaggacttgaagcaaaagcaactgcttgccaaatgttggtttactatgctaaggagttaagggaagggt

SEQ ID NO: 173888 - DNA, 704 bp, Homo sapiens
  Payload ID: 14140
  Gene Symbol: RANBP6
  Gene Name: RAN binding protein 6
  ENST ID: ENST00000623170
  CDS Start-End: 19-704
tagctttgacagagcgcaatggcggcaaccgcgtctgcaggggtgccggcgaccgtgtcagaaaagcaagagttttaccagcttctgaagaacctgatcaatccaagctgtatggtgcggaggcaagcagaggaaatctatgaaaatatcccaggtctgtgtaagactaccttcctcttagatgccgtcagaaatagaagagcaggttatgaggatcctcatccaagggtgagggctgcagcctgtactacacttggacagatggctacagattttgcacctaatttccaaaagaaatttcatgaaacagtgattgcagctctgttacgtaccatggaaaatcaaggtaatcagcgtgtgcaatcacatgcagcttctgctcttattatttttattgaagactgccctaaatcattgctagttctatatgtggatagtatggtgaaaaatctacattccgtcttggtgattaaacttcaagagttgattcggaatggaactaagttggctttggaacaacttgtgacaaccattgcatcagttgcagatacaatagaagaaaaatttgtcccatattatgatatattcatgccctcactaaagcacattgttgagcttgctgttcagaaggaactcaagcttctgagaggaaaaactatcgagtgcattagccatattggtcttgctgttgggaaggaaaaatt

SEQ ID NO: 173889 - DNA, 3113 bp, Homo sapiens
  Payload ID: 14141
  Gene Symbol: RANBP9
  Gene Name: RAN binding protein 9
  Uniprot ID: Q96S59
  ENST ID: ENST00000011619
  CDS Start-End: 60-2249
gaagcagaggaggaaggagagaagaggtggaggtggccgcaggctgagtcgcggccgggatgtccgggcagccgccgccgccgccgccgcagcagcagcaacagcagcagcagctgtcgccgccaccgccggcggccttggccccagtctccggagtcgtcctgccggcgcccccggccgtcagcgccggctcttctccggccggctcgcccggcggcggtgcgggcggcgaaggcttaggggccgcggcggccgccctgctcctccaccctccgccgccgccgcccccggccaccgcggccccgccgcccccgccgccgcccccgcctccccctgcctcagcggctgcccccgccagcgggccgcccgctcccccgggccttgcagcgggccccggcccggctggaggagccccgaccccagctctggtggcgggcagcagcgccgcggcccccttccctcacggggactcggccctgaacgagcaggagaaggagttgcagcggcggctgaagcgtctctacccggccgtggacgaacaagagacgccgctgcctcggtcctggagcccgaaggacaagttcagctacatcggcctctctcagaacaacctgcgggtgcactacaaaggtcatggcaaaaccccaaaagatgccgcgtcagttcgagccacgcatccaataccagcagcctgtgggatttattattttgaagtaaaaattgtcagtaagggaagagatggttacatgggaattggtctttctgctcaaggtgtgaacatgaatagactaccaggttgggataagcattcatatggttaccatggggatgatggacattcgttttgttcttctggaactggacaaccttatggaccaactttcactactggtgatgtcattggctgttgtgttaatcttatcaacaatacctgcttttacaccaagaatggacatagtttaggtattgctttcactgacctaccgccaaatttgtatcctactgtggggcttcaaacaccaggagaagtggtcgatgccaattttgggcaacatcctttcgtgtttgatatagaagactatatgcgggagtggagaaccaaaatccaggcacagatagatcgatttcctatcggagatcgagaaggagaatggcagaccatgatacaaaaaatggtttcatcttatttagtccaccatgggtactgtgccacagcagaggcctttgccagatctacagaccagaccgttctagaagaattagcttccattaagaatagacaaagaattcagaaattggtattagcaggaagaatgggagaagccattgaaacaacacaacagttatacccaagtttacttgaaagaaatcctaatctccttttcacattaaaagtgcgtcagtttatagaaatggtgaatggtacagatagtgaagtacgatgtttgggaggccgaagtccaaagtctcaagacagttatcctgttagtcctcgaccttttagtagtccaagtatgagccccagccatggaatgaatatccacaatttagcatcaggcaaaggaagcaccgcacatttttcaggttttgaaagttgtagtaatggtgtaatatcaaataaagcacatcaatcatattgccatagtaataaacaccagtcatccaacttgaatgtaccagaactaaacagtataaatatgtcaagatcacagcaagttaataacttcaccagtaatgatgtagacatggaaacagatcactactccaatggagttggagaaacttcatccaatggtttcctaaatggtagctctaaacatgaccacgaaatggaagattgtgacaccgaaatggaagttgattcaagtcagttgagacgccagttgtgtggaggaagtcaggccgccatagaaagaatgatccactttggacgagagctgcaagcaatgagtgaacagctaaggagagactgtggcaagaacactgcaaacaaaaaaatgttgaaggatgcattcagtctactagcatattcagatccctggaacagcccagttggaaatcagcttgacccgattcagagagaacctgtgtgctcagctcttaacagtgcaatattagaaacccacaatctgccaaagcaacctccacttgccctagcaatgggacaggccacacaatgtctaggactgatggctcgatcaggaattggatcctgcgcatttgccacagtggaagactacctacattagctatgcatttcaagagctcacacttatattgtggcatatagtcaacatggaagtagaccagctctgctgatttgaaatttagattttttaaattatgtactggggacaggtttttgtcgctttacattgcttcctagtttacagcatgatgcaaatgattttctaacttagtgttaggagaaattattttccatctttaacctcttagttgtctaagagttaaatattactgaatttcagacgttcaaattgatcatcacaaatcctttaaaacaattacctaaaagaaaccaaaaatcctgccttctttgtgggggaggggggagagaggggaaggaaatggaacaagttgtgtttgtgttagcatgtgggtgatgtaaacttcaaattgggagatgttccgacccccactcccatataagcattcaatcagtgtaacttgcaaaatgcataaacatccgacagtttgaatttatagtgttgatggaagaaatcatttttaatgtgtactgtaaaacttgaaatactcaggagctgagtgaatatgtttgttgctacttacaatcccgacctgttagtcccagtagttttgttttaacatggtctttttcaactttgtttcctgtttaactacagatgacttctgttgtagactcacaagtttaactgttgtattataacagtattacatgtcaacggtgtggttatgacctttatttatataaaaaccaaatatttagtcaatttaccgtgtcttaatttaatctttgtacaccttccatttttaagtgcttaaatgagtactatattgcaataaaatgtagtgatataattaaccagccattaaaaatttacttctacaga

SEQ ID NO: 173890 - DNA, 3060 bp, Homo sapiens
  Payload ID: 14142
  Gene Symbol: RANGAP1
  Gene Name: Ran GTPase activating protein 1
  Uniprot ID: P46060
  ENST ID: ENST00000356244
  CDS Start-End: 305-2068
gaacaaatcaaatcgaagcaaagaaactgccggctttcaaaatcctcctcctccgccatcatccgccgcggtgcggagagcaggtggtgctggaagcgcgtgaggccgggagctcgagagagctaacagactagccggctggacatctggaccgctggatccggaggtggcgaccccggcctgacccggaccctaaatccgtccccgccccagagggcggaggcgcgcgctcgattccccccacgcggcggcgccgcctgtttacgtctgcagatctccaggggagcccaccagcctagtcaacatggcctcggaagacattgccaagctggcagagacacttgccaagactcaggtggccgggggacagctgagtttcaaaggcaagagcctcaaactcaacactgcagaagatgctaaagatgtgattaaagagattgaagactttgacagcttggaggctctgcgtctggaaggcaacacagtgggcgtggaagcagccagggtcatcgccaaggccttagagaagaagtcggagttgaagcgctgccactggagtgacatgttcacgggaaggctgcggaccgagatcccaccagccctgatctcactaggggaaggactcatcacagctggggctcagctggtggagctggacttaagcgacaacgcattcgggcccgacggtgtgcaaggcttcgaggccctgctcaagagctcagcctgcttcaccctgcaggaactcaagctcaacaactgtggcatgggcattggcggcggcaagatcctggctgcagctctgaccgaatgtcaccggaaatccagtgcccaaggcaagcctctggccctgaaggtctttgtggctggcagaaaccgtctggagaatgatggcgccactgccttggcagaagcttttagggtcatcgggaccctggaggaggtccacatgccacagaatgggatcaaccaccctggcatcactgccctggcccaggctttcgctgtcaaccccctgctgcgggtcatcaacctgaatgacaacaccttcactgagaagggcgccgtggccatggccgagaccttgaagaccttgcggcaggtggaggtgattaattttggggactgcctggtgcgctccaagggtgcagttgccattgcagatgccatccgcggcggcctgcccaagctaaaggagctgaacttgtcattctgtgaaatcaagagggatgctgccctggctgttgctgaggccatggcagacaaagctgagctggagaagctggacctgaatggcaacaccctgggagaagaaggctgtgaacagcttcaggaggtgctggagggcttcaacatggccaaggtgctggcgtccctcagtgatgacgaggacgaggaggaggaggaggaaggagaagaggaagaagaggaagcagaagaagaggaggaggaagatgaggaagaggaggaagaagaggaggaggaggaggaagaagagcctcagcagcgagggcagggagagaagtcagccacgccctcacggaagattctggaccctaacactggggagccagctcccgtgctgtcctccccacctcctgcagacgtctccaccttcctggcttttccctctccagagaagctgctgcgcctagggcccaagagctccgtgctgatagcccagcagactgacacgtctgaccccgagaaggtggtctctgccttcctaaaggtgtcatctgtgttcaaggacgaagctactgtgaggatggcagtgcaggatgcagtagatgccctgatgcagaaggctttcaactcctcgtccttcaactccaacaccttcctcaccaggctgctcgtgcacatgggtctgctcaagagtgaagacaaggtcaaggccattgccaacctgtacggccccctgatggcgctgaaccacatggtgcagcaggactatttccccaaggcccttgcacccctgctgctggcgttcgtgaccaagcccaacagcgccctggaatcctgctccttcgcccgccacagtctgctgcagacgctgtacaaggtctagactcaaagcctctcccatcccttggcctggaccagtgagctggggagggactcggatgaactgaggcgcagcctacgccattgccttggacaggactctggccacaggcagggcgggtctgtgtcccatgtgtcctgtcagtcccctgagtatgtgtgtgggtgtggcgcatgtgcaggtctgtgcctcctgtcgggatttgggttttaacgtcttctgctggcccagccctgctctgttgtggggagttggcccccaggggaaagggctgtgagctgctccgccattaaactcacctccacctgagggcgctctgctgatctccgcctgggccctgatggccgtccccacccacctgccttccggcccggctccctggcggagccagaacccagggagttgcccgcgtgctgtccttcccctctgtgttgtgattgggttgtttcctgccctgcctggggctgcttctcgtcaccaagccctggtcctgcggcagctgtcacccctaccatccataccactgtgctgaccgctcagcctgaagagcagagaatgccatgggtgggactgtgggggtcggatcgtggggttgttggcagagggcaaccctgggccccacaccgtgtggacaggcagacaccagattgtccaggagcaggagctgctgggactgcgctggccccggacctagtgggccttctcctggctgctgagatgtcgtctgtgactggcctggctggagggggagtgttgacaacccaaagctgttctccagtctggggagggagaggcagggtccccaatgtccgagctgcatctggacgctgctcttaaaggacctcctggggcaggggagcggtagggtctggactgggcagatgctgtatgacctccctgagcacccgtgactgccccatgctttcccctttgtgctctgtgtgtgtctgggctgtgcccgggggcttcacaaataaagtcgtgtggcagcttca

SEQ ID NO: 173891 - DNA, 3469 bp, Homo sapiens
  Payload ID: 14142
  Gene Symbol: RANGAP1
  Gene Name: Ran GTPase activating protein 1
  Uniprot ID: P46060
  ENST ID: ENST00000405486
  CDS Start-End: 714-2477
ctttccccgtcacctgcctggaacaggggtgcggggcgaggagggcgtggcgcccgtgtgcgccttctgcctgccccctcggccttcttcacttagccttcgacggccgagcgccccaggggtggcggtgggagtggggttgttgagcggcgctggctcctttcacaaatggggaaactgaggcttaaagggcgtctgactcgccagagcagctcagcctgcagctgctagcagtggcgtctcatattagcattgttgtcaaccggaggcggtgcgagtccgccggggattccagatggggctcctgcgccgcccgcctatcatttgcggcctgtattcgcgcgtcgctcccgcagagccacctcccagcaggcccacgcccgcgggggccccgggctggcgccgctgtccctggaatcgatagacggtctccttctgtcacccaggctggagtgtagtggaacgatcaccgctgaactgcagcgtcggcttcctgggctcaagcgatcctcccacctcaacctcccaagtcatggggactacagatgccatcacacctggctaatttttaaatttttctgtggagacagggtctcattctgttgcccaggcttgtctcgaaccctggtctaaagtgatcttcccgcctagcctcccaaaatgttggaattacagtctgcagatctccaggggagcccaccagcctagtcaacatggcctcggaagacattgccaagctggcagagacacttgccaagactcaggtggccgggggacagctgagtttcaaaggcaagagcctcaaactcaacactgcagaagatgctaaagatgtgattaaagagattgaagactttgacagcttggaggctctgcgtctggaaggcaacacagtgggcgtggaagcagccagggtcatcgccaaggccttagagaagaagtcggagttgaagcgctgccactggagtgacatgttcacgggaaggctgcggaccgagatcccaccagccctgatctcactaggggaaggactcatcacagctggggctcagctggtggagctggacttaagcgacaacgcattcgggcccgacggtgtgcaaggcttcgaggccctgctcaagagctcagcctgcttcaccctgcaggaactcaagctcaacaactgtggcatgggcattggcggcggcaagatcctggctgcagctctgaccgaatgtcaccggaaatccagtgcccaaggcaagcctctggccctgaaggtctttgtggctggcagaaaccgtctggagaatgatggcgccactgccttggcagaagcttttagggtcatcgggaccctggaggaggtccacatgccacagaatgggatcaaccaccctggcatcactgccctggcccaggctttcgctgtcaaccccctgctgcgggtcatcaacctgaatgacaacaccttcactgagaagggcgccgtggccatggccgagaccttgaagaccttgcggcaggtggaggtgattaattttggggactgcctggtgcgctccaagggtgcagttgccattgcagatgccatccgcggcggcctgcccaagctaaaggagctgaacttgtcattctgtgaaatcaagagggatgctgccctggctgttgctgaggccatggcagacaaagctgagctggagaagctggacctgaatggcaacaccctgggagaagaaggctgtgaacagcttcaggaggtgctggagggcttcaacatggccaaggtgctggcgtccctcagtgatgacgaggacgaggaggaggaggaggaaggagaagaggaagaagaggaagcagaagaagaggaggaggaagatgaggaagaggaggaagaagaggaggaggaggaggaagaagagcctcagcagcgagggcagggagagaagtcagccacgccctcacggaagattctggaccctaacactggggagccagctcccgtgctgtcctccccacctcctgcagacgtctccaccttcctggcttttccctctccagagaagctgctgcgcctagggcccaagagctccgtgctgatagcccagcagactgacacgtctgaccccgagaaggtggtctctgccttcctaaaggtgtcatctgtgttcaaggacgaagctactgtgaggatggcagtgcaggatgcagtagatgccctgatgcagaaggctttcaactcctcgtccttcaactccaacaccttcctcaccaggctgctcgtgcacatgggtctgctcaagagtgaagacaaggtcaaggccattgccaacctgtacggccccctgatggcgctgaaccacatggtgcagcaggactatttccccaaggcccttgcacccctgctgctggcgttcgtgaccaagcccaacagcgccctggaatcctgctccttcgcccgccacagtctgctgcagacgctgtacaaggtctagactcaaagcctctcccatcccttggcctggaccagtgagctggggagggactcggatgaactgaggcgcagcctacgccattgccttggacaggactctggccacaggcagggcgggtctgtgtcccatgtgtcctgtcagtcccctgagtatgtgtgtgggtgtggcgcatgtgcaggtctgtgcctcctgtcgggatttgggttttaacgtcttctgctggcccagccctgctctgttgtggggagttggcccccaggggaaagggctgtgagctgctccgccattaaactcacctccacctgagggcgctctgctgatctccgcctgggccctgatggccgtccccacccacctgccttccggcccggctccctggcggagccagaacccagggagttgcccgcgtgctgtccttcccctctgtgttgtgattgggttgtttcctgccctgcctggggctgcttctcgtcaccaagccctggtcctgcggcagctgtcacccctaccatccataccactgtgctgaccgctcagcctgaagagcagagaatgccatgggtgggactgtgggggtcggatcgtggggttgttggcagagggcaaccctgggccccacaccgtgtggacaggcagacaccagattgtccaggagcaggagctgctgggactgcgctggccccggacctagtgggccttctcctggctgctgagatgtcgtctgtgactggcctggctggagggggagtgttgacaacccaaagctgttctccagtctggggagggagaggcagggtccccaatgtccgagctgcatctggacgctgctcttaaaggacctcctggggcaggggagcggtagggtctggactgggcagatgctgtatgacctccctgagcacccgtgactgccccatgctttcccctttgtgctctgtgtgtgtctgggctgtgcccgggggcttcacaaataaagtcgtgtggcagcttca

SEQ ID NO: 173892 - DNA, 759 bp, Homo sapiens
  Payload ID: 14142
  Gene Symbol: RANGAP1
  Gene Name: Ran GTPase activating protein 1
  ENST ID: ENST00000446258
  CDS Start-End: 1-759
agtgggcgtggaagcagccagggtcatcgccaaggccttagagaagaagtcggagttgaagcgctgccactggagtgacatgttcacgggaaggctgcggaccgagatcccaccagccctgatctcactaggggaaggactcatcacagctggggctcagctggtggagctggacttaagcgacaacgcattcgggcccgacggtgtgcaaggcttcgaggccctgctcaagagctcagcctgcttcaccctgcaggaactcaagctcaacaactgtggcatgggcattggcggcggcaaggtcatcgggaccctggaggaggtccacatgccacagaatgggatcaaccaccctggcatcactgccctggcccaggctttcgctgtcaaccccctgctgcgggtcatcaacctgaatgacaacaccttcactgagaagggcgccgtggccatggccgagaccttgaagaccttgcggcaggtggaggtgattaattttggggactgcctggtgcgctccaagggtgcagttgccattgcagatgccatccgcggcggcctgcccaagctaaaggagctgaacttgtcattctgtgaaatcaagagggatgctgccctggctgttgctgaggccatggcagacaaagctgagctggagaagctggacctgaatggcaacaccctgggagaagaaggctgtgaacagcttcaggaggtgctggagggcttcaacatggccaaggtgctggcgtccctcag

SEQ ID NO: 173893 - DNA, 603 bp, Homo sapiens
  Payload ID: 14142
  Gene Symbol: RANGAP1
  Gene Name: Ran GTPase activating protein 1
  ENST ID: ENST00000452543
  CDS Start-End: 204-603
gaaaccagacgtgcagtggggctgacccctgtgccccaccccagagtcatgccagcgtgggtggtggggcattctctgggatgaatgatctggatcccatagccatctgtgtcctgtttgaggaatgggaccctcaaacagagaacagccaagatgctcaagcagtctgcagatctccaggggagcccaccagcctagtcaacatggcctcggaagacattgccaagctggcagagacacttgccaagactcaggtggccgggggacagctgagtttcaaaggcaagagcctcaaactcaacactgcagaagatgctaaagatgtgattaaagagattgaagactttgacagcttggaggctctgcgtctggaaggcaacacagtgggcgtggaagcagccagggtcatcgccaaggccttagagaagaagtcggagttgaagcgctgccactggagtgacatgttcacgggaaggctgcggaccgagatcccaccagccctgatctcactaggggaaggactcatcacagctggggctcagctggtggagctggacttaagcgacaacgcattcgggcccgacggtgtgcaaggcttcgagg

SEQ ID NO: 173894 - DNA, 4222 bp, Homo sapiens
  Payload ID: 14142
  Gene Symbol: RANGAP1
  Gene Name: Ran GTPase activating protein 1
  Uniprot ID: P46060
  ENST ID: ENST00000455915
  CDS Start-End: 1471-3234
ccctgtctctactaaaaatacaaaaaaattagctggacatggtggtgggtgcctgtaatcccagctactcaggaggctgaggcaggagaatgacatgaaccttggaggcggagcttgcagtgagcccagatggcgccactgtgctccagcctgggcgactgagcgagactccgtctcaaaaaaaaaaaattctttcatttatttagttacttttagagatagagcctcccgctgttgcccaggctggagtgcagtggcagtcatagcttactgcagctttgaactcctgggctcaaatgatcctcctgcctcagcctctccagtagctgggactgactacaggcacgtgccaccacacccagctaatttttatttttatttttatttttttgagacagggttttactctgtcacccaggctagagtgcagtggtgagatcatggctcactgtagcctctgtctccggggctcaatcaatcctcccacctcagcctccccagtggctgggattactggtgcacaccaccataccctgctaattgtatttatttttagtagagatgggattttgccatgttgcccagactggtcttgagctgctgggctcaagcgatcttcccatcacagcttcccaatgtgctgggattacaggtgtgagccactgtacctggccagctttacttcttttaccagcactcctgattttataaatagtgaggcttatcaaccccatttctacccaaatcttctggtagacttgagtatagtagggcttcataggtagcagccctgtccctgtcctattatgatggtagctgttgtgatgtggcgatctctgatctagaaacccctgaggggccattgtggcctgcccagtctcccggccacggttgaaaccagacgtgcagtggggctgacccctgtgccccaccccagagtcatgccagcgtgggtggtggggcattctctgggatgaatgatctggatcccatagccatctgtgtcctgtttgaggaatgggaccctcaaacagagaacagccaagatgctcaagcaggtgtgtgcttgggccagactctgcagcctttggtttgggacttgactgccattcactgaaggggcccaggaaatgggcagctcacatggtgttgctgggtgtccagctgcggcagtttagcagaggaggacttgtaatgagatggtagcttcttataggctaagacatgatttttctgttcttttactacctcctgcaccttctagaactgttccttctctgatgctgttttcctttcttccagtgatttatctctagggtctccatagcaggggaggtagggtcagactcctgagatggctgatgtcctaccctgcccccaaccaggggccccaggagactcctttttcttactgcaactttggcctcctcagtctgcagatctccaggggagcccaccagcctagtcaacatggcctcggaagacattgccaagctggcagagacacttgccaagactcaggtggccgggggacagctgagtttcaaaggcaagagcctcaaactcaacactgcagaagatgctaaagatgtgattaaagagattgaagactttgacagcttggaggctctgcgtctggaaggcaacacagtgggcgtggaagcagccagggtcatcgccaaggccttagagaagaagtcggagttgaagcgctgccactggagtgacatgttcacgggaaggctgcggaccgagatcccaccagccctgatctcactaggggaaggactcatcacagctggggctcagctggtggagctggacttaagcgacaacgcattcgggcccgacggtgtgcaaggcttcgaggccctgctcaagagctcagcctgcttcaccctgcaggaactcaagctcaacaactgtggcatgggcattggcggcggcaagatcctggctgcagctctgaccgaatgtcaccggaaatccagtgcccaaggcaagcctctggccctgaaggtctttgtggctggcagaaaccgtctggagaatgatggcgccactgccttggcagaagcttttagggtcatcgggaccctggaggaggtccacatgccacagaatgggatcaaccaccctggcatcactgccctggcccaggctttcgctgtcaaccccctgctgcgggtcatcaacctgaatgacaacaccttcactgagaagggcgccgtggccatggccgagaccttgaagaccttgcggcaggtggaggtgattaattttggggactgcctggtgcgctccaagggtgcagttgccattgcagatgccatccgcggcggcctgcccaagctaaaggagctgaacttgtcattctgtgaaatcaagagggatgctgccctggctgttgctgaggccatggcagacaaagctgagctggagaagctggacctgaatggcaacaccctgggagaagaaggctgtgaacagcttcaggaggtgctggagggcttcaacatggccaaggtgctggcgtccctcagtgatgacgaggacgaggaggaggaggaggaaggagaagaggaagaagaggaagcagaagaagaggaggaggaagatgaggaagaggaggaagaagaggaggaggaggaggaagaagagcctcagcagcgagggcagggagagaagtcagccacgccctcacggaagattctggaccctaacactggggagccagctcccgtgctgtcctccccacctcctgcagacgtctccaccttcctggcttttccctctccagagaagctgctgcgcctagggcccaagagctccgtgctgatagcccagcagactgacacgtctgaccccgagaaggtggtctctgccttcctaaaggtgtcatctgtgttcaaggacgaagctactgtgaggatggcagtgcaggatgcagtagatgccctgatgcagaaggctttcaactcctcgtccttcaactccaacaccttcctcaccaggctgctcgtgcacatgggtctgctcaagagtgaagacaaggtcaaggccattgccaacctgtacggccccctgatggcgctgaaccacatggtgcagcaggactatttccccaaggcccttgcacccctgctgctggcgttcgtgaccaagcccaacagcgccctggaatcctgctccttcgcccgccacagtctgctgcagacgctgtacaaggtctagactcaaagcctctcccatcccttggcctggaccagtgagctggggagggactcggatgaactgaggcgcagcctacgccattgccttggacaggactctggccacaggcagggcgggtctgtgtcccatgtgtcctgtcagtcccctgagtatgtgtgtgggtgtggcgcatgtgcaggtctgtgcctcctgtcgggatttgggttttaacgtcttctgctggcccagccctgctctgttgtggggagttggcccccaggggaaagggctgtgagctgctccgccattaaactcacctccacctgagggcgctctgctgatctccgcctgggccctgatggccgtccccacccacctgccttccggcccggctccctggcggagccagaacccagggagttgcccgcgtgctgtccttcccctctgtgttgtgattgggttgtttcctgccctgcctggggctgcttctcgtcaccaagccctggtcctgcggcagctgtcacccctaccatccataccactgtgctgaccgctcagcctgaagagcagagaatgccatgggtgggactgtgggggtcggatcgtggggttgttggcagagggcaaccctgggccccacaccgtgtggacaggcagacaccagattgtccaggagcaggagctgctgggactgcgctggccccggacctagtgggccttctcctggctgctgagatgtcgtctgtgactggcctggctggagggggagtgttgacaacccaaagctgttctccagtctggggagggagaggcagggtccccaatgtccgagctgcatctggacgctgctcttaaaggacctcctggggcaggggagcggtagggtctggactgggcagatgctgtatgacctccctgagcacccgtgactgccccatgctttcccctttgtgctctgtgtgtgtctgggctgtgcccgggggcttcacaaataaagtcgtgtggcagc

SEQ ID NO: 173895 - DNA, 946 bp, Homo sapiens
  Payload ID: 14142
  Gene Symbol: RANGAP1
  Gene Name: Ran GTPase activating protein 1
  ENST ID: ENST00000422838
  CDS Start-End: 835-946
cgccttctgcctgccccctcggccttcttcacttagccttcgacggccgagcgccccaggggtggcggtgggagtggggttgttgagcggcgctggctcctttcacaaatggggaaactgaggcttaaagggcgtctgactcgccagagcagctcagcctgcagctgctagcagtggcgtctcatattagcattgttgtcaaccggaggcggtgcgagtccgccggggattccagatggggctcctgcgccgcccgcctatcatttgcggcctgtattcgcgcgtcgctcccgcagagccacctcccagcaggcccacgcccgcgggggccccgggctggcgccgctgtccctggaatcgatgtgagtcactgctgacgctttgcaggagcatgcatctcacctcagaaagtctctgacgttgctgcggagcggggagaggatgtttctctattagccctttgcttttgctctggcgctgatcctttgctgaccttggacaaatcaatttacgtttctgtgctccagtttcttggtttataaaagacggtctccttctgtcacccaggctggagtgtagtggaacgatcaccgctgaactgcagcgtcggcttcctgggctcaagcgatcctcccacctcaacctcccaagtcatggggactacagatgccatcacacctggctaatttttaaatttttctgtggagacagggtctcattctgttgcccaggcttgtctcgaaccctggtctaaagtgatcttcccgcctagcctcccaaaatgttggaattacagtctgcagatctccaggggagcccaccagcctagtcaacatggcctcggaagacattgccaagctggcagagacacttgccaagactcaggtggccgggggacagctgagtttcaaaggcaagagcctcaaactcaacactgcagaagatg

SEQ ID NO: 173896 - DNA, 650 bp, Homo sapiens
  Payload ID: 14142
  Gene Symbol: RANGAP1
  Gene Name: Ran GTPase activating protein 1
  ENST ID: ENST00000418067
  CDS Start-End: 351-650
gtctcccggccacggttgaaaccagacgtgcagtggggctgacccctgtgccccaccccagagtcatgccagcgtgggtggtggggcattctctgggatgaatgatctggatcccatagccatctgtgtcctgtttgaggaatgggaccctcaaacagagaacagccaagatgctcaagcagtgatttatctctagggtctccatagcaggggaggtagggtcagactcctgagatggctgatgtcctaccctgcccccaaccaggggccccaggagactcctttttcttactgcaactttggcctcctcagtctgcagatctccaggggagcccaccagcctagtcaacatggcctcggaagacattgccaagctggcagagacacttgccaagactcaggtggccgggggacagctgagtttcaaaggcaagagcctcaaactcaacactgcagaagatgctaaagatgtgattaaagagattgaagactttgacagcttggaggctctgcgtctggaaggcaacacagtgggcgtggaagcagccagggtcatcgccaaggccttagagaagaagtcggagttgaagcgctgccactggagtgacatgttcacgggaaggctgcggaccgagatcccaccagccctg

SEQ ID NO: 173897 - DNA, 1009 bp, Homo sapiens
  Payload ID: 14143
  Gene Symbol: RANGRF
  Gene Name: RAN guanine nucleotide release factor
  Uniprot ID: Q9HD47
  ENST ID: ENST00000226105
  CDS Start-End: 293-853
gggggcgacatagaccctaaccctaagtccaaccccaaggcagaccccaccgtcccgccaggcgcactcctaagagcgcggcttccggagcaaagccgctgacccccgcccccagggtcttggcgccgattggccaacgagagcgcagggcggagccaaatcttaaaggatccgggagctaagccagacccgggtggcggtggcagctgcgaaacccagggagccgatgccacgtgacccaatgtggacttcttttaaacctttctaatgcccataacccagcctcagacccatggagcccacgagagactgcccgctgttcgggggcgccttttccgccatcctccccatgggggccattgacgtaagcgacctccgaccggtcccggacaatcaagaagttttctgccatcccgtgacggaccagagcctgatagtggaacttctcgagctgcaggcccacgtacggggcgaagcggctgcgcggtaccactttgaggatgttggtggcgtgcagggggctagggctgtccatgtggagtctgttcagcctctcagtttggagaacctggccctgaggggccgctgtcaagaagcctgggtcctctctggcaagcagcagatagctaaggaaaaccagcaggtagcaaaggacgtgacacttcatcaggccttgctgaggctgccccagtaccagactgatctcttgcttaccttcaatcagcccccccctgacaacaggtcatctcttggccccgaaaatctgtcacctgcaccctggagcctgggtgactttgaacagctggtgaccagtctgacccttcacgatcctaacatctttggtccccagtaaaggcgctgaagcactgcatgatgttgctgagaacttggggactcggttctgtgagggggaaaagaggttgaaaagagggtttcctcttatttcttccctgtgcgtaaacataagacaatccctcttcagaataaacttgctttataatcaatataa

SEQ ID NO: 173898 - DNA, 1074 bp, Homo sapiens
  Payload ID: 14143
  Gene Symbol: RANGRF
  Gene Name: RAN guanine nucleotide release factor
  Uniprot ID: Q9HD47
  ENST ID: ENST00000407006
  CDS Start-End: 136-576
aaatcttaaaggatccgggagctaagccagacccgggtggcggtggcagctgcgaaacccagggagccgatgccacgtgacccaatgtggacttcttttaaacctttctaatgcccataacccagcctcagacccatggagcccacgagagactgcccgctgttcgggggcgccttttccgccatcctccccatgggggccattgacgtaagcgacctccgaccggtcccggacaatcaagaagttttctgccatcccgtgacggaccagagcctgatagtggaacttctcgagctgcaggcccacgtacggggcgaagcggctgcgcggtaccactttgaggatgttggtggcgtgcagggggctagggctgtccatgtggagtctgttcagcctctcagtttggagaacctggccctgaggggccgctgtcaagaagcctgggtcctctctggcaagcagcagatagctaaggaaaaccagcaggtagcaaaggacgtgacacttcatcaggccttgctgaggctgccccagtaccagactgatctcttgcttaccttcaatcagcccccgtaaggaggaaggaacgggcgggtatctcatgactgggttcccaggagaatcgggctgggagggacagaacagggagactcactggtgggatcctccaaggaagcaggagtgggccagaggtttggggtaactgatacccaggtcctctggggaacaggaattggcaatttccaaacctcaggcctggatgatgttctgtctccatctgttcccccaccccaagccctgacaacaggtcatctcttggccccgaaaatctgtcacctgcaccctggagcctgggtgactttgaacagctggtgaccagtctgacccttcacgatcctaacatctttggtccccagtaaaggcgctgaagcactgcatgatgttgctgagaacttggggactcggttctgtgagggggaaaagaggttgaaaagagggtttcctcttatttcttccctgtgcgtaaacataagacaatccctcttcagaataaacttgctttataatcaatat

SEQ ID NO: 173899 - DNA, 1140 bp, Homo sapiens
  Payload ID: 14143
  Gene Symbol: RANGRF
  Gene Name: RAN guanine nucleotide release factor
  Uniprot ID: Q9HD47
  ENST ID: ENST00000439238
  CDS Start-End: 112-609
agccagacccgggtggcggtggcagctgcgaaacccagggagccgatgccacgtgacccaatgtggacttcttttaaacctttctaatgcccataacccagcctcagacccatggagcccacgagagactgcccgctgttcgggggcgccttttccgccatcctccccatgggggccattgacgtaagcgacctccgaccggtcccggacaatcaagaagttttctgccatcccgtgacggaccagagcctgatagtggaacttctcgagctgcaggcccacgtacggggcgaagcggctgcgcggtaccactttgaggatgttggtggcgtgcagggggctagggctgtccatgtggagtctgttcagcctctcagtttggagaacctggccctgaggggccgctgtcaagaagcctgggtcctctctggcaagcagcagatagctaaggaaaaccagcaggtgagggcccgagagtgtgtaatgtcctggaagggcggtagcggggacgcagagatccaggtaagcatcctgactctgatccccttaggtagcaaaggacgtgacacttcatcaggccttgctgaggctgccccagtaccagactgatctcttgcttaccttcaatcagcccccgtaaggaggaaggaacgggcgggtatctcatgactgggttcccaggagaatcgggctgggagggacagaacagggagactcactggtgggatcctccaaggaagcaggagtgggccagaggtttggggtaactgatacccaggtcctctggggaacaggaattggcaatttccaaacctcaggcctggatgatgttctgtctccatctgttcccccaccccaagccctgacaacaggtcatctcttggccccgaaaatctgtcacctgcaccctggagcctgggtgactttgaacagctggtgaccagtctgacccttcacgatcctaacatctttggtccccagtaaaggcgctgaagcactgcatgatgttgctgagaacttggggactcggttctgtgagggggaaaagaggttgaaaagagggtttcctcttatttcttccctgtgcgtaaacataagacaatccctcttcagaataaacttgctttataatcaatataa

SEQ ID NO: 173900 - DNA, 749 bp, Homo sapiens
  Payload ID: 14143
  Gene Symbol: RANGRF
  Gene Name: RAN guanine nucleotide release factor
  Uniprot ID: Q9HD47
  ENST ID: ENST00000580434
  CDS Start-End: 119-475
ggagctaagccagacccgggtggcggtggcagctgcgaaacccagggagccgatgccacgtgacccaatgtggacttcttttaaacctttctaatgcccataacccagcctcagacccatggagcccacgagagactgcccgctgttcgggggcgccttttccgccatcctccccatgggggccattgacgtaagcgacctccgaccggtcccggacaatcaagaagttttctgccatcccgtgacggaccagagcctgatagtggaacttctcgagctgcaggcccacgtacggggcgaagcggctgcgcggtaccactttgaggatgttggtggcgtgcagggggctagggctgtccatgtggagtctgttcagcctctcagtttggagaacctggccctgaggggccgctgtcaagaagcctgggtcctctctggcaagcagcagatagctaaggaaaaccagcagccctgacaacaggtcatctcttggccccgaaaatctgtcacctgcaccctggagcctgggtgactttgaacagctggtgaccagtctgacccttcacgatcctaacatctttggtccccagtaaaggcgctgaagcactgcatgatgttgctgagaacttggggactcggttctgtgagggggaaaagaggttgaaaagagggtttcctcttatttcttccctgtgcgtaaacataagacaatccctcttcagaataaacttgctttataatcaatataa

SEQ ID NO: 173901 - DNA, 780 bp, Homo sapiens
  Payload ID: 14144
  Gene Symbol: RAN
  Gene Name: RAN, member RAS oncogene family
  ENST ID: ENST00000392367
  CDS Start-End: 42-743
agtcggacgggcgcggagacgcttctggaaggaacgccgcgatggctgcgcagggagagccccaggtccagttcaaacttgtattggttggtgatggtggtactggaaaaacgaccttcgtgaaacgtcatttgactggtgaatttgagaagaagtatgtagccaccttgggtgttgaggttcatcccctagtgttccacaccaacagaggacctattaagttcaatgtatgggacacagccggccaggagaaattcggtggactgagagatggctattatatccaagagatggggattcaccatgttgcccatgctggtctggaactcatgagctcagcccagtgtgccatcataatgtttgatgtaacatcgagagttacttacaagaatgtgcctaactggcatagagatctggtacgagtgtgtgaaaacatccccattgtgttgtgtggcaacaaagtggatattaaggacaggaaagtgaaggcgaaatccattgtcttccaccgaaagaagaatcttcagtactacgacatttctgccaaaagtaactacaactttgaaaagcccttcctctggcttgctaggaagctcattggagaccctaacttggaatttgttgccatgcctgctctcgccccaccagaagttgtcatggacccagctttggcagcacagtatgagcacgacttagaggttgctcagacaactgctctcccggatgaggatgatgacctgtgagaatgaagctggagcccagcgtcagaagtctagtttt

SEQ ID NO: 173902 - DNA, 1530 bp, Homo sapiens
  Payload ID: 14144
  Gene Symbol: RAN
  Gene Name: RAN, member RAS oncogene family
  Uniprot ID: P62826
  ENST ID: ENST00000392369
  CDS Start-End: 525-1175
tgcgcttccgccatctttccagcctcagtcggacgggcgcggagacgcttctggaaggtatcgcgacccggcgggcccggcacggccgggcggggacaggggtggcggcggcgggataggggtcggagccggggccagggccggggcgggtggcggacccaggggcagcgggcggctgagtaggtgggtggtgcgggcccggccgggccggggcaggagacgggcgtggggtcggcgctagcccccgcgaacccccgtttcatcctccgctctcatccccgtcccggtcccagtcccgttcccatccctacacctccggccgccgttccccgggccccgccgccccggatgccggccccgcccgccgccttcccgctcccaggcctggccgccatggcgccgcgggcgggaggcctttgtggggcgggcacgtggggcgctgggggcgcgggagcggggccgccatgggctgcggggccgcgcgagcgctcgcctccgtcctctgcctccgcaggaacgccgcgatggctgcgcagggagagccccaggtccagttcaaacttgtattggttggtgatggtggtactggaaaaacgaccttcgtgaaacgtcatttgactggtgaatttgagaagaagtatgtagccaccttgggtgttgaggttcatcccctagtgttccacaccaacagaggacctattaagttcaatgtatgggacacagccggccaggagaaattcggtggactgagagatggctattatatccaagcccagtgtgccatcataatgtttgatgtaacatcgagagttacttacaagaatgtgcctaactggcatagagatctggtacgagtgtgtgaaaacatccccattgtgttgtgtggcaacaaagtggatattaaggacaggaaagtgaaggcgaaatccattgtcttccaccgaaagaagaatcttcagtactacgacatttctgccaaaagtaactacaactttgaaaagcccttcctctggcttgctaggaagctcattggagaccctaacttggaatttgttgccatgcctgctctcgccccaccagaagttgtcatggacccagctttggcagcacagtatgagcacgacttagaggttgctcagacaactgctctcccggatgaggatgatgacctgtgagaatgaagctggagcccagcgtcagaagtctagttttataggcagctgtcctgtgatgtcagcggtgcagcgtgtgtgccacctcattattatctagctaagcggaacatgtgcttcatctgtgggatgctgaaggagatgagtgggcttcggagtgaatgtggcagtttaaaaaataacttcattgtttggacctgcatatttagctgttttggaacgcagttgattccttgagtttcatatataagactgctgcagtcacatcacaatattcagtggtgaaatcttgtttgttactgtcattcccattccttttcgtttagaatcagaataaagttgtatttcaaatatctaa

SEQ ID NO: 173903 - DNA, 2455 bp, Homo sapiens
  Payload ID: 14144
  Gene Symbol: RAN
  Gene Name: RAN, member RAS oncogene family
  ENST ID: ENST00000448750
  CDS Start-End: 1-705
cgccggcgtcggctgcgtctccggcgtttgaattgcgcttccgccatctttccagcctcagtcggacgggcgcggagacgcttctggaagcttgtattggttggtgatggtggtactggaaaaacgaccttcgtgaaacgtcatttgactggtgaatttgagaagaagtatgtagccaccttgggtgttgaggttcatcccctagtgttccacaccaacagaggacctattaagttcaatgtatgggacacagccggccaggagaaattcggtggactgagagatggctattatatccaagcccagtgtgccatcataatgtttgatgtaacatcgagagttacttacaagaatgtgcctaactggcatagagatctggtacgagtgtgtgaaaacatccccattgtgttgtgtggcaacaaagtggatattaaggacaggaaagtgaaggcgaaatccattgtcttccaccgaaagaagaatcttcagtactacgacatttctgccaaaagtaactacaactttgaaaagcccttcctctggcttgctaggaagctcattggagaccctaacttggaatttgttgccatgcctgctctcgccccaccagaagttgtcatggacccagctttggcagcacagtatgagcacgacttagaggttgctcagacaactgctctcccggatgaggatgatgacctgtgagaatgaagctggagcccagcgtcagaagtctagttttataggcagctgtcctgtgatgtcagcggtgcagcgtgtgtgccacctcattattatctagctaagcggaacatgtgcttcatctgtgggatgctgaaggagatgagtgggcttcggagtgaatgtggcagtttaaaaaataacttcattgtttggacctgcatatttagctgttttggaacgcagttgattccttgagtttcatatataagactgctgcagtcacatcacaatattcagtggtgaaatcttgtttgttactgtcattcccattccttttcgtttagaatcagaataaagttgtatttcaaatatctaagcaagtgaactcatcccttgtttataaatagcatttggaaaccactaaagtagggaagttttatgccatgttaatatttgaattgccttgcttttatcacttaatttgaaatctattgggttaatttctccctatgtttatttttgtacatttgagccatgtcacacaaactgatgatgacaggtcagcagtattctatttggttagaagggttacatggtgtaaatattagtgcagttaagctaaagcagtgtttgctccaccttcatattggctaggtagggtcacctagggaagcacttgctcaaaatctgtgacctgtcagaataaaaatgtggtttgtacatatcaaatagatattttaagggtaatattttcttttatggcaaaagtaatcatgttttaatgtagaacctcaaacaggatggaacatcagtggatggcaggaggttgggaattcttgctgttaaaaataattacaaattttgcacttttttgtttgaatgttagatgcttagtgtgaagttgatacgcaaggaaaatggtccatgtttacccacagttttcaggtactcctagactttaaagatgtcttgaacatttaagttcttcagcagttcacactacaccgtttttttgtttttttttcccccccgggagggtttttttgtagggcagcacagcagagcaggacatggatgaaatactaggaatatgcacagtggggcagtgtgggggcttctcagtaatggagaacagttggtgaaacttttttttttttttaactaagcatttaatttatcttgcatattttccacatttaaaaatgaattaggtctattaggataattaggagtttgatcccatcaacactattcttgtagcagttaggaatcttgagctatttttttctcatacgattactatagtccagtttaccaaagttttctttagatgtctgataatcttgagatgattgcttaccttaaaaggtatagaaaggatcacttaaatatatggaaaaatgaaataagggtgaagctgaataaagttctacttactgtattaactggcaacagttgagtttcttaagatctgaattgctgtgtatgttacgctgtattcagaaccagtttctaaccagcctgtgagatgggaagttttttccccataattgggatgaaacctttcattcaggtattttgaattgaaggtgtatgtgttgtttgtaaccttgtggagattgcaagtggtgttgacattctggatcttctatgtaacagttgaaatttggaagtgacgtcacttacctgtctaacgtggtgtgggagagaatttacaagtcctttattgaaagaataattgttgcaaaatatattgcttctactttgcctg

SEQ ID NO: 173904 - DNA, 572 bp, Homo sapiens
  Payload ID: 14144
  Gene Symbol: RAN
  Gene Name: RAN, member RAS oncogene family
  ENST ID: ENST00000536606
  CDS Start-End: 1-311
ggctgcgtctccggcgtttgaattgcgcttccgccatctttccagcctcagtcggacgggcgcggagacgcttctggaagcttgtattggttggtgatggtggtactggaaaaacgaccttcgtgaaacgtcatttgactggtgaatttgagaagaagtatgtagccaccttgggtgttgaggttcatcccctagtgttccacaccaacagaggacctattaagttcaatgtatgggacacagccggccaggagaaattcggtggactgagagatggctattatatccaagtgtgccatcataatgtttgatgtaacatcgagagttacttacaagaatgtgcctaactggcatagagatctggtacgagtgtgtgaaaacatccccattgtgttgtgtggcaacaaagtggatattaaggacaggaaagtgaaggcgaaatccattgtcttccaccgaaagaagaatcttcagtactacgacatttctgccaaaagtaactacaactttgaaaagcccttcctctggcttgctaggaagctcattggagaccctaacttggaatttgttgc

SEQ ID NO: 173905 - DNA, 1475 bp, Homo sapiens
  Payload ID: 14144
  Gene Symbol: RAN
  Gene Name: RAN, member RAS oncogene family
  ENST ID: ENST00000541630
  CDS Start-End: 282-668
gaattgcgcttccgccatctttccagcctcagtcggacgggcgcggagacgcttctggaagcttgtattggttggtgatggtggtactggaaaaacgaccttcgtgaaacgtcatttgactggtgaatttgagaagaaccaccttgggtgttgaggttcatcccctagtgttccacaccaacagaggacctattaagttcaatgtatgggacacagccggccaggagaaattcggtggactgagagatggctattatatccaagcccagtgtgccatcataatgtttgatgtaacatcgagagttacttacaagaatgtgcctaactggcatagagatctggtacgagtgtgtgaaaacatccccattgtgttgtgtggcaacaaagtggatattaaggacaggaaagtgaaggcgaaatccattgtcttccaccgaaagaagaatcttcagtactacgacatttctgccaaaagtaactacaactttgaaaagcccttcctctggcttgctaggaagctcattggagaccctaacttggaatttgttgccatgcctgctctcgccccaccagaagttgtcatggacccagctttggcagcacagtatgagcacgacttagaggttgctcagacaactgctctcccggatgaggatgatgacctgtgagaatgaagctggagcccagcgtcagaagtctagttttataggcagctgtcctgtgatgtcagcggtgcagcgtgtgtgccacctcattattatctagctaagcggaacatgtgcttcatctgtgggatgctgaaggagatgagtgggcttcggagtgaatgtggcagtttaaaaaataacttcattgtttggacctgcatatttagctgttttggaacgcagttgattccttgagtttcatatataagactgctgcagtcacatcacaatattcagtggtgaaatcttgtttgttactgtcattcccattccttttcgtttagaatcagaataaagttgtatttcaaatatctaagcaagtgaactcatcccttgtttataaatagcatttggaaaccactaaagtagggaagttttatgccatgttaatatttgaattgccttgcttttatcacttaatttgaaatctattgggttaatttctccctatgtttatttttgtacatttgagccatgtcacacaaactgatgatgacaggtcagcagtattctatttggttagaagggttacatggtgtaaatattagtgcagttaagctaaagcagtgtttgctccaccttcatattggctaggtagggtcacctagggaagcacttgctcaaaatctgtgacctgtcagaataaaaatgtggtttgtacatatcaaatagatattttaagggtaatattttcttttatggcaaaagtaatcatgttttaatgtagaacctcaaacaggatggaacatcagtggatggcaggaggtt

SEQ ID NO: 173906 - DNA, 657 bp, Homo sapiens
  Payload ID: 14144
  Gene Symbol: RAN
  Gene Name: RAN, member RAS oncogene family
  ENST ID: ENST00000535090
  CDS Start-End: 62-657
tccgccatctttccagcctcagtcggacgggcgcggagacgcttctggaaggaacgccgcgatggctgcgcagggagagccccagcttgtattggttggtgatggtggtactggaaaaacgaccttcgtgaaacgtcatttgactggtgaatttgagaagaagtatgtagccaccttgggtgttgaggttcatcccctagtgttccacaccaacagaggacctattaagttcaatgtatgggacacagccggccaggagaaattcggtggactgagagatggctattatatccaagcccagtgtgccatcataatgtttgatgtaacatcgagagttacttacaagaatgtgcctaactggcatagagatctggtacgagtgtgtgaaaacatccccattgtgttgtgtggcaacaaagtggatattaaggacaggaaagtgaaggcgaaatccattgtcttccaccgaaagaagaatcttcagtactacgacatttctgccaaaagtaactacaactttgaaaagcccttcctctggcttgctaggaagctcattggagaccctaacttggaatttgttgccatgcctgctctcgccccaccagaagttgtcatggacccagctttggcagcacagtatgagcacgacttagaggt

SEQ ID NO: 173907 - DNA, 2661 bp, Homo sapiens
  Payload ID: 14144
  Gene Symbol: RAN
  Gene Name: RAN, member RAS oncogene family
  Uniprot ID: P62826
  ENST ID: ENST00000543796
  CDS Start-End: 259-909
accgcgcctcccgccccaccctaagcgcagcgaccgcccgagcggccgaccgaaccgcgttgcgtgcgtgcgcgcacgcgcgggccacgtgggcgggcgccgcgccgttgccccgccccttgcaaccccgccccgcgccggccccgcccctgctctcgcgccggcgtcggctgcgtctccggcgtttgaattgcgcttccgccatctttccagcctcagtcggacgggcgcggagacgcttctggaaggaacgccgcgatggctgcgcagggagagccccaggtccagttcaaacttgtattggttggtgatggtggtactggaaaaacgaccttcgtgaaacgtcatttgactggtgaatttgagaagaagtatgtagccaccttgggtgttgaggttcatcccctagtgttccacaccaacagaggacctattaagttcaatgtatgggacacagccggccaggagaaattcggtggactgagagatggctattatatccaagcccagtgtgccatcataatgtttgatgtaacatcgagagttacttacaagaatgtgcctaactggcatagagatctggtacgagtgtgtgaaaacatccccattgtgttgtgtggcaacaaagtggatattaaggacaggaaagtgaaggcgaaatccattgtcttccaccgaaagaagaatcttcagtactacgacatttctgccaaaagtaactacaactttgaaaagcccttcctctggcttgctaggaagctcattggagaccctaacttggaatttgttgccatgcctgctctcgccccaccagaagttgtcatggacccagctttggcagcacagtatgagcacgacttagaggttgctcagacaactgctctcccggatgaggatgatgacctgtgagaatgaagctggagcccagcgtcagaagtctagttttataggcagctgtcctgtgatgtcagcggtgcagcgtgtgtgccacctcattattatctagctaagcggaacatgtgcttcatctgtgggatgctgaaggagatgagtgggcttcggagtgaatgtggcagtttaaaaaataacttcattgtttggacctgcatatttagctgttttggaacgcagttgattccttgagtttcatatataagactgctgcagtcacatcacaatattcagtggtgaaatcttgtttgttactgtcattcccattccttttcgtttagaatcagaataaagttgtatttcaaatatctaagcaagtgaactcatcccttgtttataaatagcatttggaaaccactaaagtagggaagttttatgccatgttaatatttgaattgccttgcttttatcacttaatttgaaatctattgggttaatttctccctatgtttatttttgtacatttgagccatgtcacacaaactgatgatgacaggtcagcagtattctatttggttagaagggttacatggtgtaaatattagtgcagttaagctaaagcagtgtttgctccaccttcatattggctaggtagggtcacctagggaagcacttgctcaaaatctgtgacctgtcagaataaaaatgtggtttgtacatatcaaatagatattttaagggtaatattttcttttatggcaaaagtaatcatgttttaatgtagaacctcaaacaggatggaacatcagtggatggcaggaggttgggaattcttgctgttaaaaataattacaaattttgcacttttttgtttgaatgttagatgcttagtgtgaagttgatacgcaaggaaaatggtccatgtttacccacagttttcaggtactcctagactttaaagatgtcttgaacatttaagttcttcagcagttcacactacaccgtttttttgtttttttttcccccccgggagggtttttttgtagggcagcacagcagagcaggacatggatgaaatactaggaatatgcacagtggggcagtgtgggggcttctcagtaatggagaacagttggtgaaacttttttttttttttaactaagcatttaatttatcttgcatattttccacatttaaaaatgaattaggtctattaggataattaggagtttgatcccatcaacactattcttgtagcagttaggaatcttgagctatttttttctcatacgattactatagtccagtttaccaaagttttctttagatgtctgataatcttgagatgattgcttaccttaaaaggtatagaaaggatcacttaaatatatggaaaaatgaaataagggtgaagctgaataaagttctacttactgtattaactggcaacagttgagtttcttaagatctgaattgctgtgtatgttacgctgtattcagaaccagtttctaaccagcctgtgagatgggaagttttttccccataattgggatgaaacctttcattcaggtattttgaattgaaggtgtatgtgttgtttgtaaccttgtggagattgcaagtggtgttgacattctggatcttctatgtaacagttgaaatttggaagtgacgtcacttacctgtctaacgtggtgtgggagagaatttacaagtcctttattgaaagaataattgttgcaaaatatattgcttctactttgcctgga

SEQ ID NO: 173908 - DNA, 572 bp, Homo sapiens
  Payload ID: 14144
  Gene Symbol: RAN
  Gene Name: RAN, member RAS oncogene family
  ENST ID: ENST00000541679
  CDS Start-End: 56-217
atctttccagcctcagtcggacgggcgcggagacgcttctggaaggaacgccgcgatggctgcgcagggagagccccaggtccagttcaaaccttcctctggcttgctaggaagctcattggagaccctaacttggaatttgttgccatgcctgctctcgccccaccagaagttgtcatggacccagctttggcagcacagtatgagcacgacttagaggttgctcagacaactgctctcccggatgaggatgatgacctgtgagaatgaagctggagcccagcgtcagaagtctagttttataggcagctgtcctgtgatgtcagcggtgcagcgtgtgtgccacctcattattatctagctaagcggaacatgtgcttcatctgtgggatgctgaaggagatgagtgggcttcggagtgaatgtggcagtttaaaaaataacttcattgtttggacctgcatatttagctgttttggaacgcagttgattccttgagtttcatatataagactgctgcagtcacatcacaatattcagtggtgaaatcttgtttgttactgtcattccca

SEQ ID NO: 173909 - DNA, 5498 bp, Homo sapiens
  Payload ID: 14145
  Gene Symbol: RGPD1
  Gene Name: RANBP2-like and GRIP domain containing 1
  ENST ID: ENST00000398193
  CDS Start-End: 39-5309
ctggtttcacgcgtctcgggagccaggttggcggtgcgatgaggcgcagcaaggcctacggggagcggtacctcgcctcggtgcagggctccgccccgtcgcctggaaagaagttgagaggattctattttgcaaagctgtattatgaagctaaagaatatgatcttgctaaaaaatacgtatgtacttaccttagtgtgcaagagagggatcccagagctcacagatttctgggtcttctttatgaattggaagaaaacacagagaaagccgttgaatgttacaggcgttcactggaattaaacccaccacaaaaagatcttgtgttgaagattgcagaattgctttgtaaaaatgatgttactgatggaagagcaaaatactgggttgaaagggcagcgaaacttttcccaggaagtcctgcaatttataaactaaaggaacatcttctagattgtgaaggtgaagatggatggaataaactttttgactggattcagtcagaactttatgtaagacctgatgacgtccatatgaacatccggctagtggagttgtatcgctcaaataaaagattgaaggatgctgtggcccgctgccatgaggcagagaggaacatagctttgcgttcaagtttagagtggaattcgtgtgttgtacagacccttaaggaatatctggagtctttacagtgtttggagtctgataaaagtgactggcgagcaaccaatacagacttactgctggcctatgctaatcttatgcttcttacgctttccactagagatgtgcaggaaagtagagaattactggaaagttttgatagtgctcttcagtctgcaaaatcttctttgggtggaaatgatgaactgtcagctactttcttagaaatgaaaggacatttctacatgcatgctggttctctgctcttgaagatgggtcagcatggtaataatgttcaatggcaagctctttctgagctggctgcattgtgctatgtcatagcatttcaggttccaagaccaaagattaaattaataaaaggtgaagctggacaaaatctgctggaaatgatggcctgtgaccgactgagccaatcagggcatatgttgctaaacttaagtcgtggcaagcaagattttttaaaagaggttgttgaaacttttgccaacaaaagcgggcagtctgtgttatataatgctctgttttctagtcagtcatctaaggatacatcttttcttggtagcgatgatattggaaacattgatgtacaagaaccagagcttgaagatttggctagatacgatgttggtgctattcaagcacataatggtagtcttcagcaccttacttggcttggcttacagtggaattcattgcctgctttacctggaatccgaaaatggctaaaacagcttttccatcatttgccccaggaaacctcaaggcttgaaacaaatgcacctgaatcaatatgtattttagatcttgaagtatttctccttggagtagtatataccagccacttacaattaaaggagaaatgtaattctcaccacagctcctatcagccgttatgcctgccccttcctgtgtgtaaacggctttgtacagagagacaaaaatcttggtgggatgcggtttgtactctgattcacagaaaagcagtacctggaaactcagcagaattgagacttgtagttcagcatgaaataaacactctaagagcccaggaaaaacatggccttcaacctgctctgcttgtacattgggcaaaatgccttcagaaaatgggcaggggtcttaattcttcttatgatcaacaagaatacatagggagaagtgttcattattggaagaaagttttgccattgttgaagataataaagaagaacagtattcctgaacctattgatcctctgtttaaacattttcatagtgtagacattcaggcatcagaaattgttgagtatgaagaagatgcacacataacttttgctatattggatgcagtacatggaaatatagaagatgctgtgactgcttttgaatctataaaaagtgttgtttcttattggaatcttgcactgatttttcacaggaaagcagaagacattgaaaatgatgccgtttttcctgaagaacaagaagaatgcaaaaattatctgagaaagaccagggactacctaataaagattatagatgacagtgattcaaatctttcagtggtcaagaaattgcctgtgcccctggagtctgtaaaagagatgcttaagtcagtcatgcaggaactcgaagactatagtgaaggaggtcctctctataaaaatggttctttgcgaaatgcagattcagaaataaaacattctacaccatctcctaccaaatattcactatcaccaagtaaaagttacaagtattctcccaaaacaccacctcgatgggcagaagatcagaattctttacggaaaatgatttgccaagaagtaaaggccattacgaaactaaatagcagtaagtcagcatcccgtcatcgttggcccacagagaattatggaccagactcggtgcctgatggatatcaggggtcacagacatttcatggggctccactaacagttgcaactactggcccttcagtatattatagtcagtcaccagcatataattcccagtatcttctcagaccagcagctaatgttactcccacaaagggttcttctaatacagaatttaagtcaaccaaagaaggattttccatcgctgtgtctgctgatggatttaaatttggcatttcggaaccaggaaatcaagaaaagaaaagtgaaaagcctcttgaaaatgatactggcttccaggctcaggatattagtggccagaagaatggccgtggtgtgatttttggccaaacaagtagcacttttacatttgcagatgttgcaaaatcaacttcaggagaaggatttcagtttggcaaaaaagaccccaatttcaagggattttcaggtgctggagaaaaattattctcatcacaatgcggtaaaatggccaataaagcaaacacttccggtgactttgagaaagatgatgatgcctgtaagactgaggacagcgatgacatccattttgaaccagtagttcaaatgcctgaaaaagtagaacttgtaacaggagaagaaggtgaaaaagttctgtattcacagggggtaaaactatttagatttgatgctgagataagtcagtggaaagaaaggggcttggggaacttaaaaattctcaaaaatgaggtcaatggcaaaccaagaatgctgatgcgaagagaccaagtactaaaagtgtgtgctaatcattggataacaactacaatgaacctgaagcccctctctggatcagatagagcatggatgtggttagccagtgatttctctgatggtgatgccaaactagagcggttggcagcacaatttaaaacaccagagctggctgaagaattcaagcagaaatttgaggaatgccagcggcttctgttagacataccacttcaaactccccataaacttgtagatactggcagagctgccaagctaatacagagagctgaagaaatgaagagtggactgaaagatttcaaaacgtttttgacaaatgatcaaacaaaagtcactgaggaagaaaataagggttcaggtacaggtgcagccggtgcctcagacacaacaataaaacccaatcctgaaaacactgggcccacattagaatgggataactatgatttaagggaagatgctttggatgataatgttagtagtagctcagtacatgattctccgttggcaagtagccctgtgagaaaaaatattttccgctttgatgagtcaacaacaggatttaacttcagttttaaatctgctttgagtctatctaagtctcctgccaagttgaatcagagtgggacttcagttggcactgatgaagaatctgatgttactcaagaagaagagagagatggacagtactttgaacctgttgttcctttacctgatctagttgaagtatccagtggtgaggaaaatgaacaagttgtttttagtcacagggcagaactctacagatatgataaagatgttggtcaatggaaagaaaggggcattggtgatataaagattttacagaattatgataataagcaagttcgtatagtgatgagaagggaccaagtattaaaactttgtgccaatcacagaataactccagacatgagtttgcaaaatatgaaagggacagaaagagtatgggtgtggactgcatgtgattttgcagatggagaaagaaaagtagagcatttagctgttcgttttaaactacaggatgttgcagactcatttaagaaaatttttgatgaagcaaaaacagcccaggaaaaagattctttgataacacctcatgtttctcggtcaagcactcccagagagtcaccatgtggcaaaattgctgtagctgtattagaagaaaccacaagagagaggacagatgttattcagggtgatgatgtagcagatgcagcttcagaagttgaagtgtctagcacatctgaaacaacaacaaaagcagtggtttctcctccaaagtttgtatttggttcagagtctgttaaaagaatttttagtagtgaaaaatcaaacccatttgcatttggcaacagttctgccactgggtctttgtttggatttagttttaatgcacctttgaaaagtaacgatagtgaaactagttcagtagcccagagtggatctgaaagcaaagtggaacctaaaaaatgtgaactgtcaaagaactctgatatcgaacagtcttcagatagcaaagtcaaaaatctctctgcttcctttccaatggaagaatcttcaatcaactacacatttaaaacaccagaaaaggagcctccattatggcatgctgaatttaccaaagaagaattggttcagaagctcagttccaccacaaaaagtgcagatcagttaaacggcctgcttcgggaaacagaggcaaccagtgcagtccttatggagcaaattaagcttctcaaaagtgaaataagaagattggaaaggaatcaagaggagtctgcagctaacgtggaacacttgaagaacgtcttgctgcagttcattttcttgaagccaggtagtgagagagagagccttcttcctgttataaatacgatgttgcagctcagccctgaagaaaagggaaaacttgctgcggttgctcaaggtcttcaagaaacctccatacccaagaaaaaatagaaagcaaccatgttctactatggtgccaaaaatagttgaacatcgacatcaaaaagattctttctgtctgcttattcacatattctggtttgaattaaaagtgatgaaattatcctaaatacagttggccctctgtatccatgggttccacatccacaaattcaaccaactgtggatggaaaagacttg

SEQ ID NO: 173910 - DNA, 6692 bp, Homo sapiens
  Payload ID: 14145
  Gene Symbol: RGPD1
  Gene Name: RANBP2-like and GRIP domain containing 1
  Uniprot ID: P0DJD0
  ENST ID: ENST00000409776
  CDS Start-End: 17-5263
atttgtgacttgtctcatgaacgtgatgggttttaacacagaccgcttagcatggactagaaataagttgagaggattctattttgcaaagctgtattatgaagctaaagaatatgatcttgctaaaaaatacgtatgtacttaccttagtgtgcaagagagggatcccagagctcacagatttctgggtcttctttatgaattggaagaaaacacagagaaagccgttgaatgttacaggcgttcactggaattaaacccaccacaaaaagatcttgtgttgaagattgcagaattgctttgtaaaaatgatgttactgatggaagagcaaaatactgggttgaaagggcagcgaaacttttcccaggaagtcctgcaatttataaactaaaggaacatcttctagattgtgaaggtgaagatggatggaataaactttttgactggattcagtcagaactttatgtaagacctgatgacgtccatatgaacatccggctagtggagttgtatcgctcaaataaaagattgaaggatgctgtggcccgctgccatgaggcagagaggaacatagctttgcgttcaagtttagagtggaattcgtgtgttgtacagacccttaaggaatatctggagtctttacagtgtttggagtctgataaaagtgactggcgagcaaccaatacagacttactgctggcctatgctaatcttatgcttcttacgctttccactagagatgtgcaggaaagtagagaattactggaaagttttgatagtgctcttcagtctgcaaaatcttctttgggtggaaatgatgaactgtcagctactttcttagaaatgaaaggacatttctacatgcatgctggttctctgctcttgaagatgggtcagcatggtaataatgttcaatggcaagctctttctgagctggctgcattgtgctatgtcatagcatttcaggttccaagaccaaagattaaattaataaaaggtgaagctggacaaaatctgctggaaatgatggcctgtgaccgactgagccaatcagggcatatgttgctaaacttaagtcgtggcaagcaagattttttaaaagaggttgttgaaacttttgccaacaaaagcgggcagtctgtgttatataatgctctgttttctagtcagtcatctaaggatacatcttttcttggtagcgatgatattggaaacattgatgtacaagaaccagagcttgaagatttggctagatacgatgttggtgctattcaagcacataatggtagtcttcagcaccttacttggcttggcttacagtggaattcattgcctgctttacctggaatccgaaaatggctaaaacagcttttccatcatttgccccaggaaacctcaaggcttgaaacaaatgcacctgaatcaatatgtattttagatcttgaagtatttctccttggagtagtatataccagccacttacaattaaaggagaaatgtaattctcaccacagctcctatcagccgttatgcctgccccttcctgtgtgtaaacggctttgtacagagagacaaaaatcttggtgggatgcggtttgtactctgattcacagaaaagcagtacctggaaactcagcagaattgagacttgtagttcagcatgaaataaacactctaagagcccaggaaaaacatggccttcaacctgctctgcttgtacattgggcaaaatgccttcagaaaatgggcaggggtcttaattcttcttatgatcaacaagaatacatagggagaagtgttcattattggaagaaagttttgccattgttgaagataataaagaagaacagtattcctgaacctattgatcctctgtttaaacattttcatagtgtagacattcaggcatcagaaattgttgagtatgaagaagatgcacacataacttttgctatattggatgcagtacatggaaatatagaagatgctgtgactgcttttgaatctataaaaagtgttgtttcttattggaatcttgcactgatttttcacaggaaagcagaagacattgaaaatgatgccgtttttcctgaagaacaagaagaatgcaaaaattatctgagaaagaccagggactacctaataaagattatagatgacagtgattcaaatctttcagtggtcaagaaattgcctgtgcccctggagtctgtaaaagagatgcttaagtcagtcatgcaggaactcgaagactatagtgaaggaggtcctctctataaaaatggttctttgcgaaatgcagattcagaaataaaacattctacaccatctcctaccaaatattcactatcaccaagtaaaagttacaagtattctcccaaaacaccacctcgatgggcagaagatcagaattctttacggaaaatgatttgccaagaagtaaaggccattacgaaactaaatagcagtaagtcagcatcccgtcatcgttggcccacagagaattatggaccagactcggtgcctgatggatatcaggggtcacagacatttcatggggctccactaacagttgcaactactggcccttcagtatattatagtcagtcaccagcatataattcccagtatcttctcagaccagcagctaatgttactcccacaaagggttcttctaatacagaatttaagtcaaccaaagaaggattttccatcgctgtgtctgctgatggatttaaatttggcatttcggaaccaggaaatcaagaaaagaaaagtgaaaagcctcttgaaaatgatactggcttccaggctcaggatattagtggccagaagaatggccgtggtgtgatttttggccaaacaagtagcacttttacatttgcagatgttgcaaaatcaacttcaggagaaggatttcagtttggcaaaaaagaccccaatttcaagggattttcaggtgctggagaaaaattattctcatcacaatgcggtaaaatggccaataaagcaaacacttccggtgactttgagaaagatgatgatgcctgtaagactgaggacagcgatgacatccattttgaaccagtagttcaaatgcctgaaaaagtagaacttgtaacaggagaagaaggtgaaaaagttctgtattcacagggggtaaaactatttagatttgatgctgagataagtcagtggaaagaaaggggcttggggaacttaaaaattctcaaaaatgaggtcaatggcaaaccaagaatgctgatgcgaagagaccaagtactaaaagtgtgtgctaatcattggataacaactacaatgaacctgaagcccctctctggatcagatagagcatggatgtggttagccagtgatttctctgatggtgatgccaaactagagcggttggcagcacaatttaaaacaccagagctggctgaagaattcaagcagaaatttgaggaatgccagcggcttctgttagacataccacttcaaactccccataaacttgtagatactggcagagctgccaagctaatacagagagctgaagaaatgaagagtggactgaaagatttcaaaacgtttttgacaaatgatcaaacaaaagtcactgaggaagaaaataagggttcaggtacaggtgcagccggtgcctcagacacaacaataaaacccaatcctgaaaacactgggcccacattagaatgggataactatgatttaagggaagatgctttggatgataatgttagtagtagctcagtacatgattctccgttggcaagtagccctgtgagaaaaaatattttccgctttgatgagtcaacaacaggatttaacttcagttttaaatctgctttgagtctatctaagtctcctgccaagttgaatcagagtgggacttcagttggcactgatgaagaatctgatgttactcaagaagaagagagagatggacagtactttgaacctgttgttcctttacctgatctagttgaagtatccagtggtgaggaaaatgaacaagttgtttttagtcacagggcagaactctacagatatgataaagatgttggtcaatggaaagaaaggggcattggtgatataaagattttacagaattatgataataagcaagttcgtatagtgatgagaagggaccaagtattaaaactttgtgccaatcacagaataactccagacatgagtttgcaaaatatgaaagggacagaaagagtatgggtgtggactgcatgtgattttgcagatggagaaagaaaagtagagcatttagctgttcgttttaaactacaggatgttgcagactcatttaagaaaatttttgatgaagcaaaaacagcccaggaaaaagattctttgataacacctcatgtttctcggtcaagcactcccagagagtcaccatgtggcaaaattgctgtagctgtattagaagaaaccacaagagagaggacagatgttattcagggtgatgatgtagcagatgcagcttcagaagttgaagtgtctagcacatctgaaacaacaacaaaagcagtggtttctcctccaaagtttgtatttggttcagagtctgttaaaagaatttttagtagtgaaaaatcaaacccatttgcatttggcaacagttctgccactgggtctttgtttggatttagttttaatgcacctttgaaaagtaacgatagtgaaactagttcagtagcccagagtggatctgaaagcaaagtggaacctaaaaaatgtgaactgtcaaagaactctgatatcgaacagtcttcagatagcaaagtcaaaaatctctctgcttcctttccaatggaagaatcttcaatcaactacacatttaaaacaccagaaaaggagcctccattatggcatgctgaatttaccaaagaagaattggttcagaagctcagttccaccacaaaaagtgcagatcagttaaacggcctgcttcgggaaacagaggcaaccagtgcagtccttatggagcaaattaagcttctcaaaagtgaaataagaagattggaaaggaatcaagaggagtctgcagctaacgtggaacacttgaagaacgtcttgctgcagttcattttcttgaagccaggtagtgagagagagagccttcttcctgttataaatacgatgttgcagctcagccctgaagaaaagggaaaacttgctgcggttgctcaaggtcttcaagaaacctccatacccaagaaaaaatagaaagcaaccatgttctactatggtgccaaaaatagttgaacatcgacatcaaaaagattctttctgtctgcttattcacatattctggtttgaattaaaagtgatgaaattatcctaaatacagttggccctctgtatccatgggttccacatccacaaattcaaccaactgtggatggaaaagacttgaaaaagatgagagaaaataacaatatgacaataaaacataatacaaataaaaacaatacagtataacaacgattacatagcatttacattatattagggattgcacaagagaaggtatgtaggttatatgcaaatactgcaccattttacataagggacttgagaagcatggattttggtagccacaggggtcctggaaccaatccctcacagacacagacggacactttacagtagatgaacacaaagatgaaaggaaaagtctgacctaggtttgcggggagaagtggaactccatttttgacaggtgatgccattttttgttttggacatcgtccctctgtagttctttccattcccagtcttgcactctgaaagatacactgaaggaaagtccacacagtggtcaaagtctttcacaagacaccacgtgaaggtctgcacagcacagtcacattgagaaaaagatctcatgcaccagaccccctgtttctgctttctaaaagatcatcttttgcacctgcaaaaaggctgcagtaaactgggccattccatactttgattcatgtattcaaatgctacttatgagctctctgtgtattgagccccaccaggatgctggggacacacggggcacagtgcagccagaggcttggccatcatagagctcacattctagtggaatcagacaggggggttacaggaaatattcaagtaaacaatataaaatgagatcacttgatgatacatggatacatgttacatacatgatgagacagagtaagagaatggggaaagggtttttagatgggggaatggcaggcttttccgaggctgaaagagatccaacccacttctatttcttcaggctcccagtgatatgaaaaagtgccaaacaggactataaaattgtggtctactgtaaatggtttgcagtaaaagttctcaaccagcttccactcaaccaactcaccagttagacaatgggccctctcctgtgtttaaaacagtccggtgcccacctgggtccacatgcagctggcaggtgtttgctagtgtgcccacccatgtctgttccccccacgtgagttatgtgcttacaacgagtcgtttctttgcattttccaactttcttacatttatatttaattaaagatgatctaaactgagaaatgaatgtgaaaagaaacaaagctcttttttgtttggtttttaactaaattaaatgtttttaacaagt

SEQ ID NO: 173911 - DNA, 3479 bp, Homo sapiens
  Payload ID: 14145
  Gene Symbol: RGPD1
  Gene Name: RANBP2-like and GRIP domain containing 1
  ENST ID: ENST00000428128
  CDS Start-End: 1-95
tacatggaaatatagaagatgctgtgactgcttttgaatctataaaaagtgttgtttcttattggaatcttgcactggaaagcagaagacattgaaaatgatgccgtttttcctgaagaacaagaagaatgcaaaaattatctgagaaagaccagggactacctaataaagattatagatgacagtgattcaaatctttcagtggtcaagaaattgcctgtgcccctggagtctgtaaaagagatgcttaagtcagtcatgcaggaactcgaagactatagtgaaggaggtcctctctataaaaatggttctttgcgaaatgcagattcagaaataaaacattctacaccatctcctaccaaatattcactatcaccaagtaaaagttacaagtattctcccaaaacaccacctcgatgggcagaagatcagaattctttacggaaaatgatttgccaagaagtaaaggccattacgaaactaaatagcagtaagtcagcatcccgtcatcgttggcccacagagaattatggaccagactcggtgcctgatggatatcaggggtcacagacatttcatggggctccactaacagttgcaactactggcccttcagtatattatagtcagtcaccagcatataattcccagtatcttctcagaccagcagctaatgttactcccacaaagggttcttctaatacagaatttaagtcaaccaaagaaggattttccatcgctgtgtctgctgatggatttaaatttggcatttcggaaccaggaaatcaagaaaagaaaagtgaaaagcctcttgaaaatgatactggcttccaggctcaggatattagtggccagaagaatggccgtggtgtgatttttggccaaacaagtagcacttttacatttgcagatgttgcaaaatcaacttcaggagaaggatttcagtttggcaaaaaagaccccaatttcaagggattttcaggtgctggagaaaaattattctcatcacaatgcggtaaaatggccaataaagcaaacacttccggtgactttgagaaagatgatgatgcctgtaagactgaggacagcgatgacatccattttgaaccagtagttcaaatgcctgaaaaagtagaacttgtaacaggagaagaaggtgaaaaagttctgtattcacagggggtaaaactatttagatttgatgctgagataagtcagtggaaagaaaggggcttggggaacttaaaaattctcaaaaatgaggtcaatggcaaaccaagaatgctgatgcgaagagaccaagtactaaaagtgtgtgctaatcattggataacaactacaatgaacctgaagcccctctctggatcagatagagcatggatgtggttagccagtgatttctctgatggtgatgccaaactagagcggttggcagcacaatttaaaacaccagagctggctgaagaattcaagcagaaatttgaggaatgccagcggcttctgttagacataccacttcaaactccccataaacttgtagatactggcagagctgccaagctaatacagagagctgaagaaatgaagagtggactgaaagatttcaaaacgtttttgacaaatgatcaaacaaaagtcactgaggaagaaaataagggttcaggtacaggtgcagccggtgcctcagacacaacaataaaacccaatcctgaaaacactgggcccacattagaatgggataactatgatttaagggaagatgctttggatgataatgttagtagtagctcagtacatgattctccgttggcaagtagccctgtgagaaaaaatattttccgctttgatgagtcaacaacaggatttaacttcagttttaaatctgctttgagtctatctaagtctcctgccaagttgaatcagagtgggacttcagttggcactgatgaagaatctgatgttactcaagaagaagagagagatggacagtactttgaacctgttgttcctttacctgatctagttgaagtatccagtggtgaggaaaatgaacaagttgtttttagtcacagggcagaactctacagatatgataaagatgttggtcaatggaaagaaaggggcattggtgatataaagattttacagaattatgataataagcaagttcgtatagtgatgagaagggaccaagtattaaaactttgtgccaatcacagaataactccagacatgagtttgcaaaatatgaaagggacagaaagagtatgggtgtggactgcatgtgattttgcagatggagaaagaaaagtagagcatttagctgttcgttttaaactacaggatgttgcagactcatttaagaaaatttttgatgaagcaaaaacagcccaggaaaaagattctttgataacacctcatgtttctcggtcaagcactcccagagagtcaccatgtggcaaaattgctgtagctgtattagaagaaaccacaagagagaggacagatgttattcagggtgatgatgtagcagatgcagcttcagaagttgaagtgtctagcacatctgaaacaacaacaaaagcagtggtttctcctccaaagtttgtatttggttcagagtctgttaaaagaatttttagtagtgaaaaatcaaacccatttgcatttggcaacagttctgccactgggtctttgtttggatttagttttaatgcacctttgaaaagtaacgatagtgaaactagttcagtagcccagagtggatctgaaagcaaagtggaacctaaaaaatgtgaactgtcaaagaactctgatatcgaacagtcttcagatagcaaagtcaaaaatctctctgcttcctttccaatggaagaatcttcaatcaactacacatttaaaacaccagaaaaggagcctccattatggcatgctgaatttaccaaagaagaattggttcagaagctcagttccaccacaaaaagtgcagatcagttaaacggcctgcttcgggaaacagaggcaaccagtgcagtccttatggagcaaattaagcttctcaaaagtgaaataagaagattggaaaggaatcaagaggagtctgcagctaacgtggaacacttgaagaacgtcttgctgcagttcattttcttgaagccaggtagtgagagagagagccttcttcctgttataaatacgatgttgcagctcagccctgaagaaaagggaaaacttgctgcggttgctcaaggtcttcaagaaacctccatacccaagaaaaaatagaaagcaaccatgttctactatggtgccaaaaatagttgaacatcgacatcaaaaagattctttctgtctgcttattcacatattctggtttgaattaaaagtgatgaaattatcctaaatacagttggccctctgtatccatgggttccacatccacaaattcaaccaactgtggatggaaaagacttgaaaaa

SEQ ID NO: 173912 - DNA, 6697 bp, Homo sapiens
  Payload ID: 14145
  Gene Symbol: RGPD1
  Gene Name: RANBP2-like and GRIP domain containing 1
  Uniprot ID: P0DJD0
  ENST ID: ENST00000559485
  CDS Start-End: 17-5263
atttgtgacttgtctcatgaacgtgatgggttttaacacagaccgcttagcatggactagaaataagttgagaggattctattttgcaaagctgtattatgaagctaaagaatatgatcttgctaaaaaatacgtatgtacttaccttagtgtgcaagagagggatcccagagctcacagatttctgggtcttctttatgaattggaagaaaacacagagaaagccgttgaatgttacaggcgttcactggaattaaacccaccacaaaaagatcttgtgttgaagattgcagaattgctttgtaaaaatgatgttactgatggaagagcaaaatactgggttgaaagggcagcgaaacttttcccaggaagtcctgcaatttataaactaaaggaacatcttctagattgtgaaggtgaagatggatggaataaactttttgactggattcagtcagaactttatgtaagacctgatgacgtccatatgaacatccggctagtggagttgtatcgctcaaataaaagattgaaggatgctgtggcccgctgccatgaggcagagaggaacatagctttgcgttcaagtttagagtggaattcgtgtgttgtacagacccttaaggaatatctggagtctttacagtgtttggagtctgataaaagtgactggcgagcaaccaatacagacttactgctggcctatgctaatcttatgcttcttacgctttccactagagatgtgcaggaaagtagagaattactggaaagttttgatagtgctcttcagtctgcaaaatcttctttgggtggaaatgatgaactgtcagctactttcttagaaatgaaaggacatttctacatgcatgctggttctctgctcttgaagatgggtcagcatggtaataatgttcaatggcaagctctttctgagctggctgcattgtgctatgtcatagcatttcaggttccaagaccaaagattaaattaataaaaggtgaagctggacaaaatctgctggaaatgatggcctgtgaccgactgagccaatcagggcatatgttgctaaacttaagtcgtggcaagcaagattttttaaaagaggttgttgaaacttttgccaacaaaagcgggcagtctgtgttatataatgctctgttttctagtcagtcatctaaggatacatcttttcttggtagcgatgatattggaaacattgatgtacaagaaccagagcttgaagatttggctagatacgatgttggtgctattcaagcacataatggtagtcttcagcaccttacttggcttggcttacagtggaattcattgcctgctttacctggaatccgaaaatggctaaaacagcttttccatcatttgccccaggaaacctcaaggcttgaaacaaatgcacctgaatcaatatgtattttagatcttgaagtatttctccttggagtagtatataccagccacttacaattaaaggagaaatgtaattctcaccacagctcctatcagccgttatgcctgccccttcctgtgtgtaaacggctttgtacagagagacaaaaatcttggtgggatgcggtttgtactctgattcacagaaaagcagtacctggaaactcagcagaattgagacttgtagttcagcatgaaataaacactctaagagcccaggaaaaacatggccttcaacctgctctgcttgtacattgggcaaaatgccttcagaaaatgggcaggggtcttaattcttcttatgatcaacaagaatacatagggagaagtgttcattattggaagaaagttttgccattgttgaagataataaagaagaacagtattcctgaacctattgatcctctgtttaaacattttcatagtgtagacattcaggcatcagaaattgttgagtatgaagaagatgcacacataacttttgctatattggatgcagtacatggaaatatagaagatgctgtgactgcttttgaatctataaaaagtgttgtttcttattggaatcttgcactgatttttcacaggaaagcagaagacattgaaaatgatgccgtttttcctgaagaacaagaagaatgcaaaaattatctgagaaagaccagggactacctaataaagattatagatgacagtgattcaaatctttcagtggtcaagaaattgcctgtgcccctggagtctgtaaaagagatgcttaagtcagtcatgcaggaactcgaagactatagtgaaggaggtcctctctataaaaatggttctttgcgaaatgcagattcagaaataaaacattctacaccatctcctaccaaatattcactatcaccaagtaaaagttacaagtattctcccaaaacaccacctcgatgggcagaagatcagaattctttacggaaaatgatttgccaagaagtaaaggccattacgaaactaaatagcagtaagtcagcatcccgtcatcgttggcccacagagaattatggaccagactcggtgcctgatggatatcaggggtcacagacatttcatggggctccactaacagttgcaactactggcccttcagtatattatagtcagtcaccagcatataattcccagtatcttctcagaccagcagctaatgttactcccacaaagggttcttctaatacagaatttaagtcaaccaaagaaggattttccatcgctgtgtctgctgatggatttaaatttggcatttcggaaccaggaaatcaagaaaagaaaagtgaaaagcctcttgaaaatgatactggcttccaggctcaggatattagtggccagaagaatggccgtggtgtgatttttggccaaacaagtagcacttttacatttgcagatgttgcaaaatcaacttcaggagaaggatttcagtttggcaaaaaagaccccaatttcaagggattttcaggtgctggagaaaaattattctcatcacaatgcggtaaaatggccaataaagcaaacacttccggtgactttgagaaagatgatgatgcctgtaagactgaggacagcgatgacatccattttgaaccagtagttcaaatgcctgaaaaagtagaacttgtaacaggagaagaaggtgaaaaagttctgtattcacagggggtaaaactatttagatttgatgctgagataagtcagtggaaagaaaggggcttggggaacttaaaaattctcaaaaatgaggtcaatggcaaaccaagaatgctgatgcgaagagaccaagtactaaaagtgtgtgctaatcattggataacaactacaatgaacctgaagcccctctctggatcagatagagcatggatgtggttagccagtgatttctctgatggtgatgccaaactagagcggttggcagcacaatttaaaacaccagagctggctgaagaattcaagcagaaatttgaggaatgccagcggcttctgttagacataccacttcaaactccccataaacttgtagatactggcagagctgccaagctaatacagagagctgaagaaatgaagagtggactgaaagatttcaaaacgtttttgacaaatgatcaaacaaaagtcactgaggaagaaaataagggttcaggtacaggtgcagccggtgcctcagacacaacaataaaacccaatcctgaaaacactgggcccacattagaatgggataactatgatttaagggaagatgctttggatgataatgttagtagtagctcagtacatgattctccgttggcaagtagccctgtgagaaaaaatattttccgctttgatgagtcaacaacaggatttaacttcagttttaaatctgctttgagtctatctaagtctcctgccaagttgaatcagagtgggacttcagttggcactgatgaagaatctgatgttactcaagaagaagagagagatggacagtactttgaacctgttgttcctttacctgatctagttgaagtatccagtggtgaggaaaatgaacaagttgtttttagtcacagggcagaactctacagatatgataaagatgttggtcaatggaaagaaaggggcattggtgatataaagattttacagaattatgataataagcaagttcgtatagtgatgagaagggaccaagtattaaaactttgtgccaatcacagaataactccagacatgagtttgcaaaatatgaaagggacagaaagagtatgggtgtggactgcatgtgattttgcagatggagaaagaaaagtagagcatttagctgttcgttttaaactacaggatgttgcagactcatttaagaaaatttttgatgaagcaaaaacagcccaggaaaaagattctttgataacacctcatgtttctcggtcaagcactcccagagagtcaccatgtggcaaaattgctgtagctgtattagaagaaaccacaagagagaggacagatgttattcagggtgatgatgtagcagatgcagcttcagaagttgaagtgtctagcacatctgaaacaacaacaaaagcagtggtttctcctccaaagtttgtatttggttcagagtctgttaaaagaatttttagtagtgaaaaatcaaacccatttgcatttggcaacagttctgccactgggtctttgtttggatttagttttaatgcacctttgaaaagtaacgatagtgaaactagttcagtagcccagagtggatctgaaagcaaagtggaacctaaaaaatgtgaactgtcaaagaactctgatatcgaacagtcttcagatagcaaagtcaaaaatctctctgcttcctttccaatggaagaatcttcaatcaactacacatttaaaacaccagaaaaggagcctccattatggcatgctgaatttaccaaagaagaattggttcagaagctcagttccaccacaaaaagtgcagatcagttaaacggcctgcttcgggaaacagaggcaaccagtgcagtccttatggagcaaattaagcttctcaaaagtgaaataagaagattggaaaggaatcaagaggagtctgcagctaacgtggaacacttgaagaacgtcttgctgcagttcattttcttgaagccaggtagtgagagagagagccttcttcctgttataaatacgatgttgcagctcagccctgaagaaaagggaaaacttgctgcggttgctcaaggtcttcaagaaacctccatacccaagaaaaaatagaaagcaaccatgttctactatggtgccaaaaatagttgaacatcgacatcaaaaagattctttctgtctgcttattcacatattctggtttgaattaaaagtgatgaaattatcctaaatacagttggccctctgtatccatgggttccacatccacaaattcaaccaactgtggatggaaaagacttgaaaaagatgagagaaaataacaatatgacaataaaacataatacaaataaaaacaatacagtataacaacgattacatagcatttacattatattagggattgcacaagagaaggtatgtaggttatatgcaaatactgcaccattttacataagggacttgagaagcatggattttggtagccacaggggtcctggaaccaatccctcacagacacagacggacactttacagtagatgaacacaaagatgaaaggaaaagtctgacctaggtttgcggggagaagtggaactccatttttgacaggtgatgccattttttgttttggacatcgtccctctgtagttctttccattcccagtcttgcactctgaaagatacactgaaggaaagtccacacagtggtcaaagtctttcacaagacaccacgtgaaggtctgcacagcacagtcacattgagaaaaagatctcatgcaccagaccccctgtttctgctttctaaaagatcatcttttgcacctgcaaaaaggctgcagtaaactgggccattccatactttgattcatgtattcaaatgctacttatgagctctctgtgtattgagccccaccaggatgctggggacacacggggcacagtgcagccagaggcttggccatcatagagctcacattctagtggaatcagacaggggggttacaggaaatattcaagtaaacaatataaaatgagatcacttgatgatacatggatacatgttacatacatgatgagacagagtaagagaatggggaaagggtttttagatgggggaatggcaggcttttccgaggctgaaagagatccaacccacttctatttcttcaggctcccagtgatatgaaaaagtgccaaacaggactataaaattgtggtctactgtaaatggtttgcagtaaaagttctcaaccagcttccactcaaccaactcaccagttagacaatgggccctctcctgtgtttaaaacagtccggtgcccacctgggtccacatgcagctggcaggtgtttgctagtgtgcccacccatgtctgttccccccacgtgagttatgtgcttacaacgagtcgtttctttgcattttccaactttcttacatttatatttaattaaagatgatctaaactgagaaatgaatgtgaaaagaaacaaagctcttttttgtttggtttttaactaaattaaatgtttttaacaagttgaaa

SEQ ID NO: 173913 - DNA, 6931 bp, Homo sapiens
  Payload ID: 14146
  Gene Symbol: RGPD2
  Gene Name: RANBP2-like and GRIP domain containing 2
  Uniprot ID: P0DJD1
  ENST ID: ENST00000398146
  CDS Start-End: 224-5494
caagacaccctcagagcacagggtgctgccaagagcccggccgagtgcagctcgagcgccgacgtcgccaaggatacacagtgctgacgcagtacacaagtgcgtcacagtggtcctccgccggctacgtcagtggctttcaggcgctttcctgttggaattggcgactgctgcggggctgagcgctggtttcacgcgtctcgggagccaggttggcggtgcgatgaggcgcagcaaagcctacggggagcggtacctcgcctcggtgcagggctccgccccgtcgcctggaaagaagttgagaggattctattttgcaaagctgtattatgaagctaaagaatatgatcttgctaaaaaatacgtatgtacttaccttagtgtgcaagagagggatcccagagctcacagatttctgggtcttctttatgaattggaagaaaacacagagaaagccgttgaatgttacaggcgttcactggaattaaacccaccacaaaaagatcttgtgttgaagattgcagaattgctttgtaaaaatgatgttactgatggaagagcaaaatactgggttgaaagggcagcgaaacttttcccaggaagtcctgcaatttataaactaaaggaacatcttctagattgtgaaggtgaagatggatggaataaactttttgactggattcagtcagaactttatgtaagacctgatgacgtccatatgaacatccggctagtggagttgtatcgctcaaataaaagattgaaggatgctgtggcccgctgccatgaggcagagaggaacatagctttgcgttcaagtttagagtggaattcgtgtgttgtacagacccttaaggaatatctggagtctttacagtgtttggagtctgataaaagtgactggcgagcaaccaatacagacttactgctggcctatgctaatcttatgcttcttacgctttccactagagatgtgcaggaaagtagagaattactggaaagttttgatagtgctcttcagtctgcaaaatcttctttgggtggaaatgatgaactgtcagctactttcttagaaatgaaaggacatttctacatgcatgctggttctctgctcttgaagatgggtcagcatggtaataatgttcaatggcaagctctttctgagctggctgcattgtgctatgtcatagcatttcaggttccaagaccaaagattaaattaataaaaggtgaagctggacaaaatctgctggaaatgatggcctgtgaccgactgagccaatcagggcatatgttgctaaacttaagtcgtggcaagcaagattttttaaaagaggttgttgaaacttttgccaacaaaagcgggcagtctgtgttatataatgctctgttttctagtcagtcatctaaggatacatcttttcttggtagcgatgatattggaaacattgatgtacaagaaccagagcttgaagatttggctagatacgatgttggtgctattcaagcacataatggtagtcttcagcaccttacttggcttggcttacagtggaattcattgcctgctttacctggaatccgaaaatggctaaaacagcttttccatcatttgccccaggaaacctcaaggcttgaaacaaatgcacctgaatcaatatgtattttagatcttgaagtatttctccttggagtagtatataccagccacttacaattaaaggagaaatgtaattctcaccacagctcctatcagccgttatgcctgccccttcctgtgtgtaaacggctttgtacagagagacaaaaatcttggtgggatgcggtttgtactctgattcacagaaaagcagtacctggaaactcagcagaattgagacttgtagttcagcatgaaataaacactctaagagcccaggaaaaacatggccttcaacctgctctgcttgtacattgggcaaaatgccttcagaaaatgggcaggggtcttaattcttcttatgatcaacaagaatacatagggagaagtgttcattattggaagaaagttttgccattgttgaagataataaagaagaacagtattcctgaacctattgatcctctgtttaaacattttcatagtgtagacattcaggcatcagaaattgttgagtatgaagaagatgcacacataacttttgctatattggatgcagtacatggaaatatagaagatgctgtgactgcttttgaatctataaaaagtgttgtttcttattggaatcttgcactgatttttcacaggaaagcagaagacattgaaaatgatgccgtttttcctgaagaacaagaagaatgcaaaaattatctgagaaagaccagggactacctaataaagattatagatgacagtgattcaaatctttcagtggtcaagaaattgcctgtgcccctggagtctgtaaaagagatgcttaagtcagtcatgcaggaactcgaagactatagtgaaggaggtcctctctataaaaatggttctttgcgaaatgcagattcagaaataaaacattctacaccatctcctaccaaatattcactatcaccaagtaaaagttacaagtattctcccaaaacaccacctcgatgggcagaagatcagaattctttacggaaaatgatttgccaagaagtaaaggccattacgaaactaaatagcagtaagtcagcatcccgtcatcgttggcccacagagaattatggaccagactcggtgcctgatggatatcaggggtcacagacatttcatggggctccactaacagttgcaactactggcccttcagtatattatagtcagtcaccagcatataattcccagtatcttctcagaccagcagctaatgttactcccacaaagggttcttctaatacagaatttaagtcaaccaaagaaggattttccatcgctgtgtctgctgatggatttaaatttggcatttcggaaccaggaaatcaagaaaagaaaagtgaaaagcctcttgaaaatgatactggcttccaggctcaggatattagtggccagaagaatggccgtggtgtgatttttggccaaacaagtagcacttttacatttgcagatgttgcaaaatcaacttcaggagaaggatttcagtttggcaaaaaagaccccaatttcaagggattttcaggtgctggagaaaaattattctcatcacaatgcggtaaaatggccaataaagcaaacacttccggtgactttgagaaagatgatgatgcctgtaagactgaggacagcgatgacatccattttgaaccagtagttcaaatgcctgaaaaagtagaacttgtaacaggagaagaaggtgaaaaagttctgtattcacagggggtaaaactatttagatttgatgctgagataagtcagtggaaagaaaggggcttggggaacttaaaaattctcaaaaatgaggtcaatggcaaaccaagaatgctgatgcgaagagaccaagtactaaaagtgtgtgctaatcattggataacaactacaatgaacctgaagcccctctctggatcagatagagcatggatgtggttagccagtgatttctctgatggtgatgccaaactagagcggttggcagcacaatttaaaacaccagagctggctgaagaattcaagcagaaatttgaggaatgccagcggcttctgttagacataccacttcaaactccccataaacttgtagatactggcagagctgccaagctaatacagagagctgaagaaatgaagagtggactgaaagatttcaaaacgtttttgacaaatgatcaaacaaaagtcactgaggaagaaaataagggttcaggtacaggtgcagccggtgcctcagacacaacaataaaacccaatcctgaaaacactgggcccacattagaatgggataactatgatttaagggaagatgctttggatgataatgttagtagtagctcagtacatgattctccgttggcaagtagccctgtgagaaaaaatattttccgctttgatgagtcaacaacaggatttaacttcagttttaaatctgctttgagtctatctaagtctcctgccaagttgaatcagagtgggacttcagttggcactgatgaagaatctgatgttactcaagaagaagagagagatggacagtactttgaacctgttgttcctttacctgatctagttgaagtatccagtggtgaggaaaatgaacaagttgtttttagtcacatggcagaactctacagatatgataaagatgttggtcaatggaaagaaaggggcattggtgatataaagattttacagaattatgataataagcaagttcgtatagtgatgagaagggaccaagtattaaaactttgtgccaatcacagaataactccagacatgagtttgcaaaatatgaaagggacagaaagagtatgggtgtggactgcatgtgattttgcagatggagaaagaaaagtagagcatttagctgttcgttttaaactacaggatgttgcagactcatttaagaaaatttttgatgaagcaaaaacagcccaggaaaaagattctttgataacacctcatgtttctcggtcaagcactcccagagagtcaccatgtggcaaaattgctgtagctgtattagaagaaaccacaagagagaggacagatgttattcagggtgatgatgtagcagatgcagcttcagaagttgaagtgtctagcacatctgaaacaacaacaaaagcagtggtttctcctccaaagtttgtatttggttcagagtctgttaaaagaatttttagtagtgaaaaatcaaacccatttgcatttggcaacagttctgccactgggtctttgtttggatttagttttaatgcacctttgaaaagtaacgatagtgaaactagttcagtagcccagagtggatctgaaagcaaagtggaacctaaaaaatgtgaactgtcaaagaactctgatatcgaacagtcttcagatagcaaagtcaaaaatctctctgcttcctttccaatggaagaatcttcaatcaactacacatttaaaacaccagaaaaggagcctccattatggcatgctgaatttaccaaagaagaattggttcagaagctcagttccaccacaaaaagtgcagatcagttaaacggcctgcttcgggaaacagaggcaaccagtgcagtccttatggagcaaattaagcttctcaaaagtgaaataagaagattggaaaggaatcaagaggagtctgcagctaacgtggaacacttgaagaacgtcttgctgcagttcattttcttgaagccaggtagtgagagagagagccttcttcctgttataaatacgatgttgcagctcagccctgaagaaaagggaaaacttgctgcggttgctcaaggtcttcaagaaacctccatacccaagaaaaaatagaaagcaaccatgttctactatggtgccaaaaatagttgaacatcgacatcaaaaagattctttctgtctgcttattcacatattctggtttgaattaaaagtgatgaaattatcctaaatacagttggccctctgtatccatgggttccacatccacaaattcaaccaactgtggatggaaaagacttgaaaaagatgagagaaaataacaatatgacaataaaacataatacaaataaaaacaatacagtataacaacgattacatagcatttacattatattagggattgcacaagagaaggtatgtaggttatatgcaaatactgcaccattttacataagggacttgagaagcatggattttggtagccacaggggtcctggaaccaatccctcacagacacagacggacactttacagtagatgaacacaaagatgaaaggaaaagtctgacctaggtctgcggggagaagtggaactccatttttgacaggtgatgccattttttgttttggacatcgtccctctgtagttctttccattcccagtcttgcactctgaaagatacactgaaggaaagtccacacagtggtcaaagtctttcacaagacaccacgtgaaggtctgcacagcacagtcacattgagaaaaagatctcatgcaccagaccccctgtttctgctttctaaaagatcatcttttgcacctgcaaaaaggctgcagtaaactgggccattccatactttgattcatgtattcaaatgctacttatgagctctctgtgtattgagccccaccaggatgctggggacacacggggcacagtgcagccagaggcttggccatcatagagctcacattctagtggaatcagacaggggggttacaggaaatattcaagtaaacaatataaaatgagatcacttaatgatgatacatggatacatgttacatacatgatgagacagagtaagagaatggggaaagggtttttagatgggggaatggcaggcttttccgaggctgaaagagatccaacccacttctatttcttcaggctcccagtgatatgaaaaagtgccaaacaggactataaaattgtggtctactgtaaatggtttgcagtaaaagttctcaaccagcttccactcaaccaactcaccagttagacaatgggccctctcctgtgtttaaaacagtccggtgcccacctgggtccacatgcagctggcaggtgtttgctagtgtgcccacccatgtctgttccccccacgtgagttatgtgcttacaacgagtcgtttctttgcattttccaactttcttacatttatatttaattaaagatgatctaaactgagaaatgaatgtgaaaagaaacaaagctcttttttgtttggtttttaactaaattaaatgtttttaacaagttgaaa

SEQ ID NO: 173914 - DNA, 5510 bp, Homo sapiens
  Payload ID: 14147
  Gene Symbol: RGPD3
  Gene Name: RANBP2-like and GRIP domain containing 3
  ENST ID: ENST00000304514
  CDS Start-End: 39-5321
ctggtctcacgcatctcgggagccaggttggtggcgcgatgagttgcagcaaggcctacggggagcggtacgtcgcctcggtgcagggctccgccccgtcgcctcgaaagaagtcaacgagaggattctattttgcaaagctgtattatgaagctaaagaatatgatcttgctaaaaaatacatatgtacttacattaatgtgcgagagatggatcccagagctcacagatttctgggtcttctttatgaattggaagaaaacacagagaaagccgttgaatgttacaggcgttcagtggaattaaacccaacacaaaaagatcttgtgttgaagattgcagaattgctttgtaaaaatgatgttactgatggaagagcagaatactgggtggaaagagcagcaaaacttttcccaggaagtcctgcaatttataaactaaaggaacagcttctagattgtgaaggtgaagatggatggaataaactttttgacttgattcagtcagaactttatgtaagacctgatgacgtccatgtgaacatccggctagtggagttgtatcgctcaactaaaagattgaaggatgctgtggcccgctgccatgaggcagagaggaacatagctttgcgttcaagtttagagtggaattcgtgtgttgtacagacccttaaggaatatctggagtctttacagtgtttggagtctgataaaagtgactggcgagcaaccaatacagacttactgctggcctatgctaatcttatgcttcttacgctttccactagagatgtgcaggaaagtagagaattactggaaagttttgatagtgctcttcagtctgcgaaatcttctttgggtggaaatgatgaactgtcagctactttcttagaaatgaaaggacatttctacatgcatgctggttctctgctcttgaagatgggtcagcatggtaataatgttcaatggcgagctctttctgagctggctgcattgtgctatctcatagcatttcaggttccaagaccaaagattaaattaataaaaggtgaagctggacaaaatctgctggaaatgatggcctgtgaccgactgagccaatcagggcacatgttgctaaacttaagtcgtggcaagcaagattttttaaaagtggttgttgaaacttttgccaacaaaagcgggcagtctgcattatatgatgctctgttttctagtcagtcacctaaggatacatcttttcttggtagcgatgatattggaaacattgatgtacaagaaccagagcttgaagatttggctagatacgatgttggtgctattcgagcacataatggtagtcttcagcaccttacttggcttggcttacagtggaattcattgcctgctttacctggaatccgaaaatggctaaaacagcttttccatcatttgccccaggaaacctcaaggcttgaaacaaatgcacctgaatcaatatgtattttagatcttgaagtatttctccttggagtagtatataccagccacttacaattaaaggagaaatgtaattctcaccacagctcctatcagccgttatgcctgccccttcctgtgtgtaaacagctttgtacagaaagacaaaaatcttggtgggatgcggtttgtactctgattcacagaaaagcagtacctggaaactcagcaaaattgagacttctagttcagcatgaaataaacactctaagagcccaggaaaaacatggccttcaacctgctctgcttgtacattgggcaaaatgccttcagaaaatgggcagcggtcttaattctttttatgatcaacgagaatacatagggagaagtgttcattattggaagaaagttttgccattgttgaagataataaaaaagaagaacagtattcctgaacctattgatcctctgtttaaacattttcatagtgtagacattcaggcatcagaaattgttgaatatgaagaagacgcacacgtaacttttgctatattggatgcagtaaatggaaatatagaagatgctatgactgcttttgaatctataaaaagtgttgtttcttattggaatcttgcactgatttttcacaggaaggcagaagacattgcaaatgatgccctttctcctgaagaacaagaagaatgcaaaaattatctgagaaagaccaggggctacctaataaagattttagatgacagtgattcaaatctttcagtggtcaagaaattgcctgtgcccctggagtctgtaaaagagatgcttaagtcagtcatgcaggaactcgaaaactatagtgaaggaggtcctctctataaaaatggttctttgcgaaatgcggattcagaaataaaacattctacaccatctcctaccaaatattcactatcaccaagtaaaagttacaagtattctcccaaaacaccacctcgatgggcagaagatcagaattctttactgaaaatgattcgccaagaagtaaaggccattaagaaactaaatagcagtaagtcagcatcccatcatcgttggcccacagagaattatggaccagactcggtgcctgatggatatcaggggtcacagacatttcatggggctccactaacagttgcaactactggcccttcagtatattatagtcagtcaccagcatataattcccagtatcttctcagaccagcagctaatgttactcccacaaagggttcttctaatacagaatttaagtcaaccaaagaaggattttccatccctgtgtctgctgatggatttaaatttggcatttcggaaccaggaaatcaagaaaagaaaagtgaaaagcctcttgaaaatgatactggcttacaggctcaggatattagtggccggaagaagggccgtggtgtgatttttggccaaacaagtagcacttttacatttgcagatgttgcaaaatcaacttcaggagaaggatttcagtttggcaaaaaagacctcaatttcaagggattttcaggtgctggagaaaaattattctcatcacaatacggtaaaatggccaataaagcaaacacttccggtgactttgagaaagatgatgatgcctataagactgaggacagcgatgacatccattttgaaccagtagttcaaatgcctgaaaaagtagaacttgtaacaggagaagaaggtgaaaaagttctgtattcacagggggtaaaactatttagatttgatgctgaggtaagtcagtggaaagaaaggggcttggggaacttaaaaattctcaaaaacgaggtcaatggcaaagtaagaatgctgatgcaaagagaacaagtactaaaagtgtgtgctaatcattggataacgactacaatgaacctgaagcccctctctggatcagatagagcatggatgtggtcagccagtgatttctctgatggtgatgccaaactagagcgattggcagcaaaatttaaaacaccagagctggctgaagaattcaagcagaaatttgaggaatgccagcggcttctgttagacataccacttcaaactccccataaacttgtagatactggcagagctgccaagttaatacagagagctgaagaaatgaagagtggactgaaagatttcaaaacatttttgacaaatgatcaaacaaaagtcgctgaggaagaaaataagggttcaggtacaggtgcggccggtgcctcagacacaacaataaaacccaatgctgaaaacactgggcccacattagaatgggataactatgatttaagggaagatgctttggatgatagtgtcagtagtagctcagtacatgcttctccattggcaagtagccctgtgagaaaaaatcttttccactttgatgagtcaacaacaggatctaacttcagttttaaatctgctttgagtctatctaagtctcctgccaagttgaatcagagtgggacttcagttggcactgatgaagaatctgatgttactcaagaagaagagagagatggacagtactttgaacctgttgttcctttacctgatctagttgaagtatccagtggtgaggaaaatgaacaagttgtttttagtcacagggcagaattctacagatatgataaagatgttggtcaatggaaagaaaggggcattggtgatataaagattttacagaattatgataataagcacgttcgtatactgatgagaagggaccaagtattaaaactttgtgccaatcacagaataactccagacatgagtttgcaaaatatgaaagggacagaaagagtatgggtgtggactgcatgtgattttgcagatggagaaagaaaagtagagcatttagctgttcgttttaaactacaggatgttgcagactcgtttaagaaaatttttgatgaagcaaaaacagcccaggaaaaagattctttgataacacctcatgtttctcggtcaagcactcccagagagtcaccatgtggcaaaattgctgtagctgtattagaagaaaccacaagagagaggacagatgttattcagggtgatgatgtagcagatgcagcttcagaagttgaagtgtctagcacatctgaaacaacaacaaaagcagtggtttctcctccaaagtttgtatttggttcagagtctgttaaaagaatttttagtagtgaaaaatcaaaaccatttgcatttggcaacagttctgccactgggtctttgtttggatttagttttaatgcacctttgaaaagtaacaatagtgaaactagttcagtagcccagagtggatctgaaagcaaagtggaacctaaaaaatgtgaactgtcaaagaactctgatatcgaacagtcttcagatagcaaagtcaaaaatctctctgcttcctttccaacggaagaatcttcaatcaactacacatttaaaacaccagaaaaggagcctccattatggtatgctgaatttactaaagaagaattggttcagaagctcagttccaccacaaaaagtgcagatcacttaaacggcctgcttcgggaaatagaggcaaccaatgcagtccttatggagcaaattaagcttctcaaaagtgaaataagaagattggaaaggaatcaagagcaagaggtgtctgcagctaacgtggaacacttgaagaacgtcttgctgcagttcattttcttgaagccaggtagtgaaagagagagacttcttcctgttataaatacgatgttgcagctcagccttgaagaaaagggaaaacttgctgcggttgctcaaggtcttcaagaaacctccatacccaagaaaaaatagaaagcaacgatgttctactatggtgccaaaaatagttgaacatcgacatcaaaaagattctttctgtctgcttattcacatattctggtttgaattaaaagtgatgaaattatcctaaatacagttggccctctgtatccatgggttccacatccacaaattcaaccaactgtggatggaaaagacttg

SEQ ID NO: 173915 - DNA, 5594 bp, Homo sapiens
  Payload ID: 14147
  Gene Symbol: RGPD3
  Gene Name: RANBP2-like and GRIP domain containing 3
  Uniprot ID: A6NKT7
  ENST ID: ENST00000409886
  CDS Start-End: 89-5365
gctttcaggcgctttcctcttggaattggcgactgctgcggggctgagcgctggtctcacgcatctcgggagccaggttggtggcgcgatgagttgcagcaaggcctacggggagcggtacgtcgcctcggtgcagggctccgccccgtcgcctcgaaagaagtcaacgagaggattctattttgcaaagctgtattatgaagctaaagaatatgatcttgctaaaaaatacatatgtacttacattaatgtgcgagagatggatcccagagctcacagatttctgggtcttctttatgaattggaagaaaacacagagaaagccgttgaatgttacaggcgttcagtggaattaaacccaacacaaaaagatcttgtgttgaagattgcagaattgctttgtaaaaatgatgttactgatggaagagcagaatactgggtggaaagagcagcaaaacttttcccaggaagtcctgcaatttataaactaaaggaacagcttctagattgtgaaggtgaagatggatggaataaactttttgacttgattcagtcagaactttatgtaagacctgatgacgtccatgtgaacatccggctagtggagttgtatcgctcaactaaaagattgaaggatgctgtggcccgctgccatgaggcagagaggaacatagctttgcgttcaagtttagagtggaattcgtgtgttgtacagacccttaaggaatatctggagtctttacagtgtttggagtctgataaaagtgactggcgagcaaccaatacagacttactgctggcctatgctaatcttatgcttcttacgctttccactagagatgtgcaggaaagtagagaattactggaaagttttgatagtgctcttcagtctgcgaaatcttctttgggtggaaatgatgaactgtcagctactttcttagaaatgaaaggacatttctacatgcatgctggttctctgctcttgaagatgggtcagcatggtaataatgttcaatggcgagctctttctgagctggctgcattgtgctatctcatagcatttcaggttccaagaccaaagattaaattaataaaaggtgaagctggacaaaatctgctggaaatgatggcctgtgaccgactgagccaatcagggcacatgttgctaaacttaagtcgtggcaagcaagattttttaaaagtggttgttgaaacttttgccaacaaaagcgggcagtctgcattatatgatgctctgttttctagtcagtcacctaaggatacatcttttcttggtagcgatgatattggaaacattgatgtacaagaaccagagcttgaagatttggctagatacgatgttggtgctattcgagcacataatggtagtcttcagcaccttacttggcttggcttacagtggaattcattgcctgctttacctggaatccgaaaatggctaaaacagcttttccatcatttgccccaggaaacctcaaggcttgaaacaaatgcacctgaatcaatatgtattttagatcttgaagtatttctccttggagtagtatataccagccacttacaattaaaggagaaatgtaattctcaccacagctcctatcagccgttatgcctgccccttcctgtgtgtaaacagctttgtacagaaagacaaaaatcttggtgggatgcggtttgtactctgattcacagaaaagcagtacctggaaactcagcaaaattgagacttctagttcagcatgaaataaacactctaagagcccaggaaaaacatggccttcaacctgctctgcttgtacattgggcaaaatgccttcagaaaatgggcagcggtcttaattctttttatgatcaacgagaatacatagggagaagtgttcattattggaagaaagttttgccattgttgaagataataaaaaagaagaacagtattcctgaacctattgatcctctgtttaaacattttcatagtgtagacattcaggcatcagaaattgttgaatatgaagaagacgcacacgtaacttttgctatattggatgcagtaaatggaaatatagaagatgctatgactgcttttgaatctataaaaagtgttgtttcttattggaatcttgcactgatttttcacaggaaggcagaagacattgcaaatgatgccctttctcctgaagaacaagaagaatgcaaaaattatctgagaaagaccaggggctacctaataaagattttagatgacagtgattcaaatctttcagtggtcaagaaattgcctgtgcccctggagtctgtaaaagagatgcttaagtcagtcatgcaggaactcgaaaactatagtgaaggaggtcctctctataaaaatggttctttgcgaaatgcggattcagaaataaaacattctacaccatctcctaccaaatattcactatcaccaagtaaaagttacaagtattctcccaaaacaccacctcgatgggcagaagatcagaattctttactgaaaatgattcgccaagaagtaaaggccattaaggaagaaatgcaggagttgaaactaaatagcagtaagtcagcatcccatcatcgttggcccacagagaattatggaccagactcggtgcctgatggatatcaggggtcacagacatttcatggggctccactaacagttgcaactactggcccttcagtatattatagtcagtcaccagcatataattcccagtatcttctcagaccagcagctaatgttactcccacaaagggttcttctaatacagaatttaagtcaaccaaagaaggattttccatccctgtgtctgctgatggatttaaatttggcatttcggaaccaggaaatcaagaaaagaaaagtgaaaagcctcttgaaaatgatactggcttacaggctcaggatattagtggccggaagaagggccgtggtgtgatttttggccaaacaagtagcacttttacatttgcagatgttgcaaaatcaacttcaggagaaggatttcagtttggcaaaaaagacctcaatttcaagggattttcaggtgctggagaaaaattattctcatcacaatacggtaaaatggccaataaagcaaacacttccggtgactttgagaaagatgatgatgcctataagactgaggacagcgatgacatccattttgaaccagtagttcaaatgcctgaaaaagtagaacttgtaacaggagaagaaggtgaaaaagttctgtattcacagggggtaaaactatttagatttgatgctgaggtaagtcagtggaaagaaaggggcttggggaacttaaaaattctcaaaaacgaggtcaatggcaaagtaagaatgctgatgcaaagagaacaagtactaaaagtgtgtgctaatcattggataacgactacaatgaacctgaagcccctctctggatcagatagagcatggatgtggtcagccagtgatttctctgatggtgatgccaaactagagcgattggcagcaaaatttaaaacaccagagctggctgaagaattcaagcagaaatttgaggaatgccagcggcttctgttagacataccacttcaaactccccataaacttgtagatactggcagagctgccaagttaatacagagagctgaagaaatgaagagtggactgaaagatttcaaaacatttttgacaaatgatcaaacaaaagtcgctgaggaagaaaataagggttcaggtacaggtgcggccggtgcctcagacacaacaataaaacccaatgctgaaaacactgggcccacattagaatgggataactatgatttaagggaagatgctttggatgatagtgtcagtagtagctcagtacatgcttctccattggcaagtagccctgtgagaaaaaatcttttccactttgatgagtcaacaacaggatctaacttcagttttaaatctgctttgagtctatctaagtctcctgccaagttgaatcagagtgggacttcagttggcactgatgaagaatctgatgttactcaagaagaagagagagatggacagtactttgaacctgttgttcctttacctgatctagttgaagtatccagtggtgaggaaaatgaacaagttgtttttagtcacagggcagaattctacagatatgataaagatgttggtcaatggaaagaaaggggcattggtgatataaagattttacagaattatgataataagcacgttcgtatactgatgagaagggaccaagtattaaaactttgtgccaatcacagaataactccagacatgagtttgcaaaatatgaaagggacagaaagagtatgggtgtggactgcatgtgattttgcagatggagaaagaaaagtagagcatttagctgttcgttttaaactacaggatgttgcagactcgtttaagaaaatttttgatgaagcaaaaacagcccaggaaaaagattctttgataacacctcatgtttctcggtcaagcactcccagagagtcaccatgtggcaaaattgctgtagctgtattagaagaaaccacaagagagaggacagatgttattcagggtgatgatgtagcagatgcagcttcagaagttgaagtgtctagcacatctgaaacaacaacaaaagcagtggtttctcctccaaagtttgtatttggttcagagtctgttaaaagaatttttagtagtgaaaaatcaaaaccatttgcatttggcaacagttctgccactgggtctttgtttggatttagttttaatgcacctttgaaaagtaacaatagtgaaactagttcagtagcccagagtggatctgaaagcaaagtggaacctaaaaaatgtgaactgtcaaagaactctgatatcgaacagtcttcagatagcaaagtcaaaaatctctctgcttcctttccaacggaagaatcttcaatcaactacacatttaaaacaccagaaaaggagcctccattatggtatgctgaatttactaaagaagaattggttcagaagctcagttccaccacaaaaagtgcagatcacttaaacggcctgcttcgggaaatagaggcaaccaatgcagtccttatggagcaaattaagcttctcaaaagtgaaataagaagattggaaaggaatcaagagcaagaggtgtctgcagctaacgtggaacacttgaagaacgtcttgctgcagttcattttcttgaagccaggtagtgaaagagagagacttcttcctgttataaatacgatgttgcagctcagccttgaagaaaagggaaaacttgctgcggttgctcaaggtgaggaataaaatgcttcccgttcttctggatgggcatcctatcttcgtagttggtttggacttcgataggttgatggaaggaatgtttttattaaccaaataaaatctatttacaaaaatggttcatgtgtattaccatcattcttttgtcaaaaagtgtgtatatgtttgcatttacatatatttgtacatctatatgacagatgtattttaaaagtttcaacttgaagtaaaagta

SEQ ID NO: 173916 - DNA, 5464 bp, Homo sapiens
  Payload ID: 14148
  Gene Symbol: RGPD4
  Gene Name: RANBP2-like and GRIP domain containing 4
  Uniprot ID: Q7Z3J3
  ENST ID: ENST00000408999
  CDS Start-End: 78-5354
ctttcctgttggaattggcgactgctgcggggctgagcgctggtttcacgcgtctcgggagccaggttggtggcgcgatgagttgcagcaaggcctacggggagcggtacgtcgcctccgtgcagggctccgccccgtcgcctcgaaagaagtcaacgagaggattctattttgcaaagctgtattatgaagctaaagaatatgatcttgctaaaaaatacatatgtacttacattaatgtgcgagagatggatcccagagctcacagatttctgggtcttctttatgaattggaagaaaacacagagaaagccgttgaatgttacaggcgttcagtggaattaaacccaacacaaaaagatctggtgttgaagattgcagaattgctttgtaaaaatgatgttactgatggaagagcaaaatactgggtggaaagagcagcaaaacttttcccaggaagtcctgcaatttataaactaaaggaacagcttctagattgtgaaggtgaagatggatggaataaactttttgacttgattcagtcagaactttatgtaagacctgatgacgtccatgtgaacatccggctagtggagttgtatcgctcaactaaaagattgaaggatgctgtggcccgctgccatgaggcagagaggaacatagctttgcgttcaagtttagagtggaattcgtgtgttgtacagacccttaaggaatatctggagtctttacagtgtttggagtctgataaaagtgactggcgagcaaccaatacagacttactgctggcctatgctaatcttatgcttcttacgctttccactagagatgtgcaggaaagtagagaattactggaaagttttgatagtgctcttcagtctgcgaaatcttctttgggtggaaatgatgaactgtcagctactttcttagaaatgaaaggacatttctacatgcatgctggttctctgctcttgaagatgggtcagcatggtaataatgttcaatggcgagctctttctgagctggctgcattgtgctatctcatagcatttcaggttccaagaccaaagattaaattaataaaaggtgaagctggacaaaatctgctggaaatgatggcctgtgaccgactgagccaatcagggcacatgttgctaaacttaagtcgtggcaagcaagattttttaaaagtggttgttgaaacttttgccaacaaaagcgggcagtctgcattatatgatgctctgttttctagtcagtcacctaaggatacatcttttcttggtagcgatgatattggaaacattgatgtacaagaaccagagcttgaagatttggctagatacgatgttggtgctattcgagcacataatggtagtcttcagcaccttacttggcttggcttacagtggaattcattgcctgctttacctggaatccgaaaatggctaaaacagcttttccatcatttgccccaggaaacctcaaggcttgaaacaaatgcacctgaatcaatatgtattttagatcttgaagtatttctccttggagtagtatataccagccacttacaattaaaggagaaatgtaattctcaccacagctcctatcagccgttatgcctgccccttcctgtatgtaaacagctttgtacagaaagacaaaaatcttggtgggatgcggtttgtactctgattcacagaaaagcagtacctggaaactcagcaaaattgagacttttagttcagcatgaaataaacactctaagagcccaggaaaaacatggccttcaacctgctctgcttgtacattgggcaaaatgccttcagaaaatgggcagtggtcttaattctttttatgatcaacgagaatacatagggagaagtgttcattattggaagaaagttttgccattgttgaagataataaaaaagaagaacagtattcctgaacctattgatcctctgtttaaacattttcatagtgtagacattcaggcatcagaaattgttgaatatgaagaagacgcacacgtaacttttgctatattggatgcagtaaatggaaatatagaagatgctatgactgcttttgaatctataaaaagtgttgtttcttattggaatcttgcactgatttttcacaggaaggcagaagacattgcaaatgatgccctttctcctgaagaacaagaagaatgcaaaaattatctgagaaagaccaggggctacctaataaagattttagatgacagtgattcaaatctttcagtggtcaagaaattgcctgtgcccctggagtctgtaaaagagatgcttaagtcagtcatgcaggaactcgaaaactatagtgaaggagatcctctctataaaaatggttctttgcgaaatgcggattcagaaataaaacattctacaccatctcctaccaaatattcactatcaccaagtaaaagttacaagtattctcccaaaacaccacctcgatgggcagaagatcagaattctttactgaaaatgattcgccaagaagtaaaggccattaaggaagaaatgcaggagttgaaactaaatagcagtaagtcagcatcccatcatcgttggcccacagagaattatggaccagactcggtgcctgatggatatcaggggtcacagacatttcatggggctccactaacagttgcaactactggcccttcagtatattatagtcagtcaccagcatataattcccagtatcttctcagaccagcagctaatgttactcccacaaagggttcttctaatacagaatttaagtcaaccaaagaaggattttccatccctgtgtctgctgatggatttaaatttggcatttcggaaccaggaaatcaagaaaaggaaagtgaaaagcctcttgaaaatgatactggcttccaggctcaggatattagtggccagaagaatggccgtggtgtgatttttggccaaacaagtagcacttttacatttgcagatgttgcaaaatcaacttcaggagaaggatttcagtttggcaaaaaagaccccaatttcaagggattttcaggtgctggagaaaaattattctcatcacaatgcggtaaaatggccaataaagcaaacacttccggtgactttgagaaagatgatgatgcctataagactgaggacagcgatgacatccattttgaaccagtagttcaaatgcctgaaaaagtagaacttgtaataggagaagaaggtgaaaaagttctgtattcacagggggtaaaactatttagatttgatgctgaggtaaggcagtggaaagaaaggggcttggggaacttaaaaattctcaaaaacgaggtcaatggcaaaccaagaatgctgatgcgaagagaacaagtactaaaagtgtgtgctaatcattggataacgactacaatgaacctgaagcccctgtctggatcagatagagcatggatgtggtcagccagtgatttctctgatggtgatgccaaactagagcggttagcagcaaaatttaaaacaccagagctggctgaagaattcaagcagaaatttgaggaatgccagcagcttctgttagacataccacttcaaactccccataaacttgtagatactggcagagctgccaagttaatacagagagctgaagaaatgaagagtggactgaaagatttcaaaacatttttgacaaatgatcaaacaaaagtcactgaggaagaaaataagggttcaggtacaggtgcggccggtgcctcagacacaacaataaaacccaatcctgaaaacactgggcccacattagaatgggataactgtgatttaagggaagatgctttggatgatagtgtcagtagtagctcagtacatgcttctccattggcaagtagccctgtgagaaaaaatcttttccattttggtgagtcaacaacaggatctaacttcagttttaaatctgctttgagtccatctaagtctcctgccaagttgaatcagagtgggacttcagttggcactgatgaagaatctgatgttactcaagaagaagagagagatggacagtactttgaacctgttgttcctttacctgatctagttgaagtatccagtggtgaggaaaatgaaaaagttgtttttagtcacagggcagaactctacagatatgataaagatgttggtcaatggaaagaaaggggcattggtgatataaagattttacagaattatgataataagcaagttcgtatagtgatgagaagggaccaagtattaaaactttgtgccaatcacacaataactccagacatgagtttgcaaaatatgaaagggacagaaagagtatgggtgtggactgcatgtgattttgcagatggagaaagaaaagtagagcatttagctgttcgttttaaactacaggatgttgcagactcgtttaagaaaatttttgatgaagcaaaaacagcccaggaaaaagattctttgataacacctcatgtttctcggtcaagcactcccagagagtcaccatgtggcaaaattgctgtagctgtattagaagaaaccacaagagagaggacagatgttattcagggtgatgatgtagcagatgcagcttcagaagttgaagtgtctagcacatctgaaacaacaacaaaagcagtggtttctcctccaaagtttgtatttggttcagagtctgttaaaagaatttttagtagtgaaaaatcaaaaccatttgcatttggcaacagttctgccactgggtctttgtttggatttagttttaatgcatctttgaaaagtaacaacagtgaaactagttcagtagcccagagtggatctgaaagcaaagtggaacctaaaaaatgtgaactgtcaaagaactctgatatcgaacagtcttcagatagcaaagtcaaaaatctctctgcttcctttccaatggaagaatcttcaatcaactacacatttaaaacaccagaaaaggagcctccattatggcatgctgaatttaccaaagaagaattggttcagaagctcagttccaccacaaaaagtgcagatcacttaaacggcctgcttcgggaagcagaggcaaccagtgcagtccttatggagcaaattaagcttctcaaaagtgaaataagaagattggaaaggaatcaagagcaagaggagtctgcagctaacgtggaacacttgaagaacgtcttgctgcagttcattttcttgaagccaggtagtgaaagagagagacttcttcctgttataaatacgatgttgcagctcagccctgaagaaaagggaaaacttgctgcggttgctcaaggtgaggaataaaatgcttcccgttcttctggatgggcatcctatcttcgtagttggtttggacttcgataggttgatggaaggaatatttttattaaccaaataaaatctatttacaaaaa

SEQ ID NO: 173917 - DNA, 7253 bp, Homo sapiens
  Payload ID: 14149
  Gene Symbol: RGPD5
  Gene Name: RANBP2-like and GRIP domain containing 5
  Uniprot ID: Q99666
  ENST ID: ENST00000016946
  CDS Start-End: 159-5456
gtgggcctccgtgggcggcgccgcacgctcgtcacagtgggcctccgccggctacgccgctgcttcagtggcttgcaggcactttcctcttggaagtggcgactgctgcggggctgagcggtgctcgcacgcgtctcgggagccaggttggcggcgcgatgaggcgcagcaaggccgatgtggagcggtacgtcgcctcggtgctgggtctcaccccgtcgcctcgacagaagtcaatgaaaggattctattttgcaaagctgtattatgaagctaaagaatatgatcttgctaaaaaatacatatgtacttacattaatgtgcaagagagggatcccaaagctcacagatttctgggtcttctttatgaattggaagaaaacacagagaaagccgttgaatgttacaggcgttcagtggaattaaacccaacacaaaaagatcttgtgttgaagattgcagaattgctttgtaaaaatgatgttactgatggaagagcaaaatactgggtcgaaagagcagcaaaacttttcccaggaagtcctgcaatttataaactaaaggaacagcttctagattgtgaaggtgaagatggatggaataaactttttgacttgattcagtcagaactttatgtaagacctgatgacgtccatgtgaacatccggctagtggagttgtatcgctcaactaaaagattgaaggatgctgtggcccactgccatgaggcagagaggaacatagctttgcgttcaagtttagagtggaattcgtgtgttgtacagacccttaaggaatatctggagtctttacagtgtttggagtctgataaaagtgactggcaagcaaccaatacagacttactgctggcctatgctaatcttatgcttcttacgctttccactagagatgtgcaggaaaatagagaattactggaaagttttgatagtgctcttcagtctgcgaaatcttctttgggtggaaatgatgaactgtcagctactttcttagaaatgaaaggacatttctatatgtatgctggttctctgctcttgaagatgggtcagcatggtaataatgttcaatggcgagctctttctgagctggctgcattgtgctatctcatagcatttcaggttccaagaccaaagattaaattaagagaaggtaaagctggacaaaatctgctggaaatgatggcctgtgaccgactgagccaatcagggcacatgttgctaagcttaagtcgtggcaagcaagatttcttaaaagaggttgttgaaacttttgccaacaaaattgggcagtctgcgttatatgatgctctgttttctagtcagtcacctaaggatacatcttttcttggtagcgatgatattggaaaaattgatgtacaagaaccagagcttgaagatttggctagatacgatgttggtgctattcgagcacataatggtagtcttcagcatcttacttggcttggcttacagtggaattcattgcctgctttacctggaatccgaaaatggctaaaacagcttttccatcgtttgccccatgaaacctcaaggcttgaaacaaatgcgcctgaatcaatatgtattttagatcttgaagtatttctccttggagtagtatataccagccacttacaattaaaggagaaatgtaattctcaccatagctcctatcagccgttatgcctgccctttcctgtgtgtaaacagctttgtacagaaagacaaaaatcttggtgggatgcggtttgtactctgattcacagaaaagcagtacctggaaacttggcaaaattgagacttctagttcagcatgaaataaacactctaagagcccaggaaaaacatggccttcaacctgctctgcttgtacattgggcaaaataccttcagaaaacgggcagcggtcttaattctttttatggtcaactagaatacatagggagaagtgttcattattggaagaaagttttgccattgttgaagataataaagaagaacagtattcctgaacctattgatcctctgtttaaacattttcatagtgtagacattcaggcatcagaaattgttgaatatgaagaagacgcacacataacttttgctatgttggatgcagtaaatggaaatatagaagatgctgtgactgcttttgaatctataaaaagtgttgtttcttattggaatcttgcactgatttttcacaggaaggcagaagacattgaaaatgatgccctttctcctgaagaacaagaagaatgcagaaattatctgacaaagaccagggactacctaataaagattatagatgacggtgattcaaatctttcagtggtcaagaaattgcctgtgcccctggagtctgtaaaacagatgcttaattcagtcatgcaggaactcgaagactatagtgaaggaggtcctctctataaaaatggttctttgcgaaatgcagattcagaaataaaacattctacaccgtctcctaccaaatattcactatcaccaagtaaaagttacaagtattctcccgaaacaccacctcgatggacagaagatcggaattctttactgaatatgatttgccaacaagtagaggccattaagaaagaaatgcaggagttgaaactaaatagcagtaagtcagcatcccgtcatcgttggcccacagagaattatggaccagactcggtgcctgatggatatcaggggtcacagacatttcatggggctccactaacagttgcaactactggcccttcagtatattatagtcagtcaccagcatataattcccagtatcttctcagaccagcagctaatgttactcccacaaagggttcttctaatacagaatttaagtcaaccaaagaaggattttccatccctgtgtctgctgatggatttaaatttggcatttcggaaccaggaaatcaagaaaagaaaagggaaaagcctcttgaaaatgatactggcttccaggctcaggatattagtggccggaagaagggccgtggtgtgatttttggccaaacaagtagcacttttacatttgcagatgttgcaaaatcaacttcaggagaaggatttcagtttggcaaaaaagacctcaatttcaagggattttcaggtgctggagaaaaattattctcatcacgatacggtaaaatggccaataaagcaaacacttccggtgactttgagaaagatgatgatgcctataagactgaggacagcgatgacatccattttgaaccagtagttcaaatgcctgaaaaagtagaacttgtaacaggagaagaaggtgaaaaagttctgtattcacagggggtaaaactatttagatttgatgctgaggtaaggcagtggaaagaaaggggcttggggaacttaaaaattctcaaaaacgaggtcaatggcaaactaagaatgctgatgcgaagagaacaagtactaaaagtgtgtgctaatcattggataacgactacaatgaacctgaagcccctctctggatcagatagagcatggatgtggtcagccagtgatttctctgacggtgatgccaaactagagcggttggcagcaaaatttaaaacaccagagctggctgaagaattcaagcagaaatttgaggaatgccagcggcttctgttagacataccacttcaaactccccataaacttgtagatactggcagagctgccaagttaatacagagagctgaagaaatgaagagtggactgaaagatttcaaaacatttttgacaaatgatcaaacaaaagtcactgaggaagaaaataagggttcaggtacaggtgcggccggtgcctcagacacaacaataaaacccaatgctgaaaacactgggcccacattagaatgggataactatgacttaagggaagatgctttggatgatagtgtcagtagtagctcagtacatgcttctccattggcaagtagccctgtgagaaaaaatcttttccgctttgatgagtcaacaacaggatctaacttcagttttaaatctgctttgagtctatctaagtctcctgccaagttgaatcagagtgggacttcagttggcactgatgaagaatctgttgttactcaagaagaagagagagatggacagtactttgaacctgttgttcctttacctgatctagttgaagtatccagtggtgaggaaaatgaacaagttgtttttagtcacagggcagaaatctacagatatgataaagatgttggtcaatggaaagaaaggggcattggtgatataaagattttacagaattatgataataagcaagttcgtatagtgatgagaagggaccaagtattaaaactttgtgccaatcacagaataactccagacatgagtttgcaaaatatgaaagggacagaaagagtatgggtgtggactgcatgtgattttgcagatggagaaagaaaagtagagcatttagctgttcgttttaaactacaggatgttgcagactcgtttaagaaaatttttgatgaagcaaaaacagcccaggaaaaagattctttgataacacctcatgtttctcggtcaagcactcccagagagtcaccatgtggcaaaattgctgtagctatattagaagaaaccacaagagagaggacagatgttattcagggtgatgatgtagcagatgcagcttcagaagttgaagtgtctagcacatctgaaacaacaacaaaagcagtggtttctcctccaaagtttgtatttgtttcagagtctgttaaaagaatttttagtagtgaaaaatcaaaaccatttgtatttggcaacagttctgccactgggtctttgtttggatttagttttaatgcacctttgaaaagtaacaatagtgaaactagttcagtagcccagagtggatctgaaagcaaagtggaacctaaaaaatgtgaactgtcaaagaactctgatatcgaacagtcttcagatagcaaagtcaaaaatctctctgcttcctttccaacggaagaatcttcaatcaactacacatttaaaacaccagaaaaggagcctccattatggcatgctgaatttaccaaagaagaattggttcagaagctccgttccaccacaaaaagtgcagatcacttaaacggcctgcttcgggaaatagaggcaaccaatgcagtccttatggagcaaattaagcttctcaaaagtgaaataagaagattggaaaggaatcaagagcgagagaagtctgcagctaacctggaatacttgaagaacgtcttgctgcagttcattttcttgaagccaggtagtgaaagagagagacttcttcctgttataaatacgatgttgcagctcagccctgaagaaaagggaaaacttgctgcggttgctcaagatgaggaagaaaatgcttcccgttcttctggatgagcatcctatcttcgtagttggtttggacttcgataggttgatggaaggaatacttctattaaccaaatagaatctgtttacaaaaatggttcgtgtgtgttaccattattcttttgtcaaaaagtgtgtatatatgtttgcatttacatatatttgtacatctgtatgacagatgtattttaaaagtttcaacttgaagtaaaagtacaacagcttgaagtgttgataccaggccacagccctctaactcatgtgatctcccatgcatgctgccagaataaaaccaccaggaatgaattcactccccacttctctggaacctcaggacccgcccatttctcggcagtactgtgaattttgaagttaaactaaattttggtaccataccaactggaatttaggctttaaaaataatgtttcaaggccaggtgtggtgattcatgcctgaaatcccactactttgggaggctgaggctggagaatcgcttgaggctagtgagctgtgattgtaccactgcactccagctcggggaacagagcgagaccttgtctctaaaaataataatagtaataaaaataacgttttatgactatttattgcaaggtcagatttacagattgttataaattgttgagaaatttttgtgattagaatatgaaggaaaaagctttgttggtaaaagtgacatgttaaggggctatgaagtaaatatgctgcagttaattgtgctaagttaaaatacagtttagttatttgctttaaaataaactcttctttttttctttaaagtatactacctcaaaactcattatgttgtcagagccctagagctggctagtgtaacactgactatgagtaggtgggcccaccacttgagttgaggtgatttcatggtgtctttccaggctcttgatagggtgtcactgcatgcaagccatgaatctgttttgagaatcctctccattttcccaaataaaaacctatcccaacagtgactatatcactcagcattggatctaaatataaaagtggtgctttcagtgtttttggcagatagtgttccataacctttccatcagaagggattttagacaccttagaggtccgtgctacatcttcacagttcctccgaataaccttaggtggtagtgttacttgcctttgacacctgtgcatatgttttaatgactagatccaaactgtgttgttcttaaatcaaaaattggataatttttaatatttatgtattaatcacacagtgtgctctctgaagttctcttaagccttcagtttatactcttaattttctttctgagctggggaactgactttgcactttggttacacagaacattggtttccaatttagtttaactgaaatttgctgctgatatgttgagtttgttctttaaaaaatatctcatatatctcgtctttcctccttagaagaacagacctaactagcgaatgtatgaatgaaaatgcatctatttcagagccgacatgaagagtttagtttttttactttataaactgtgaatatgagtatgccagctgcattagatgtaactaatcatatttaaatatatttcactttgactttagaccttttgaagtctgtataaacttgttttgaaatacagtctccacttacgaatgtcataacaaaatacttttttgcatgataaaaaattactttgattacaaaaggcatattctttcatggtttctgcaatgagaggaagtgtaatgattattttaatatttctattaaaactgtatatttttatggctgc

SEQ ID NO: 173918 - DNA, 2907 bp, Homo sapiens
  Payload ID: 14149
  Gene Symbol: RGPD5
  Gene Name: RANBP2-like and GRIP domain containing 5
  Uniprot ID: Q99666
  ENST ID: ENST00000272454
  CDS Start-End: 193-2907
acacagtgctgaggcagaacgcaggttcgtcacagtgggcctccgtgggcggcgccgcacgctcgtcacagtgggcctccgccggctacgccgctgcttcagtggcttgcaggcactttcctcttggaagtggcgactgctgcggggctgagcggtgctcgcacgcgtctcgggagccaggttggcggcgcgatgaggcgcagcaaggccgatgtggagcggtacgtcgcctcggtgctgggtctcaccccgtcgcctcgacagaagtcaatgaaaggattctattttgcaaagctgtattatgaagctaaagaatatgatcttgctaaaaaatacatatgtacttacattaatgtgcaagagagggatcccaaagctcacagatttctgggtcttctttatgaattggaagaaaacacagagaaagccgttgaatgttacaggcgttcagtggaattaaacccaacacaaaaagatcttgtgttgaagattgcagaattgctttgtaaaaatgatgttactgatggaagagcaaaatactgggtcgaaagagcagcaaaacttttcccaggaagtcctgcaatttataaactaaaggaacagcttctagattgtgaaggtgaagatggatggaataaactttttgacttgattcagtcagaactttatgtaagacctgatgacgtccatgtgaacatccggctagtggagttgtatcgctcaactaaaagattgaaggatgctgtggcccactgccatgaggcagagaggaacatagctttgcgttcaagtttagagtggaattcgtgtgttgtacagacccttaaggaatatctggagtctttacagtgtttggagtctgataaaagtgactggcaagcaaccaatacagacttactgctggcctatgctaatcttatgcttcttacgctttccactagagatgtgcaggaaaatagagaattactggaaagttttgatagtgctcttcagtctgcgaaatcttctttgggtggaaatgatgaactgtcagctactttcttagaaatgaaaggacatttctatatgtatgctggttctctgctcttgaagatgggtcagcatggtaataatgttcaatggcgagctctttctgagctggctgcattgtgctatctcatagcatttcaggttccaagaccaaagattaaattaagagaaggtaaagctggacaaaatctgctggaaatgatggcctgtgaccgactgagccaatcagggcacatgttgctaagcttaagtcgtggcaagcaagatttcttaaaagaggttgttgaaacttttgccaacaaaattgggcagtctgcgttatatgatgctctgttttctagtcagtcacctaaggatacatcttttcttggtagcgatgatattggaaaaattgatgtacaagaaccagagcttgaagatttggctagatacgatgttggtgctattcgagcacataatggtagtcttcagcatcttacttggcttggcttacagtggaattcattgcctgctttacctggaatccgaaaatggctaaaacagcttttccatcgtttgccccatgaaacctcaaggcttgaaacaaatgcgcctgaatcaatatgtattttagatcttgaagtatttctccttggagtagtatataccagccacttacaattaaaggagaaatgtaattctcaccatagctcctatcagccgttatgcctgccctttcctgtgtgtaaacagctttgtacagaaagacaaaaatcttggtgggatgcggtttgtactctgattcacagaaaagcagtacctggaaacttggcaaaattgagacttctagttcagcatgaaataaacactctaagagcccaggaaaaacatggccttcaacctgctctgcttgtacattgggcaaaataccttcagaaaacgggcagcggtcttaattctttttatggtcaactagaatacatagggagaagtgttcattattggaagaaagttttgccattgttgaagataataaagaagaacagtattcctgaacctattgatcctctgtttaaacattttcatagtgtagacattcaggcatcagaaattgttgaatatgaagaagacgcacacataacttttgctatgttggatgcagtaaatggaaatatagaagatgctgtgactgcttttgaatctataaaaagtgttgtttcttattggaatcttgcactgatttttcacaggaaggcagaagacattgaaaatgatgccctttctcctgaagaacaagaagaatgcagaaattatctgacaaagaccagggactacctaataaagattatagatgacggtgattcaaatctttcagtggtcaagaaattgcctgtgcccctggagtctgtaaaacagatgcttaattcagtcatgcaggaactcgaagactatagtgaaggaggtcctctctataaaaatggttctttgcgaaatgcagattcagaaataaaacattctacaccgtctcctaccaaatattcactatcaccaagtaaaagttacaagtattctcccgaaacaccacctcgatggacagaagatcggaattctttactgaatatgatttgccaacaagtagaggccattaagaaagaaatgcaggagttgaaactaaatagcagtaagtcagcatcccgtcatcgttggcccacagagaattatggaccagactcggtgcctgatggatatcaggggtcacagacatttcatggggctccactaacagaagcagcacatcgtcattttacaattgagaaacatggagactccaaatggattatttacaggttcacaaaacagctttgtggcactgaaagggcgagagccaagatctcctga

SEQ ID NO: 173919 - DNA, 3304 bp, Homo sapiens
  Payload ID: 14149
  Gene Symbol: RGPD5
  Gene Name: RANBP2-like and GRIP domain containing 5
  Uniprot ID: Q99666
  ENST ID: ENST00000393283
  CDS Start-End: 534-3248
ataaaccccagggctcattcttgagctgctcctgcatagatctcgtcctgttcaacacaccaaagattgacagctgaactgagagaccatcacccacagacacaactggccactgggtggtgcacaagtcagacagaactgaatagtcctgtgaagactctggacactgaactgactttggaaccagactgcagaatggaggggtgggaacttgtggcttgaacctaatcaggtttcattaaggttttctatagataagatcatgtcaagacaccctcagaccacagggcggcgccacgagcccggccgagtgcagctggagcgccgacgtcgccgaggatacacagtgctgaggcagaacgcaggttcgtcacagtgggcctccgtgggcggcgccgcacgctcgtcacagtgggcctccgccggctacgccgctgcttcagtggcttgcaggcactttcctcttggaagtggcgactgctgcggggctgagcggtgctcgcacgcgtctcgggagccaggttggcggcgcgatgaggcgcagcaaggccgatgtggagcggtacgtcgcctcggtgctgggtctcaccccgtcgcctcgacagaagtcaatgaaaggattctattttgcaaagctgtattatgaagctaaagaatatgatcttgctaaaaaatacatatgtacttacattaatgtgcaagagagggatcccaaagctcacagatttctgggtcttctttatgaattggaagaaaacacagagaaagccgttgaatgttacaggcgttcagtggaattaaacccaacacaaaaagatcttgtgttgaagattgcagaattgctttgtaaaaatgatgttactgatggaagagcaaaatactgggtcgaaagagcagcaaaacttttcccaggaagtcctgcaatttataaactaaaggaacagcttctagattgtgaaggtgaagatggatggaataaactttttgacttgattcagtcagaactttatgtaagacctgatgacgtccatgtgaacatccggctagtggagttgtatcgctcaactaaaagattgaaggatgctgtggcccactgccatgaggcagagaggaacatagctttgcgttcaagtttagagtggaattcgtgtgttgtacagacccttaaggaatatctggagtctttacagtgtttggagtctgataaaagtgactggcaagcaaccaatacagacttactgctggcctatgctaatcttatgcttcttacgctttccactagagatgtgcaggaaaatagagaattactggaaagttttgatagtgctcttcagtctgcgaaatcttctttgggtggaaatgatgaactgtcagctactttcttagaaatgaaaggacatttctatatgtatgctggttctctgctcttgaagatgggtcagcatggtaataatgttcaatggcgagctctttctgagctggctgcattgtgctatctcatagcatttcaggttccaagaccaaagattaaattaagagaaggtaaagctggacaaaatctgctggaaatgatggcctgtgaccgactgagccaatcagggcacatgttgctaagcttaagtcgtggcaagcaagatttcttaaaagaggttgttgaaacttttgccaacaaaattgggcagtctgcgttatatgatgctctgttttctagtcagtcacctaaggatacatcttttcttggtagcgatgatattggaaaaattgatgtacaagaaccagagcttgaagatttggctagatacgatgttggtgctattcgagcacataatggtagtcttcagcatcttacttggcttggcttacagtggaattcattgcctgctttacctggaatccgaaaatggctaaaacagcttttccatcgtttgccccatgaaacctcaaggcttgaaacaaatgcgcctgaatcaatatgtattttagatcttgaagtatttctccttggagtagtatataccagccacttacaattaaaggagaaatgtaattctcaccatagctcctatcagccgttatgcctgccctttcctgtgtgtaaacagctttgtacagaaagacaaaaatcttggtgggatgcggtttgtactctgattcacagaaaagcagtacctggaaacttggcaaaattgagacttctagttcagcatgaaataaacactctaagagcccaggaaaaacatggccttcaacctgctctgcttgtacattgggcaaaataccttcagaaaacgggcagcggtcttaattctttttatggtcaactagaatacatagggagaagtgttcattattggaagaaagttttgccattgttgaagataataaagaagaacagtattcctgaacctattgatcctctgtttaaacattttcatagtgtagacattcaggcatcagaaattgttgaatatgaagaagacgcacacataacttttgctatgttggatgcagtaaatggaaatatagaagatgctgtgactgcttttgaatctataaaaagtgttgtttcttattggaatcttgcactgatttttcacaggaaggcagaagacattgaaaatgatgccctttctcctgaagaacaagaagaatgcagaaattatctgacaaagaccagggactacctaataaagattatagatgacggtgattcaaatctttcagtggtcaagaaattgcctgtgcccctggagtctgtaaaacagatgcttaattcagtcatgcaggaactcgaagactatagtgaaggaggtcctctctataaaaatggttctttgcgaaatgcagattcagaaataaaacattctacaccgtctcctaccaaatattcactatcaccaagtaaaagttacaagtattctcccgaaacaccacctcgatggacagaagatcggaattctttactgaatatgatttgccaacaagtagaggccattaagaaagaaatgcaggagttgaaactaaatagcagtaagtcagcatcccgtcatcgttggcccacagagaattatggaccagactcggtgcctgatggatatcaggggtcacagacatttcatggggctccactaacagaagcagcacatcgtcattttacaattgagaaacatggagactccaaatggattatttacaggttcacaaaacagctttgtggcactgaaagggcgagagccaagatctcctgatttctgttcctgtgttcatagattctttttccttaataaaagtaaacatatatcaa

SEQ ID NO: 173920 - DNA, 563 bp, Homo sapiens
  Payload ID: 14149
  Gene Symbol: RGPD5
  Gene Name: RANBP2-like and GRIP domain containing 5
  ENST ID: ENST00000430736
  CDS Start-End: 162-563
acagtgggcctccgtgggcggcgccgcacgctcgtcacagtgggcctccgccggctacgccgctgcttcagtggcttgcaggcactttcctcttggaagtggcgactgctgcggggctgagcggtgctcgcacgcgtctcgggagccaggttggcggcgcgatgaggcgcagcaaggccgatgtggagcggtacgtcgcctcggtgctgggtctcaccccgtcgcctcgacagtcaatgaaaggattctattttgcaaagctgtattatgaagctaaagaatatgatcttgctaaaaaatacatatgtacttacattaatgtgcaagagagggatcccaaagctcacagatttctgggtcttctttatgaattggaagaaaacacagagaaagccgttgaatgttacaggcgttcagtggaattaaacccaacacaaaaagatcttgtgttgaagattgcagaattgctttgtaaaaatgatgttactgatggaagagcaaaatactgggtcgaaagagcagcaaaacttttcccaggaagtcctgcaatttataaactaaag

SEQ ID NO: 173921 - DNA, 568 bp, Homo sapiens
  Payload ID: 14149
  Gene Symbol: RGPD5
  Gene Name: RANBP2-like and GRIP domain containing 5
  ENST ID: ENST00000432606
  CDS Start-End: 399-568
ctgttgaggcgccggccggctggcgcagtcctgtgggcggcgtggcgcttgcaagcgcaggaagagtcctggggggaccgcggcgggcgggagaccgttggcgccggcgcttcctcttaatcccggcttgttcccgacgcttgttcccgacggtgctcgctcctgggcccgtcctggcccgggctttctggccgatcgcgcaccccgtagtacccgcgcggcctagttctcgggggcttgggcacccgggtgctgtatcggcgggtttcttcccatctcctggacatttactttatatgctgcggcggaggtcgtacctccttggcctggaggaacccagtggggactgacgcagctccgggtgagctttggcggctgcgtcgagtgacaagaagtcaatgaaaggattctattttgcaaagctgtattatgaagctaaagaatatgatcttgctaaaaaatacatatgtacttacattaatgtgcaagagagggatcccaaagctcacagatttctgggtcttctttatgaattggaagaaaacacagagaaagccgttgaatgtta

SEQ ID NO: 173922 - DNA, 2179 bp, Homo sapiens
  Payload ID: 14149
  Gene Symbol: RGPD5
  Gene Name: RANBP2-like and GRIP domain containing 5
  ENST ID: ENST00000413468
  CDS Start-End: 1-297
tactgggtcgaaagagcagcaaaacttttcccaggaagtcctgcaatttataaactaaaggaacagcttctagattgtgaaggtgaagatggatggaataaactttttgacttgattcagtcagaactttatgtaagacctgatgacgtccatgtgaacatccggctagtggagttgtatcgctcaactaaaagattgaaggatgctgtggcccactgccatgaggcagagaggaacatagctttgcgttcaagtttagagtggaattcgtgtgttgtacagacccttaagttttgatagtgctcttcagtctgcgaaatcttctttgggtggaaatgatgaactgtcagctactttcttagaaatgaaaggacatttctatatgtatgctggttctctgctcttgaagatgggtcagcatggtaataatgttcaatggcgagctctttctgagctggctgcattgtgctatctcatagcatttcaggttccaagaccaaagattaaattaagagaaggtaaagctggacaaaatctgctggaaatgatggcctgtgaccgactgagccaatcagcgatgatattggaaaaattgatgtacaagaaccagagcttgaagatttggctagatacgatgttggtgctattcgagcacataatggtagtcttcagcatcttacttggcttggcttacagtggaattcattgcctgctttacctggaatccgaaaatggctaaaacagcttttccatcgtttgccccatgaaacctcaaggcttgaaacaaatgcgcctgaatcaatatgtattttagatcttgaagtatttctccttggagtagtatataccagccacttacaattaaaggagaaatgtaattctcaccatagctcctatcagccgttatgcctgccctttcctgtgtgtaaacagctttgtacagaaagacaaaaatcttggtgggatgcggtttgtactctgattcacagaaaagcagttaaattgaactattttttagacctggaaacttggcaaaattgagacttctagttcagcatgaaataaacactctaagagcccaggaaaaacatggccttcaacctgctctgcttgtacattgggcaaaataccttcagaaaacgggcagcggtcttaattctttttatggtcaactagaatacatagggagaagtgttcattattggaagaaagttttgccattgttgaagataataaagaagaacagtattcctgaacctattgatcctctgtttaaacattttcatagtgtagacattcaggcatcagaaattgttgaatatgaagaagacgcacacataacttttgctatgttggatgcagtaaatggaaatatagaagatgctgtgactgcttttgaatctataaaaagtgttgtttcttattggaatcttgcactgatttttcacaggaaggcagaagacattgaaaatgatgccctttctcctgaagaacaagaagaatgcagaaattatctgacaaagaccagggactacctaataaagattatagatgacggtgattcaaatctttcagtggtcaagaaattgcctgtgcccctggagtctgtaaaacagatgcttaattcagtcatgcaggaactcgaagactatagtgaaggaggtcctctctataaaaatggttctttgcgaaatgcagattcagaaataaaacattctacaccgtctcctaccaaatattcactatcaccaagtaaaagttacaagtattctcccgaaacaccacctcgatggacagaagatcggaattctttactgaatatgatttgccaacaagtagaggccattaagaaagaaatgcaggagttgaaactaaatagcagtaagtcagcatcccgtcatcgttggcccacagagaattatggaccagactcggtgcctgatggatatcaggggtcacagacatttcatggggctccactaacagttgcaactactggcccttcagtatattatagtcagtcaccagcatataattcccagtatcttctcagaccagcagctaatgttactcccacaaagggttcttctaatacagaatttaagtcaaccaaagaaggattttccatccctgtgtctgctgatggatttaaatttggcatttcggaaccaggaaatca

SEQ ID NO: 173923 - DNA, 541 bp, Homo sapiens
  Payload ID: 14149
  Gene Symbol: RGPD5
  Gene Name: RANBP2-like and GRIP domain containing 5
  ENST ID: ENST00000441344
  CDS Start-End: 86-541
gaagtggcgactgctgcggggctgagcggtgctcgcacgcgtctcgggagccaggttggcggcgcgatgaggcgcagcaaggccgatgtggagcggtacgtcgcctcggtgctgggtctcaccccgtcgcctcgacagatacatatgtacttacattaatgtgcaagagagggatcccaaagctcacagatttctgggtcttctttatgaattggaagaaaacacagagaaagccgttgaatgttacaggcgttcagtggaattaaacccaacacaaaaagatcttgtgttgaagattgcagaattgctttgtaaaaatgatgttactgatggaagagcaaaatactgggtcgaaagagcagcaaaacttttcccaggaagtcctgcaatttataaactaaaggaacagcttctagattgtgaaggtgaagatggatggaataaactttttgacttgattcagtcagaactttatgtaagacctgatgacgtccatgtgaacatccggctagtggagttgtatcgctcaactaaaagattg

SEQ ID NO: 173924 - DNA, 2848 bp, Homo sapiens
  Payload ID: 14150
  Gene Symbol: RGPD6
  Gene Name: RANBP2-like and GRIP domain containing 6
  Uniprot ID: Q99666
  ENST ID: ENST00000330331
  CDS Start-End: 78-2792
ctttcctcttggaagtggcgactgctgcggggctgagcggtgctcgcacgcgtctcgggagccaggttggcggcgcgatgaggcgcagcaaggccgatgtggagcggtacgtcgcctcggtgctgggtctcaccccgtcgcctcgacagaagtcaatgaaaggattctattttgcaaagctgtattatgaagctaaagaatatgatcttgctaaaaaatacatatgtacttacattaatgtgcaagagagggatcccaaagctcacagatttctgggtcttctttatgaattggaagaaaacacagagaaagccgttgaatgttacaggcgttcagtggaattaaacccaacacaaaaagatcttgtgttgaagattgcagaattgctttgtaaaaatgatgttactgatggaagagcaaaatactgggtcgaaagagcagcaaaacttttcccaggaagtcctgcaatttataaactaaaggaacagcttctagattgtgaaggtgaagatggatggaataaactttttgacttgattcagtcagaactttatgtaagacctgatgacgtccatgtgaacatccggctagtggagttgtatcgctcaactaaaagattgaaggatgctgtggcccactgccatgaggcagagaggaacatagctttgcgttcaagtttagagtggaattcgtgtgttgtacagacccttaaggaatatctggagtctttacagtgtttggagtctgataaaagtgactggcaagcaaccaatacagacttactgctggcctatgctaatcttatgcttcttacgctttccactagagatgtgcaggaaaatagagaattactggaaagttttgatagtgctcttcagtctgcgaaatcttctttgggtggaaatgatgaactgtcagctactttcttagaaatgaaaggacatttctatatgtatgctggttctctgctcttgaagatgggtcagcatggtaataatgttcaatggcgagctctttctgagctggctgcattgtgctatctcatagcatttcaggttccaagaccaaagattaaattaagagaaggtaaagctggacaaaatctgctggaaatgatggcctgtgaccgactgagccaatcagggcacatgttgctaagcttaagtcgtggcaagcaagatttcttaaaagaggttgttgaaacttttgccaacaaaattgggcagtctgcgttatatgatgctctgttttctagtcagtcacctaaggatacatcttttcttggtagcgatgatattggaaaaattgatgtacaagaaccagagcttgaagatttggctagatacgatgttggtgctattcgagcacataatggtagtcttcagcatcttacttggcttggcttacagtggaattcattgcctgctttacctggaatccgaaaatggctaaaacagcttttccatcgtttgccccatgaaacctcaaggcttgaaacaaatgcgcctgaatcaatatgtattttagatcttgaagtatttctccttggagtagtatataccagccacttacaattaaaggagaaatgtaattctcaccatagctcctatcagccgttatgcctgccctttcctgtgtgtaaacagctttgtacagaaagacaaaaatcttggtgggatgcggtttgtactctgattcacagaaaagcagtacctggaaacttggcaaaattgagacttctagttcagcatgaaataaacactctaagagcccaggaaaaacatggccttcaacctgctctgcttgtacattgggcaaaataccttcagaaaacgggcagcggtcttaattctttttatggtcaactagaatacatagggagaagtgttcattattggaagaaagttttgccattgttgaagataataaagaagaacagtattcctgaacctattgatcctctgtttaaacattttcatagtgtagacattcaggcatcagaaattgttgaatatgaagaagacgcacacataacttttgctatgttggatgcagtaaatggaaatatagaagatgctgtgactgcttttgaatctataaaaagtgttgtttcttattggaatcttgcactgatttttcacaggaaggcagaagacattgaaaatgatgccctttctcctgaagaacaagaagaatgcagaaattatctgacaaagaccagggactacctaataaagattatagatgacggtgattcaaatctttcagtggtcaagaaattgcctgtgcccctggagtctgtaaaacagatgcttaattcagtcatgcaggaactcgaagactatagtgaaggaggtcctctctataaaaatggttctttgcgaaatgcagattcagaaataaaacattctacaccgtctcctaccaaatattcactatcaccaagtaaaagttacaagtattctcccgaaacaccacctcgatggacagaagatcggaattctttactgaatatgatttgccaacaagtagaggccattaagaaagaaatgcaggagttgaaactaaatagcagtaagtcagcatcccgtcatcgttggcccacagagaattatggaccagactcggtgcctgatggatatcaggggtcacagacatttcatggggctccactaacagaagcagcacatcgtcattttacaattgagaaacatggagactccaaatggattatttacaggttcacaaaacagctttgtggcactgaaagggcgagagccaagatctcctgatttctgttcctgtgttcatagattctttttccttaataaaagtaaacatatatcaa

SEQ ID NO: 173925 - DNA, 7165 bp, Homo sapiens
  Payload ID: 14150
  Gene Symbol: RGPD6
  Gene Name: RANBP2-like and GRIP domain containing 6
  Uniprot ID: Q99666
  ENST ID: ENST00000329516
  CDS Start-End: 78-5375
ctttcctcttggaagtggcgactgctgcggggctgagcggtgctcgcacgcgtctcgggagccaggttggcggcgcgatgaggcgcagcaaggccgatgtggagcggtacgtcgcctcggtgctgggtctcaccccgtcgcctcgacagaagtcaatgaaaggattctattttgcaaagctgtattatgaagctaaagaatatgatcttgctaaaaaatacatatgtacttacattaatgtgcaagagagggatcccaaagctcacagatttctgggtcttctttatgaattggaagaaaacacagagaaagccgttgaatgttacaggcgttcagtggaattaaacccaacacaaaaagatcttgtgttgaagattgcagaattgctttgtaaaaatgatgttactgatggaagagcaaaatactgggtcgaaagagcagcaaaacttttcccaggaagtcctgcaatttataaactaaaggaacagcttctagattgtgaaggtgaagatggatggaataaactttttgacttgattcagtcagaactttatgtaagacctgatgacgtccatgtgaacatccggctagtggagttgtatcgctcaactaaaagattgaaggatgctgtggcccactgccatgaggcagagaggaacatagctttgcgttcaagtttagagtggaattcgtgtgttgtacagacccttaaggaatatctggagtctttacagtgtttggagtctgataaaagtgactggcaagcaaccaatacagacttactgctggcctatgctaatcttatgcttcttacgctttccactagagatgtgcaggaaaatagagaattactggaaagttttgatagtgctcttcagtctgcgaaatcttctttgggtggaaatgatgaactgtcagctactttcttagaaatgaaaggacatttctatatgtatgctggttctctgctcttgaagatgggtcagcatggtaataatgttcaatggcgagctctttctgagctggctgcattgtgctatctcatagcatttcaggttccaagaccaaagattaaattaagagaaggtaaagctggacaaaatctgctggaaatgatggcctgtgaccgactgagccaatcagggcacatgttgctaagcttaagtcgtggcaagcaagatttcttaaaagaggttgttgaaacttttgccaacaaaattgggcagtctgcgttatatgatgctctgttttctagtcagtcacctaaggatacatcttttcttggtagcgatgatattggaaaaattgatgtacaagaaccagagcttgaagatttggctagatacgatgttggtgctattcgagcacataatggtagtcttcagcatcttacttggcttggcttacagtggaattcattgcctgctttacctggaatccgaaaatggctaaaacagcttttccatcgtttgccccatgaaacctcaaggcttgaaacaaatgcgcctgaatcaatatgtattttagatcttgaagtatttctccttggagtagtatataccagccacttacaattaaaggagaaatgtaattctcaccatagctcctatcagccgttatgcctgccctttcctgtgtgtaaacagctttgtacagaaagacaaaaatcttggtgggatgcggtttgtactctgattcacagaaaagcagtacctggaaacttggcaaaattgagacttctagttcagcatgaaataaacactctaagagcccaggaaaaacatggccttcaacctgctctgcttgtacattgggcaaaataccttcagaaaacgggcagcggtcttaattctttttatggtcaactagaatacatagggagaagtgttcattattggaagaaagttttgccattgttgaagataataaagaagaacagtattcctgaacctattgatcctctgtttaaacattttcatagtgtagacattcaggcatcagaaattgttgaatatgaagaagacgcacacataacttttgctatgttggatgcagtaaatggaaatatagaagatgctgtgactgcttttgaatctataaaaagtgttgtttcttattggaatcttgcactgatttttcacaggaaggcagaagacattgaaaatgatgccctttctcctgaagaacaagaagaatgcagaaattatctgacaaagaccagggactacctaataaagattatagatgacggtgattcaaatctttcagtggtcaagaaattgcctgtgcccctggagtctgtaaaacagatgcttaattcagtcatgcaggaactcgaagactatagtgaaggaggtcctctctataaaaatggttctttgcgaaatgcagattcagaaataaaacattctacaccgtctcctaccaaatattcactatcaccaagtaaaagttacaagtattctcccgaaacaccacctcgatggacagaagatcggaattctttactgaatatgatttgccaacaagtagaggccattaagaaagaaatgcaggagttgaaactaaatagcagtaagtcagcatcccgtcatcgttggcccacagagaattatggaccagactcggtgcctgatggatatcaggggtcacagacatttcatggggctccactaacagttgcaactactggcccttcagtatattatagtcagtcaccagcatataattcccagtatcttctcagaccagcagctaatgttactcccacaaagggttcttctaatacagaatttaagtcaaccaaagaaggattttccatccctgtgtctgctgatggatttaaatttggcatttcggaaccaggaaatcaagaaaagaaaagggaaaagcctcttgaaaatgatactggcttccaggctcaggatattagtggccggaagaagggccgtggtgtgatttttggccaaacaagtagcacttttacatttgcagatgttgcaaaatcaacttcaggagaaggatttcagtttggcaaaaaagacctcaatttcaagggattttcaggtgctggagaaaaattattctcatcacgatacggtaaaatggccaataaagcaaacacttccggtgactttgagaaagatgatgatgcctataagactgaggacagcgatgacatccattttgaaccagtagttcaaatgcctgaaaaagtagaacttgtaacaggagaagaaggtgaaaaagttctgtattcacagggggtaaaactatttagatttgatgctgaggtaaggcagtggaaagaaaggggcttggggaacttaaaaattctcaaaaacgaggtcaatggcaaactaagaatgctgatgcgaagagaacaagtactaaaagtgtgtgctaatcattggataacgactacaatgaacctgaagcccctctctggatcagatagagcatggatgtggtcagccagtgatttctctgacggtgatgccaaactagagcggttggcagcaaaatttaaaacaccagagctggctgaagaattcaagcagaaatttgaggaatgccagcggcttctgttagacataccacttcaaactccccataaacttgtagatactggcagagctgccaagttaatacagagagctgaagaaatgaagagtggactgaaagatttcaaaacatttttgacaaatgatcaaacaaaagtcactgaggaagaaaataagggttcaggtacaggtgcggccggtgcctcagacacaacaataaaacccaatgctgaaaacactgggcccacattagaatgggataactatgacttaagggaagatgctttggatgatagtgtcagtagtagctcagtacatgcttctccattggcaagtagccctgtgagaaaaaatcttttccgctttgatgagtcaacaacaggatctaacttcagttttaaatctgctttgagtctatctaagtctcctgccaagttgaatcagagtgggacttcagttggcactgatgaagaatctgttgttactcaagaagaagagagagatggacagtactttgaacctgttgttcctttacctgatctagttgaagtatccagtggtgaggaaaatgaacaagttgtttttagtcacagggcagaaatctacagatatgataaagatgttggtcaatggaaagaaaggggcattggtgatataaagattttacagaattatgataataagcaagttcgtatagtgatgagaagggaccaagtattaaaactttgtgccaatcacagaataactccagacatgagtttgcaaaatatgaaagggacagaaagagtatgggtgtggactgcatgtgattttgcagatggagaaagaaaagtagagcatttagctgttcgttttaaactacaggatgttgcagactcgtttaagaaaatttttgatgaagcaaaaacagcccaggaaaaagattctttgataacacctcatgtttctcggtcaagcactcccagagagtcaccatgtggcaaaattgctgtagctatattagaagaaaccacaagagagaggacagatgttattcagggtgatgatgtagcagatgcagcttcagaagttgaagtgtctagcacatctgaaacaacaacaaaagcagtggtttctcctccaaagtttgtatttgtttcagagtctgttaaaagaatttttagtagtgaaaaatcaaaaccatttgtatttggcaacagttctgccactgggtctttgtttggatttagttttaatgcacctttgaaaagtaacaatagtgaaactagttcagtagcccagagtggatctgaaagcaaagtggaacctaaaaaatgtgaactgtcaaagaactctgatatcgaacagtcttcagatagcaaagtcaaaaatctctctgcttcctttccaacggaagaatcttcaatcaactacacatttaaaacaccagaaaaggagcctccattatggcatgctgaatttaccaaagaagaattggttcagaagctccgttccaccacaaaaagtgcagatcacttaaacggcctgcttcgggaaatagaggcaaccaatgcagtccttatggagcaaattaagcttctcaaaagtgaaataagaagattggaaaggaatcaagagcgagagaagtctgcagctaacctggaatacttgaagaacgtcttgctgcagttcattttcttgaagccaggtagtgaaagagagagacttcttcctgttataaatacgatgttgcagctcagccctgaagaaaagggaaaacttgctgcggttgctcaagatgaggaagaaaatgcttcccgttcttctggatgagcatcctatcttcgtagttggtttggacttcgataggttgatggaaggaatacttctattaaccaaatagaatctgtttacaaaaatggttcgtgtgtgttaccattattcttttgtcaaaaagtgtgtatatatgtttgcatttacatatatttgtacatctgtatgacagatgtattttaaaagtttcaacttgaagtaaaagtacaacagcttgaagtgttgataccaggccacagccctctaactcatgtgatctcccatgcatgctgccagaataaaaccaccaggaatgaattcactccccacttctctggaacctcaggacccgcccatttctcggcagtactgtgaattttgaagttaaactaaattttggtaccataccaactggaatttaggctttaaaaataatgtttcaaggccaggtgtggtgattcatgcctgaaatcccactactttgggaggctgaggctggagaatcgcttgaggctagtgagctgtgattgtaccactgcactccagctcggggaacagagcgagaccttgtctctaaaaataataatagtaataaaaataacgttttatgactatttattgcaaggtcagatttacagattgttataaattgttgagaaatttttgtgattagaatatgaaggaaaaagctttgttggtaaaagtgacatgttaaggggctatgaagtaaatatgctgcagttaattgtgctaagttaaaatacagtttagttatttgctttaaaataaactcttctttttttctttaaagtatactacctcaaaactcattatgttgtcagagccctagagctggctagtgtaacactgactatgagtaggtgggcccaccacttgagttgaggtgatttcatggtgtctttccaggctcttgatagggtgtcactgcatgcaagccatgaatctgttttgagaatcctctccattttcccaaataaaaacctatcccaacagtgactatatcactcagcattggatctaaatataaaagtggtgctttcagtgtttttggcagatagtgttccataacctttccatcagaagggattttagacaccttagaggtccgtgctacatcttcacagttcctccgaataaccttaggtggtagtgttacttgcctttgacacctgtgcatatgttttaatgactagatccaaactgtgttgttcttaaatcaaaaattggataatttttaatatttatgtattaatcacacagtgtgctctctgaagttctcttaagccttcagtttatactcttaattttctttctgagctggggaactgactttgcactttggttacacagaacattggtttccaatttagtttaactgaaatttgctgctgatatgttgagtttgttctttaaaaaatatctcatatatctcgtctttcctccttagaagaacagacctaactagcgaatgtatgaatgaaaatgcatctatttcagagccgacatgaagagtttagtttttttactttataaactgtgaatatgagtatgccagctgcattagatgtaactaatcatatttaaatatatttcactttgactttagaccttttgaagtctgtataaacttgttttgaaatacagtctccacttacgaatgtcataacaaaatacttttttgcatgataaaaaattactttgattacaaaaggcatattctttcatggtttctgcaatgagaggaagtgtaatgattattttaatatttctattaaaactgtatattttta

SEQ ID NO: 173926 - DNA, 606 bp, Homo sapiens
  Payload ID: 14150
  Gene Symbol: RGPD6
  Gene Name: RANBP2-like and GRIP domain containing 6
  ENST ID: ENST00000437167
  CDS Start-End: 1-606
tttttgatgaagcaaaaacagcccaggaaaaagattctttgataacacctcatgtttctcggtcaagcactcccagagagtcaccatgtggcaaaattgctgtagctatattagaagaaaccacaagagagaggacagatgttattcagggtgatgatgtagcagatgcagcttcagaagttgaagtgtctagcacatctgaaacaacaacaaaagcagtggtttctcctccaaagtttgtatttgtttcagagtctgttaaaagaatttttagtagtgaaaaatcaaaaccatttgtatttggcaacagttctgccactgggtctttgtttggatttagttttaatgcacctttgaaaagtaacaatagtgaaactagttcagtagcccagagtggatctgaaagcaaagtggaacctaaaaaatgtgaactgtcaaagaactctgatatcgaacagtcttcagatagcaaagtcaaaaatctctctgcttcctttccaacggaagaatcttcaatcaactacacatttaaaacaccagaaaagggatttaattttagcctttttaaatctaatcccatggccttttggactagcaccccttcct

SEQ ID NO: 173927 - DNA, 568 bp, Homo sapiens; identical to SEQ ID NO: 173921
  Payload ID: 14150
  Gene Symbol: RGPD6
  Gene Name: RANBP2-like and GRIP domain containing 6
  ENST ID: ENST00000455695
  CDS Start-End: 399-568

SEQ ID NO: 173928 - DNA, 566 bp, Homo sapiens
  Payload ID: 14150
  Gene Symbol: RGPD6
  Gene Name: RANBP2-like and GRIP domain containing 6
  ENST ID: ENST00000446930
  CDS Start-End: 162-566
acagtgggcctccgtgggcggcgccgcacgctcgtcacagtgggcctccgccggctacgccgctgcttcagtggcttgcaggcactttcctcttggaagtggcgactgctgcggggctgagcggtgctcgcacgcgtctcgggagccaggttggcggcgcgatgaggcgcagcaaggccgatgtggagcggtacgtcgcctcggtgctgggtctcaccccgtcgcctcgacagtcaatgaaaggattctattttgcaaagctgtattatgaagctaaagaatatgatcttgctaaaaaatacatatgtacttacattaatgtgcaagagagggatcccaaagctcacagatttctgggtcttctttatgaattggaagaaaacacagagaaagccgttgaatgttacaggcgttcagtggaattaaacccaacacaaaaagatcttgtgttgaagattgcagaattgctttgtaaaaatgatgttactgatggaagagcaaaatactgggtcgaaagagcagcaaaacttttcccaggaagtcctgcaatttataaactaaaggaa

SEQ ID NO: 173929 - DNA, 2179 bp, Homo sapiens; identical to SEQ ID NO: 173922
  Payload ID: 14150
  Gene Symbol: RGPD6
  Gene Name: RANBP2-like and GRIP domain containing 6
  ENST ID: ENST00000484024
  CDS Start-End: 1-297

SEQ ID NO: 173930 - DNA, 5576 bp, Homo sapiens
  Payload ID: 14151
  Gene Symbol: RGPD8
  Gene Name: RANBP2-like and GRIP domain containing 8
  Uniprot ID: O14715
  ENST ID: ENST00000302558
  CDS Start-End: 193-5490
acacagtgctgaggcagaacgcaggttcgtcacagtgggcctccgtgggcggcgccgcacgctcgtcacagtgggcctccgccggctacgccgctgcttcagtggcttgcaggcactttcctcttggaagtggcgactgctgcggggctgagcggtgctcgcacgcgtctcgggagccaggttggcggcgcgatgaggcgcagcaaggccgatgtggagcggtacgtcgcctcggtgctgggtctcaccccgtcgcctcgacagaagtcaatgaaaggattctattttgcaaagctgtattatgaagctaaagaatatgatcttgctaaaaaatacatatgtacttacattaatgtgcaagagagggatcccaaagctcacagatttctgggtcttctttatgaattggaagaaaacacagagaaagccgttgaatgttacaggcgttcagtggaattaaacccaacacaaaaagatcttgtgttgaagattgcagaattgctttgtaaaaatgatgttactgatggaagagcaaaatactgggtcgaaagagcagcaaaacttttcccaggaagtcctgcaatttataaactaaaggaacagcttctagattgtgaaggtgaagatggatggaataaactttttgacttgattcagtcagaactttatgtaagacctgatgacgtccatgtgaacatccggctagtggagttgtatcgctcaactaaaagattgaaggatgctgtggcccactgccatgaggcagagaggaacatagctttgcgttcaagtttagagtggaattcgtgtgttgtacagacccttaaggaatatctggagtctttacagtgtttggagtctgataaaagtgactggcgagcaaccaatacagacttactgctggcctatgctaatcttatgcttcttacgctttccactagagatgtgcaggaaaatagagaattactggaaagttttgatagtgctcttcagtctgcgaaatcttctttgggtggaaatgatgaactgtcagctactttcttagaaatgaaaggacatttctatatgtatgctggttctctgctcttgaagatgggtcagcatggtaataatgttcaatggcgagctctttctgagctggctgcattgtgctatctcatagcatttcaggttccaagaccaaagattaaattaagagaaggtaaagctggacaaaatctgctggaaatgatggcctgtgaccgactgagccaatcagggcacatgttgctaagcttaagtcgtggcaagcaagatttcttaaaagaggttgttgaaacttttgccaacaaaattgggcagtctgcgttatatgatgctctgttttctagtcagtcacctaaggatacatcttttcttggtagcgatgatattggaaaaattgatgtacaagaaccagagcttgaagatttggctagatacgatgttggtgctattcgagcacataatggtagtcttcagcatcttacttggcttggcttacagtggaattcattgcctgctttacctggaatccgaaaatggctaaaacagcttttccatcgtttgccccatgaaacctcaaggcttgaaacaaatgcgcctgaatcaatatgtattttagatcttgaagtatttctccttggagtagtatataccagccacttacaattaaaggagaaatgtaattctcaccatagctcctatcagccgttatgcctgccctttcctgtgtgtaaacagctttgtacagaaagacaaaaatcttggtgggatgcggtttgtactctgattcacagaaaagcagtacctggaaacttggcaaaattgagacttctagttcagcatgaaataaacactctaagagcccaggaaaaacatggccttcaacctgctctgcttgtacattgggcaaaataccttcagaaaacgggcagcggtcttaattctttttatggtcaactagaatacatagggagaagtgttcattattggaagaaagttttgccattgttgaagataataaagaagaacagtattcctgaacctattgatcctctgtttaaacattttcatagtgtagacattcaggcatcagaaattgttgaatatgaagaagacgcacacataacttttgctatattggatgcagtaaatggaaatatagaagatgctgtgactgcttttgaatctataaaaagtgttgtttcttattggaatcttgcactgatttttcacaggaaggcagaagacattgaaaatgatgccctttctcctgaagaacaagaagaatgcagaaattatctgacaaagaccagggactacctaataaagattatagatgacggtgattcaaatctttcagtggtcaagaaattgcctgtgcccctggagtctgtaaaacagatgcttaattcagtcatgcaggaactcgaagactatagtgaaggaggtcctctctataaaaatggttctttgcgaaatgcagattcagaaataaaacattctacaccgtctcctaccaaatattcactatcaccaagtaaaagttacaagtattctcccgaaacaccacctcgatggacagaagatcggaattctttactgaatatgatttgccaacaagtagaggccattaagaaagaaatgcaggagttgaaactaaatagcagtaagtcagcatcccgtcatcgttggcccacagagaattatggaccagactcggtgcctgatggatatcaggggtcacagacatttcatggggctccactaacagttgcaactactggcccttcagtatattatagtcagtcaccagcatataattcccagtatcttctcagaccagcagctaatgttactcccacaaagggttcttctaatacagaatttaagtcaaccaaagaaggattttccatccctgtgtctgctgatggatttaaatttggcatttcggaaccaggaaatcaagaaaagaaaagggaaaagcctcttgaaaatgatactggcttacaggctcaggatattaggggccggaagaagggccgtggtgtgatttttggccaaacaagtagcacttttacatttgcagatgttgcaaaatcaacttcaggagaaggatttcagtttggcaaaaaagacctcaatttcaagggattttcaggtgctggagaaaaattattctcatcacgatacggtaaaatggccaataaagcaaacacttccggtgactttgagaaagatgatgatgcctataagactgaggacagcgatgacatccattttgaaccagtagttcaaatgcctgaaaaagtagaacttgtaacaggagaagaaggtgaaaaagttctgtattcacagggggtaaaactatttagatttgatgctgaggtaaggcagtggaaagaaaggggcttggggaacttaaaaattctcaaaaacgaggtcaatggcaaactaagaatgctgatgcgaagagaacaagtactaaaagtgtgtgctaatcattggataacgactacaatgaacctgaagcccctctctggatcagatagagcatggatgtggtcagccagtgatttctctgatggtgatgccaaactagagcggttggcagcaaaatttaaaacaccagagctggctgaagaattcaagcagaaatttgaggaatgccagcggcttctgttagacataccacttcaaactccccataaacttgtagatactggcagagctgccaagttaatacagagagctgaagaaatgaagagtggactgaaagatttcaaaacatttttgacaaatgatcaaacaaaagtcactgaggaagaaaataagggttcaggtacaggtgtggccggtgcctcagacacaacaataaaacccaatgctgaaaacactgggcccacattagaatgggataactatgacttaagggaagatgctttggatgatagtgtcagtagtagctcagtacatgcttctccattggcaagtagccctgtgagaaaaaatcttttccgctttgatgagtcaacaacaggatctaacttcagttttaaatctgctttgagtctatctaagtctcctgccaagttgaatcagagtgggacttcagttggcactgatgaagaatctgttgttactcaagaagaagagagagatggacagtactttgaacctgttgttcctttacctgatctagttgaagtatccagtggtgaggaaaatgaacaagttgtttttagtcacagggcagaaatctacagatatgataaagatgttggtcaatggaaagaaaggggcattggtgatataaagattttacagaattatgataataagcaagttcgtatagtgatgagaagggaccaagtattaaaactttgtgccaatcacagaataactccagacatgagtttgcaaaatatgaaagggacagaaagagtatgggtgtggactgcatgtgattttgcagatggagaaagaaaagtagagcatttagctgttcgttttaaactacaggatgttgcagactcgtttaagaaaatttttgatgaagcaaaaacagcccaggaaaaagattctttgataacacctcatgtttctcggtcaagcactcccagagagtcaccatgtggcaaaattgctgtagctgtattagaagaaatcacaagagagaggacagatgttattcagggtgatgatgtagcagatgcagcttcagaagttgaagtgtctagcacatctgaaacaacaacaaaagcagtggtttctcctccaaagtttgtatttgtttcagagtctgttaaaagaatttttagtagtgaaaaatcaaaaccatttgcatttggcaacagttctgccactgggtctttgtttggatttagttttaatgcacctttgaaaagtaacaatagtgaaactagttcagtagcccagagtggatctgaaagcaaagtggaacctaaaaaatgtgaactgtcaaagaactctgatatcgaacagtcttcagatagcaaagtcaaaaatctctctgcttcctttccaacggaagaatcttcaatcaactacacatttaaaacaccagaaaaggagcctccattatggcatgctgaatttaccaaagaagaattggttcagaagctccgttccaccacaaaaagtgcagatcacttaaacggcctgcttcgggaaatagaggcaaccaatgcagtccttatggagcaaattaagcttctcaaaagtgaaataagaagattggaaaggaatcaagagcgagagaagtctgcagctaacctggaatacttgaagaacgtcttgctgcagttcattttcttgaagccaggtagtgaaagagagagacttcttcctgttataaatacgatgttgcagctcagccctgaagaaaagggaaaacttgctgcggttgctcaagatgaggaagaaaatccttcccgttcttctggatgagcatcctatcttcgtagttggtttggacttcgataggttgatggaaggaatacttctattaaccaaatagaatctgtttacaaaaa

SEQ ID NO: 173931 - DNA, 2848 bp, Homo sapiens
  Payload ID: 14151
  Gene Symbol: RGPD8
  Gene Name: RANBP2-like and GRIP domain containing 8
  ENST ID: ENST00000330575
  CDS Start-End: 78-2792
ctttcctcttggaagtggcgactgctgcggggctgagcggtgctcgcacgcgtctcgggagccaggttggcggcgcgatgaggcgcagcaaggccgatgtggagcggtacgtcgcctcggtgctgggtctcaccccgtcgcctcgacagaagtcaatgaaaggattctattttgcaaagctgtattatgaagctaaagaatatgatcttgctaaaaaatacatatgtacttacattaatgtgcaagagagggatcccaaagctcacagatttctgggtcttctttatgaattggaagaaaacacagagaaagccgttgaatgttacaggcgttcagtggaattaaacccaacacaaaaagatcttgtgttgaagattgcagaattgctttgtaaaaatgatgttactgatggaagagcaaaatactgggtcgaaagagcagcaaaacttttcccaggaagtcctgcaatttataaactaaaggaacagcttctagattgtgaaggtgaagatggatggaataaactttttgacttgattcagtcagaactttatgtaagacctgatgacgtccatgtgaacatccggctagtggagttgtatcgctcaactaaaagattgaaggatgctgtggcccactgccatgaggcagagaggaacatagctttgcgttcaagtttagagtggaattcgtgtgttgtacagacccttaaggaatatctggagtctttacagtgtttggagtctgataaaagtgactggcgagcaaccaatacagacttactgctggcctatgctaatcttatgcttcttacgctttccactagagatgtgcaggaaaatagagaattactggaaagttttgatagtgctcttcagtctgcgaaatcttctttgggtggaaatgatgaactgtcagctactttcttagaaatgaaaggacatttctatatgtatgctggttctctgctcttgaagatgggtcagcatggtaataatgttcaatggcgagctctttctgagctggctgcattgtgctatctcatagcatttcaggttccaagaccaaagattaaattaagagaaggtaaagctggacaaaatctgctggaaatgatggcctgtgaccgactgagccaatcagggcacatgttgctaagcttaagtcgtggcaagcaagatttcttaaaagaggttgttgaaacttttgccaacaaaattgggcagtctgcgttatatgatgctctgttttctagtcagtcacctaaggatacatcttttcttggtagcgatgatattggaaaaattgatgtacaagaaccagagcttgaagatttggctagatacgatgttggtgctattcgagcacataatggtagtcttcagcatcttacttggcttggcttacagtggaattcattgcctgctttacctggaatccgaaaatggctaaaacagcttttccatcgtttgccccatgaaacctcaaggcttgaaacaaatgcgcctgaatcaatatgtattttagatcttgaagtatttctccttggagtagtatataccagccacttacaattaaaggagaaatgtaattctcaccatagctcctatcagccgttatgcctgccctttcctgtgtgtaaacagctttgtacagaaagacaaaaatcttggtgggatgcggtttgtactctgattcacagaaaagcagtacctggaaacttggcaaaattgagacttctagttcagcatgaaataaacactctaagagcccaggaaaaacatggccttcaacctgctctgcttgtacattgggcaaaataccttcagaaaacgggcagcggtcttaattctttttatggtcaactagaatacatagggagaagtgttcattattggaagaaagttttgccattgttgaagataataaagaagaacagtattcctgaacctattgatcctctgtttaaacattttcatagtgtagacattcaggcatcagaaattgttgaatatgaagaagacgcacacataacttttgctatattggatgcagtaaatggaaatatagaagatgctgtgactgcttttgaatctataaaaagtgttgtttcttattggaatcttgcactgatttttcacaggaaggcagaagacattgaaaatgatgccctttctcctgaagaacaagaagaatgcagaaattatctgacaaagaccagggactacctaataaagattatagatgacggtgattcaaatctttcagtggtcaagaaattgcctgtgcccctggagtctgtaaaacagatgcttaattcagtcatgcaggaactcgaagactatagtgaaggaggtcctctctataaaaatggttctttgcgaaatgcagattcagaaataaaacattctacaccgtctcctaccaaatattcactatcaccaagtaaaagttacaagtattctcccgaaacaccacctcgatggacagaagatcggaattctttactgaatatgatttgccaacaagtagaggccattaagaaagaaatgcaggagttgaaactaaatagcagtaagtcagcatcccgtcatcgttggcccacagagaattatggaccagactcggtgcctgatggatatcaggggtcacagacatttcatggggctccactaacagaagcagcacatcgtcattttacaattgagaaacatggagactccaaatggattatttacaggttcacaaaacagctttgtggcactgaaagggcgagagccaagatctcctgatttctgttcctgtgttcatagattctttttccttaataaaagtaaacatatatcaa

SEQ ID NO: 173932 - DNA, 5544 bp, Homo sapiens
  Payload ID: 14151
  Gene Symbol: RGPD8
  Gene Name: RANBP2-like and GRIP domain containing 8
  ENST ID: ENST00000409750
  CDS Start-End: 581-5458
ggcctagggggtgggggtgtgcctggatgtgtgttgcgggggtctgaacccttagttaggaccgggggccctcctttccacttcgtgcagtccctggggtctggggcatcctagccatgcgtggggcctccctgctgggattggagaccccctgacagctggggctggtcccagcattttcgctcttcccccagaaggactcagatgcagggtcttctctgctccccgtcacacagagggtggcacccccgatgggaactctcatttatcaccaaaccagaagataatggagaaactgacagagaagggctgcaagcagctaccgcagggcggtgtgtggatgcagatgggatgggcagatggaggcgggggccagcatcgctgccttcttgcccctcccagaggaccccaggtccccagctcgggcgccccaccagactgctttcattaaggttttctatagataagatcatgtcaagacaccctcagaccacagggcggcgccaccagcccggccgagtgcagctggagcgccgacgtccccgaggatacacagtgctgaggcagaacgcagaagtcaatgaaaggattctattttgcaaagctgtattatgaagctaaagaatatgatcttgctaaaaaatacatatgtacttacattaatgtgcaagagagggatcccaaagctcacagatttctgggtcttctttatgaattggaagaaaacacagagaaagccgttgaatgttacaggcgttcagtggaattaaacccaacacaaaaagatcttgtgttgaagattgcagaattgctttgtaaaaatgatgttactgatggaagagcaaaatactgggtcgaaagagcagcaaaacttttcccaggaagtcctgcaatttataaactaaaggaacagcttctagattgtgaaggtgaagatggatggaataaactttttgacttgattcagtcagaactttatgtaagacctgatgacgtccatgtgaacatccggctagtggagttgtatcgctcaactaaaagattgaaggatgctgtggcccactgccatgaggcagagaggaacatagctttgcgttcaagtttagagtggaattcgtgtgttgtacagacccttaaggttccaagaccaaagattaaattaagagaaggtaaagctggacaaaatctgctggaaatgatggcctgtgaccgactgagccaatcagggcacatgttgctaagcttaagtcgtggcaagcaagatttcttaaaagaggttgttgaaacttttgccaacaaaattgggcagtctgcgttatatgatgctctgttttctagtcagtcacctaaggatacatcttttcttggtagcgatgatattggaaaaattgatgtacaagaaccagagcttgaagatttggctagatacgatgttggtgctattcgagcacataatggtagtcttcagcatcttacttggcttggcttacagtggaattcattgcctgctttacctggaatccgaaaatggctaaaacagcttttccatcgtttgccccatgaaacctcaaggcttgaaacaaatgcgcctgaatcaatatgtattttagatcttgaagtatttctccttggagtagtatataccagccacttacaattaaaggagaaatgtaattctcaccatagctcctatcagccgttatgcctgccctttcctgtgtgtaaacagctttgtacagaaagacaaaaatcttggtgggatgcggtttgtactctgattcacagaaaagcagtacctggaaacttggcaaaattgagacttctagttcagcatgaaataaacactctaagagcccaggaaaaacatggccttcaacctgctctgcttgtacattgggcaaaataccttcagaaaacgggcagcggtcttaattctttttatggtcaactagaatacatagggagaagtgttcattattggaagaaagttttgccattgttgaagataataaagaagaacagtattcctgaacctattgatcctctgtttaaacattttcatagtgtagacattcaggcatcagaaattgttgaatatgaagaagacgcacacataacttttgctatattggatgcagtaaatggaaatatagaagatgctgtgactgcttttgaatctataaaaagtgttgtttcttattggaatcttgcactgatttttcacaggaaggcagaagacattgaaaatgatgccctttctcctgaagaacaagaagaatgcagaaattatctgacaaagaccagggactacctaataaagattatagatgacggtgattcaaatctttcagtggtcaagaaattgcctgtgcccctggagtctgtaaaacagatgcttaattcagtcatgcaggaactcgaagactatagtgaaggaggtcctctctataaaaatggttctttgcgaaatgcagattcagaaataaaacattctacaccgtctcctaccaaatattcactatcaccaagtaaaagttacaagtattctcccgaaacaccacctcgatggacagaagatcggaattctttactgaatatgatttgccaacaagtagaggccattaagaaagaaatgcaggagttgaaactaaatagcagtaagtcagcatcccgtcatcgttggcccacagagaattatggaccagactcggtgcctgatggatatcaggggtcacagacatttcatggggctccactaacagttgcaactactggcccttcagtatattatagtcagtcaccagcatataattcccagtatcttctcagaccagcagctaatgttactcccacaaagggttcttctaatacagaatttaagtcaaccaaagaaggattttccatccctgtgtctgctgatggatttaaatttggcatttcggaaccaggaaatcaagaaaagaaaagggaaaagcctcttgaaaatgatactggcttacaggctcaggatattaggggccggaagaagggccgtggtgtgatttttggccaaacaagtagcacttttacatttgcagatgttgcaaaatcaacttcaggagaaggatttcagtttggcaaaaaagacctcaatttcaagggattttcaggtgctggagaaaaattattctcatcacgatacggtaaaatggccaataaagcaaacacttccggtgactttgagaaagatgatgatgcctataagactgaggacagcgatgacatccattttgaaccagtagttcaaatgcctgaaaaagtagaacttgtaacaggagaagaaggtgaaaaagttctgtattcacagggggtaaaactatttagatttgatgctgaggtaaggcagtggaaagaaaggggcttggggaacttaaaaattctcaaaaacgaggtcaatggcaaactaagaatgctgatgcgaagagaacaagtactaaaagtgtgtgctaatcattggataacgactacaatgaacctgaagcccctctctggatcagatagagcatggatgtggtcagccagtgatttctctgatggtgatgccaaactagagcggttggcagcaaaatttaaaacaccagagctggctgaagaattcaagcagaaatttgaggaatgccagcggcttctgttagacataccacttcaaactccccataaacttgtagatactggcagagctgccaagttaatacagagagctgaagaaatgaagagtggactgaaagatttcaaaacatttttgacaaatgatcaaacaaaagtcactgaggaagaaaataagggttcaggtacaggtgtggccggtgcctcagacacaacaataaaacccaatgctgaaaacactgggcccacattagaatgggataactatgacttaagggaagatgctttggatgatagtgtcagtagtagctcagtacatgcttctccattggcaagtagccctgtgagaaaaaatcttttccgctttgatgagtcaacaacaggatctaacttcagttttaaatctgctttgagtctatctaagtctcctgccaagttgaatcagagtgggacttcagttggcactgatgaagaatctgttgttactcaagaagaagagagagatggacagtactttgaacctgttgttcctttacctgatctagttgaagtatccagtggtgaggaaaatgaacaagttgtttttagtcacagggcagaaatctacagatatgataaagatgttggtcaatggaaagaaaggggcattggtgatataaagattttacagaattatgataataagcaagttcgtatagtgatgagaagggaccaagtattaaaactttgtgccaatcacagaataactccagacatgagtttgcaaaatatgaaagggacagaaagagtatgggtgtggactgcatgtgattttgcagatggagaaagaaaagtagagcatttagctgttcgttttaaactacaggatgttgcagactcgtttaagaaaatttttgatgaagcaaaaacagcccaggaaaaagattctttgataacacctcatgtttctcggtcaagcactcccagagagtcaccatgtggcaaaattgctgtagctgtattagaagaaatcacaagagagaggacagatgttattcagggtgatgatgtagcagatgcagcttcagaagttgaagtgtctagcacatctgaaacaacaacaaaagcagtggtttctcctccaaagtttgtatttgtttcagagtctgttaaaagaatttttagtagtgaaaaatcaaaaccatttgcatttggcaacagttctgccactgggtctttgtttggatttagttttaatgcacctttgaaaagtaacaatagtgaaactagttcagtagcccagagtggatctgaaagcaaagtggaacctaaaaaatgtgaactgtcaaagaactctgatatcgaacagtcttcagatagcaaagtcaaaaatctctctgcttcctttccaacggaagaatcttcaatcaactacacatttaaaacaccagaaaaggagcctccattatggcatgctgaatttaccaaagaagaattggttcagaagctccgttccaccacaaaaagtgcagatcacttaaacggcctgcttcgggaaatagaggcaaccaatgcagtccttatggagcaaattaagcttctcaaaagtgaaataagaagattggaaaggaatcaagagcgagagaagtctgcagctaacctggaatacttgaagaacgtcttgctgcagttcattttcttgaagccaggtagtgaaagagagagacttcttcctgttataaatacgatgttgcagctcagccctgaagaaaagggaaaacttgctgcggttgctcaagatgaggaagaaaatccttcccgttcttctggatgagcatcctatcttcgtagttggtttggacttcgataggttgatggaaggaatacttctattaaccaaatagaatctgtttacaaaaa

SEQ ID NO: 173933 - DNA, 2179 bp, Homo sapiens
  Payload ID: 14151
  Gene Symbol: RGPD8
  Gene Name: RANBP2-like and GRIP domain containing 8
  ENST ID: ENST00000522286
  CDS Start-End: 1-297
tactgggtcgaaagagcagcaaaacttttcccaggaagtcctgcaatttataaactaaaggaacagcttctagattgtgaaggtgaagatggatggaataaactttttgacttgattcagtcagaactttatgtaagacctgatgacgtccatgtgaacatccggctagtggagttgtatcgctcaactaaaagattgaaggatgctgtggcccactgccatgaggcagagaggaacatagctttgcgttcaagtttagagtggaattcgtgtgttgtacagacccttaagttttgatagtgctcttcagtctgcgaaatcttctttgggtggaaatgatgaactgtcagctactttcttagaaatgaaaggacatttctatatgtatgctggttctctgctcttgaagatgggtcagcatggtaataatgttcaatggcgagctctttctgagctggctgcattgtgctatctcatagcatttcaggttccaagaccaaagattaaattaagagaaggtaaagctggacaaaatctgctggaaatgatggcctgtgaccgactgagccaatcagcgatgatattggaaaaattgatgtacaagaaccagagcttgaagatttggctagatacgatgttggtgctattcgagcacataatggtagtcttcagcatcttacttggcttggcttacagtggaattcattgcctgctttacctggaatccgaaaatggctaaaacagcttttccatcgtttgccccatgaaacctcaaggcttgaaacaaatgcgcctgaatcaatatgtattttagatcttgaagtatttctccttggagtagtatataccagccacttacaattaaaggagaaatgtaattctcaccatagctcctatcagccgttatgcctgccctttcctgtgtgtaaacagctttgtacagaaagacaaaaatcttggtgggatgcggtttgtactctgattcacagaaaagcagttaaattgaactattttttagacctggaaacttggcaaaattgagacttctagttcagcatgaaataaacactctaagagcccaggaaaaacatggccttcaacctgctctgcttgtacattgggcaaaataccttcagaaaacgggcagcggtcttaattctttttatggtcaactagaatacatagggagaagtgttcattattggaagaaagttttgccattgttgaagataataaagaagaacagtattcctgaacctattgatcctctgtttaaacattttcatagtgtagacattcaggcatcagaaattgttgaatatgaagaagacgcacacataacttttgctatattggatgcagtaaatggaaatatagaagatgctgtgactgcttttgaatctataaaaagtgttgtttcttattggaatcttgcactgatttttcacaggaaggcagaagacattgaaaatgatgccctttctcctgaagaacaagaagaatgcagaaattatctgacaaagaccagggactacctaataaagattatagatgacggtgattcaaatctttcagtggtcaagaaattgcctgtgcccctggagtctgtaaaacagatgcttaattcagtcatgcaggaactcgaagactatagtgaaggaggtcctctctataaaaatggttctttgcgaaatgcagattcagaaataaaacattctacaccgtctcctaccaaatattcactatcaccaagtaaaagttacaagtattctcccgaaacaccacctcgatggacagaagatcggaattctttactgaatatgatttgccaacaagtagaggccattaagaaagaaatgcaggagttgaaactaaatagcagtaagtcagcatcccgtcatcgttggcccacagagaattatggaccagactcggtgcctgatggatatcaggggtcacagacatttcatggggctccactaacagttgcaactactggcccttcagtatattatagtcagtcaccagcatataattcccagtatcttctcagaccagcagctaatgttactcccacaaagggttcttctaatacagaatttaagtcaaccaaagaaggattttccatccctgtgtctgctgatggatttaaatttggcatttcggaaccaggaaatca

SEQ ID NO: 173934 - DNA, 541 bp, Homo sapiens; identical to SEQ ID NO: 173923
  Payload ID: 14151
  Gene Symbol: RGPD8
  Gene Name: RANBP2-like and GRIP domain containing 8
  ENST ID: ENST00000496537
  CDS Start-End: 86-541

SEQ ID NO: 173935 - DNA, 2511 bp, Homo sapiens
  Payload ID: 14152
  Gene Symbol: RBCK1
  Gene Name: RanBP-type and C3HC4-type zinc finger containing 1
  Uniprot ID: Q9BYM8
  ENST ID: ENST00000353660
  CDS Start-End: 569-1975
gcgccgggaccgctgggaccccgcactcggcgtccgccgccgccgggtagccgggcagtggaggtcccggatgaggcgacaatttttccggccccccctcccagtcccgccccacttccggggccgccactttcactttctcttccgccgaagccgctccccttgcgaagaactggggcctcccgggaggagagagggctttgccttgaaacccgggacgccaggggcgctcccgcaagtgggggtcctccgggacttggaacgccccggctgggtggtgtccgggcgtcctttccccgcttcttcccacctcggctggtcccgtttcctcctgcgcccagtgcggacctgtctcggcgcccgctgccctctcaccgccccacgcaggatcccggcctggtcaccgggcagtgtgatgcttcccgactgccgcggggacagcgaggcacacacagggcttgggccgcgccggaggccacacggcctggctgagttgctcctggtctcccgcctctcccaggcgacccggaggtagcatttcccaggaggcacggtcccccccagggggatgggcacagccacgccagatggacgagaagaccaagaaaggctgtgggtgagcgtggaggatgctcagatgcacaccgtcaccatctggctcacagtgcgccctgatatgacagtggcgtctctcaaggacatggtttttctggactatggcttcccaccagtcttgcagcagtgggtgattgggcagcggctggcacgagaccaggagaccctgcactcccatggggtgcggcagaatggggacagtgcctacctctatctgctgtcagcccgcaacacctccctcaaccctcaggagctgcagcgggagcggcagctgcggatgctggaagatctgggcttcaaggacctcacgctgcagccgcggggccctctggagccaggccccccaaagcccggggtcccccaggaacccggacgggggcagccagatgcagtgcctgagcccccaccggtgggctggcagtgccccgggtgcaccttcatcaacaagcccacgcggcctggctgtgagatgtgctgccgggcgcgccccgaggcctaccaggtccccgcctcataccagcccgacgaggaggagcgagcgcgcctggcgggcgaggaggaggcgctgcgtcagtaccagcagcggaagcagcagcagcaggaggggaactacctgcagcacgtccagctggaccagaggagcctggtgctgaacacggagcccgccgagtgccccgtgtgctactcggtgctggcgcccggcgaggccgtggtgctgcgtgagtgtctgcacaccttctgcagggagtgcctgcagggcaccatccgcaacagccaggaggcggaggtctcctgccccttcattgacaacacctactcgtgctcgggcaagctgctggagagggagatcaaggcgctcctgacccctgaggattaccagcgatttctagacctgggcatctccattgctgaaaaccgcagtgccttcagctaccattgcaagaccccagattgcaagggatggtgcttctttgaggatgatgtcaatgagttcacctgccctgtgtgtttccacgtcaactgcctgctctgcaaggccatccatgagcagatgaactgcaaggagtatcaggaggacctggccctgcgggctcagaacgatgtggctgcccggcagacgacagagatgctgaaggtgatgctgcagcagggcgaggccatgcgctgcccccagtgccagatcgtggtacagaagaaggacggctgcgactggatccgctgcaccgtctgccacaccgagatctgctgggtcaccaagggcccacgctggggccctgggggcccaggagacaccagcgggggctgccgctgcagggtaaatgggattccttgccacccaagctgtcagaactgccactgagctaaagatggtggggccacatgctgacccagccccacatccacattctgttagaatgtagctcagggagcttcgtggacggccttgcttgctgtagcgttgtaggggccctgcctgcactgcggttgtccacggtcacatctgccccagtgcctttgtccttcccttggggcttgccggccagacttctctcccctgcggctcccacctctgcctgaccccagccttaaacatagcccctggccagaggccttgctgggtggagcctctgtgtgactccatactcctcccaccacaacactcatctgtcaaacaccaagcactctcagcctccccgccttcagctgtcagctttctggggctaacttctctgcctttgtggttggaggcctgaggcctcttggaactcttgctaacctgttcagagccaggaaggagactgcacagttttgaaagcacagcccgtcaggtccggctctgcgtctccctctctgcagcctgtgtaagctattataattaaaatggttttccgggaa

SEQ ID NO: 173936 - DNA, 2774 bp, Homo sapiens
  Payload ID: 14152
  Gene Symbol: RBCK1
  Gene Name: RanBP-type and C3HC4-type zinc finger containing 1
  Uniprot ID: Q9BYM8
  ENST ID: ENST00000356286
  CDS Start-End: 706-2238
cgcctgcggcccagctccttcccgcggctctgcgatgcggcccgcagggtgacccgggcgggagtccggggacccgcgatcagccccggaggacggggtggggtcgccccaaacaggagcgccgggaccgctgggaccccgcactcggcgtccgccgccgccgggtagccgggcagtggaggtcccggatgaggcgacaatttttccggccccccctcccagtcccgccccacttccggggccgccactttcactttctcttccgccgaagccgctccccttgcgaagaactggggcctcccgggaggagagagggctttgccttgaaacccgggacgccaggggcgctcccgcaagtgggggtcctccgggacttggaacgccccggctgggtggtgtccgggcgtcctttccccgcttcttcccacctcggctggtcccgtttcctcctgcgcccagtgcggacctgtctcggcgcccgctgccctctcaccgccccacgcaggatcccggcctggtcaccgggcagtgtgatgcttcccgactgccgcggggacagcgaggcacacacagggcttgggccgcgccggaggccacacggcctggctgagttgctcctggtctcccgcctctcccaggcgacccggaggtagcatttcccaggaggcacggtcccccccagggggatgggcacagccacgccagatggacgagaagaccaagaaagcagaggaaatggccctgagcctcacccgagcagtggcgggcggggatgaacaggtggcaatgaagtgtgccatctggctggcagagcaacgggtgcccctgagtgtgcaactgaagcctgaggtctccccaacgcaggacatcaggctgtgggtgagcgtggaggatgctcagatgcacaccgtcaccatctggctcacagtgcgccctgatatgacagtggcgtctctcaaggacatggtttttctggactatggcttcccaccagtcttgcagcagtgggtgattgggcagcggctggcacgagaccaggagaccctgcactcccatggggtgcggcagaatggggacagtgcctacctctatctgctgtcagcccgcaacacctccctcaaccctcaggagctgcagcgggagcggcagctgcggatgctggaagatctgggcttcaaggacctcacgctgcagccgcggggccctctggagccaggccccccaaagcccggggtcccccaggaacccggacgggggcagccagatgcagtgcctgagcccccaccggtgggctggcagtgccccgggtgcaccttcatcaacaagcccacgcggcctggctgtgagatgtgctgccgggcgcgccccgaggcctaccaggtccccgcctcataccagcccgacgaggaggagcgagcgcgcctggcgggcgaggaggaggcgctgcgtcagtaccagcagcggaagcagcagcagcaggaggggaactacctgcagcacgtccagctggaccagaggagcctggtgctgaacacggagcccgccgagtgccccgtgtgctactcggtgctggcgcccggcgaggccgtggtgctgcgtgagtgtctgcacaccttctgcagggagtgcctgcagggcaccatccgcaacagccaggaggcggaggtctcctgccccttcattgacaacacctactcgtgctcgggcaagctgctggagagggagatcaaggcgctcctgacccctgaggattaccagcgatttctagacctgggcatctccattgctgaaaaccgcagtgccttcagctaccattgcaagaccccagattgcaagggatggtgcttctttgaggatgatgtcaatgagttcacctgccctgtgtgtttccacgtcaactgcctgctctgcaaggccatccatgagcagatgaactgcaaggagtatcaggaggacctggccctgcgggctcagaacgatgtggctgcccggcagacgacagagatgctgaaggtgatgctgcagcagggcgaggccatgcgctgcccccagtgccagatcgtggtacagaagaaggacggctgcgactggatccgctgcaccgtctgccacaccgagatctgctgggtcaccaagggcccacgctggggccctgggggcccaggagacaccagcgggggctgccgctgcagggtaaatgggattccttgccacccaagctgtcagaactgccactgagctaaagatggtggggccacatgctgacccagccccacatccacattctgttagaatgtagctcagggagcttcgtggacggccttgcttgctgtagcgttgtaggggccctgcctgcactgcggttgtccacggtcacatctgccccagtgcctttgtccttcccttggggcttgccggccagacttctctcccctgcggctcccacctctgcctgaccccagccttaaacatagcccctggccagaggccttgctgggtggagcctctgtgtgactccatactcctcccaccacaacactcatctgtcaaacaccaagcactctcagcctccccgccttcagctgtcagctttctggggctaacttctctgcctttgtggttggaggcctgaggcctcttggaactcttgctaacctgttcagagccaggaaggagactgcacagttttgaaagcacagcccgtcaggtccggctctgcgtctccctctctgcagcctgtgtaagctattataattaaaatggttttccgggaa

SEQ ID NO: 173937 - DNA, 2208 bp, Homo sapiens
  Payload ID: 14152
  Gene Symbol: RBCK1
  Gene Name: RanBP-type and C3HC4-type zinc finger containing 1
  ENST ID: ENST00000382181
  CDS Start-End: 650-1672
ttccgccgaagccgctccccttgcgaagaactggggcctcccgggaggagagagggctttgccttgaaacccgggacgccaggggcgctcccgcaagtgggggtcctccgggacttggaacgccccggctgggtggtgtccgggcgtcctttccccgcttcttcccacctcggctggtcccgtttcctcctgcgcccagtgcggacctgtctcggcgcccgctgccctctcaccgccccacgcaggatcccggcctggtcaccgggcagtgtgatgcttcccgactgccgcggggacagcgaggcacacacagggcttgggccgcgccggaggccacacggcctggctgagttgctcctggtctcccgcctctcccaggcgacccggaggtagcatttcccaggaggcacggtcccccccagggggatgggcacagccacgccagatggacgagaagaccaagaaaggctgtgggtgagcgtggaggatgctcagatgcacaccgtcaccatctggctcacagtgcgccctgatatgacagtggcgtctctcaaggacatggtttttctggactatggcttcccaccagtcttgcagcagtgggtgattgggcagcggctggcacgagaccaggagaccctgcactcccatggggtgcggcagaatggggacagtgcctacctctatctgctgtcagcccgcaacacctccctcaaccctcaggagctgcagcgggagcggcagctgcggatgctggaagatctgggcttcaaggacctcacgctgcagccgcggggccctctggagccaggccccccaaagcccggggtcccccaggaacccggacgggggcagccagatgcagtgcctgagcccccaccggtgggctggcagtgccccgggtgcaccttcatcaacaagcccacgcggcctggctgtgagatgtgctgccgggcgcgccccgaggcctaccaggtccccgcctcataccagcccgacgaggaggagcgagcgcgcctggcgggcgaggaggaggcgctgcgtcagtaccagcagggagtgcctgcagggcaccatccgcaacagccaggaggcggaggtctcctgccccttcattgacaacacctactcgtgctcgggcaagctgctggagagggagatcaaggcgctcctgacccctgaggattaccagcgatttctagacctgggcatctccattgctgaaaaccgcagtgccttcagctaccattgcaagaccccagattgcaagggatggtgcttctttgaggatgatgtcaatgagttcacctgccctgtgtgtttccacgtcaactgcctgctctgcaaggccatccatgagcagatgaactgcaaggagtatcaggaggacctggccctgcgggctcagaacgatgtggctgcccggcagacgacagagatgctgaaggtgatgctgcagcagggcgaggccatgcgctgcccccagtgccagatcgtggtacagaagaaggacggctgcgactggatccgctgcaccgtctgccacaccgagatctgctgggtcaccaagggcccacgctggggccctgggggcccaggagacaccagcgggggctgccgctgcagggtaaatgggattccttgccacccaagctgtcagaactgccactgagctaaagatggtggggccacatgctgacccagccccacatccacattctgttagaatgtagctcagggagcttcgtggacggccttgcttgctgtagcgttgtaggggccctgcctgcactgcggttgtccacggtcacatctgccccagtgcctttgtccttcccttggggcttgccggccagacttctctcccctgcggctcccacctctgcctgaccccagccttaaacatagcccctggccagaggccttgctgggtggagcctctgtgtgactccatactcctcccaccacaacactcatctgtcaaacaccaagcactctcagcctccccgccttcagctgtcagctttctggggctaacttctctgcctttgtggttggaggcctgaggcctcttggaactcttgctaacctgttcagagccaggaaggagactgcacagttttgaaagcacagcccgtcaggtccggctctgcgtctccctctctgcagcctgtgtaagctattataattaaaatggttttccgggaa

SEQ ID NO: 173938 - DNA, 2752 bp, Homo sapiens
  Payload ID: 14152
  Gene Symbol: RBCK1
  Gene Name: RanBP-type and C3HC4-type zinc finger containing 1
  ENST ID: ENST00000382214
  CDS Start-End: 709-1719
ccccgcctgcggcccagctccttcccgcggctctgcgatgcggcccgcagggtgacccgggcgggagtccggggacccgcgatcagccccggaggacggggtggggtcgccccaaacaggagcgccgggaccgctgggaccccgcactcggcgtccgccgccgccgggtagccgggcagtggaggtcccggatgaggcgacaatttttccggccccccctcccagtcccgccccacttccggggccgccactttcactttctcttccgccgaagccgctccccttgcgaagaactggggcctcccgggaggagagagggctttgccttgaaacccgggacgccaggggcgctcccgcaagtgggggtcctccgggacttggaacgccccggctgggtggtgtccgggcgtcctttccccgcttcttcccacctcggctggtcccgtttcctcctgcgcccagtgcggacctgtctcggcgcccgctgccctctcaccgccccacgcaggatcccggcctggtcaccgggcagtgtgatgcttcccgactgccgcggggacagcgaggcacacacagggcttgggccgcgccggaggccacacggcctggctgagttgctcctggtctcccgcctctcccaggcgacccggaggtagcatttcccaggaggcacggtcccccccagggggatgggcacagccacgccagatggacgagaagaccaagaaagcagaggaaatggccctgagcctcacccgagcagtggcgggcggggatgaacaggtggcaatgaagtgtgccatctggctggcagagcaacgggtgcccctgagtgtgcaactgaagcctgaggtctccccaacgcaggacatcaggctgtgggtgagcgtggaggatgctcagatgcacaccgtcaccatctggctcacagtgcgccctgatatgacagtggcgtctctcaaggacatggtttttctggactatggcttcccaccagtcttgcagcagtgggtgattgggcagcggctggcacgagaccaggagaccctgcactcccatggggtgcggcagaatggggacagtgcctacctctatctgctgtcagcccgcaacacctccctcaaccctcaggagctgcagcgggagcggcagctgcggatgctggaagatctgggcttcaaggacctcacgctgcagccgcggggccctctggagccaggccccccaaagcccggggtcccccaggaacccggacgggggcagccagatgcagtgcctgagcccccaccggtgggctggcagtgccccgggtgcaccttcatcaacaagcccacgcggcctggctgtgagatgtgctgccgggcgcgccccgaggcctaccaggtccccgcctcataccagcccgacgaggaggagcgagcgcgcctggcgggcgaggaggaggcgctgcgtcagtaccagcagcggaagcagcagcagcaggaggggaactacctgcagcacgtccagctggaccagaggagcctggtgctgaacacggagcccgccgagtgccccgtgtgctactcggtgctggcgcccggcgaggccgtggtgctgcggagtgcctgcagggcaccatccgcaacagccaggaggcggaggtctcctgccccttcattgacaacacctactcgtgctcgggcaagctgctggagagggagatcaaggcgctcctgacccctgaggattaccagcgatttctagacctgggcatctccattgctgaaaaccgcagtgccttcagctaccattgcaagaccccagattgcaagggatggtgcttctttgaggatgatgtcaatgagttcacctgccctgtgtgtttccacgtcaactgcctgctctgcaaggccatccatgagcagatgaactgcaaggagtatcaggaggacctggccctgcgggctcagaacgatgtggctgcccggcagacgacagagatgctgaaggtgatgctgcagcagggcgaggccatgcgctgcccccagtgccagatcgtggtacagaagaaggacggctgcgactggatccgctgcaccgtctgccacaccgagatctgctgggtcaccaagggcccacgctggggccctgggggcccaggagacaccagcgggggctgccgctgcagggtaaatgggattccttgccacccaagctgtcagaactgccactgagctaaagatggtggggccacatgctgacccagccccacatccacattctgttagaatgtagctcagggagcttcgtggacggccttgcttgctgtagcgttgtaggggccctgcctgcactgcggttgtccacggtcacatctgccccagtgcctttgtccttcccttggggcttgccggccagacttctctcccctgcggctcccacctctgcctgaccccagccttaaacatagcccctggccagaggccttgctgggtggagcctctgtgtgactccatactcctcccaccacaacactcatctgtcaaacaccaagcactctcagcctccccgccttcagctgtcagctttctggggctaacttctctgcctttgtggttggaggcctgaggcctcttggaactcttgctaacctgttcagagccaggaaggagactgcacagttttgaaagcacagcccgtcaggtccggctctgcgtctccctctctgcagcctgtgtaagctattataattaaaatggttttccgggaa

SEQ ID NO: 173939 - DNA, 790 bp, Homo sapiens
  Payload ID: 14152
  Gene Symbol: RBCK1
  Gene Name: RanBP-type and C3HC4-type zinc finger containing 1
  ENST ID: ENST00000400247
  CDS Start-End: 397-588
ctggggcctcccgggaggagagagggctttgccttgaaacccgggacgccaggggcgctcccgcaagtgggggtcctccgggacttggaacgccccggctgggtggtgtccgggcgtcctttccccgcttcttcccacctcggctggtcccgtttcctcctgcgcccagtgcggacctgtctcggcgcccgctgccctctcaccgccccacgcaggatcccggcctggtcaccgggcagtgtgatgcttcccgactgccgcggggacagcgaggcacacacagggcttgggccgcgccggaggccacacggcctggctgagttgctcctggtctcccgcctctcccaggcgacccggaggtagcatttcccaggaggcacggtcccccccagggggatgggcacagccacgccagatggacgagaagaccaagaaagattcctcatggtgcaaaatggccattccagctccatccagccatcacatcacaggaggaagggaagaaagacacccctccacactcttctaaagagcatagctcaaaaattgtacacacttcttccgttaattcctgtggaccagaactgattcccacagctacagttcagcttgaggggagactgtatagccaagatattcagctagaattcaggggttcgcttggtaagggaagggaagagaatggatactgtcggtctgtgctccaggagacttaaactcaatgctgaaacactttgcacaatgcctggcgtgttatgcactcaataataaacattagtgtctatcgtta

SEQ ID NO: 173940 - DNA, 961 bp, Homo sapiens
  Payload ID: 14152
  Gene Symbol: RBCK1
  Gene Name: RanBP-type and C3HC4-type zinc finger containing 1
  ENST ID: ENST00000441733
  CDS Start-End: 612-961
ggggtggggtcgccccaaacaggagcgccgggaccgctgggaccccgcactcggcgtccgccgccgccgggtagccgggcagtggaggtcccggatgaggcgacaatttttccggccccccctcccagtcccgccccacttccggggccgccactttcactttctcttccgccgaagccgctccccttgcgaagaactggggcctcccgggaggagagagggctttgccttgaaacccgggacgccaggggcgctcccgcaagtgggggtcctccgggacttggaacgccccggctgggtggtgtccgggcgtcctttccccgcttcttcccacctcggctggtcccgtttcctcctgcgcccagtgcggacctgtctcggcgcccgctgccctctcaccgccccacgcaggatcccggcctggtcaccgggcagtgtgatgcttcccgactgccgcggggacagcgaggcacacacagggcttgggccgcgccggaggccacacggcctggctgagttgctcctggtctcccgcctctcccaggcgacccggaggtagcatttcccaggaggcacggtcccccccagggggatgggcacagccacgccagatggacgagaagaccaagaaagaggaaatggccctgagcctcacccgagcagtggcgggcggggatgaacaggtggcaatgaagtgtgccatctggctggcagagcaacgggtgcccctgagtgtgcaactgaagcctgaggtctccccaacgcaggacatcaggctgtgggtgagcgtggaggatgctcagatgcacaccgtcaccatctggctcacagtgcgccctgatatgacagtggcgtctctcaaggacatggtttttctggactatggcttcccaccagtcttgcagcagtgggtgattgggcagcggctggcacgagaccaggagaccctgcactcccatgg

SEQ ID NO: 173941 - DNA, 765 bp, Homo sapiens
  Payload ID: 14152
  Gene Symbol: RBCK1
  Gene Name: RanBP-type and C3HC4-type zinc finger containing 1
  ENST ID: ENST00000414880
  CDS Start-End: 1-765
aggaaatggccctgagcctcacccgagcagtggcgggcggggatgaacaggtggcaatgaagtgtgccatctggctggcagagcaacgggtgcccctgagtgtgcaactgaagcctgaggtctccccaacgcaggacatcaggagcaggggagagaagacagaagaggttggagaggtcagggaggtgccagatcatggaggccctcgtgtgctgccacgagttgattctaagagtagcgtggagccattggaggggcctaactggctgtgggtgagcgtggaggatgctcagatgcacaccgtcaccatctggctcacagtgcgccctgatatgacagtggcgtctctcaaggacatggtttttctggactatggcttcccaccagtcttgcagcagtgggtgattgggcagcggctggcacgagaccaggagaccctgcactcccatggggtgcggcagaatggggacagtgcctacctctatctgctgtcagcccgcaacacctccctcaaccctcaggagctgcagcgggagcggcagctgcggatgctggaagatctgggcttcaaggacctcacgctgcagccgcggggccctctggagccaggccccccaaagcccggggtcccccaggaacccggacgggggcagccagatgcagtgcctgagcccccaccggtgggctggcagtgccccgggtgcaccttcatcaacaagcccacgcggcctggctgtgagatgtgctgccgggcgcgccccgagg

SEQ ID NO: 173942 - DNA, 2613 bp, Homo sapiens
  Payload ID: 14152
  Gene Symbol: RBCK1
  Gene Name: RanBP-type and C3HC4-type zinc finger containing 1
  ENST ID: ENST00000415942
  CDS Start-End: 706-1524
cgcctgcggcccagctccttcccgcggctctgcgatgcggcccgcagggtgacccgggcgggagtccggggacccgcgatcagccccggaggacggggtggggtcgccccaaacaggagcgccgggaccgctgggaccccgcactcggcgtccgccgccgccgggtagccgggcagtggaggtcccggatgaggcgacaatttttccggccccccctcccagtcccgccccacttccggggccgccactttcactttctcttccgccgaagccgctccccttgcgaagaactggggcctcccgggaggagagagggctttgccttgaaacccgggacgccaggggcgctcccgcaagtgggggtcctccgggacttggaacgccccggctgggtggtgtccgggcgtcctttccccgcttcttcccacctcggctggtcccgtttcctcctgcgcccagtgcggacctgtctcggcgcccgctgccctctcaccgccccacgcaggatcccggcctggtcaccgggcagtgtgatgcttcccgactgccgcggggacagcgaggcacacacagggcttgggccgcgccggaggccacacggcctggctgagttgctcctggtctcccgcctctcccaggcgacccggaggtagcatttcccaggaggcacggtcccccccagggggatgggcacagccacgccagatggacgagaagaccaagaaagcagaggaaatggccctgagcctcacccgagcagtggcgggcggggatgaacaggtggcaatgaagtgtgccatctggctggcagagcaacgggtgcccctgagtgtgcaactgaagcctgaggtctccccaacgcaggacatcaggctgtgggtgagcgtggaggatgctcagatgcacaccgtcaccatctggctcacagtgcgccctgatatgacagtggcgtctctcaaggacatggtttttctggactatggcttcccaccagtcttgcagcagtgggtgattgggcagcggctggcacgagaccaggagaccctgcactcccatggggtgcggcagaatggggacagtgcctacctctatctgctgtcagcccgcaacacctccctcaaccctcaggagctgcagcgggagcggcagctgcggatgctggaagatctgggcttcaaggacctcacgctgcagccgcggggccctctggagccaggccccccaaagcccggggtcccccaggaacccggacgggggcagccagatgcagtgcctgagcccccaccggtgggctggcagtgccccgggtgcaccttcatcaacaagcccacgcggcctggctgtgagatgtgctgccgggcgcgccccgaggcctaccaggtccccgcctcataccagcccgacgaggaggagcgagcgcgcctggcgggcgaggaggaggcgctgcgtcagtaccagcagggagtgcctgcagggcaccatccgcaacagccaggaggcggaggtctcctgccccttcattgacaacacctactcgtgctcgggcaagctgctggagagggagatcaaggcgctcctgacccctgaggattaccagcgatttctagacctgggcatctccattgctgaaaaccgcagtgccttcagctaccattgcaagaccccagattgcaagggatggtgcttctttgaggatgatgtcaatgagttcacctgccctgtgtgtttccacgtcaactgcctgctctgcaaggccatccatgagcagatgaactgcaaggagtatcaggaggacctggccctgcgggctcagaacgatgtggctgcccggcagacgacagagatgctgaaggtgatgctgcagcagggcgaggccatgcgctgcccccagtgccagatcgtggtacagaagaaggacggctgcgactggatccgctgcaccgtctgccacaccgagatctgctgggtcaccaagggcccacgctggggccctgggggcccaggagacaccagcgggggctgccgctgcagggtaaatgggattccttgccacccaagctgtcagaactgccactgagctaaagatggtggggccacatgctgacccagccccacatccacattctgttagaatgtagctcagggagcttcgtggacggccttgcttgctgtagcgttgtaggggccctgcctgcactgcggttgtccacggtcacatctgccccagtgcctttgtccttcccttggggcttgccggccagacttctctcccctgcggctcccacctctgcctgaccccagccttaaacatagcccctggccagaggccttgctgggtggagcctctgtgtgactccatactcctcccaccacaacactcatctgtcaaacaccaagcactctcagcctccccgccttcagctgtcagctttctggggctaacttctctgcctttgtggttggaggcctgaggcctcttggaactcttgctaacctgttcagagccaggaaggagactgcacagttttgaaagcacagcccgtcaggtccggctctgcgtctccctctctgcagcctgtgtaagctattataattaaaatggttttccgggaa

SEQ ID NO: 173943 - DNA, 593 bp, Homo sapiens
  Payload ID: 14152
  Gene Symbol: RBCK1
  Gene Name: RanBP-type and C3HC4-type zinc finger containing 1
  ENST ID: ENST00000411647
  CDS Start-End: 242-593
gccggaggaggtgagggatgagattctgcaagtggagcccgcaggatctgctgatcgatgggacgaggaacgggagaaaaattaaagcggcgcatgaggcagacgaatgcaaacttcaccaatagctcaacgaaaagacagacggtgaccgctgagaggcagcgtcggatctgggcgacccggaggtagcatttcccaggaggcacggtcccccccagggggatgggcacagccacgccagatggacgagaagaccaagaaagcagaggaaatggccctgagcctcacccgagcagtggcgggcggggatgaacaggtggcaatgaagtgtgccatctggctggcagagcaacgggtgcccctgagtgtgcaactgaagcctgaggtctccccaacgcaggacatcaggctgtgggtgagcgtggaggatgctcagatgcacaccgtcaccatctggctcacagtgcgccctgatatgacagtggcgtctctcaaggacatggtttttctggactatggcttcccaccagtcttgcagcagtgggtgattgggcagcggctggcacgagaccaggagaccctgcactcccatg

SEQ ID NO: 173944 - DNA, 1200 bp, Homo sapiens
  Payload ID: 14152
  Gene Symbol: RBCK1
  Gene Name: RanBP-type and C3HC4-type zinc finger containing 1
  ENST ID: ENST00000475269
  CDS Start-End: 681-998
ggctctgcgatgcggcccgcagggtgacccgggcgggagtccggggacccgcgatcagccccggaggacggggtggggtcgccccaaacaggagcgccgggaccgctgggaccccgcactcggcgtccgccgccgccgggtagccgggcagtggaggtcccggatgaggcgacaatttttccggccccccctcccagtcccgccccacttccggggccgccactttcactttctcttccgccgaagccgctccccttgcgaagaactggggcctcccgggaggagagagggctttgccttgaaacccgggacgccaggggcgctcccgcaagtgggggtcctccgggacttggaacgccccggctgggtggtgtccgggcgtcctttccccgcttcttcccacctcggctggtcccgtttcctcctgcgcccagtgcggacctgtctcggcgcccgctgccctctcaccgccccacgcaggatcccggcctggtcaccgggcagtgtgatgcttcccgactgccgcggggacagcgaggcacacacagggcttgggccgcgccggaggccacacggcctggctgagttgctcctggtctcccgcctctcccaggcgacccggaggtagcatttcccaggaggcacggtcccccccagggggatgggcacagccacgccagatggacgagaagaccaagaaagcagaggaaatggccctgagcctcacccgagcagtggcgggcggggatgaacaggtggcaatgaagtgtgccatctggctggcagagcaacgggtgcccctgagtgtgcaactgaagcctgaggtctccccaacgcaggacatcagattcctcatggtgcaaaatggccattccagctccatccagccatcacatcacaggaggaagggaagaaagacacccctccacactcttctaaagagcatagctcaaaaattgtacacacttcttccgttaattcctgtggaccagaactgattcccacagctacagttcagcttgaggggagactgtatagccaagatattcagctagaattcaggggttcgcttggtaagggaagggaagagaatggatactgtcggtctgtgctccaggagacttaaactcaatgctgaaacactttgcacaatgcctggcgtgttatgcactcaataataaacattagtgtctatcgtta

SEQ ID NO: 173945 - DNA, 6085 bp, Homo sapiens
  Payload ID: 14153
  Gene Symbol: RAPGEF1
  Gene Name: Rap guanine nucleotide exchange factor (GEF) 1
  Uniprot ID: Q13905
  ENST ID: ENST00000372189
  CDS Start-End: 125-3358
ccttttctgggcaccgccttctgctagggggttgtagatgaaagtgcctgctcccagagaagcttgtctaacctagcacagtttctaagctacccaggctgccagaccgagcgaccgtgctgccatggacacagactctcagcgttctcatctctcttccttcaccatgaagctgatggacaaattccactcacccaaaatcaagagaacgccatcaaagaagggaaaaccagctgaggtgtccgtaaagattccagagaagcctgtgaacaaagaggcaacagacagatttctaccagagggctaccctctccccttggatctggagcagcaggcagtagaatttatgtccaccagtgctgtggcttccaggtctcaaaggcagaagaacctgagctggctggaggagaaagagaaggaagttgtcagtgccctgcgctactttaagaccattgtggacaaaatggcaattgataagaaggtactggagatgcttccagggtcagccagcaaggtgctggaggccatcttacccctggtgcagaacgatcctcgaattcagcacagctcagccctctcttcctgctatagccgagtgtaccaaagcctcgccaacctcattcgctggtctgaccaagtgatgctggaaggcgtgaactcagaagacaaggagatggtgacgactgtgaagggggtcatcaaggctgtgctggatggagtgaaggagctggtcaggctcaccatcgagaagcagggacgtccgtctccgacgagccccgtgaagcccagttcccctgccagcaagcctgatggcccagcagagctccccctgacagaccgcgaggtagagatcctaaacaagacgactgggatgtcacagtcaactgagctcctcccagatgccacggatgaagaggtcgcgccccccaagcctcctctgcctggcattcgggtggttgataatagtcctccaccagcattgccacccaagaaaagacagtcggcgccgtcccctacccgagtggctgtggtggcccccatgagccgagccaccagtggctccagtttgcctgttggaatcaataggcaggattttgatgttgactgttacgcacagaggcgactgtcaggaggcagccactcatatggtggagagtcgccccgcctctccccctgcagcagcataggcaagctcagcaagtcagacgagcagctgtcctctctggacagggacagtgggcagtgctcccggaacacaagctgtgaaacactagaccactatgatcccgactatgaattcctccagcaagacctctctaacgcagaccagatacctcagcagacggcctggaaccttagcccgttgccagagtctttgggggagtctgggtctccatttcttggccctcctttccagctgcctcttggcggccatccccagccagacggacctctggccccagggcagcagacagatacgccacctgctctccccgagaagaagcgcaggagcgcagcctcccagacggcggacggctctggctgcagggtgtcctacgagcggcatccctcgcagtatgacaacatctctggggaggacctgcagagcacagccccgatcccatccgtcccctacgcgccctttgctgctattctgccctttcagcatggaggttcctcagcccctgtcgaatttgtgggtgattttactgctcctgagtcaaccggtgacccagaaaaaccacctcctctaccagagaagaaaaacaaacacatgctggcctacatgcagttgctggaggactactcggagccgcagccctctatgttctaccagacgccacagaacgagcacatctaccagcagaagaacaagctcctcatggaggtatacggcttcagcgactccttcagtggggtggactccgtgcaggagctggccccgccgcccgccctaccccccaagcagcggcagctggagccaccggctgggaaagacggacatcccagagatccctcagcggtcagcggcgtccctgggaaggacagcagagacggcagtgagagggccccaaagtcaccagatgctctggagtcggctcagtcggaggaggaagtggacgagctgtccctcattgaccacaacgaaattatgtccaggctgacgctcaagcaggagggtgatgacgggccggacgtccgcggaggatctggggacatcttactggtccatgctactgagactgacaggaaagatttggtgttgtactgcgaggcattcctgaccacctacaggaccttcatctccccagaggagctcatcaagaagctgcagtacagatatgagaaattctctccctttgccgacacattcaagaagcgcgtcagcaagaacacgttcttcgtgctggtacgggtggtggatgagctctgcctggtggagttgacagaagagatcctgaagctgctgatggaactggtcttccgcctggtgtgcaatggggagctgagcctggcccgtgtgctccggaagaacatcctggacaaggtggaccagaagaagctactcaggtgtgccacctccagccagcccctggcagcccggggggtagcagccaggccggggaccttgcacgactttcacagccatgagatagcggagcagctaacgctgctggatgctgagctcttctataaaatagagattcctgaggttttgctttgggcaaaagagcagaatgaggagaagagccccaacttgacccagttcacggagcacttcaacaacatgtcctactgggtccggtccataatcatgttacaggaaaaggcccaggacagggaacggctgctcttgaagttcatcaagatcatgaagcacttgcggaagctgaataacttcaactcctacttggccatcctctctgccctggactcggcgcccatccgcaggctggagtggcagaagcagacttcagagggcctggccgagtactgcacactgatcgacagctcgtcctccttccgagcctaccgggccgccctctcggaggtggaaccgccgtgcatcccgtacctggggctgatcctgcaggacctgaccttcgttcacctgggaaacccagactacatcgacgggaaagtgaacttctccaagcggtggcagcagttcaacatcctcgacagcatgcgctgcttccagcaggcgcactatgacatgcggaggaacgacgacattataaacttcttcaatgacttcagtgaccacctggctgaggaggccctatgggaactgtctctgaaaattaaacccaggaacataacaaggagaaaaacagaccgggaagagaagacctaggagcagacgccgggatccaggagaatgctcgaggggcgcagagggcagctcccagaccggagaggaccttggacctgttaggcgcatggcaggagtcccggcctcggagccatgaggctggccagccctcagcggggccgggcgggagctggagcctgccagccgcttcctgcctccttcctctgtgggagcagacccgtgggcctcagggcagccagcaggcaggtcttgttgccaatttacaaaccggtggttttctggtttggttttgttttctgcttttacttccatctctcccctcttgaccttccacccactcccctccagggagagagcagcagagacctcatcagcagaccaaggaagtggtgggtgctccccctccctaagctccagggtccctgaatcttctgaaatctcaaatgagtggaggcctcctggggtggcctgtcctgcaggggccctggaatgggggcaagcagctgggtgggcagaatgcagagtagactcgggggaggatcctttcactttccgcttccccttctgatgcatggaggatggtgtgagcttttcagcaggcccggaaaggtacgcaggtgacgccttagcagccccgcagctggtgctctgccccgcggtactggcgccatcagggcctcccttgcccgcctgagagcagcagcagtctctgtcatcccgtcgccccttaccccccaccccaggccactgggcccctcccacaccacctggggagctgagaagaggaggctggagtaagggaggacttgatcatccaagaaatactttttattgctgggagtcttctgaacctcaccaaactgaggccagagctgagctcctgggggagttaattcagaggggagaggccagcacctccctcctccatcgctcgctgtgtgccttaaactccatctcatgtccctccccatcccctggctttccctccctccttgccccatcctgggccagccagcagggctcctcctctggctcttcagacctttcagccagtgctgtcagtgcccctgggagggaagggcatccctgaggcacccgaatggtccctcagggtgcagggaggcagaagcctggccacagaggagcctcctaaggcagcagctgcagcaagcgcaccctctccccactctccccacgccagagcggcttccagagcagatgctgtttccatcctcctcgtcaaaaccattctcgctgctgagcttgacaatctgggcaaggcttgtggggcgcttgacaaacagaatctgccctgtgccgcctggttccgtggcctccagcatgagcctgcaggcagggcgctgcgggaacccagttgtgctgccccagcccatgcctccgggtctgctgtgcatgaatgagtgctcacttgtcccgggtttaggacgtggtcaagtgaacagcagggtctaactgtgcttacttagcccagttcaaacagaacaaaggaaaaatatagaaagcaacatctgttgatcatttaggtttttttttaaaccaccatgtcactttgagtccttcatgggtttttgaacagcatttatcaagaagaaaatgtgggctttttcccctctcccgtgttttgtttgtcctgtagatagagggaggaaagccgtgcagtggcaggcgggaccccctctggtggcgggaccccctcttgcggtggtcttgcggggccagccgggacctgtcactttattatttaaggagtgtgtgtgtagagtcgctggcttattaacagtattgtgtgtgggttgggtttttagtttgttccttctttttgaagtcccttcatttcaatccttgactctctctccccttcccttgcccagctctgttgaatgctgctgtgcgcgtgtgagggccgctctgcacacagggcccttgggttgtgtgaactgaaattctccctgtatttgtgagactcgcaggagtccccatctgtagcacaggcaatgccagtgccatgctgcagcctcagaaaccaggcctctcactccagcagcaggcagaaccgtgtctgtggtcgggtgctgtccacagctctgtctgccttgttcttgggcttgagctggatagaggtggggtctcttcaccttccctgaattcagaacagaccctgtgcctggccccagtgtgcccaggcaattccccaggccctcactgggagcccttggtgttctgagcagcagggcccaggcagcacatgagcagtgcccaggggctccctgcgtgaggacggcaaggtgcgatgtatgtctaacttattgatggcaggcagccccctgtgccccctaagcctggccctggttattgctgagctctgtgctcagtgctgcggcctggccgtggctcgtctgttcctttggggggcccgggcgggttgtgggaatcagtcttcacagacagacgtgagccaggcggaggactcgttccttgcagaggtcagtcctcacctgcaggtgtcggggtgtgggggggcaaggaggggcaggcacacaccatgtctgacctgaacccgattctggggagcatcttcccgctccggccccacgacctccacagggttacattgtaatatatatgccccagctaacctgtctgatggtggcatcttcctgcagacatttcaaacatgtaacttttatatgaaaaaaaataaacacagatgaaagctgcccaatgcca

SEQ ID NO: 173946 - DNA, 6045 bp, Homo sapiens
  Payload ID: 14153
  Gene Symbol: RAPGEF1
  Gene Name: Rap guanine nucleotide exchange factor (GEF) 1
  Uniprot ID: Q13905
  ENST ID: ENST00000372190
  CDS Start-End: 39-3326
ctggggctgggaagggccctgtgtcctctggctttaaaatgggcaatgctattgaaaaacagaagcccttgaaacgaagtcatctgtacccctggaaacaagactctcagcgttctcatctctcttccttcaccatgaagctgatggacaaattccactcacccaaaatcaagagaacgccatcaaagaagggaaaaccagctgaggtgtccgtaaagattccagagaagcctgtgaacaaagaggcaacagacagatttctaccagagggctaccctctccccttggatctggagcagcaggcagtagaatttatgtccaccagtgctgtggcttccaggtctcaaaggcagaagaacctgagctggctggaggagaaagagaaggaagttgtcagtgccctgcgctactttaagaccattgtggacaaaatggcaattgataagaaggtactggagatgcttccagggtcagccagcaaggtgctggaggccatcttacccctggtgcagaacgatcctcgaattcagcacagctcagccctctcttcctgctatagccgagtgtaccaaagcctcgccaacctcattcgctggtctgaccaagtgatgctggaaggcgtgaactcagaagacaaggagatggtgacgactgtgaagggggtcatcaaggctgtgctggatggagtgaaggagctggtcaggctcaccatcgagaagcagggacgtccgtctccgacgagccccgtgaagcccagttcccctgccagcaagcctgatggcccagcagagctccccctgacagaccgcgaggtagagatcctaaacaagacgactgggatgtcacagtcaactgagctcctcccagatgccacggatgaagaggtcgcgccccccaagcctcctctgcctggcattcgggtggttgataatagtcctccaccagcattgccacccaagaaaagacagtcggcgccgtcccctacccgagtggctgtggtggcccccatgagccgagccaccagtggctccagtttgcctgttggaatcaataggcaggattttgatgttgactgttacgcacagaggcgactgtcaggaggcagccactcatatggtggagagtcgccccgcctctccccctgcagcagcataggcaagctcagcaagtcagacgagcagctgtcctctctggacagggacagtgggcagtgctcccggaacacaagctgtgaaacactagaccactatgatcccgactatgaattcctccagcaagacctctctaacgcagaccagatacctcagcagacggcctggaaccttagcccgttgccagagtctttgggggagtctgggtctccatttcttggccctcctttccagctgcctcttggcggccatccccagccagacggacctctggccccagggcagcagacagatacgccacctgctctccccgagaagaagcgcaggagcgcagcctcccagacggcggacggctctggctgcagggtgtcctacgagcggcatccctcgcagtatgacaacatctctggggaggacctgcagagcacagccccgatcccatccgtcccctacgcgccctttgctgctattctgccctttcagcatggaggttcctcagcccctgtcgaatttgtgggtgattttactgctcctgagtcaaccggtgacccagaaaaaccacctcctctaccagagaagaaaaacaaacacatgctggcctacatgcagttgctggaggactactcggagccgcagccctctatgttctaccagacgccacagaacgagcacatctaccagcagaagaacaagctcctcatggaggtatacggcttcagcgactccttcagtggggtggactccgtgcaggagctggccccgccgcccgccctaccccccaagcagcggcagctggagccaccggctgggaaagacggacatcccagagatccctcagcggtcagcggcgtccctgggaaggacagcagagacggcagtgagagggccccaaagtcaccagatgctctggagtcggctcagtcggaggaggaagtggacgagctgtccctcattgaccacaacgaaattatgtccaggctgacgctcaagcaggagggtgatgacgggccggacgtccgcggaggatctggggacatcttactggtccatgctactgagactgacaggaaagatttggtgttgtactgcgaggcattcctgaccacctacaggaccttcatctccccagaggagctcatcaagaagctgcagtacagatatgagaaattctctccctttgccgacacattcaagaagcgcgtcagcaagaacacgttcttcgtgctggtacgggtggtggatgagctctgcctggtggagttgacagaagagatcctgaagctgctgatggaactggtcttccgcctggtgtgcaatggggagctgagcctggcccgtgtgctccggaagaacatcctggacaaggtggaccagaagaagctactcaggtgtgccacctccagccagcccctggcagcccggggggtagcagccaggccggggaccttgcacgactttcacagccatgagatagcggagcagctaacgctgctggatgctgagctcttctataaaatagagattcctgaggttttgctttgggcaaaagagcagaatgaggagaagagccccaacttgacccagttcacggagcacttcaacaacatgtcctactgggtccggtccataatcatgttacaggaaaaggcccaggacagggaacggctgctcttgaagttcatcaagatcatgaagcacttgcggaagctgaataacttcaactcctacttggccatcctctctgccctggactcggcgcccatccgcaggctggagtggcagaagcagacttcagagggcctggccgagtactgcacactgatcgacagctcgtcctccttccgagcctaccgggccgccctctcggaggtggaaccgccgtgcatcccgtacctggggctgatcctgcaggacctgaccttcgttcacctgggaaacccagactacatcgacgggaaagtgaacttctccaagcggtggcagcagttcaacatcctcgacagcatgcgctgcttccagcaggcgcactatgacatgcggaggaacgacgacattataaacttcttcaatgacttcagtgaccacctggctgaggaggccctatgggaactgtctctgaaaattaaacccaggaacataacaaggagaaaaacagaccgggaagagaagacctaggagcagacgccgggatccaggagaatgctcgaggggcgcagagggcagctcccagaccggagaggaccttggacctgttaggcgcatggcaggagtcccggcctcggagccatgaggctggccagccctcagcggggccgggcgggagctggagcctgccagccgcttcctgcctccttcctctgtgggagcagacccgtgggcctcagggcagccagcaggcaggtcttgttgccaatttacaaaccggtggttttctggtttggttttgttttctgcttttacttccatctctcccctcttgaccttccacccactcccctccagggagagagcagcagagacctcatcagcagaccaaggaagtggtgggtgctccccctccctaagctccagggtccctgaatcttctgaaatctcaaatgagtggaggcctcctggggtggcctgtcctgcaggggccctggaatgggggcaagcagctgggtgggcagaatgcagagtagactcgggggaggatcctttcactttccgcttccccttctgatgcatggaggatggtgtgagcttttcagcaggcccggaaaggtacgcaggtgacgccttagcagccccgcagctggtgctctgccccgcggtactggcgccatcagggcctcccttgcccgcctgagagcagcagcagtctctgtcatcccgtcgccccttaccccccaccccaggccactgggcccctcccacaccacctggggagctgagaagaggaggctggagtaagggaggacttgatcatccaagaaatactttttattgctgggagtcttctgaacctcaccaaactgaggccagagctgagctcctgggggagttaattcagaggggagaggccagcacctccctcctccatcgctcgctgtgtgccttaaactccatctcatgtccctccccatcccctggctttccctccctccttgccccatcctgggccagccagcagggctcctcctctggctcttcagacctttcagccagtgctgtcagtgcccctgggagggaagggcatccctgaggcacccgaatggtccctcagggtgcagggaggcagaagcctggccacagaggagcctcctaaggcagcagctgcagcaagcgcaccctctccccactctccccacgccagagcggcttccagagcagatgctgtttccatcctcctcgtcaaaaccattctcgctgctgagcttgacaatctgggcaaggcttgtggggcgcttgacaaacagaatctgccctgtgccgcctggttccgtggcctccagcatgagcctgcaggcagggcgctgcgggaacccagttgtgctgccccagcccatgcctccgggtctgctgtgcatgaatgagtgctcacttgtcccgggtttaggacgtggtcaagtgaacagcagggtctaactgtgcttacttagcccagttcaaacagaacaaaggaaaaatatagaaagcaacatctgttgatcatttaggtttttttttaaaccaccatgtcactttgagtccttcatgggtttttgaacagcatttatcaagaagaaaatgtgggctttttcccctctcccgtgttttgtttgtcctgtagatagagggaggaaagccgtgcagtggcaggcgggaccccctctggtggcgggaccccctcttgcggtggtcttgcggggccagccgggacctgtcactttattatttaaggagtgtgtgtgtagagtcgctggcttattaacagtattgtgtgtgggttgggtttttagtttgttccttctttttgaagtcccttcatttcaatccttgactctctctccccttcccttgcccagctctgttgaatgctgctgtgcgcgtgtgagggccgctctgcacacagggcccttgggttgtgtgaactgaaattctccctgtatttgtgagactcgcaggagtccccatctgtagcacaggcaatgccagtgccatgctgcagcctcagaaaccaggcctctcactccagcagcaggcagaaccgtgtctgtggtcgggtgctgtccacagctctgtctgccttgttcttgggcttgagctggatagaggtggggtctcttcaccttccctgaattcagaacagaccctgtgcctggccccagtgtgcccaggcaattccccaggccctcactgggagcccttggtgttctgagcagcagggcccaggcagcacatgagcagtgcccaggggctccctgcgtgaggacggcaaggtgcgatgtatgtctaacttattgatggcaggcagccccctgtgccccctaagcctggccctggttattgctgagctctgtgctcagtgctgcggcctggccgtggctcgtctgttcctttggggggcccgggcgggttgtgggaatcagtcttcacagacagacgtgagccaggcggaggactcgttccttgcagaggtcagtcctcacctgcaggtgtcggggtgtgggggggcaaggaggggcaggcacacaccatgtctgacctgaacccgattctggggagcatcttcccgctccggccccacgacctccacagggttacattgtaatatatatgccccagctaacctgtctgatggtggcatcttcctgcagacatttcaaacatgtaacttttatatgaaaaaaaataaacacagatgaaagctgcc

SEQ ID NO: 173947 - DNA, 6256 bp, Homo sapiens
  Payload ID: 14153
  Gene Symbol: RAPGEF1
  Gene Name: Rap guanine nucleotide exchange factor (GEF) 1
  Uniprot ID: Q13905
  ENST ID: ENST00000372195
  CDS Start-End: 245-3529
cgctgcgctgcggccggctcgcgggccgggggagcggcggcgggcgcgcgggaggcggagcggcggcggcgggcgcggcgggagcggctgggcccgggcgggctggagcgcggtcgccgagcgcagggccgcggccgcgcggagcccgccatgccggcgcgggtctgaggcgtggcgagccagggccgaggcgagcggcgggcgcgccgcccctgtcgccccgcggcggcccggcccgggcccgatgagcggcggcctcggcctccggcgcagcccggaaatgtccggcaagatcgagaaagcagactctcagcgttctcatctctcttccttcaccatgaagctgatggacaaattccactcacccaaaatcaagagaacgccatcaaagaagggaaaaccagctgaggtgtccgtaaagattccagagaagcctgtgaacaaagaggcaacagacagatttctaccagagggctaccctctccccttggatctggagcagcaggcagtagaatttatgtccaccagtgctgtggcttccaggtctcaaaggcagaagaacctgagctggctggaggagaaagagaaggaagttgtcagtgccctgcgctactttaagaccattgtggacaaaatggcaattgataagaaggtactggagatgcttccagggtcagccagcaaggtgctggaggccatcttacccctggtgcagaacgatcctcgaattcagcacagctcagccctctcttcctgctatagccgagtgtaccaaagcctcgccaacctcattcgctggtctgaccaagtgatgctggaaggcgtgaactcagaagacaaggagatggtgacgactgtgaagggggtcatcaaggctgtgctggatggagtgaaggagctggtcaggctcaccatcgagaagcagggacgtccgtctccgacgagccccgtgaagcccagttcccctgccagcaagcctgatggcccagcagagctccccctgacagaccgcgaggtagagatcctaaacaagacgactgggatgtcacagtcaactgagctcctcccagatgccacggatgaagaggtcgcgccccccaagcctcctctgcctggcattcgggtggttgataatagtcctccaccagcattgccacccaagaaaagacagtcggcgccgtcccctacccgagtggctgtggtggcccccatgagccgagccaccagtggctccagtttgcctgttggaatcaataggcaggattttgatgttgactgttacgcacagaggcgactgtcaggaggcagccactcatatggtggagagtcgccccgcctctccccctgcagcagcataggcaagctcagcaagtcagacgagcagctgtcctctctggacagggacagtgggcagtgctcccggaacacaagctgtgaaacactagaccactatgatcccgactatgaattcctccagcaagacctctctaacgcagaccagatacctcagcagacggcctggaaccttagcccgttgccagagtctttgggggagtctgggtctccatttcttggccctcctttccagctgcctcttggcggccatccccagccagacggacctctggccccagggcagcagacagatacgccacctgctctccccgagaagaagcgcaggagcgcagcctcccagacggcggacggctctggctgcagggtgtcctacgagcggcatccctcgcagtatgacaacatctctggggaggacctgcagagcacagccccgatcccatccgtcccctacgcgccctttgctgctattctgccctttcagcatggaggttcctcagcccctgtcgaatttgtgggtgattttactgctcctgagtcaaccggtgacccagaaaaaccacctcctctaccagagaagaaaaacaaacacatgctggcctacatgcagttgctggaggactactcggagccgcagccctctatgttctaccagacgccacagaacgagcacatctaccagcagaagaacaagctcctcatggaggtatacggcttcagcgactccttcagtggggtggactccgtgcaggagctggccccgccgcccgccctaccccccaagcagcggcagctggagccaccggctgggaaagacggacatcccagagatccctcagcggtcagcggcgtccctgggaaggacagcagagacggcagtgagagggccccaaagtcaccagatgctctggagtcggctcagtcggaggaggaagtggacgagctgtccctcattgaccacaacgaaattatgtccaggctgacgctcaagcaggagggtgatgacgggccggacgtccgcggaggatctggggacatcttactggtccatgctactgagactgacaggaaagatttggtgttgtactgcgaggcattcctgaccacctacaggaccttcatctccccagaggagctcatcaagaagctgcagtacagatatgagaaattctctccctttgccgacacattcaagaagcgcgtcagcaagaacacgttcttcgtgctggtacgggtggtggatgagctctgcctggtggagttgacagaagagatcctgaagctgctgatggaactggtcttccgcctggtgtgcaatggggagctgagcctggcccgtgtgctccggaagaacatcctggacaaggtggaccagaagaagctactcaggtgtgccacctccagccagcccctggcagcccggggggtagcagccaggccggggaccttgcacgactttcacagccatgagatagcggagcagctaacgctgctggatgctgagctcttctataaaatagagattcctgaggttttgctttgggcaaaagagcagaatgaggagaagagccccaacttgacccagttcacggagcacttcaacaacatgtcctactgggtccggtccataatcatgttacaggaaaaggcccaggacagggaacggctgctcttgaagttcatcaagatcatgaagcacttgcggaagctgaataacttcaactcctacttggccatcctctctgccctggactcggcgcccatccgcaggctggagtggcagaagcagacttcagagggcctggccgagtactgcacactgatcgacagctcgtcctccttccgagcctaccgggccgccctctcggaggtggaaccgccgtgcatcccgtacctggggctgatcctgcaggacctgaccttcgttcacctgggaaacccagactacatcgacgggaaagtgaacttctccaagcggtggcagcagttcaacatcctcgacagcatgcgctgcttccagcaggcgcactatgacatgcggaggaacgacgacattataaacttcttcaatgacttcagtgaccacctggctgaggaggccctatgggaactgtctctgaaaattaaacccaggaacataacaaggagaaaaacagaccgggaagagaagacctaggagcagacgccgggatccaggagaatgctcgaggggcgcagagggcagctcccagaccggagaggaccttggacctgttaggcgcatggcaggagtcccggcctcggagccatgaggctggccagccctcagcggggccgggcgggagctggagcctgccagccgcttcctgcctccttcctctgtgggagcagacccgtgggcctcagggcagccagcaggcaggtcttgttgccaatttacaaaccggtggttttctggtttggttttgttttctgcttttacttccatctctcccctcttgaccttccacccactcccctccagggagagagcagcagagacctcatcagcagaccaaggaagtggtgggtgctccccctccctaagctccagggtccctgaatcttctgaaatctcaaatgagtggaggcctcctggggtggcctgtcctgcaggggccctggaatgggggcaagcagctgggtgggcagaatgcagagtagactcgggggaggatcctttcactttccgcttccccttctgatgcatggaggatggtgtgagcttttcagcaggcccggaaaggtacgcaggtgacgccttagcagccccgcagctggtgctctgccccgcggtactggcgccatcagggcctcccttgcccgcctgagagcagcagcagtctctgtcatcccgtcgccccttaccccccaccccaggccactgggcccctcccacaccacctggggagctgagaagaggaggctggagtaagggaggacttgatcatccaagaaatactttttattgctgggagtcttctgaacctcaccaaactgaggccagagctgagctcctgggggagttaattcagaggggagaggccagcacctccctcctccatcgctcgctgtgtgccttaaactccatctcatgtccctccccatcccctggctttccctccctccttgccccatcctgggccagccagcagggctcctcctctggctcttcagacctttcagccagtgctgtcagtgcccctgggagggaagggcatccctgaggcacccgaatggtccctcagggtgcagggaggcagaagcctggccacagaggagcctcctaaggcagcagctgcagcaagcgcaccctctccccactctccccacgccagagcggcttccagagcagatgctgtttccatcctcctcgtcaaaaccattctcgctgctgagcttgacaatctgggcaaggcttgtggggcgcttgacaaacagaatctgccctgtgccgcctggttccgtggcctccagcatgagcctgcaggcagggcgctgcgggaacccagttgtgctgccccagcccatgcctccgggtctgctgtgcatgaatgagtgctcacttgtcccgggtttaggacgtggtcaagtgaacagcagggtctaactgtgcttacttagcccagttcaaacagaacaaaggaaaaatatagaaagcaacatctgttgatcatttaggtttttttttaaaccaccatgtcactttgagtccttcatgggtttttgaacagcatttatcaagaagaaaatgtgggctttttcccctctcccgtgttttgtttgtcctgtagatagagggaggaaagccgtgcagtggcaggcgggaccccctctggtggcgggaccccctcttgcggtggtcttgcggggccagccgggacctgtcactttattatttaaggagtgtgtgtgtagagtcgctggcttattaacagtattgtgtgtgggttgggtttttagtttgttccttctttttgaagtcccttcatttcaatccttgactctctctccccttcccttgcccagctctgttgaatgctgctgtgcgcgtgtgagggccgctctgcacacagggcccttgggttgtgtgaactgaaattctccctgtatttgtgagactcgcaggagtccccatctgtagcacaggcaatgccagtgccatgctgcagcctcagaaaccaggcctctcactccagcagcaggcagaaccgtgtctgtggtcgggtgctgtccacagctctgtctgccttgttcttgggcttgagctggatagaggtggggtctcttcaccttccctgaattcagaacagaccctgtgcctggccccagtgtgcccaggcaattccccaggccctcactgggagcccttggtgttctgagcagcagggcccaggcagcacatgagcagtgcccaggggctccctgcgtgaggacggcaaggtgcgatgtatgtctaacttattgatggcaggcagccccctgtgccccctaagcctggccctggttattgctgagctctgtgctcagtgctgcggcctggccgtggctcgtctgttcctttggggggcccgggcgggttgtgggaatcagtcttcacagacagacgtgagccaggcggaggactcgttccttgcagaggtcagtcctcacctgcaggtgtcggggtgtgggggggcaaggaggggcaggcacacaccatgtctgacctgaacccgattctggggagcatcttcccgctccggccccacgacctccacagggttacattgtaatatatatgccccagctaacctgtctgatggtggcatcttcctgcagacatttcaaacatgtaacttttatatgaaaaaaaataaacacagatgaaagctgcccaatgcca

SEQ ID NO: 173948 - DNA, 683 bp, Homo sapiens
  Payload ID: 14153
  Gene Symbol: RAPGEF1
  Gene Name: Rap guanine nucleotide exchange factor (GEF) 1
  ENST ID: ENST00000419442
  CDS Start-End: 1-683
ctctaccagagaagaaaaacaaacacatgctggcctacatgcagttgctggaggactactcggagccgcagccctctatgttctaccagacgccacagaacgagcacatctaccagcagaagaacaagctcctcatggaggtatacggcttcagcgactccttcagtggggtggactccgtgcaggagctggccccgccgcccgccctaccccccaagcagcggcagctgcaggcctcctgtgctgcttcttccttctcctctgtctcccactgtgtccagcaaactaaagtggccttcacccccgaggacggcagtgccgctcagggcctcagtgtgtccgtctctaactcctttctcagccggcacggcagcttgcccgtgccctcgtataagtctgtgtttaggtcctactcccaggatttcgtgcctcaccaccaagcttccgttccgcctttccttccgcctacctcctcttcctctccacatttcccacctgcccaccagtctcagagctctgacttagccgtgccaaccatggccggtccacctcccagcaccgtggacgggcctctctcggcttctcaggagagcagctttcatgggaatactgtctgccttccttccgaaacctctttcactgactcggagccaccggctgggaaagacggacatcccagagat

SEQ ID NO: 173949 - DNA, 957 bp, Homo sapiens
  Payload ID: 14153
  Gene Symbol: RAPGEF1
  Gene Name: Rap guanine nucleotide exchange factor (GEF) 1
  ENST ID: ENST00000414781
  CDS Start-End: 1-957
gctggccccgccgcccgccctaccccccaagcagcggcagctgagtgaaaacgccagtgaggaagctggtgagggtgaatatgtcaatctgtattcctctggccagagcagcgaggagctggctccctctcgaggagagccaccggctgggaaagacggacatcccagagatccctcagcggtcagcggcgtccctgggaaggacagcagagacggcagtgagagggccccaaagtcaccagatgctctggagtcggctcagtcggaggaggaagtggacgagctgtccctcattgaccacaacgaaattatgtccaggctgacgctcaagcaggagggtgatgacgggccggacgtccgcggaggatctggggacatcttactggtccatgctactgagactgacaggaaagatttggtgttgtactgcgaggcattcctgaccacctacaggaccttcatctccccagaggagctcatcaagaagctgcagtacagatatgagaaattctctccctttgccgacacattcaagaagcgcgtcagcaagaacacgttcttcgtgctggtacgggtggtggatgagctctgcctggtggagttgacagaagagatcctgaagctgctgatggaactggtcttccgcctggtgtgcaatggggagctgagcctggcccgtgtgctccggaagaacatcctggacaaggtggaccagaagaagctactcaggtgtgccacctccagccagcccctggcagcccggggggtagcagccaggccggggaccttgcacgactttcacagccatgagatagcggagcagctaacgctgctggatgctgagctcttctataaaatagagattcctgaggttttgctttgggcaaaagagcagaatgaggagaagagccccaacttgacccagttcacggagcacttcaacaacatgtcctactg

SEQ ID NO: 173950 - DNA, 588 bp, Homo sapiens
  Payload ID: 14153
  Gene Symbol: RAPGEF1
  Gene Name: Rap guanine nucleotide exchange factor (GEF) 1
  ENST ID: ENST00000438647
  CDS Start-End: 115-588
gcggccgcgcggagcccgccatgccggcgcgggtctgaggcgtggcgagccagggccgaggcgagcggcgggcgcgccgcccctgtcgccccgcggcggcccggcccgggcccgatgagcggcggcctcggcctccggcgcagcccggaaatgtccggcaagatcgagaaagcagactctcagcgttctcatctctcttccttcaccatgaagctgatggacaaattccactcacccaaaatcaagagaacgccatcaaagaagggaaaaccagctgaggtgtccgtaaagattccagagaagcctgtgaacaaaaacctgagctggctggaggagaaagagaaggaagttgtcagtgccctgcgctactttaagaccattgtggacaaaatggcaattgataagaaggtactggagatgcttccagggtcagccagcaaggtgctggaggccatcttacccctggtgcagaacgatcctcgaattcagcacagctcagccctctcttcctgctatagccgagtgtaccaaagcctcgccaacctcattcgctggtctgaccaagtgatgctggaaggcgtgaactca

SEQ ID NO: 173951 - DNA, 6949 bp, Homo sapiens
  Payload ID: 14154
  Gene Symbol: RAPGEF2
  Gene Name: Rap guanine nucleotide exchange factor (GEF) 2
  Uniprot ID: Q9Y4G8
  ENST ID: ENST00000264431
  CDS Start-End: 420-4919
gtgttaagcctttttgaggggagtctgtgtgcagtcagccattttagcttttttcttttttttttttttttcctctccttttcttttgcctcttgttcttcaatctcagaaatgatcttgttctcttggaagactgagagctgtgtgaggttttctcagtcttgtcatagcctaggatggttagagtttcaatgttataaaaatggagacgaacactgttgttcggattccttttctggtctacaagtgtgaagggtttttaagcttaccagtagtgacactttaagctgcagcttggttttccctcctccctttttttttttcctttttcttttaatttaatgctgtagagggtgacttgccatcgtgagagattggtacatgatgtgtaaattcagttcagcatatgtttcttcattatgaaaccactagcaatcccagctaaccatggagttatgggccagcaggagaaacactcacttcctgcagatttcacaaaactgcatcttactgacagtctccacccacaggtgacccacgtttcttctagccattcaggatgtagtatcactagtgattctgggagcagcagtctttctgatatctaccaggccacagaaagcgaggctggtgatatggacctgagtgggttgccagaaacagcagtggattccgaagacgacgacgatgaagaagacattgagagagcatcagatcctctgatgagcagggacattgtgagagactgcctagagaaggacccaattgaccggacagatgatgacattgaacaactcttggaatttatgcaccagttgcctgcttttgccaatatgacaatgtcagtgaggcgagaactctgtgctgtgatggtgttcgcagtggtggaaagagcagggaccatagtgttaaatgatggtgaagagctggactcctggtcagtgattctcaatggatctgtggaagtgacttatccagatggaaaagcagaaatactgtgcatgggaaatagttttggtgtctctcctaccatggacaaagaatacatgaaaggagtgatgagaacaaaggtggatgactgccagtttgtctgcatagcccagcaagattactgccgtattctcaatcaagtagaaaagaacatgcaaaaagttgaagaggaaggagagattgttatggtgaaagaacaccgagaacttgatcgaactggaacaagaaagggacacattgtcatcaagggtacctcagaaaggttaacaatgcatttggtggaagagcattcagtagtagatccaacattcatagaagactttctgttgacctataggacttttctttctagcccaatggaagtgggcaaaaagttattggagtggtttaatgacccgagcctcagggataaggttacacgggtagtattattgtgggtaaataatcacttcaatgactttgaaggagatcctgcaatgactcgatttttagaagaatttgaaaacaatctggaaagagagaaaatgggtggacacctaaggctgttgaatatcgcgtgtgctgctaaagcaaaaagaagattgatgacgttaacaaaaccatcccgagaagctcctttgccttttatcttacttggaggctctgagaagggatttggaatctttgttgacagtgtagattcaggtagcaaagcaactgaagcaggcttgaaacggggggatcagatattagaagtaaatggccaaaactttgaaaacattcagctgtcaaaagctatggaaattcttagaaataacacacatttatctatcactgtgaaaaccaatttatttgtatttaaagaacttctaacaagattgtcagaagagaaaagaaatggtgccccccaccttcctaaaattggtgacattaaaaaggccagtcgctactccattccagatcttgctgtagatgtagaacaggtgataggacttgaaaaagtgaacaaaaaaagtaaagccaacactgtgggaggaaggaacaagctgaaaaagatactcgacaagactcggatcagtatcttgccacagaaaccatacaatgatattgggattggtcagtctcaagatgacagcatagtaggattaaggcagacaaagcacatcccaactgcattgcctgtcagtggaaccttatcatccagtaatcctgatttattgcagtcacatcatcgcattttagacttcagtgctactcctgacttgccagatcaagtgctaagggtttttaaggctgatcagcaaagccgctacatcatgatcagtaaggacactacagcaaaggaagtggtcattcaggctatcagggagtttgctgttactgccaccccggatcaatattcactatgtgaggtctctgtcacacctgagggagtaatcaaacaaagaagacttccagatcagctttccaaacttgcagacagaatacaactgagtggaaggtattatctgaaaaacaacatggaaacagaaactctttgttcagatgaagatgctcaggagttgttgagagagagtcaaatttccctccttcagctcagcactgtggaagttgcaacacagctctctatgcgaaattttgaactctttcgcaacattgaacctactgaatatatagatgatttatttaaactcagatcaaaaaccagctgtgccaacctgaagagatttgaagaagtcattaaccaggaaacattttgggtagcatctgaaattctcagagaaacaaaccagctgaagaggatgaagatcattaagcatttcatcaagatagcactgcactgtagggaatgcaagaattttaactcaatgtttgcaatcatcagtggcctaaacctggcaccagtggcaagactgcgaacgacctgggagaaacttcccaataaatacgaaaaactatttcaagatctccaagacctgtttgatccttccagaaacatggcaaaatatcgtaatgttctcaatagtcaaaatctacaacctcccataatccctctattcccagttatcaaaaaggatctcaccttccttcacgaaggaaatgactcaaaagtagacgggctggtcaattttgagaagctaaggatgattgcaaaagaaattcgtcacgttggccgaatggcttcagtgaacatggaccctgccctcatgttcaggactcggaagaagaaatggcggagtttggggtctctcagccagggtagtacaaatgcaacagtgctagatgttgctcagacaggtggtcataaaaagcgggtacgtcgtagttcctttctcaatgccaaaaagctttatgaagatgcccaaatggctcgaaaagtgaagcagtacctttccaatttggagctagaaatggacgaggagagtcttcagacattatctctgcagtgtgagccagcaaccaacacattgcctaagaatcctggtgacaaaaagcctgtcaaatccgagacctctccagtagctccaagggcagggtcacaacagaaagctcagtccctgccacagccccagcagcagccaccaccagcacataaaatcaaccagggactacaggttcccgccgtgtccctttatccttcacggaagaaagtgcccgtaaaggatctcccaccttttggcataaactctccacaagctttaaaaaaaattctttctttgtctgaagaaggaagtttggaacgtcacaagaaacaggctgaagatacaatatcaaatgcatcttcgcagctttcttctcctcctacttctccacagagttctccaaggaaaggctatactttggctcccagtggtactgtggataatttttcagattctggtcacagtgaaatttcttcacgatccagtattgttagcaattcgtcttttgactcagtgccagtctcactgcacgatgagaggcgccagaggcattctgtcagcatcgtggaaacaaacctagggatgggcaggatggagaggcggaccatgattgaacctgatcagtatagcttggggtcctatgcaccaatgtccgagggccgaggcttatatgctacagctacagtaatttcttctccaagcacagaggaactttcccaggatcagggggatcgcgcgtcacttgatgctgctgacagtggccgtgggagctggacgtcatgctcaagtggctcccatgataatatacagacgatccagcaccagagaagctgggagactcttccattcgggcatactcactttgattattcaggggatcctgcaggtttatgggcatcaagcagccatatggaccaaattatgttttctgatcatagcacaaagtataacaggcaaaatcaaagtagagagagccttgaacaagcccagtcccgagcaagctgggcgtcttccacaggttactggggagaagactcagaaggtgacacaggcacaataaagcggaggggtggaaaggatgtttccattgaagccgaaagcagtagcctaacgtctgtgactacggaagaaaccaagcctgtccccatgcctgcccacatagctgtggcatcaagtactacaaaggggctcattgcacgaaaggagggcaggtatcgagagcccccgcccacccctcccggctacattggaattcccattactgactttccagaagggcactcccatccagccaggaaaccgccggactacaacgtggcccttcagagatcgcggatggtcgcacgatcctccgacacagctgggccttcatccgtacagcagccacatgggcatcccaccagcagcaggcctgtgaacaaacctcagtggcataaaccgaacgagtctgacccgcgcctcgccccctatcagtcccaagggttttccaccgaggaggatgaagatgaacaagtttctgctgtttgaggcacagacttttctggaagcagagcgagccacctgaaaggagagcacaagaagacgtcctgagcattggagccttggaactcacattctgaggacggtggaccagtttgcctccttccctgccttaaaagcagcatggggcttcttctccccttcttcctttcccctttgcatgtgaaatactgtgaagaaattgccctggcacttttcagactttgttgcttgaaatgcacagtgcagcaatcttcgagctcccactgttgctgcctgccacatcacacagtatcattccaaattccaagatcatcacaacaagatgattcactctggctgcacttctcaatgcctggaaggattttttttaatcttccttttagatttcaatccagtcctagcacttgatctcattgggataatgagaaaagctagccattgaactacttggggcctttaacccaccaaggaagacaaagaaaaacaatgaaatcctttgagtacagtgcttgtccacttgtttacaatgtcctccttttaaaaaaaaaaaatgagtttaaagattttgttcagagagtaaatatatatccatttaatgattacagtattattttaaaccttaagtagggttgccagcctggtttctgaaaaaccaaatatgccggacagggtgtggccacaccaagaagacgggaagacctggcttgtgaccctggcttcccatgtccttctggtctcacccgcgaagtgccctatcctggaagtatgaaatgttagccaattaataccaagacacctcatctgctccttccccagtggatggggttcttctgtaaaactgtttgcacatggccaggggagggaactaggacccttgtgtcctgtctgagccttatggaggcaggacggtgtcattggcggatgtgtcctgctccattgagatggatggcaaaccccatttttaagttatatttctttgatttttgttaatttagaggtgtaggttttgttttttgtttttttgtttttttttaagagaaacatttataactggatagcattgcagtgaaagcagcttgggatgttggagctaatgccagctgtttatactgctctttcaagacagcctccctttattgaattggcattagggaataaacaagcctttaaacgtgataaaagatcaaaaacctggttagacatgccagcctttgcaaggcaggttagtcaccaaagactaacctccaagtggctttatggacgctgcatatagagaaggcctaagtgtagcaaccatctgctcacagctgctattaaccctataatgactgaaatgacccctccactctatttttgtgttgttttgcacagactccggaaaagtgaaggctgccaatctgagtagtactcaaatgtgaggaactgctggtcttggattttttttccattaaattcagctgatcatattgatcagtagataaacgtaaatagcttcaaattttaaaagtggaattgcagtgttttttcactgtatcaaacaatgtcagtgctttatttaataattctcttctgtatcatggcatttgtctacttgcttattacattgtcaattatgcatttgtaattttacatgtaatatgcattatttgccagttttattatataggctatggacctcatgtgcatatagaaagacagaaatctagctctaccacaagttgcacaaatgttatctaagcattaagtaattgtagaacataggactgctaatctcagttcgctctgtgatgtcaagtgcagaatgtacaattaactggtgatttcctcatacttttgatactacttgtacctgtatgtcttttagaaagacattggtggagtctgtatcccttttgtatttttaatacaataattgtacatattggttatatttttgttgaagatggtagaaatgtactatgtttatgcttctacatccagtttgtacaagctggaaaataaataaatataacataaagccttgcctatattcttaa

SEQ ID NO: 173952 - DNA, 796 bp, Homo sapiens
  Payload ID: 14154
  Gene Symbol: RAPGEF2
  Gene Name: Rap guanine nucleotide exchange factor (GEF) 2
  ENST ID: ENST00000510253
  CDS Start-End: 1-796
aagatgcccaaatggctcgaaaagtgaagcagtacctttccaatttggagctagaaatggacgaggagagtcttcagacattatctctgcagtgtgagccagcaaccaacacattgcctaagaatcctggtgacaaaaagcctgtcaaatccgagacctctccagtagctccaagggcagggtcacaacagaaagctcagtccctgccacagccccagcagcagccaccaccagcacataaaatcaaccagggactacaggttcccgccgtgtccctttatccttcacggaagaaagtgcccgtaaaggatctcccaccttttggcataaactctccacaagctttaaaaaaaattctttctttgtctgaagaaggaagtttggaacgtcacaagaaacaggctgaagatacaatatcaaatgcatcttcgcagctttcttctcctcctacttctccacagagttctccaaggaaaggtggcagtggcaatcagctgagatcttttggctccgggcagttggacttaaccagttcctcctcttctcttggaagctatactttggctcccagtggtactgtggataatttttcagattctggtcacagtgaaatttcttcacgatccagtattgttagcaattcgtcttttgactcagtgccagtctcactgcacgatgagaggcgccagaggcattctgtcagcatcgtggaaacaaacctagggatgggcaggatggagaggcggaccatgattgaacctgatcagtatagcttggggtcctatgcaccaatgtc

SEQ ID NO: 173953 - DNA, 582 bp, Homo sapiens
  Payload ID: 14154
  Gene Symbol: RAPGEF2
  Gene Name: Rap guanine nucleotide exchange factor (GEF) 2
  ENST ID: ENST00000511336
  CDS Start-End: 235-582
gatattatttggagtcagcaatcaatggattccatccctctgagacttgcttaacctacagctgctgatagaatacagcttcctgcagatttcacaaaactgcatcttactgacagtctccacccacaggtgacccacgtttcttctagccattcaggatgtagtatcactagtgattctgggagcagcagtctttctgatatctaccaggccacagaaagcgaggctggtgatatggacctgagtgggttgccagaaacagcagtggattccgaagacgacgacgatgaagaagacattgagagagcatcagatcctctgatgagcagggacattgtgagagactgcctagagaaggacccaattgaccggacagatgatgacattgaacaactcttggaatttatgcaccagttgcctgcttttgccaatatgacaatgtcagtgaggcgagaactctgtgctgtgatggtgttcgcagtggtggaaagagcagggaccatagtgttaaatgatggtgaagagctggactcctggtcagtgattctcaatggatctgtggaagtgacttatccagatgga

SEQ ID NO: 173954 - DNA, 723 bp, Homo sapiens
  Payload ID: 14154
  Gene Symbol: RAPGEF2
  Gene Name: Rap guanine nucleotide exchange factor (GEF) 2
  ENST ID: ENST00000512056
  CDS Start-End: 1-568
aaagaaaatgggtggacacctaaggctgttgaatatcgcgtgtgctgctaaagcaaaaagaagattgatgacgttaacaaaaccatcccgagaagctcctttgccttttatcttacttggaggctctgagaagggatttggaatctttgttgacagtgtagattcaggtagcaaagcaactgaagcaggcttgaaacggggggatcagatattagaagtaaatggccaaaactttgaaaacattcagctgtcaaaagctatggaaattcttagaaataacacacatttatctatcactgtgaaaaccaatttatttgtatttaaagaacttctaacaagattgtcagaagagaaaagaaatggtgccccccaccttcctaaaattggtgacattaaaaaggccagtcgctactccattccagatcttgctgtagatgtagaacaggtgataggacttgaaaaagtgaacaaaaaaagtaaagccaacactgtgggaggaaggaacaagctgaaaaagatactcgacaagactcggatcagtatcttgccacagaaaccatacaagtaagcatctgcatatgtcttctgtgcattattttattttgttaaaatgatatgcaaagatagtgatgtaattaatgtttgcatgagtctgaaaactgttctaggtttttatgactgagctattttggaagcagtattaaacaatcaaatttgttttaa

SEQ ID NO: 173955 - DNA, 562 bp, Homo sapiens
  Payload ID: 14154
  Gene Symbol: RAPGEF2
  Gene Name: Rap guanine nucleotide exchange factor (GEF) 2
  ENST ID: ENST00000510510
  CDS Start-End: 96-562
agactacagtgtcttgctttctgcaggaagcagcaatgccgtttgtttcctaagaggaattttttatttagaaaaggaagctttctatccaggaaatggctttccttgtgcgttgctatgccaactgcctgcagccatggtcctccaaacttcctgcagatttcacaaaactgcatcttactgacagtctccacccacaggtgacccacgtttcttctagccattcaggatgtagtatcactagtgattctgggagcagcagtctttctgatatctaccaggccacagaaagcgaggctggtgatatggacctgagtgggttgccagaaacagcagtggattccgaagacgacgacgatgaagaagacattgagagagcatcagatcctctgatgagcagggacattgtgagagactgcctagagaaggacccaattgaccggacagatgatgacattgaacaactcttggaatttatgcaccagttgcctgcttttgccaatatgacaatgtcagtgaggcgagaactctgtgctgtgatggtgttcgcagtggtggaaag

SEQ ID NO: 173956 - DNA, 545 bp, Homo sapiens
  Payload ID: 14154
  Gene Symbol: RAPGEF2
  Gene Name: Rap guanine nucleotide exchange factor (GEF) 2
  ENST ID: ENST00000502485
  CDS Start-End: 1-545
agtagacgggctggtcaattttgagaagctaaggatgattgcaaaagaaattcgtcacgttggccgaatggcttcagtgaacatggaccctgccctcatgttcaggactcggtctctcagccagggtagtacaaatgcaacagtgctagatgttgctcagacaggtggtcataaaaagcgggtacgtcgtagttcctttctcaatgccaaaaagctttatgaagatgcccaaatggctcgaaaagtgaagcagtacctttccaatttggagctagaaatggacgaggagagtcttcagacattatctctgcagtgtgagccagcaaccaacacattgcctaagaatcctggtgacaaaaagcctgtcaaatccgagacctctccagtagctccaagggcagggtcacaacagaaagctcagtccctgccacagccccagcagcagccaccaccagcacataaaatcaaccagggactacaggttcccgccgtgtccctttatccttcacggaagaaagtgcccgtaaaggatctcccaccttttg

SEQ ID NO: 173957 - DNA, 596 bp, Homo sapiens
  Payload ID: 14154
  Gene Symbol: RAPGEF2
  Gene Name: Rap guanine nucleotide exchange factor (GEF) 2
  ENST ID: ENST00000514565
  CDS Start-End: 135-596
gaacagcaatctgacgtctttagaggagacatcagttcattatgtggatacaaattctatgctttcggcttttatacaccaagtcttaatttaaatctgtttttcttgccttttctaacgaaagagactacatcatgcttcctgcagatttcacaaaactgcatcttactgacagtctccacccacaggtgacccacgtttcttctagccattcaggatgtagtatcactagtgattctgggagcagcagtctttctgatatctaccaggccacagaaagcgaggctggtgatatggacctgagtgggttgccagaaacagcagtggattccgaagacgacgacgatgaagaagacattgagagagcatcagatcctctgatgagcagggacattgtgagagactgcctagagaaggacccaattgaccggacagatgatgacattgaacaactcttggaatttatgcaccagttgcctgcttttgccaatatgacaatgtcagtgaggcgagaactctgtgctgtgatggtgttcgcagtggtggaaagagcagggaccatagtgttaaatgatggtgaagagctggactcctgg

SEQ ID NO: 173958 - DNA, 838 bp, Homo sapiens
  Payload ID: 14154
  Gene Symbol: RAPGEF2
  Gene Name: Rap guanine nucleotide exchange factor (GEF) 2
  ENST ID: ENST00000505478
  CDS Start-End: 1-838
gataacagcttccgccaggcggtgatgaagaatccccccgaaaggaccccccaggatctggaaatagtatattcctatttacatggtatggaagccttatcaaacttgagggagcatcaacttaggttaatgtgtgaaactgtgagatatgagagacacgaagcaaatgaagttttatactaccctgatgatattgggacctgctggtatatccttctttctggttccgtgttcatcaaggaatccatgtttcttccaagaagcagttttggcaagcgttctgcaggaagttttaggcgtggctgtgaatgcattgttttagagccttctgaaatgattgtggtggactatatggatgaaaatgaagaatattttcagcggcaagcttcccatagacagtctcgaaggagatttagaaaaatcaaccagaaaggtgaaagacaaacaattattgacactgtggatccttatcccatgggcaaacctcctttgcctagaggctatcacacggaatgcactaaatctcagcttcctgcagatttcacaaaactgcatcttactgacagtctccacccacaggtgacccacgtttcttctagccattcaggatgtagtatcactagtgattctgggagcagcagtctttctgatatctaccaggccacagaaagcgaggctggtgatatggacctgagtgggttgccagaaacagcagtggattccgaagacgacgacgatgaagaagacattgagagagcatcagatcctctgatgagcagggacattgtgagagactgcctagagaaggacccaattgaccggacagatgatgacattg

SEQ ID NO: 173959 - DNA, 970 bp, Homo sapiens
  Payload ID: 14154
  Gene Symbol: RAPGEF2
  Gene Name: Rap guanine nucleotide exchange factor (GEF) 2
  ENST ID: ENST00000505026
  CDS Start-End: 1-970
atcaaatgcatcttcgcagctttcttctcctcctacttctccacagagttctccaaggaaaggtggcagtggcaatcagctgagatcttttggctccgggcagttggacttaaccagttcctcctcttctcttggaagtgagaacagtaacaagaataacaatgcaccacggacctatgggataggctatactttggctcccagtggtactgtggataatttttcagattctggtcacagtgaaatttcttcacgatccagtattgttagcaattcgtcttttgactcagtgccagtctcactgcacgatgagaggcgccagaggcattctgtcagcatcgtggaaacaaacctagggatgggcaggatggagaggcggaccatgattgaacctgatcagtatagcttggggtcctatgcaccaatgtccgagggccgaggcttatatgctacagctacagtaatttcttctccaagcacagaggaactttcccaggatcagggggatcgcgcgtcacttgatgctgctgacagtggccgtgggagctggacgtcatgctcaagtggctcccatgataatatacagacgatccagcaccagagaagctgggagactcttccattcgggcatactcactttgattattcaggggatcctgcaggtttatgggcatcaagcagccatatggaccaaattatgttttctgatcatagcacaaagtataacaggcaaaatcaaagtagagagagccttgaacaagcccagtcccgagcaagctgggcgtcttccacaggttactggggagaagactcagaaggtgacacaggcacaataaagcggaggggtggaaaggatgtttccattgaagccgaaagcagtagcctaacgtctgtgactacggaagaaaccaagcctgtccccatgcctgcccacatagctgtggcatcaagtactacaaaggggctcatt

SEQ ID NO: 173960 - DNA, 3294 bp, Homo sapiens
  Payload ID: 14155
  Gene Symbol: RAPGEF3
  Gene Name: Rap guanine nucleotide exchange factor (GEF) 3
  Uniprot ID: O95398
  ENST ID: ENST00000389212
  CDS Start-End: 213-2984
gtgccagctggctccttcgtctgagacgaaggcgcaggctcggggctccctgtcgccggtggctgggtggcgtccccccaccacgcccccacccctctactcacccaagaggagcctctccaccgagccctgcatcctgctgccctggcagccagtccagctaggcactggcccagttcactgtacctggacttacccactggaaaagaaacatgaaggtgggctggccaggtgagagctgctggcaggtgggcctggctgtggaggatagcccagctctgggagcaccgcgggtgggagccctccctgacgtggtgccggaggggacactactcaacatggtgttgagaaggatgcaccggccccgaagctgctcctaccagctgctgctggagcaccagcgtccgagctgcatccaggggctgcgctggacaccactcaccaacagcgaggagtccctggatttcagcgagagcctggagcaggcctccacagagcgggtgctcagggctgggaggcagctgcatcggcatctgctggccacctgcccaaacctcatccgagaccggaagtaccaccttaggctctatcggcagtgctgctctggccgggagctggtggatgggatcttggccctgggacttggggtccattcccggagccaagttgtgggaatctgccaggtgctgctggatgaaggtgccctctgccatgtgaaacacgactgggccttccaggaccgagatgcccaattctaccggttccccgggcccgagcccgagcccgtgagaactcatgagatggaggaggagttggccgaagctgtggccctgctctcccagcgggggcctgacgccctgctcactgtggcacttcgaaagcccccaggtcagcgcacggatgaagagctggacctcatctttgaggagctgctgcacatcaaggctgtggcccacctctccaactcggtgaagcgagaattagcggctgttctgctctttgaaccacacagcaaggcagggaccgtgttgttcagccagggggacaagggcacttcgtggtacattatctggaagggatctgtcaacgtggtgacccatggcaaggggctggtgaccaccctgcatgagggagatgattttggacagctggctctggtgaatgatgcaccccgggcagccaccatcatcctgcgagaagacaactgtcatttcctgcgtgtggacaagcaggacttcaaccgtatcatcaaggatgtggaggcaaagaccatgcggctggaagaacatggcaaagtggtgctggtgctggagagagcctctcagggcgccggcccttcccgacccccaaccccaggcaggaaccggtatacagtgatgtctggcaccccagagaagatcctagagcttctgttggaggccatgggaccagattccagtgctcatgacccaacagagacattcctcagcgacttcctcctgacccacagggtcttcatgcccagcgcccaactctgcgctgcccttctgcaccacttccatgtggagcctgcgggtggcagcgagcaggagcgcagcacctacgtctgcaacaagaggcagcagatcttgcggctggtcagccagtgggtggccctgtatggctccatgctccacactgaccctgtggccaccagcttcctccagaaactctcagacctggtgggcagggacacccgactcagcaacctgctgagggagcagtggccagagaggcggcgatgccacaggttggagaatggctgtgggaatgcatctcctcagatgaaggcccggaacttgcctgtttggctccccaaccaggacgagccccttcctggcagcagctgtgccatccaagttggggataaagtcccctatgacatctgccggccagaccactcagtgttgaccctgcagctgcctgtgacagcctccgtgagagaggtgatggcagcgttggcccaggaggatggctggaccaaggggcaggtgctggtgaaggtcaattctgcaggtgatgccattggcctgcagccagatgcccgtggtgtggccacatctctggggctcaatgagcgtctctttgttgtcaacccacaggaagtgcatgagctgatcccacaccctgaccagctggggcccactgtgggctctgctgaggggctggacctggtgagtgccaaggacctggcaggccagctgacggaccacgactggagcctcttcaacagtatccaccaggtggagctgatccactatgtgctgggcccccagcatctgcgggatgtcaccaccgccaacctggagcgcttcatgcgccgcttcaatgagctgcagtactgggtggccaccgagctgtgtctctgccccgtgcccggcccccgggcccagctgctcaggaagttcattaagctggcggcccacctcaaggagcagaagaatctcaattccttctttgccgtcatgtttggcctcagcaactcggccatcagccgcctagcccacacctgggagcggctgcctcacaaagtccggaagctgtactccgccctcgagaggctgctggatccctcatggaaccaccgggtataccgactggccctcgccaagctctcccctcctgtcatccccttcatgccccttcttctcaaagacatgaccttcattcatgagggaaaccacacactagtggagaatctcatcaactttgagaagatgagaatgatggccagagccgcgcggatgctgcaccactgccgaagccacaaccctgtgcctctctcaccactcagaagccgagtttcccacctccacgaggacagccaggtggcgaggatttccacatgctcggagcagtccctgagcacccggagtccagccagcacctgggcttatgtccagcagctgaaggtcattgacaaccagcgggaactctcccgcctctcccgagagctggagccatgaggaggggctgggactggagctggagcaggcacttgcagccgggaaagccagggtgtgccgggccaagatactcacaggctggccacagctgggcaaggctctccgtggagtggactcgagtccctggagcaggcagtgtggaggcagccatcccctgtgatgactggcagctaaggaggacctcggagtggacccgagccaggaataacgaatgacccaaggccaaggaagggaggacagagaggccccaggagtgggtggagagtggagtgcgctgggacgttgtgtgcaatagagaggtctccacacc

SEQ ID NO: 173961 - DNA, 4092 bp, Homo sapiens
  Payload ID: 14155
  Gene Symbol: RAPGEF3
  Gene Name: Rap guanine nucleotide exchange factor (GEF) 3
  Uniprot ID: O95398
  ENST ID: ENST00000395358
  CDS Start-End: 90-1886
ggatccccttatcaaagctgatgggggtcgctggggaccccccagccttttgctagagcctgcacggctgtgcgagcttgaaaagaaacatgaaggtgggctggccaggtgagagctgctggcaggtgggcctggctgtggaggatagcccagctctgggagcaccgcgggtgggagccctccctgacgtggtgccggaggggacactactcaacatggtgttgagaaggatgcaccggccccgaagctgctcctaccagctgctgctggagcaccagcgtccgagctgcatccaggggctgcgctggacaccactcaccaacagcgaggagtccctggatttcagcgagagcctggagcaggcctccacagagcgggtgctcagggctgggaggcagctgcatcggcatctgctggccacctgcccaaacctcatccgagaccggaagtaccaccttaggctctatcggcagtgctgctctggccgggagctggtggatgggatcttggccctgggacttggggtccattcccggagccaagttgtgggaatctgccaggtgctgctggatgaaggtgccctctgccatgtgaaacacgactgggccttccaggaccgagatgcccaattctaccggttccccgggcccgagcccgagcccgtgagaactcatgagatggaggaggagttggccgaagctgtggccctgctctcccagcgggggcctgacgccctgctcactgtggcacttcgaaagcccccaggtcagcgcacggatgaagagctggacctcatctttgaggagctgctgcacatcaaggctgtggcccacctctccaactcggtgaagcgagaattagcggctgttctgctctttgaaccacacagcaaggcagggaccgtgttgttcagccagggggacaagggcacttcgtggtacattatctggaagggatctgtcaacgtggtgacccatggcaaggggctggtgaccaccctgcatgagggagatgattttggacagctggctctggtgaatgatgcaccccgggcagccaccatcatcctgcgagaagacaactgtcatttcctgcgtgtggacaagcaggacttcaaccgtatcatcaaggatgtggaggcaaagaccatgcggctggaagaacatggcaaagtggtgctggtgctggagagagcctctcagggcgccggcccttcccgacccccaaccccaggcaggaaccggtatacagtgatgtctggcaccccagagaagatcctagagcttctgttggaggccatgggaccagattccagtgctcatgacccaacagagacattcctcagcgacttcctcctgacccacagggtcttcatgcccagcgcccaactctgcgctgcccttctgcaccacttccatgtggagcctgcgggtggcagcgagcaggagcgcagcacctacgtctgcaacaagaggcagcagatcttgcggctggtcagccagtgggtggccctgtatggctccatgctccacactgaccctgtggccaccagcttcctccagaaactctcagacctggtgggcagggacacccgactcagcaacctgctgagggagcagtggccagagaggcggcgatgccacaggttggagaatggctgtgggaatgcatctcctcagatgaaggtgtctgcctggccccagtttctttcctctgctcctcctggactgcaggcccctccttcgccccctgaccctgaggggctctgtgggcgtgggaagctctcctcccacagacacacccttgggtctctgataggtgttcacggggcccttgctgcatgtggtgccctgggccaggccgtgccaggaggcgcagaggcctaaggtggcctccctcctcgcccactccctgactcaatgggccttttattccttttgggaggtaattcatgcccacaggtagagcctgggagatgaggaatggtggctggagttggcccctgaggcccacggggctcctggtggccagtgctgtgggagctcagaggaaggcgaggcccctccctggaaagtcagagggggccccaggccattctcagctggggcttaaagggaagcaaagaggggatgagaagatgtgactgcagccaggatttggttgaggaatggtgggagaaagaactggaaaggtagattaggttggtggtggggagggctgcactgggaataaaatccaggggcctcaccatccagcaggctccccatggtcccaccctactgtgtgtcccagcccctgcctgctggagactcttactggcttcttctcctccgcaggcgaagcccgttctcccctcagggcctttgcacttatcccttagcctggaagggtctttctctggctctgcctggcaggatccttctcgttctcatctcagccaaatgctgggttcccagacaggccccctcccgtctccctatccggagcaccctcccctttctcccaccacgctctgccttggtgtcctctgtgattttcttcaaagcactctcgccatgtggagttgttttctttgcctacttgctttctgtcctttggtatctctcccatcccactggagagttgacttccctcctgcgggcccccacctccgcttctccttgctcacatgctgcctggctcttggctgacgctcagaaactgatgtgggctcaccctcgcaggccgggcactgcgctaggtgctgatgctgcacctcattcaaccctggcctgtggggctgcagtcaggcaaggggcagagcagttcaacaacccgtgatgtgcagtgacacgggacactttccctgaatgtgcactggagtcggctcttccaactgtagtccgctcctgaaaacgggaggggaagagccaactccagtgcagattcagggaaagtgtcccgtgtaagcgactactggagttgagagctgcagggggcaagggtggaggaagaagaggattcctggtgggcaaacccaggaggaaagggaacccaggaggaggatccctggaggagcgagagtaagagtaggaccccagagcaggcaggaggtgggcagggccccctgggccaaggacaggggtctgatctttgtcctaagagcagtgcaaaccattaaaggggtttgagccaaggttggcaaagtctgatttgtgttttgaataggtcagctaaagagcctgggctttctccagcagacaatggacgccactgaagtcgagtgcgggagcttcacagggctctggtcaggcagattggaggaggagggctggaggcacctgggagggaggaggaggagcatagttgggccattggagtagataaggagtgaggcctcgtgggcaggtggaactggagttagcctgggcaggggaggagggggcacagaagacccacttcaaagaagaatcttcaaagcaagatgacaagctacggaagtgtggaggagcctggagctggggagaatggctggggaacagagtggtctgggaggcaggatgcaaggatccgatgggtatatggagtgtgaggtaatggatcattcatgtggaaggatgcagggggtttttgagaccagggtttggaagagagttcagcactgctggtagttttgggaatcacccatgtgcaggcgacacatgaggcagtaaggaactctgcaggggtccctgagatttggaaatgtagggaagagcaatggattgaggtccgaacctggaggatctgctatacgcagagctgggaggagggacagagtcagtaccagagtcggaaaaaagcagggtgggaaggggaacctgagtcaggagacttgcctggcaggcgctgccctgccagcagaggcctgacagtggtttccatgaactgcatccctgctgtgggctgggacagggccactgacacagtatcggagcacagagggggaaaggagcaggagggattccaactctgccagttagcagctgtgtggctttgggcatgttacttaacctctctgagcctcatttatttcatccataaaatggaaataaaaataatacttttgtcaaa

SEQ ID NO: 173962 - DNA, 5751 bp, Homo sapiens
  Payload ID: 14155
  Gene Symbol: RAPGEF3
  Gene Name: Rap guanine nucleotide exchange factor (GEF) 3
  Uniprot ID: O95398
  ENST ID: ENST00000405493
  CDS Start-End: 211-2856
gttagtcagggctgaggaggagaggagaagggtttaagccgaagctgcatttctgggagacctagtgaatctatagcttcatactgggaggtgggctggccaggtgagagctgctggcaggtgggcctggctgtggaggatagcccagctctgggagcaccgcgggtgggagccctccctgacgtggtgccggaggggacactactcaacatggtgttgagaaggatgcaccggccccgaagctgctcctaccagctgctgctggagcaccagcgtccgagctgcatccaggggctgcgctggacaccactcaccaacagcgaggagtccctggatttcagcgagagcctggagcaggcctccacagagcgggtgctcagggctgggaggcagctgcatcggcatctgctggccacctgcccaaacctcatccgagaccggaagtaccaccttaggctctatcggcagtgctgctctggccgggagctggtggatgggatcttggccctgggacttggggtccattcccggagccaagttgtgggaatctgccaggtgctgctggatgaaggtgccctctgccatgtgaaacacgactgggccttccaggaccgagatgcccaattctaccggttccccgggcccgagcccgagcccgtgagaactcatgagatggaggaggagttggccgaagctgtggccctgctctcccagcgggggcctgacgccctgctcactgtggcacttcgaaagcccccaggtcagcgcacggatgaagagctggacctcatctttgaggagctgctgcacatcaaggctgtggcccacctctccaactcggtgaagcgagaattagcggctgttctgctctttgaaccacacagcaaggcagggaccgtgttgttcagccagggggacaagggcacttcgtggtacattatctggaagggatctgtcaacgtggtgacccatggcaaggggctggtgaccaccctgcatgagggagatgattttggacagctggctctggtgaatgatgcaccccgggcagccaccatcatcctgcgagaagacaactgtcatttcctgcgtgtggacaagcaggacttcaaccgtatcatcaaggatgtggaggcaaagaccatgcggctggaagaacatggcaaagtggtgctggtgctggagagagcctctcagggcgccggcccttcccgacccccaaccccaggcaggaaccggtatacagtgatgtctggcaccccagagaagatcctagagcttctgttggaggccatgggaccagattccagtgctcatgacccaacagagacattcctcagcgacttcctcctgacccacagggtcttcatgcccagcgcccaactctgcgctgcccttctgcaccacttccatgtggagcctgcgggtggcagcgagcaggagcgcagcacctacgtctgcaacaagaggcagcagatcttgcggctggtcagccagtgggtggccctgtatggctccatgctccacactgaccctgtggccaccagcttcctccagaaactctcagacctggtgggcagggacacccgactcagcaacctgctgagggagcagtggccagagaggcggcgatgccacaggttggagaatggctgtgggaatgcatctcctcagatgaaggcccggaacttgcctgtttggctccccaaccaggacgagccccttcctggcagcagctgtgccatccaagttggggataaagtcccctatgacatctgccggccagaccactcagtgttgaccctgcagctgcctgtgacagcctccgtgagagaggtgatggcagcgttggcccaggaggatggctggaccaaggggcaggtgctggtgaaggtcaattctgcaggtgatgccattggcctgcagccagatgcccgtggtgtggccacatctctggggctcaatgagcgtctctttgttgtcaacccacaggaagtgcatgagctgatcccacaccctgaccagctggggcccactgtgggctctgctgaggggctggacctggtgagtgccaaggacctggcaggccagctgacggaccacgactggagcctcttcaacagtatccaccaggtggagctgatccactatgtgctgggcccccagcatctgcgggatgtcaccaccgccaacctggagcgcttcatgcgccgcttcaatgagctgcagtactgggtggccaccgagctgtgtctctgccccgtgcccggcccccgggcccagctgctcaggaagttcattaagctggcggcccacctcaaggagcagaagaatctcaattccttctttgccgtcatgtttggcctcagcaactcggccatcagccgcctagcccacacctgggagcggctgcctcacaaagtccggaagctgtactccgccctcgagaggctgctggatccctcatggaaccaccgggtataccgactggccctcgccaagctctcccctcctgtcatccccttcatgccccttcttctcaaagacatgaccttcattcatgagggaaaccacacactagtggagaatctcatcaactttgagaagatgagaatgatggccagagccgcgcggatgctgcaccactgccgaagccacaaccctgtgcctctctcaccactcagaagccgagtttcccacctccacgaggacagccaggtggcgaggatttccacatgctcggagcagtccctgagcacccggagtccagccagcacctgggcttatgtccagcagctgaaggtcattgacaaccagcgggaactctcccgcctctcccgagagctggagccatgaggaggggctgggactggagctggagcaggcacttgcagccgggaaagccagggtgtgccgggccaagatactcacaggctggccacagctgggcaaggctctccgtggagtggactcgagtccctggagcaggcagtgtggaggcagccatcccctgtgatgactggcagctaaggaggacctcggagtggacccgagccaggaataacgaatgacccaaggccaaggaagggaggacagagaggccccaggagtgggtggagagtggagtgcgctgggacgttgtgtgcaatagagaggtctccacaccagatgtcttccagattctgtgcctctggctttgttgtccagccaggcctgcagtttattttcacagtggacagagagagagagagaggctgcatgtgtgtaccgtgtgtggcaagggcagggccttggcctggggcaggggccccctgctttctttccacagctttcttccaacagcaggcagtggggctgcgggcctgtgcggtggtccctgaggagctttattgttactgtcaacatagtagtatgttccaggccagcccagagtgggcgtggcagggaggctgaggccccgccctctgggaaggagctgtggaggagaagcagccccatgctgggcacgggccagactgggtccaagatcctgatgccacccagatgtgcctccagggctctggccaaagggcgggctggagcctggagcccctgtcagcagccagccagggtgaccatcagctccccgtggtggtccaataggactttacagtccagatgcaactgacagcttcttcccaactgcaatccccgcttttccacacttgagctcgtcctggcctgttgggccaggcttctggggtcttctgggggtggcttgtgatagaaacaatgctgaagcttccgcggagagcccgtcgcttgttgaggcccaacagacttccaggaaatcagggtttatcatcagtgttgagaatggtcccagcaagctctggtcatacgaagtcctctcttccctgccccttcagcacttcccctaggaaccagctactgccaggacgcctcttgcgaggcagagctcacccaggaagctccagggactccaccctcttgccttgctattgccctgagtcctggcagcaggaggcacttgtctggccagagagagaactcatggcccctggcatgactcctgagtaggtattgaggctgcagggccttgggcgtccagaggcagctggtatggcccctctgcacttcagccccatggatgtggatacacaggcctgctgcttccagaaagggtcagagcctttagcagggaggcagcacagctgggcttagacctcaggtcactaagtgaatctgagcaagtcagtgaacagttctcttccttcatttctccacctgtaagccaggtatgataaacgccatacagcgcttagtgacaaacacataaaactgtagctcctgcctctgtagcagaggtgacagccaagggcagtcctgtgctatccaggcctggtaggggggcagcctcgcctcagttgagggctgagggagagactgaggtgcagcagatggcagtggtaaccaaaccagttcccttgccgtgggtggggacacaggagaagcacggaagcatctggaactgagcaatcaggacaggaggctcaagcctgggtgagtcaggagtccgggggctttcttttcatccaacccattgtctgctggtgtctcggcaaaagccagccagccagccgtggcccttcaccgttcttcagactctagggtgagcccagcccagcgacacaacagaaaccaagtgccacgggggccggtgtcctccaccagcatttctcctctggtcacatctacgtcctgatgggacttctccctcctccttggaccatcagctttacagtccagaccaccctgcagccacccggtggtctcccagctgccccagtctcgggcaggatggcttttgagcctgttgggagagaccttgccaggagaatggtgcccagggcaggcaagaggacacagactctgggagctagaagagttgcggcccagggggccaggccactcccagaggacaggaggcccaaaagcggggaaaggctccatgttacggtggccccatgctgggagtttgtgctgccttctgtctccctgactgcccaagcgtggggtggtgtggggcaggaggcatcctctggtgttccctagcagcccaggctgtgtgcaggggctcccattttgtgtctcagctgcaagaaggccacaaagggaggaggggctcatgggactgctgagaagaaggtgtgcagaaagggagtgtggccctagatcagtcctttaaaaagcctctgttacctgaaaggaggtcaagcagagaggaatggctgcgtgtgtgtcctaccgggcaggacaggacagagggaggtcattgttacacacacatcccccctcctttcctccttcccctccacttccctgtgaaggcctgaggcaggctgtggccaggctcaggccctgactgtggggtacacaccagggagggccacgcctccccacagacggggtggagtggtcagtggagccagcaccctctgctgcttcagcatctccgcctggagccagctgtcccctctctctcaggctccatccgaacaaaaggaaggcagagcctgagatccggcaccccatccccctccactcagcactgagttagagctgggtgggggcatgtctgccttcacacgctgccttatggcttctgtgtctccaacagccctcagcctctggctgctctccttcccaatagtcacaagatttaccatgataataataggttaagacttg

SEQ ID NO: 173963 - DNA, 6061 bp, Homo sapiens
  Payload ID: 14155
  Gene Symbol: RAPGEF3
  Gene Name: Rap guanine nucleotide exchange factor (GEF) 3
  Uniprot ID: O95398
  ENST ID: ENST00000449771
  CDS Start-End: 90-2861
ggatccccttatcaaagctgatgggggtcgctggggaccccccagccttttgctagagcctgcacggctgtgcgagcttgaaaagaaacatgaaggtgggctggccaggtgagagctgctggcaggtgggcctggctgtggaggatagcccagctctgggagcaccgcgggtgggagccctccctgacgtggtgccggaggggacactactcaacatggtgttgagaaggatgcaccggccccgaagctgctcctaccagctgctgctggagcaccagcgtccgagctgcatccaggggctgcgctggacaccactcaccaacagcgaggagtccctggatttcagcgagagcctggagcaggcctccacagagcgggtgctcagggctgggaggcagctgcatcggcatctgctggccacctgcccaaacctcatccgagaccggaagtaccaccttaggctctatcggcagtgctgctctggccgggagctggtggatgggatcttggccctgggacttggggtccattcccggagccaagttgtgggaatctgccaggtgctgctggatgaaggtgccctctgccatgtgaaacacgactgggccttccaggaccgagatgcccaattctaccggttccccgggcccgagcccgagcccgtgagaactcatgagatggaggaggagttggccgaagctgtggccctgctctcccagcgggggcctgacgccctgctcactgtggcacttcgaaagcccccaggtcagcgcacggatgaagagctggacctcatctttgaggagctgctgcacatcaaggctgtggcccacctctccaactcggtgaagcgagaattagcggctgttctgctctttgaaccacacagcaaggcagggaccgtgttgttcagccagggggacaagggcacttcgtggtacattatctggaagggatctgtcaacgtggtgacccatggcaaggggctggtgaccaccctgcatgagggagatgattttggacagctggctctggtgaatgatgcaccccgggcagccaccatcatcctgcgagaagacaactgtcatttcctgcgtgtggacaagcaggacttcaaccgtatcatcaaggatgtggaggcaaagaccatgcggctggaagaacatggcaaagtggtgctggtgctggagagagcctctcagggcgccggcccttcccgacccccaaccccaggcaggaaccggtatacagtgatgtctggcaccccagagaagatcctagagcttctgttggaggccatgggaccagattccagtgctcatgacccaacagagacattcctcagcgacttcctcctgacccacagggtcttcatgcccagcgcccaactctgcgctgcccttctgcaccacttccatgtggagcctgcgggtggcagcgagcaggagcgcagcacctacgtctgcaacaagaggcagcagatcttgcggctggtcagccagtgggtggccctgtatggctccatgctccacactgaccctgtggccaccagcttcctccagaaactctcagacctggtgggcagggacacccgactcagcaacctgctgagggagcagtggccagagaggcggcgatgccacaggttggagaatggctgtgggaatgcatctcctcagatgaaggcccggaacttgcctgtttggctccccaaccaggacgagccccttcctggcagcagctgtgccatccaagttggggataaagtcccctatgacatctgccggccagaccactcagtgttgaccctgcagctgcctgtgacagcctccgtgagagaggtgatggcagcgttggcccaggaggatggctggaccaaggggcaggtgctggtgaaggtcaattctgcaggtgatgccattggcctgcagccagatgcccgtggtgtggccacatctctggggctcaatgagcgtctctttgttgtcaacccacaggaagtgcatgagctgatcccacaccctgaccagctggggcccactgtgggctctgctgaggggctggacctggtgagtgccaaggacctggcaggccagctgacggaccacgactggagcctcttcaacagtatccaccaggtggagctgatccactatgtgctgggcccccagcatctgcgggatgtcaccaccgccaacctggagcgcttcatgcgccgcttcaatgagctgcagtactgggtggccaccgagctgtgtctctgccccgtgcccggcccccgggcccagctgctcaggaagttcattaagctggcggcccacctcaaggagcagaagaatctcaattccttctttgccgtcatgtttggcctcagcaactcggccatcagccgcctagcccacacctgggagcggctgcctcacaaagtccggaagctgtactccgccctcgagaggctgctggatccctcatggaaccaccgggtataccgactggccctcgccaagctctcccctcctgtcatccccttcatgccccttcttctcaaagacatgaccttcattcatgagggaaaccacacactagtggagaatctcatcaactttgagaagatgagaatgatggccagagccgcgcggatgctgcaccactgccgaagccacaaccctgtgcctctctcaccactcagaagccgagtttcccacctccacgaggacagccaggtggcgaggatttccacatgctcggagcagtccctgagcacccggagtccagccagcacctgggcttatgtccagcagctgaaggtcattgacaaccagcgggaactctcccgcctctcccgagagctggagccatgaggaggggctgggactggagctggagcaggcacttgcagccgggaaagccagggtgtgccgggccaagatactcacaggctggccacagctgggcaaggctctccgtggagtggactcgagtccctggagcaggcagtgtggaggcagccatcccctgtgatgactggcagctaaggaggacctcggagtggacccgagccaggaataacgaatgacccaaggccaaggaagggaggacagagaggccccaggagtgggtggagagtggagtgcgctgggacgttgtgtgcaatagagaggtctccacaccagatgtcttccagattctgtgcctctggctttgttgtccagccaggcctgcagtttattttcacagtggacagagagagagagagaggctgcatgtgtgtaccgtgtgtggcaagggcagggccttggcctggggcaggggccccctgctttctttccacagctttcttccaacagcaggcagtggggctgcgggcctgtgcggtggtccctgaggagctttattgttactgtcaacatagtagtatgttccaggccagcccagagtgggcgtggcagggaggctgaggccccgccctctgggaaggagctgtggaggagaagcagccccatgctgggcacgggccagactgggtccaagatcctgatgccacccagatgtgcctccagggctctggccaaagggcgggctggagcctggagcccctgtcagcagccagccagggtgaccatcagctccccgtggtggtccaataggactttacagtccagatgcaactgacagcttcttcccaactgcaatccccgcttttccacacttgagctcgtcctggcctgttgggccaggcttctggggtcttctgggggtggcttgtgatagaaacaatgctgaagcttccgcggagagcccgtcgcttgttgaggcccaacagacttccaggaaatcagggtttatcatcagtgttgagaatggtcccagcaagctctggtcatacgaagtcctctcttccctgccccttcagcacttcccctaggaaccagctactgccaggacgcctcttgcgaggcagagctcacccaggaagctccagggactccaccctcttgccttgctattgccctgagtcctggcagcaggaggcacttgtctggccagagagagaactcatggcccctggcatgactcctgagtaggtattgaggctgcagggccttgggcgtccagaggcagctggtatggcccctctgcacttcagccccatggatgtggatacacaggcctgctgcttccagaaagggtcagagcctttagcagggaggcagcacagctgggcttagacctcaggtcactaagtgaatctgagcaagtcagtgaacagttctcttccttcatttctccacctgtaagccaggtatgataaacgccatacagcgcttagtgacaaacacataaaactgtagctcctgcctctgtagcagaggtgacagccaagggcagtcctgtgctatccaggcctggtaggggggcagcctcgcctcagttgagggctgagggagagactgaggtgcagcagatggcagtggtaaccaaaccagttcccttgccgtgggtggggacacaggagaagcacggaagcatctggaactgagcaatcaggacaggaggctcaagcctgggtgagtcaggagtccgggggctttcttttcatccaacccattgtctgctggtgtctcggcaaaagccagccagccagccgtggcccttcaccgttcttcagactctagggtgagcccagcccagcgacacaacagaaaccaagtgccacgggggccggtgtcctccaccagcatttctcctctggtcacatctacgtcctgatgggacttctccctcctccttggaccatcagctttacagtccagaccaccctgcagccacccggtggtctcccagctgccccagtctcgggcaggatggcttttgagcctgttgggagagaccttgccaggagaatggtgcccagggcaggcaagaggacacagactctgggagctagaagagttgcggcccagggggccaggccactcccagaggacaggaggcccaaaagcggggaaaggctccatgttacggtggccccatgctgggagtttgtgctgccttctgtctccctgactgcccaagcgtggggtggtgtggggcaggaggcatcctctggtgttccctagcagcccaggctgtgtgcaggggctcccattttgtgtctcagctgcaagaaggccacaaagggaggaggggctcatgggactgctgagaagaaggtgtgcagaaagggagtgtggccctagatcagtcctttaaaaagcctctgttacctgaaaggaggtcaagcagagaggaatggctgcgtgtgtgtcctaccgggcaggacaggacagagggaggtcattgttacacacacatcccccctcctttcctccttcccctccacttccctgtgaaggcctgaggcaggctgtggccaggctcaggccctgactgtggggtacacaccagggagggccacgcctccccacagacggggtggagtggtcagtggagccagcaccctctgctgcttcagcatctccgcctggagccagctgtcccctctctctcaggctccatccgaacaaaaggaaggcagagcctgagatccggcaccccatccccctccactcagcactgagttagagctgggtgggggcatgtctgccttcacacgctgccttatggcttctgtgtctccaacagccctcagcctctggctgctctccttcccaatagtcacaagatttaccatgataataataggttaagacttgaatggtgttttcatcttctttcatcttcaccctgtctcacgttacgttatttttatcctgatgacagaataggtactacaggtatttttactctggttttacagtcaaagaaactgaggcacaggcaggtttgcccaaggtcacataactgcttaatagcagggtagacaggtgaagtaactggatgtgtatcagccatgccctttccccatgcccccggcactccccatgacagctctctgaatcccaacattttattcttttgcaggattagacccaagcatataaattcctttttccctctc

SEQ ID NO: 173964 - DNA, 855 bp, Homo sapiens
  Payload ID: 14155
  Gene Symbol: RAPGEF3
  Gene Name: Rap guanine nucleotide exchange factor (GEF) 3
  ENST ID: ENST00000466322
  CDS Start-End: 188-855
ggagaagggtttaagccgaagctgcatttctgggagacctagtgaatctatagcttcatactgggaggtgggctggccaggtgagagctgctggcaggtgggcctggctgtggaggatagcccagctctgggagcaccgcgggtgggagccctccctgacgtggtgccggaggggacactactcaacatggtgttgagaaggatgcaccggccccgaagctgctcctaccagctgctgctggagcaccagcgtccgagctgcatccaggggctgcgctggacaccactcaccaacagcgaggagtccctggatttcagcgagagcctggagcaggcctccacagagcgggtgctcagggctgggaggcagctgcatcggcatctgctggccacctgcccaaacctcatccgagaccggaagtaccaccttaggctctatcggcagtgctgctctggccgggagctggtggatgggatcttggccctgggacttggggtccattcccggagccaagttgtgggaatctgccaggtgctgctggatgaaggtgccctctgccatgtgaaacacgactgggccttccaggaccgagatgcccaattctaccggttccccgggcccgagcccgagcccgtgagaactcatgagatggaggaggagttggccgaagctgtggccctgctctcccagcgggggcctgacgccctgctcactgtggcacttcgaaagcccccaggtcagcgcacggatgaagagctggacctcatctttgaggagctgctgcacatcaaggctgtggcccacctctccaactcggtgaagcgagaattagcggctgttctgctctttgaacc

SEQ ID NO: 173965 - DNA, 695 bp, Homo sapiens
  Payload ID: 14155
  Gene Symbol: RAPGEF3
  Gene Name: Rap guanine nucleotide exchange factor (GEF) 3
  ENST ID: ENST00000548434
  CDS Start-End: 1-554
atgccattggcctgcagccagatgcccgtggtgtggccacatctctggggctcaatgagcgtctctttgttgtcaacccacaggaagtgcatgagctgatcccacaccctgaccagctggggcccactgtgggctctgctgaggggctggacctggtgagtgccaaggacctggcaggccagctgacggaccacgactggagcctcttcaacagtatccaccaggtggagctgatccactatgtgctgggcccccagcatctgcgggatgtcaccaccgccaacctggagcgcttcatgcgccgcttcaatgagctgcagtactgggtggccaccgagctgtgtctctgccccgtgcccggcccccgggcccagctgctcaggaagttcattaagctggcggcccacctcaaggagcagaagaatctcaattccttctttgccgtcatgtttggcctcagcaactcggccatcagccgcctagcccacacctgggagcggctgcctcacaaagtccggaagctgtactccgccctcgagaggctgctgtgctaatgggaggttggaagccccgtgttcgcctgtgacagagcctgggatccctcatggaaccaccgggtataccgactggccctcgccaagctctcccctcctgtcatccccttcatgccccttcttctcaaagacatgaccttc

SEQ ID NO: 173966 - DNA, 2776 bp, Homo sapiens
  Payload ID: 14155
  Gene Symbol: RAPGEF3
  Gene Name: Rap guanine nucleotide exchange factor (GEF) 3
  ENST ID: ENST00000548919
  CDS Start-End: 305-2749
tcctttaggagctgccggtggagagtgagtgctggtcctgtggaggagggagcaagccccgtggtccggagtgcatttccatggatggcttcagagctggccaggatggacagtactccaggcagtgggaaccgcacgtgtgatggcgcagagggaagaaataaagcggccgctttgggaaactgtgggctggccaggtgagagctgctggcaggtgggcctggctgtggaggatagcccagctctgggagcaccgcgggtgggagccctccctgacgtggtgccggaggggacactactcaacatggtgttgagaaggatgcaccggccccgaagctgctcctaccagctgctgctggagcaccagcgtccgagctgcatccaggggctgcgctggacaccactcaccaacagcgaggagtccctggatttcagcgagagcctggagcaggcctccacagagcgggtgctcagggctgggaggcagctgcatcggcatctgctggccacctgcccaaacctcatccgagaccggaagtaccaccttaggctctatcggcagtgctgctctggccgggagctggtggatgggatcttggccctgggacttggggtccattcccggagccaagttgtgggaatctgccaggtgctgctggatgaaggtgccctctgccatgtgaaacacgactgggccttccaggaccgagatgcccaattctaccggttccccgggcccgagcccgagcccgtgagaactcatgagatggaggaggagttggccgaagctgtggccctgctctcccagcgggggcctgacgccctgctcactgtggcacttcgaaagcccccaggtcagcgcacggatgaagagctggacctcatctttgaggagctgctgcacatcaaggctgtggcccacctctccaactcggtgaagcgagaattagcggctgttctgctctttgaaccacacagcaaggcagggaccgtgttgttcagccagggggacaagggcacttcgtggtacattatctggaagggatctgtcaacgtggtgacccatggcaaggggctggtgaccaccctgcatgagggagatgattttggacagctggctctggtgaatgatgcaccccgggcagccaccatcatcctgcgagaagacaactgtcatttcctgcgtgtggacaagcaggacttcaaccgtatcatcaaggatgtggaggcaaagaccatgcggctggaagaacatggcaaagtggtgctggtgctggagagagcctctcagggcgccggcccttcccgacccccaaccccaggcaggaaccggtatacagtgatgtctggcaccccagagaagatcctagagcttctgttggaggccatgggaccagattccagtgctcatgacccaacagagacattcctcagcgacttcctcctgacccacagggtcttcatgcccagcgcccaactctgcgctgcccttctgcaccacttccatgtggagcctgcgggtggcagcgagcaggagcgcagcacctacgtctgcaacaagaggcagcagatcttgcggctggtcagccagtgggtggccctgtatggctccatgctccacactgaccctgtggccaccagcttcctccagaaactctcagacctggtgggcagggacacccgactcagcaacctgctgagggagcagtggccagagaggcggcgatgccacaggttggagaatggctgtgggaatgcatctcctcagatgaaggcccggaacttgcctgtttggctccccaaccaggacgagccccttcctggcagcagctgtgccatccaagttggggataaagatgccattggcctgcagccagatgcccgtggtgtggccacatctctggggctcaatgagcgtctctttgttgtcaacccacaggaagtgcatgagctgatcccacaccctgaccagctggggcccactgtgggctctgctgaggggctggacctggtgagtgccaaggacctggcaggccagctgacggaccacgactggagcctcttcaacagtatccaccaggtggagctgatccactatgtgctgggcccccagcatctgcgggatgtcaccaccgccaacctggagcgcttcatgcgccgcttcaatgagctgcagtactgggtggccaccgagctgtgtctctgccccgtgcccggcccccgggcccagctgctcaggaagttcattaagctggcggcccacaactcggccatcagccgcctagcccacacctgggagcggctgcctcacaaagtccggaagctgtactccgccctcgagaggctgctggatccctcatggaaccaccgggtataccgactggccctcgccaagctctcccctcctgtcatccccttcatgccccttcttctcaaagacatgaccttcattcatgagggaaaccacacactagtggagaatctcatcaactttgagaagatgagaatgatggccagagccgcgcggatgctgcaccactgccgaagccacaaccctgtgcctctctcaccactcagaagccgagtttcccacctccacgaggacagccaggtggcgaggatttccacatgctcggagcagtccctgagcacccggagtccagccagcacctgggcttatgtccagcagctgaaggtcattgacaaccagcgggaactctcccgcctctcccgagagctggagccatgaggaggggctgggactggagctggagca

SEQ ID NO: 173967 - DNA, 3265 bp, Homo sapiens
  Payload ID: 14155
  Gene Symbol: RAPGEF3
  Gene Name: Rap guanine nucleotide exchange factor (GEF) 3
  Uniprot ID: O95398
  ENST ID: ENST00000549151
  CDS Start-End: 299-2944
aggagctgccggtggagagtgagtgctggtcctgtggaggagggagcaagccccgtggtccggagtgcatttccatggatggcttcagagctggccaggatggacagtactccaggcagtgggaaccgcacgtgtgatggcgcagagggaagaaataaagcggccgctttgggaaactgtgggctggccaggtgagagctgctggcaggtgggcctggctgtggaggatagcccagctctgggagcaccgcgggtgggagccctccctgacgtggtgccggaggggacactactcaacatggtgttgagaaggatgcaccggccccgaagctgctcctaccagctgctgctggagcaccagcgtccgagctgcatccaggggctgcgctggacaccactcaccaacagcgaggagtccctggatttcagcgagagcctggagcaggcctccacagagcgggtgctcagggctgggaggcagctgcatcggcatctgctggccacctgcccaaacctcatccgagaccggaagtaccaccttaggctctatcggcagtgctgctctggccgggagctggtggatgggatcttggccctgggacttggggtccattcccggagccaagttgtgggaatctgccaggtgctgctggatgaaggtgccctctgccatgtgaaacacgactgggccttccaggaccgagatgcccaattctaccggttccccgggcccgagcccgagcccgtgagaactcatgagatggaggaggagttggccgaagctgtggccctgctctcccagcgggggcctgacgccctgctcactgtggcacttcgaaagcccccaggtcagcgcacggatgaagagctggacctcatctttgaggagctgctgcacatcaaggctgtggcccacctctccaactcggtgaagcgagaattagcggctgttctgctctttgaaccacacagcaaggcagggaccgtgttgttcagccagggggacaagggcacttcgtggtacattatctggaagggatctgtcaacgtggtgacccatggcaaggggctggtgaccaccctgcatgagggagatgattttggacagctggctctggtgaatgatgcaccccgggcagccaccatcatcctgcgagaagacaactgtcatttcctgcgtgtggacaagcaggacttcaaccgtatcatcaaggatgtggaggcaaagaccatgcggctggaagaacatggcaaagtggtgctggtgctggagagagcctctcagggcgccggcccttcccgacccccaaccccaggcaggaaccggtatacagtgatgtctggcaccccagagaagatcctagagcttctgttggaggccatgggaccagattccagtgctcatgacccaacagagacattcctcagcgacttcctcctgacccacagggtcttcatgcccagcgcccaactctgcgctgcccttctgcaccacttccatgtggagcctgcgggtggcagcgagcaggagcgcagcacctacgtctgcaacaagaggcagcagatcttgcggctggtcagccagtgggtggccctgtatggctccatgctccacactgaccctgtggccaccagcttcctccagaaactctcagacctggtgggcagggacacccgactcagcaacctgctgagggagcagtggccagagaggcggcgatgccacaggttggagaatggctgtgggaatgcatctcctcagatgaaggcccggaacttgcctgtttggctccccaaccaggacgagccccttcctggcagcagctgtgccatccaagttggggataaagtcccctatgacatctgccggccagaccactcagtgttgaccctgcagctgcctgtgacagcctccgtgagagaggtgatggcagcgttggcccaggaggatggctggaccaaggggcaggtgctggtgaaggtcaattctgcaggtgatgccattggcctgcagccagatgcccgtggtgtggccacatctctggggctcaatgagcgtctctttgttgtcaacccacaggaagtgcatgagctgatcccacaccctgaccagctggggcccactgtgggctctgctgaggggctggacctggtgagtgccaaggacctggcaggccagctgacggaccacgactggagcctcttcaacagtatccaccaggtggagctgatccactatgtgctgggcccccagcatctgcgggatgtcaccaccgccaacctggagcgcttcatgcgccgcttcaatgagctgcagtactgggtggccaccgagctgtgtctctgccccgtgcccggcccccgggcccagctgctcaggaagttcattaagctggcggcccacctcaaggagcagaagaatctcaattccttctttgccgtcatgtttggcctcagcaactcggccatcagccgcctagcccacacctgggagcggctgcctcacaaagtccggaagctgtactccgccctcgagaggctgctggatccctcatggaaccaccgggtataccgactggccctcgccaagctctcccctcctgtcatccccttcatgccccttcttctcaaagacatgaccttcattcatgagggaaaccacacactagtggagaatctcatcaactttgagaagatgagaatgatggccagagccgcgcggatgctgcaccactgccgaagccacaaccctgtgcctctctcaccactcagaagccgagtttcccacctccacgaggacagccaggtggcgaggatttccacatgctcggagcagtccctgagcacccggagtccagccagcacctgggcttatgtccagcagctgaaggtcattgacaaccagcgggaactctcccgcctctcccgagagctggagccatgaggaggggctgggactggagctggagcaggcacttgcagccgggaaagccagggtgtgccgggccaagatactcacaggctggccacagctgggcaaggctctccgtggagtggactcgagtccctggagcaggcagtgtggaggcagccatcccctgtgatgactggcagctaaggaggacctcggagtggacccgagccaggaataacgaatgacccaaggccaaggaagggaggacagagaggccccaggagtgggtggagagtggagtgcgctgggacgttgtgtgcaatagagaggtctccacaccagatgtcttcc

SEQ ID NO: 173968 - DNA, 648 bp, Homo sapiens
  Payload ID: 14155
  Gene Symbol: RAPGEF3
  Gene Name: Rap guanine nucleotide exchange factor (GEF) 3
  ENST ID: ENST00000495953
  CDS Start-End: 226-648
agtccagaggactctaaggaagtagttctgcctggggcagttgtactgtggcccagccgccccagtcgtgtcccatggctgtccactttcctccccgtgtcacaggtgggctggccaggtgagagctgctggcaggtgggcctggctgtggaggatagcccagctctgggagcaccgcgggtgggagccctccctgacgtggtgccggaggggacactactcaacatggtgttgagaaggatgcaccggccccgaagctgctcctaccagctgctgctggagcaccagcgtccgagctgcatccaggggctgcgctggacaccactcaccaacagcgaggagtccctggatttcagcgagagcctggagcaggcctccacagagcgggtgctcagggctgggaggcagctgcatcggcatctgctggccacctgcccaaacctcatccgagaccggaagtaccaccttaggctctatcggcagtgctgctctggccgggagctggtggatgggatcttggccctgggacttggggtccattcccggagccaagttgtgggaatctgccaggtgctgctggatgaaggtgccctctgccatgtgaaacacgactgggccttccaggaccgagatgcccaattctaccgg

SEQ ID NO: 173969 - DNA, 910 bp, Homo sapiens
  Payload ID: 14155
  Gene Symbol: RAPGEF3
  Gene Name: Rap guanine nucleotide exchange factor (GEF) 3
  ENST ID: ENST00000495465
  CDS Start-End: 1-327
ttccccgggcccgagcccgagcccgtgagaactcatgagatggaggaggagttggccgaagctgtggccctgctctcccagcgggggcctgacgccctgctcactgtggcacttcgaaagcccccaggtcagcgcacggatgaagagctggacctcatctttgaggagctgctgcacatcaaggctgtggcccacctctccaactcggtgaagcgagaattagcggctgttctgctctttgaaccacacagcaaggcagggaccgtgtccagggggacaagggcacttcgtggtacattatctggaagggatctgtcaacgtggtgacccatggcaaggggctggtgaccaccctgcatgagggagatgattttggacagctggctctggtgaatgatgcaccccgggcagccaccatcatcctgcgagaagacaactgtcatttcctgcgtgtggacaagcaggacttcaaccgtatcatcaaggatgtggaggcaaagaccatgcggctggaagaacatggcaaagtggtgctggtgctggagagagcctctcagggcgccggcccttcccgacccccaaccccaggcaggaaccggtatacagtgatgtctggcaccccagagaagatcctagagcttctgttggaggccatgggaccagattccagtgctcatgacccaacagagacattcctcagcgacttcctcctgacccacagggtcttcatgcccagcgcccaactctgcgctgcccttctgcaccacttccatgtggagcctgcgggtggcagcgagcaggagcgcagcacctacgtctgcaacaagaggcagcagatcttgcggctggtcagccagtgggtggccctgtatggctccatgctccacactgaccctgtggccaccagctt

SEQ ID NO: 173970 - DNA, 2659 bp, Homo sapiens
  Payload ID: 14155
  Gene Symbol: RAPGEF3
  Gene Name: Rap guanine nucleotide exchange factor (GEF) 3
  ENST ID: ENST00000547856
  CDS Start-End: 17-256
gagcttgaaaagaaacatgaaggtgggctggccaggtgagagctgctggcaggtgggcctggctgtggaggatagcccagctctgggagcaccgcgggtgggagccctccctgacgtggtgccggaggggacactactcaacatggtgttgagaaggatgcaccggccccgaagctgctcctaccagctgctgctggagcaccagcgtccgagctgcatccaggggctgcgctggcccaggtcagcgcacggatgaagagctggacctcatctttgaggagctgctgcacatcaaggctgtggcccacctctccaactcggtgaagcgagaattagcggctgttctgctctttgaaccacacagcaaggcagggaccgtgttgttcagccagggggacaagggcacttcgtggtacattatctggaagggatctgtcaacgtggtgacccatggcaaggggctggtgaccaccctgcatgagggagatgattttggacagctggctctggtgaatgatgcaccccgggcagccaccatcatcctgcgagaagacaactgtcatttcctgcgtgtggacaagcaggacttcaaccgtatcatcaaggatgtggaggcaaagaccatgcggctggaagaacatggcaaagtggtgctggtgctggagagagcctctcagggcgccggcccttcccgacccccaaccccaggcaggaaccggtatacagtgatgtctggcaccccagagaagatcctagagcttctgttggaggccatgggaccagattccagtgctcatgacccaacagagacattcctcagcgacttcctcctgacccacagggtcttcatgcccagcgcccaactctgcgctgcccttctgcaccacttccatgtggagcctgcgggtggcagcgagcaggagcgcagcacctacgtctgcaacaagaggcagcagatcttgcggctggtcagccagtgggtggccctgtatggctccatgctccacactgaccctgtggccaccagcttcctccagaaactctcagacctggtgggcagggacacccgactcagcaacctgctgagggagcagtggccagagaggcggcgatgccacaggttggagaatggctgtgggaatgcatctcctcagatgaaggcccggaacttgcctgtttggctccccaaccaggacgagccccttcctggcagcagctgtgccatccaagttggggataaagtcccctatgacatctgccggccagaccactcagtgttgaccctgcagctgcctgtgacagcctccgtgagagaggtgatggcagcgttggcccaggaggatggctggaccaaggggcaggtgctggtgaaggtcaattctgcaggtgatgccattggcctgcagccagatgcccgtggtgtggccacatctctggggctcaatgagcgtctctttgttgtcaacccacaggaagtgcatgagctgatcccacaccctgaccagctggggcccactgtgggctctgctgaggggctggacctggtgagtgccaaggacctggcaggccagctgacggaccacgactggagcctcttcaacagtatccaccaggtggagctgatccactatgtgctgggcccccagcatctgcgggatgtcaccaccgccaacctggagcgcttcatgcgccgcttcaatgagctgcagtactgggtggccaccgagctgtgtctctgccccgtgcccggcccccgggcccagctgctcaggaagttcattaagctggcggcccacctcaaggagcagaagaatctcaattccttctttgccgtcatgtttggcctcagcaactcggccatcagccgcctagcccacacctgggagcggctgcctcacaaagtccggaagctgtactccgccctcgagaggctgctggatccctcatggaaccaccgggtataccgactggccctcgccaagctctcccctcctgtcatccccttcatgccccttcttctcaaagacatgaccttcattcatgagggaaaccacacactagtggagaatctcatcaactttgagaagatgagaatgatggccagagccgcgcggatgctgcaccactgccgaagccacaaccctgtgcctctctcaccactcagaagccgagtttcccacctccacgaggacagccaggtggcgaggatttccacatgctcggagcagtccctgagcacccggagtccagccagcacctgggcttatgtccagcagctgaaggtcattgacaaccagcgggaactctcccgcctctcccgagagctggagccatgaggaggggctgggactggagctggagcaggcacttgcagccgggaaagccagggtgtgccgggccaagatactcacaggctggccacagctgggcaaggctctccgtggagtggactcgagtccctggagcaggcagtgtggaggcagccatcccctgtgatgactggcagctaaggaggacctcggagtggacccgagccaggaataacgaatgacccaaggccaaggaagggaggacagagaggccccaggagtgggtggagagtggagtgcgctgggacgttgtgtgcaatagagaggtctccacaccagatgtcttccag

SEQ ID NO: 173971 - DNA, 4299 bp, Homo sapiens
  Payload ID: 14156
  Gene Symbol: RAPGEF4
  Gene Name: Rap guanine nucleotide exchange factor (GEF) 4
  Uniprot ID: Q8WZA2
  ENST ID: ENST00000397081
  CDS Start-End: 144-3179
gggcgggcctgtcgcagccgcgctggtcgccaggcgtccgggaggagcggggtccgcgcggcggacgaggcgggggcggaggcgcaggcagagcgagcgcgggaggtcgccgcagccagggacaccgcgcgccgccgctcaacatggtcgctgcgcacgctgcccattcttcctcctctgccgagtggatcgcctgcctggataaaagaccactggagcgatccagcgaagatgtggatataatcttcactcgactgaaagaagttaaagcttttgagaaatttcacccaaatctccttcatcagatttgcttatgtggttattatgagaatctggaaaagggaataacattatttcgccagggtgatattggaacaaactggtatgctgtcctggcagggtctttggatgttaaagtatctgagaccagcagtcaccaggatgctgtgaccatctgtaccctgggaattgggacggcctttggagagtccattctggacaacacaccccgccatgcaaccatcgttaccagggagagcagtgaactgctccgcatcgagcagaaggacttcaaggcactatgggagaaatatcgacagtatatggcaggacttctggctcctccttatggtgttatggaaacgggctctaacaatgacaggattcctgacaaggagaacacacctctcattgaacctcacgttcctcttcgtcctgctaacaccattaccaaggtcccttcagagaagatcctcagagctggaaaaattttacgaaatgccattctctctcgagcacctcacatgataagagatagaaaataccacctaaagacatacagacaatgctgtgtgggaactgaactggtggactggatgatgcagcagacaccatgtgttcactcccggactcaagctgttggcatgtggcaagtcctgttagaagatggtgttctcaaccacgtggaccaggagcaccatttccaagacaaatatttattctatcgatttctggatgatgagcacgaggatgcccctttgcctactgaggaggagaagaaggagtgtgatgaggagctccaggacaccatgctgctgctgtcacagatgggccccgacgcccacatgaggatgatccttcgcaaaccacctggccagaggactgtggatgacctagagattatctatgaggagcttcttcatattaaagccttatcccatctttctaccacagtgaaacgagagttagcaggtgttctcatttttgagtctcacgccaaaggagggactgtgttgtttaaccagggggaagaaggtacctcctggtacattattctaaaaggatcagtgaatgtagtcatttacggcaagggtgtggtctgcaccctgcatgaaggagatgacttcggcaagttagcactagtgaatgatgccccacgagctgcctctatcgtcttacgagaagataactgccatttcttaagagtagacaaggaggatttcaaccggatcctaagggacgtggaggcgaatacagtcagacttaaagaacatgaccaagatgtcttggtgctggagaaggtcccagcagggaacagagcttctaatcaaggaaactcacagcctcagcaaaagtatactgtgatgtcaggaacacctgaaaaaattttagagcattttctagaaacaatacgccttgaggcaactttaaatgaagcaacagattctgttttaaatgactttattatgatgcactgtgtttttatgccaaatacccagctttgcccggcactggtggcccactaccacgcacagccttcacaaggtacagaacaggagaaaatggattatgccctcaacaataagaggcgagtcatccgcctggttctacagtgggctgccatgtatggagacctcctgcaagaggatgacgtgtctatggccttcctggaggagttttatgtatctgtatcagatgatgcccggatgattgctgccctcaaggagcaactgccagagttggagaagattgtcaagcaaatctcagaagatgcaaaggcaccacaaaagaagcacaaggttcttttgcaacagttcaatacgggcgatgagagagcccagaagcgccagcctatccgcggctctgatgaagttctgtttaaggtctattgcatggaccacacctacacaaccattcgggtgccagtggccacttcggtgaaggaagtcatcagtgcagttgccgacaagctgggctccggggagggcctgatcatagtcaagatgagttccggaggagaaaaggtggtgctcaaacctaatgatgtttcagtatttacgacgctcaccattaatggacgcctgtttgcttgcccgcgagagcaattcgattcactgactcccttaccagaacaggaaggcccaactgttggaacagtgggaacttttgaactgatgagctccaaagatttagcataccagatgacaatttatgattgggaactcttcaactgcgtgcatgagctggagctaatctatcacacatttggaaggcataattttaaaaagaccacagcaaacttggatttgttcctgaggagatttaatgaaattcagttttgggtcgtcactgagatctgcctttgttctcagctcagcaagcgtgttcagctattaaaaaaatttattaagatagcagcccactgtaaggagtataaaaatctgaattccttttttgccatcgtcatgggactaagtaacgttgctgtgagccgcttggcactaacgtgggagaaactgccaagcaagttcaagaagttctatgcggagtttgaaagtttaatggacccttcaaggaaccacagggcctacaggctgacagtagctaagctggaacctcctctcatccccttcatgcctttgctcattaaagatatgacatttactcatgaggggaacaagacgttcattgacaatctagtaaactttgaaaaaatgcgcatgattgcaaatacggccagaacagtgagatactacaggagccaacccttcaatcctgatgcagctcaagctaataagaaccatcaggatgtccggagttatgtacggcaattaaatgtgattgacaaccagagaactttatcacagatgtcacacagattagagcctcgtcgaccatagacatttcaaatgcccaaagcaacagtttgtctccagtccacaatctttcaaaaatgccatttatgctactactgactgtattgccactagagaattctacaaaacaagcaaaaacacatcctgagacacctcagggctgcattcagcttaccagctacctagcaagagaaggaattatttgacatgcctaaagcttacacactctagcttaggaatccccagtttgtggctaccctgtttcatttccacttgtgccatcttctttgctgaagtgttgaataaggcccacgtgaagagtttggtagaaatagccttgtcaagagaactagcaagcccctgacatttttttctaagagtgtttatgggatgagatgtgctacaaatgggatagatttggataaaattttaactcaacatcttgatttggagcctggggtttcgggaaggtgttgaggaatctatagaagtccaaattataggttgtattcttccatcttcattgtcttacctctgaaggaatagaacctgaccacattattatgaaacattatggctgtttatgtaatttagggaggactggtctgtaatttctgaatgtatatagaataatatttatgtttacaatgtaacttttcaaaatttacaaatcaggattatatacataagaattccactaagaaatgccaagattcttaaatttgccagcgttaaagtagaaaataacatttcagaagagcacaatatgcataaaacatttttcaaaattgaaatattttcctgggcattaaaaacctttactattggctacaaatttattgtacctgatgaaaacatattttctggacttaaatgttattacaaatatcttaattttcagtaattgttttgcactttcaaagattgtaaatagttcattcaatcaatggtatggagttatttatttgctacataatagatactgtgccaaataattactttttatttattttatttagtacgtaattttgaagtacattttttcctgttttcacaattagactacatttaatgtgtaggaattgtatgtatgtatatcttctgtaaataacatctagtatcttcactaaatataattgtcgac

SEQ ID NO: 173972 - DNA, 649 bp, Homo sapiens
  Payload ID: 14156
  Gene Symbol: RAPGEF4
  Gene Name: Rap guanine nucleotide exchange factor (GEF) 4
  ENST ID: ENST00000397085
  CDS Start-End: 1-564
ctgatgagctccaaagatttagcataccagatgacaatttatgattgggaactcttcaactgcgtgcatgagctggagctaatctatcacacatttggaaggcataattttaaaaagaccacagcaaacttggatttgttcctgaggagatttaatgaaattcagttttgggtcgtcactgagatctgcctttgttctcagctcagcaagcgtgttcagctattaaaaaaatttattaagatagcagcccactgtaaggagtataaaaatctgaattccttttttgccatcgtcatgggactaagtaacgttgctgtgagccgcttggcactaacgtgggagaaactgccaagcaagttcaagaagttctatgcggagtttgaaagtttaatggacccttcaaggaaccacagggcctacaggctgacagtagctaagctggaacctcctctcatccccttcatgcctttgctcattaaagatatgacatttactcatgaggggaacaagacgttcattgacaatctagtaaactttgaaaaaatggtatgtgcagtattataaccttaaccacaatgtgtttttaaaataaaatttgcattttttctaataaaggaaataatttccatatatgctgccctgctaaaaa

SEQ ID NO: 173973 - DNA, 4120 bp, Homo sapiens
  Payload ID: 14156
  Gene Symbol: RAPGEF4
  Gene Name: Rap guanine nucleotide exchange factor (GEF) 4
  Uniprot ID: Q8WZA2
  ENST ID: ENST00000397087
  CDS Start-End: 391-2994
acagttctgattcttttaaaccaagcggaagcctgcttcgatgacttggacttatgtctgcaccagggtctcattcctgtgtcttcaagcttttccatggagtggcaaaatgattcaaatccagaaaggaagggagtgaagttattaggagctaactaaagttaaaaaaaaaaaaaaaaaaaaaaaaggaagtgttttcttattgccttagactgcctgagctttcctggagaaccatcagcaccagtttcctttctgtggactgagagccactcagtagtagacacgaacagggaatgaacggcaatgaaggtacattttgctgatcaaataaaggatagatgctcactggatgtctgagaactttgagagaccgaaaaagaaggacgtatgctctacaagaaatatcgacagtatatggcaggacttctggctcctccttatggtgttatggaaacgggctctaacaatgacaggattcctgacaaggagaacacacctctcattgaacctcacgttcctcttcgtcctgctaacaccattaccaaggtcccttcagagaagatcctcagagctggaaaaattttacgaaatgccattctctctcgagcacctcacatgataagagatagaaaataccacctaaagacatacagacaatgctgtgtgggaactgaactggtggactggatgatgcagcagacaccatgtgttcactcccggactcaagctgttggcatgtggcaagtcctgttagaagatggtgttctcaaccacgtggaccaggagcaccatttccaagacaaatatttattctatcgatttctggatgatgagcacgaggatgcccctttgcctactgaggaggagaagaaggagtgtgatgaggagctccaggacaccatgctgctgctgtcacagatgggccccgacgcccacatgaggatgatccttcgcaaaccacctggccagaggactgtggatgacctagagattatctatgaggagcttcttcatattaaagccttatcccatctttctaccacagtgaaacgagagttagcaggtgttctcatttttgagtctcacgccaaaggagggactgtgttgtttaaccagggggaagaaggtacctcctggtacattattctaaaaggatcagtgaatgtagtcatttacggcaagggtgtggtctgcaccctgcatgaaggagatgacttcggcaagttagcactagtgaatgatgccccacgagctgcctctatcgtcttacgagaagataactgccatttcttaagagtagacaaggaggatttcaaccggatcctaagggacgtggaggcgaatacagtcagacttaaagaacatgaccaagatgtcttggtgctggagaaggtcccagcagggaacagagcttctaatcaaggaaactcacagcctcagcaaaagtatactgtgatgtcaggaacacctgaaaaaattttagagcattttctagaaacaatacgccttgaggcaactttaaatgaagcaacagattctgttttaaatgactttattatgatgcactgtgtttttatgccaaatacccagctttgcccggcactggtggcccactaccacgcacagccttcacaaggtacagaacaggagaaaatggattatgccctcaacaataagaggcgagtcatccgcctggttctacagtgggctgccatgtatggagacctcctgcaagaggatgacgtgtctatggccttcctggaggagttttatgtatctgtatcagatgatgcccggatgattgctgccctcaaggagcaactgccagagttggagaagattgtcaagcaaatctcagaagatgcaaaggcaccacaaaagaagcacaaggttcttttgcaacagttcaatacgggcgatgagagagcccagaagcgccagcctatccgcggctctgatgaagttctgtttaaggtctattgcatggaccacacctacacaaccattcgggtgccagtggccacttcggtgaaggaagtcatcagtgcagttgccgacaagctgggctccggggagggcctgatcatagtcaagatgagttccggaggagaaaaggtggtgctcaaacctaatgatgtttcagtatttacgacgctcaccattaatggacgcctgtttgcttgcccgcgagagcaattcgattcactgactcccttaccagaacaggaaggcccaactgttggaacagtgggaacttttgaactgatgagctccaaagatttagcataccagatgacaatttatgattgggaactcttcaactgcgtgcatgagctggagctaatctatcacacatttggaaggcataattttaaaaagaccacagcaaacttggatttgttcctgaggagatttaatgaaattcagttttgggtcgtcactgagatctgcctttgttctcagctcagcaagcgtgttcagctattaaaaaaatttattaagatagcagcccactgtaaggagtataaaaatctgaattccttttttgccatcgtcatgggactaagtaacgttgctgtgagccgcttggcactaacgtgggagaaactgccaagcaagttcaagaagttctatgcggagtttgaaagtttaatggacccttcaaggaaccacagggcctacaggctgacagtagctaagctggaacctcctctcatccccttcatgcctttgctcattaaagatatgacatttactcatgaggggaacaagacgttcattgacaatctagtaaactttgaaaaaatgcgcatgattgcaaatacggccagaacagtgagatactacaggagccaacccttcaatcctgatgcagctcaagctaataagaaccatcaggatgtccggagttatgtacggcaattaaatgtgattgacaaccagagaactttatcacagatgtcacacagattagagcctcgtcgaccatagacatttcaaatgcccaaagcaacagtttgtctccagtccacaatctttcaaaaatgccatttatgctactactgactgtattgccactagagaattctacaaaacaagcaaaaacacatcctgagacacctcagggctgcattcagcttaccagctacctagcaagagaaggaattatttgacatgcctaaagcttacacactctagcttaggaatccccagtttgtggctaccctgtttcatttccacttgtgccatcttctttgctgaagtgttgaataaggcccacgtgaagagtttggtagaaatagccttgtcaagagaactagcaagcccctgacatttttttctaagagtgtttatgggatgagatgtgctacaaatgggatagatttggataaaattttaactcaacatcttgatttggagcctggggtttcgggaaggtgttgaggaatctatagaagtccaaattataggttgtattcttccatcttcattgtcttacctctgaaggaatagaacctgaccacattattatgaaacattatggctgtttatgtaatttagggaggactggtctgtaatttctgaatgtatatagaataatatttatgtttacaatgtaacttttcaaaatttacaaatcaggattatatacataagaattccactaagaaatgccaagattcttaaatttgccagcgttaaagtagaaaataacatttcagaagagcacaatatgcataaaacatttttcaaaattgaaatattttcctgggcattaaaaacctttactattggctacaaatttattgtacctgatgaaaacatattttctggacttaaatgttattacaaatatcttaattttcagtaattgttttgcactttcaaagattgtaaatagttcattcaatcaatggtatggagttatttatttgctacataatagatactgtgccaaataattactttttatttattttatttagtacgtaattttgaagtacattttttcctgttttcacaattagactacatttaatgtgtaggaattgtatgtatgtatatcttctgtaaataacatctagtatcttcactaaatataattgtcgacaagaaa

SEQ ID NO: 173974 - DNA, 3975 bp, Homo sapiens
  Payload ID: 14156
  Gene Symbol: RAPGEF4
  Gene Name: Rap guanine nucleotide exchange factor (GEF) 4
  ENST ID: ENST00000409036
  CDS Start-End: 18-2849
gcgcgccgccgctcaacatggtcgctgcgcacgctgcccattcttcctcctctgccgagtggatcgcctgcctggataaaagaccactggagcgatccagcgaagatgtggatataatcttcactcgactgaaagaagttaaagcttttgagaaatttcacccaaatctccttcatcagatttgcttatgtggttattatgagaatctggaaaagggaataacattatttcgccagggtgatattggaacaaactggtatgctgtcctggcagggtctttggatgttaaagtatctgagaccagcagtcaccaggatgctgtgaccatctgtaccctgggaattgggacggcctttggagagtccattctggacaacacaccccgccatgcaaccatcgttaccagggagagcagtgaactgctccgcatcgagcagaaggacttcaaggcactatgggagaaatatcgacagtatatggcaggacttctggctcctccttatggtgttatggaaacgggctctaacaatgacaggattcctgacaaggagaacacacctctcattgaacctcacgttcctcttcgtcctgctaacaccattaccaaggtcccttcagagaagatcctcagagctggaaaaattttacgaaatgccattctctctcgagcacctcacatgataagagatagaaaataccacctaaagacatacagacaatgctgtgtgggaactgaactggtggactggatgatgcagcagacaccatgtgttcactcccggactcaagctgttggcatgtggcaagtcctgttagaagatggtgttctcaaccacgtggaccaggagcaccatttccaagacaaatatttattctatcgatttctggatgatgagcacgaggatgcccctttgcctactgaggaggagaagaaggagtgtgatgaggagctccaggacaccatgctgctgctgtcacagatgggccccgacgcccacatgaggatgatccttcgcaaaccacctggccagaggactgtggatgacctagagattatctatgaggagcttcttcatattaaagccttatcccatctttctaccacagtgaaacgagagttagcaggtgttctcatttttgagtctcacgccaaaggagggactgtgttgtttaaccagggggaagaaggtacctcctggtacattattctaaaaggatcagtgaatgtagtcatttacggcaagggtgtggtctgcaccctgcatgaaggagatgacttcggcaagttagcactagtgaatgatgccccacgagctgcctctatcgtcttacgagaagataactgccatttcttaagagtagacaaggaggatttcaaccggatcctaagggacgtggaggcgaatacagtcagacttaaagaacatgaccaagatgtcttggtgctggagaaggtcccagcagggaacagagcttctaatcaaggaaactcacagcctcagcaaaagtatactgtgatgtcaggaacacctgaaaaaattttagagcattttctagaaacaatacgccttgaggcaactttaaatgaagcaacagattctgttttaaatgactttattatgatgcactgtgtttttatgccaaatacccagctttgcccggcactggtggcccactaccacgcacagccttcacaaggtacagaacaggagaaaatggattatgccctcaacaataagaggcgagtcatccgcctggttctacagtgggctgccatgtatggagacctcctgcaagaggatgacgtgtctatggccttcctggaggagttttatgtatctgtatcagatgatgcccggatgattgctgccctcaaggagcaactgccagagttggagaagattgtcaagcaaatctcagaagatgcaaaggcaccacaaaagaagcacaaggttcttttgcaacagttcaatacgggcgatgagagagcccagaagcgccagcctatccgcggctctgatgaagttctgtttaaggtctattgcatggaccacacctacacaaccattcgggtgccagtggccacttcggtgaaggaagtcatcagtgcagttgccgacaagctgggctccggggagggcctgatcatagtcaagatgagttccggaggagaaaaggtggtgctcaaacctaatgatgtttcagtatttacgacgctcaccattaatggacgcctgtttgcttgcccgcgagagcaattcgattcactgactcccttaccagaacaggaaggcccaactgttggaacagtgggaacttttgaactgatgagctccaaagatttagcataccagatgacaatttatgattgggaactcttcaactgcgtgcatgagctggagctaatctatcacacatttggaaggcataattttaaaaagaccacagcaaacttggatttgttcctgaggagatttaatgaaattcagttttgggtcgtcactgagatctgcctttgttctcagctcagcaagcgtgttcagctattaaaaaaatttattaagatagcagcccactgtaaggagtataaaaatctgaattccttttttgccatcgtcatgggactaagtaacgttgctgtgagccgcttggcactaacgtgggagcgcatgattgcaaatacggccagaacagtgagatactacaggagccaacccttcaatcctgatgcagctcaagctaataagaaccatcaggatgtccggagttatgtacggcaattaaatgtgattgacaaccagagaactttatcacagatgtcacacagattagagcctcgtcgaccatagacatttcaaatgcccaaagcaacagtttgtctccagtccacaatctttcaaaaatgccatttatgctactactgactgtattgccactagagaattctacaaaacaagcaaaaacacatcctgagacacctcagggctgcattcagcttaccagctacctagcaagagaaggaattatttgacatgcctaaagcttacacactctagcttaggaatccccagtttgtggctaccctgtttcatttccacttgtgccatcttctttgctgaagtgttgaataaggcccacgtgaagagtttggtagaaatagccttgtcaagagaactagcaagcccctgacatttttttctaagagtgtttatgggatgagatgtgctacaaatgggatagatttggataaaattttaactcaacatcttgatttggagcctggggtttcgggaaggtgttgaggaatctatagaagtccaaattataggttgtattcttccatcttcattgtcttacctctgaaggaatagaacctgaccacattattatgaaacattatggctgtttatgtaatttagggaggactggtctgtaatttctgaatgtatatagaataatatttatgtttacaatgtaacttttcaaaatttacaaatcaggattatatacataagaattccactaagaaatgccaagattcttaaatttgccagcgttaaagtagaaaataacatttcagaagagcacaatatgcataaaacatttttcaaaattgaaatattttcctgggcattaaaaacctttactattggctacaaatttattgtacctgatgaaaacatattttctggacttaaatgttattacaaatatcttaattttcagtaattgttttgcactttcaaagattgtaaatagttcattcaatcaatggtatggagttatttatttgctacataatagatactgtgccaaataattactttttatttattttatttagtacgtaattttgaagtacattttttcctgttttcacaattagactacatttaatgtgtaggaattgtatgtatgtatatcttctgtaaataacatctagtatcttcactaaatataattgtcgacaagaaa

SEQ ID NO: 173975 - DNA, 3707 bp, Homo sapiens
  Payload ID: 14156
  Gene Symbol: RAPGEF4
  Gene Name: Rap guanine nucleotide exchange factor (GEF) 4
  ENST ID: ENST00000535187
  CDS Start-End: 212-2587
aaatgtttgtttttgtacttgtgagttatgcattttatggggcagactgtcgttgctgaatttctttctgctttttattccatctgttcctcaactcttacaaaagctagccataccatctctctctctagcttctgaagtggtcccttcagagaagatcctcagagctggaaaaattttacgaaatgccattctctctcgagcacctcacatgataagagatagaaaataccacctaaagacatacagacaatgctgtgtgggaactgaactggtggactggatgatgcagcagacaccatgtgttcactcccggactcaagctgttggcatgtggcaagtcctgttagaagatggtgttctcaaccacgtggaccaggagcaccatttccaagacaaatatttattctatcgatttctggatgatgagcacgaggatgcccctttgcctactgaggaggagaagaaggagtgtgatgaggagctccaggacaccatgctgctgctgtcacagatgggccccgacgcccacatgaggatgatccttcgcaaaccacctggccagaggactgtggatgacctagagattatctatgaggagcttcttcatattaaagccttatcccatctttctaccacagtgaaacgagagttagcaggtgttctcatttttgagtctcacgccaaaggagggactgtgttgtttaaccagggggaagaaggtacctcctggtacattattctaaaaggatcagtgaatgtagtcatttacggcaagggtgtggtctgcaccctgcatgaaggagatgacttcggcaagttagcactagtgaatgatgccccacgagctgcctctatcgtcttacgagaagataactgccatttcttaagagtagacaaggaggatttcaaccggatcctaagggacgtggaggcgaatacagtcagacttaaagaacatgaccaagatgtcttggtgctggagaaggtcccagcagggaacagagcttctaatcaaggaaactcacagcctcagcaaaagtatactgtgatgtcaggaacacctgaaaaaattttagagcattttctagaaacaatacgccttgaggcaactttaaatgaagcaacagattctgttttaaatgactttattatgatgcactgtgtttttatgccaaatacccagctttgcccggcactggtggcccactaccacgcacagccttcacaaggtacagaacaggagaaaatggattatgccctcaacaataagaggcgagtcatccgcctggttctacagtgggctgccatgtatggagacctcctgcaagaggatgacgtgtctatggccttcctggaggagttttatgtatctgtatcagatgatgcccggatgattgctgccctcaaggagcaactgccagagttggagaagattgtcaagcaaatctcagaagatgcaaaggcaccacaaaagaagcacaaggttcttttgcaacagttcaatacgggcgatgagagagcccagaagcgccagcctatccgcggctctgatgaagttctgtttaaggtctattgcatggaccacacctacacaaccattcgggtgccagtggccacttcggtgaaggaagtcatcagtgcagttgccgacaagctgggctccggggagggcctgatcatagtcaagatgagttccggaggagaaaaggtggtgctcaaacctaatgatgtttcagtatttacgacgctcaccattaatggacgcctgtttgcttgcccgcgagagcaattcgattcactgactcccttaccagaacaggaaggcccaactgttggaacagtgggaacttttgaactgatgagctccaaagatttagcataccagatgacaatttatgattgggaactcttcaactgcgtgcatgagctggagctaatctatcacacatttggaaggcataattttaaaaagaccacagcaaacttggatttgttcctgaggagatttaatgaaattcagttttgggtcgtcactgagatctgcctttgttctcagctcagcaagcgtgttcagctattaaaaaaatttattaagatagcagcccactgtaaggagtataaaaatctgaattccttttttgccatcgtcatgggactaagtaacgttgctgtgagccgcttggcactaacgtgggagaaactgccaagcaagttcaagaagttctatgcggagtttgaaagtttaatggacccttcaaggaaccacagggcctacaggctgacagtagctaagctggaacctcctctcatccccttcatgcctttgctcattaaagatatgacatttactcatgaggggaacaagacgttcattgacaatctagtaaactttgaaaaaatgcgcatgattgcaaatacggccagaacagtgagatactacaggagccaacccttcaatcctgatgcagctcaagctaataagaaccatcaggatgtccggagttatgtacggcaattaaatgtgattgacaaccagagaactttatcacagatgtcacacagattagagcctcgtcgaccatagacatttcaaatgcccaaagcaacagtttgtctccagtccacaatctttcaaaaatgccatttatgctactactgactgtattgccactagagaattctacaaaacaagcaaaaacacatcctgagacacctcagggctgcattcagcttaccagctacctagcaagagaaggaattatttgacatgcctaaagcttacacactctagcttaggaatccccagtttgtggctaccctgtttcatttccacttgtgccatcttctttgctgaagtgttgaataaggcccacgtgaagagtttggtagaaatagccttgtcaagagaactagcaagcccctgacatttttttctaagagtgtttatgggatgagatgtgctacaaatgggatagatttggataaaattttaactcaacatcttgatttggagcctggggtttcgggaaggtgttgaggaatctatagaagtccaaattataggttgtattcttccatcttcattgtcttacctctgaaggaatagaacctgaccacattattatgaaacattatggctgtttatgtaatttagggaggactggtctgtaatttctgaatgtatatagaataatatttatgtttacaatgtaacttttcaaaatttacaaatcaggattatatacataagaattccactaagaaatgccaagattcttaaatttgccagcgttaaagtagaaaataacatttcagaagagcacaatatgcataaaacatttttcaaaattgaaatattttcctgggcattaaaaacctttactattggctacaaatttattgtacctgatgaaaacatattttctggacttaaatgttattacaaatatcttaattttcagtaattgttttgcactttcaaagattgtaaatagttcattcaatcaatggtatggagttatttatttgctacataatagatactgtgccaaataattactttttatttattttatttagtacgtaattttgaagtacattttttcctgttttcacaattagactacatttaatgtgtaggaattgtatgtatgtatatcttctgtaaataacatctagtatcttcactaaatataattgtcgac

SEQ ID NO: 173976 - DNA, 3920 bp, Homo sapiens
  Payload ID: 14156
  Gene Symbol: RAPGEF4
  Gene Name: Rap guanine nucleotide exchange factor (GEF) 4
  Uniprot ID: Q8WZA2
  ENST ID: ENST00000538974
  CDS Start-End: 278-2800
aatttagattaccaatgataaagccggggctacggctaaagaaaggtaggatgcatacgcagaaacattagtgctaatatgctgcagaaaagccaagataaatcagtccagctctcatacatcactaagggagaagctgattgcaacttgaccatgttgcctgagtagtcccatcagtgagaagaggagaacatggatttaaaaaaaactagaatgtacccctagggctcctgccgtggtggacctgggagaagtgtctggtaaatatcgacagtatatggcaggacttctggctcctccttatggtgttatggaaacgggctctaacaatgacaggattcctgacaaggagaacgtcccttcagagaagatcctcagagctggaaaaattttacgaaatgccattctctctcgagcacctcacatgataagagatagaaaataccacctaaagacatacagacaatgctgtgtgggaactgaactggtggactggatgatgcagcagacaccatgtgttcactcccggactcaagctgttggcatgtggcaagtcctgttagaagatggtgttctcaaccacgtggaccaggagcaccatttccaagacaaatatttattctatcgatttctggatgatgagcacgaggatgcccctttgcctactgaggaggagaagaaggagtgtgatgaggagctccaggacaccatgctgctgctgtcacagatgggccccgacgcccacatgaggatgatccttcgcaaaccacctggccagaggactgtggatgacctagagattatctatgaggagcttcttcatattaaagccttatcccatctttctaccacagtgaaacgagagttagcaggtgttctcatttttgagtctcacgccaaaggagggactgtgttgtttaaccagggggaagaaggtacctcctggtacattattctaaaaggatcagtgaatgtagtcatttacggcaagggtgtggtctgcaccctgcatgaaggagatgacttcggcaagttagcactagtgaatgatgccccacgagctgcctctatcgtcttacgagaagataactgccatttcttaagagtagacaaggaggatttcaaccggatcctaagggacgtggaggcgaatacagtcagacttaaagaacatgaccaagatgtcttggtgctggagaaggtcccagcagggaacagagcttctaatcaaggaaactcacagcctcagcaaaagtatactgtgatgtcaggaacacctgaaaaaattttagagcattttctagaaacaatacgccttgaggcaactttaaatgaagcaacagattctgttttaaatgactttattatgatgcactgtgtttttatgccaaatacccagctttgcccggcactggtggcccactaccacgcacagccttcacaaggtacagaacaggagaaaatggattatgccctcaacaataagaggcgagtcatccgcctggttctacagtgggctgccatgtatggagacctcctgcaagaggatgacgtgtctatggccttcctggaggagttttatgtatctgtatcagatgatgcccggatgattgctgccctcaaggagcaactgccagagttggagaagattgtcaagcaaatctcagaagatgcaaaggcaccacaaaagaagcacaaggttcttttgcaacagttcaatacgggcgatgagagagcccagaagcgccagcctatccgcggctctgatgaagttctgtttaaggtctattgcatggaccacacctacacaaccattcgggtgccagtggccacttcggtgaaggaagtcatcagtgcagttgccgacaagctgggctccggggagggcctgatcatagtcaagatgagttccggaggagaaaaggtggtgctcaaacctaatgatgtttcagtatttacgacgctcaccattaatggacgcctgtttgcttgcccgcgagagcaattcgattcactgactcccttaccagaacaggaaggcccaactgttggaacagtgggaacttttgaactgatgagctccaaagatttagcataccagatgacaatttatgattgggaactcttcaactgcgtgcatgagctggagctaatctatcacacatttggaaggcataattttaaaaagaccacagcaaacttggatttgttcctgaggagatttaatgaaattcagttttgggtcgtcactgagatctgcctttgttctcagctcagcaagcgtgttcagctattaaaaaaatttattaagatagcagcccactgtaaggagtataaaaatctgaattccttttttgccatcgtcatgggactaagtaacgttgctgtgagccgcttggcactaacgtgggagaaactgccaagcaagttcaagaagttctatgcggagtttgaaagtttaatggacccttcaaggaaccacagggcctacaggctgacagtagctaagctggaacctcctctcatccccttcatgcctttgctcattaaagatatgacatttactcatgaggggaacaagacgttcattgacaatctagtaaactttgaaaaaatgcgcatgattgcaaatacggccagaacagtgagatactacaggagccaacccttcaatcctgatgcagctcaagctaataagaaccatcaggatgtccggagttatgtacggcaattaaatgtgattgacaaccagagaactttatcacagatgtcacacagattagagcctcgtcgaccatagacatttcaaatgcccaaagcaacagtttgtctccagtccacaatctttcaaaaatgccatttatgctactactgactgtattgccactagagaattctacaaaacaagcaaaaacacatcctgagacacctcagggctgcattcagcttaccagctacctagcaagagaaggaattatttgacatgcctaaagcttacacactctagcttaggaatccccagtttgtggctaccctgtttcatttccacttgtgccatcttctttgctgaagtgttgaataaggcccacgtgaagagtttggtagaaatagccttgtcaagagaactagcaagcccctgacatttttttctaagagtgtttatgggatgagatgtgctacaaatgggatagatttggataaaattttaactcaacatcttgatttggagcctggggtttcgggaaggtgttgaggaatctatagaagtccaaattataggttgtattcttccatcttcattgtcttacctctgaaggaatagaacctgaccacattattatgaaacattatggctgtttatgtaatttagggaggactggtctgtaatttctgaatgtatatagaataatatttatgtttacaatgtaacttttcaaaatttacaaatcaggattatatacataagaattccactaagaaatgccaagattcttaaatttgccagcgttaaagtagaaaataacatttcagaagagcacaatatgcataaaacatttttcaaaattgaaatattttcctgggcattaaaaacctttactattggctacaaatttattgtacctgatgaaaacatattttctggacttaaatgttattacaaatatcttaattttcagtaattgttttgcactttcaaagattgtaaatagttcattcaatcaatggtatggagttatttatttgctacataatagatactgtgccaaataattactttttatttattttatttagtacgtaattttgaagtacattttttcctgttttcacaattagactacatttaatgtgtaggaattgtatgtatgtatatcttctgtaaataacatctagtatcttcactaaatataattgtcgac

SEQ ID NO: 173977 - DNA, 3974 bp, Homo sapiens
  Payload ID: 14156
  Gene Symbol: RAPGEF4
  Gene Name: Rap guanine nucleotide exchange factor (GEF) 4
  Uniprot ID: Q8WZA2
  ENST ID: ENST00000540783
  CDS Start-End: 278-2854
aatttagattaccaatgataaagccggggctacggctaaagaaaggtaggatgcatacgcagaaacattagtgctaatatgctgcagaaaagccaagataaatcagtccagctctcatacatcactaagggagaagctgattgcaacttgaccatgttgcctgagtagtcccatcagtgagaagaggagaacatggatttaaaaaaaactagaatgtacccctagggctcctgccgtggtggacctgggagaagtgtctggtaaatatcgacagtatatggcaggacttctggctcctccttatggtgttatggaaacgggctctaacaatgacaggattcctgacaaggagaacacacctctcattgaacctcacgttcctcttcgtcctgctaacaccattaccaaggtcccttcagagaagatcctcagagctggaaaaattttacgaaatgccattctctctcgagcacctcacatgataagagatagaaaataccacctaaagacatacagacaatgctgtgtgggaactgaactggtggactggatgatgcagcagacaccatgtgttcactcccggactcaagctgttggcatgtggcaagtcctgttagaagatggtgttctcaaccacgtggaccaggagcaccatttccaagacaaatatttattctatcgatttctggatgatgagcacgaggatgcccctttgcctactgaggaggagaagaaggagtgtgatgaggagctccaggacaccatgctgctgctgtcacagatgggccccgacgcccacatgaggatgatccttcgcaaaccacctggccagaggactgtggatgacctagagattatctatgaggagcttcttcatattaaagccttatcccatctttctaccacagtgaaacgagagttagcaggtgttctcatttttgagtctcacgccaaaggagggactgtgttgtttaaccagggggaagaaggtacctcctggtacattattctaaaaggatcagtgaatgtagtcatttacggcaagggtgtggtctgcaccctgcatgaaggagatgacttcggcaagttagcactagtgaatgatgccccacgagctgcctctatcgtcttacgagaagataactgccatttcttaagagtagacaaggaggatttcaaccggatcctaagggacgtggaggcgaatacagtcagacttaaagaacatgaccaagatgtcttggtgctggagaaggtcccagcagggaacagagcttctaatcaaggaaactcacagcctcagcaaaagtatactgtgatgtcaggaacacctgaaaaaattttagagcattttctagaaacaatacgccttgaggcaactttaaatgaagcaacagattctgttttaaatgactttattatgatgcactgtgtttttatgccaaatacccagctttgcccggcactggtggcccactaccacgcacagccttcacaaggtacagaacaggagaaaatggattatgccctcaacaataagaggcgagtcatccgcctggttctacagtgggctgccatgtatggagacctcctgcaagaggatgacgtgtctatggccttcctggaggagttttatgtatctgtatcagatgatgcccggatgattgctgccctcaaggagcaactgccagagttggagaagattgtcaagcaaatctcagaagatgcaaaggcaccacaaaagaagcacaaggttcttttgcaacagttcaatacgggcgatgagagagcccagaagcgccagcctatccgcggctctgatgaagttctgtttaaggtctattgcatggaccacacctacacaaccattcgggtgccagtggccacttcggtgaaggaagtcatcagtgcagttgccgacaagctgggctccggggagggcctgatcatagtcaagatgagttccggaggagaaaaggtggtgctcaaacctaatgatgtttcagtatttacgacgctcaccattaatggacgcctgtttgcttgcccgcgagagcaattcgattcactgactcccttaccagaacaggaaggcccaactgttggaacagtgggaacttttgaactgatgagctccaaagatttagcataccagatgacaatttatgattgggaactcttcaactgcgtgcatgagctggagctaatctatcacacatttggaaggcataattttaaaaagaccacagcaaacttggatttgttcctgaggagatttaatgaaattcagttttgggtcgtcactgagatctgcctttgttctcagctcagcaagcgtgttcagctattaaaaaaatttattaagatagcagcccactgtaaggagtataaaaatctgaattccttttttgccatcgtcatgggactaagtaacgttgctgtgagccgcttggcactaacgtgggagaaactgccaagcaagttcaagaagttctatgcggagtttgaaagtttaatggacccttcaaggaaccacagggcctacaggctgacagtagctaagctggaacctcctctcatccccttcatgcctttgctcattaaagatatgacatttactcatgaggggaacaagacgttcattgacaatctagtaaactttgaaaaaatgcgcatgattgcaaatacggccagaacagtgagatactacaggagccaacccttcaatcctgatgcagctcaagctaataagaaccatcaggatgtccggagttatgtacggcaattaaatgtgattgacaaccagagaactttatcacagatgtcacacagattagagcctcgtcgaccatagacatttcaaatgcccaaagcaacagtttgtctccagtccacaatctttcaaaaatgccatttatgctactactgactgtattgccactagagaattctacaaaacaagcaaaaacacatcctgagacacctcagggctgcattcagcttaccagctacctagcaagagaaggaattatttgacatgcctaaagcttacacactctagcttaggaatccccagtttgtggctaccctgtttcatttccacttgtgccatcttctttgctgaagtgttgaataaggcccacgtgaagagtttggtagaaatagccttgtcaagagaactagcaagcccctgacatttttttctaagagtgtttatgggatgagatgtgctacaaatgggatagatttggataaaattttaactcaacatcttgatttggagcctggggtttcgggaaggtgttgaggaatctatagaagtccaaattataggttgtattcttccatcttcattgtcttacctctgaaggaatagaacctgaccacattattatgaaacattatggctgtttatgtaatttagggaggactggtctgtaatttctgaatgtatatagaataatatttatgtttacaatgtaacttttcaaaatttacaaatcaggattatatacataagaattccactaagaaatgccaagattcttaaatttgccagcgttaaagtagaaaataacatttcagaagagcacaatatgcataaaacatttttcaaaattgaaatattttcctgggcattaaaaacctttactattggctacaaatttattgtacctgatgaaaacatattttctggacttaaatgttattacaaatatcttaattttcagtaattgttttgcactttcaaagattgtaaatagttcattcaatcaatggtatggagttatttatttgctacataatagatactgtgccaaataattactttttatttattttatttagtacgtaattttgaagtacattttttcctgttttcacaattagactacatttaatgtgtaggaattgtatgtatgtatatcttctgtaaataacatctagtatcttcactaaatataattgtcgac

SEQ ID NO: 173978 - DNA, 6621 bp, Homo sapiens
  Payload ID: 14157
  Gene Symbol: RAPGEF5
  Gene Name: Rap guanine nucleotide exchange factor (GEF) 5
  ENST ID: ENST00000344041
  CDS Start-End: 314-2506
gctgcggccgcggctgagggacctgcccgcgctgctgcggagcgggctcacgctgcggaggaagcggagcgccgctgggggccggactctatcaagaagaatatctaatccgtaccttgaacatacgccttcccagatttatggagagaattcttcttgtgcaggaagagcattgaggaatattattatcgttcaagcagctgacctgataaaggacagagtgaacctcaaggggttttacaggaggagctgcgttgggtcagagctggtagactggcttctagaacactgtcctttcgtccagtgcagatctatggccataggagtctggcaactcctactggacatgggaattatgttatcagtggaccagcatctatactttcaagatacttatgttttctaccagttttcctctgatgaatgtagctacttgtactgtgaatttgaaagagaagaagaatggcaaaatggtgtcaagcttttactgcaacttgtgcctctcattcctgccagaggtggcatctgtgaactgtctcatcagaaaattgaagactccgaagaaagcagtgatgaaattcttgtgcgtctaacatctgcggtgcagagagagctagcagctgttattgctttgaaagcaaggaagtctgcaattgaacaagatgaagaaaacaacgacaaacatgtagctgtaacagaagccgaaagtgttccagattctcaggcaggggtgatgtgcaagctccaggaaagagatgaaatcggacgaattgaactagtccagaagctggcaaaagaaaactatcagtttttgcagacggacaaaaaagaacaggagaagtctgaacaccaagatgatgaagtgacgactgttcaggttaaagagcaagaccagagcgtcctggtgctgaagaaagtgcagtgctgtggcccagcccccacagctgggagtgcggagagccattggagatatgtggtggtgtccgggaccccggagaagattttggagcaccttttgaatgacttgcacctggaagaagtccaggacaaagaaacagagaccctcctggatgacttccttctcacgtacactgtcttcatgacaactgatgacttgtgccaggctctgttaaggcactattctgctaagaagtatcaaggcaaagaggaaaactcagacgttccgcgtaggaaacgtaaagtcttgcatcttgtttcccagtggattgctctgtacaaagactggttacctgaagatgaacattcaaaaatgtttttaaagaccatatataggaatgtactggatgatgtttatgaatatccaatacttgaaaaagaattgaaagaatttcaaaagatacttggaatgcaccgtcgtcacactgtagatgaatattcaccacaaaaaaagaataaagcccttttccaccaattcagtcttaaggagaactggctccagcatagaggaactgtgactgaaacggaggaaattttctgccacgtgtatataacagagcactcctatgtcagtgtgaaggcaaaagtttccagtatagcccaagagatcctaaaagtcgtggcagaaaagatccagtatgcagaagaggatctggctctggtggccatcacattctctggggaaaagcatgaacttcagccaaatgacttagtcatctccaaatccctcgaggcatctggtcgaatatatgtctaccggaaagacctggcggacactttgaacccatttgcagaaaatgaggaatcacagcaaaggtcgatgaggattttgggaatgaacacttgggatcttgctctggaattaatgaattttgattggagtctattcaattcaattcacgagcaagagctgatctacttcacgttcagcagacagggaagtggggaacacactgcaaatctcagccttctgctccagagatgcaatgaggtccagctttgggtggccacggagattctgctctgcagccagctgggcaagcgagtgcagctggtgaaaaaattcatcaaaattgcggctcactgcaaagcccagagaaacctgaattctttctttgccattgtgatgggtctcaacactgcttctgtcagtcgactgtcgcagacctgggagaaaatccctgggaagtttaagaaacttttctctgaacttgaaagtttaacagatccttccctaaatcacaaagcctacagagatgcattcaaaaagatgaagccaccaaaaatccctttcatgcccttattgcttaaagatgtaacatttattcatgaaggaaataaaacttttttggataatcttgtcaattttgaaaagctgcatatgatcgcagacactgtccgaaccctgagacactgcaggactaaccagtttggtgacctgtctccaaaagagcatcaagagttaaagtcctatgttaatcacctgtatgtcattgacagccagcaggctctgtttgagctctcacacaggatcgagcctcgggtgtgagccccactgcctcacctcccctgtatctgcagcactttgagctacgggaatgtctatgccaagcacgttgctttcctgtgagaaaagaagttgctgagttttatcagtataacccaagacattcacaggaaagccagccaaagcgtgttcaggaagtgatgtcagccaccagagagggggagaggtttctccatgctactctcgggacaagaaggcagaaggagagtcagaagcattcttgagatggagaaggctggtttcttatgatcacattgttgatccagtccagttttcaatatgagatgtgccagcatcaagacaagacaacgtcttgacatgcaatgaccaaatatttcattaagagcgtgcatgaaacaggaaggagtttttactttgcctagttttagattactgtccataagctgtcaaagaagtcattcttttgaacacctgatgacagagacagcatctctagatctccagggaggagaggtttctgttgatacaacctgtgacatcaccaaaagccacttgtgtctagggagttagtgaggactgcagctagcatccatgctctgatgggcagatgaacaatgtcaaggtgtgcatcactttgcaccacaatcaactattgacacatgcttgcaggtgaaattagtttctgtacaactgatttgcagctataggcaaggtagatgaagttgctttgccagtaaggaaaaatagtaatctttaagaaattgactcattgtttaatttctggggattttctttatacttctaagcaggctcttatcttttattggacataatatgattttgaaaaagcacagtgcctgacacattgcaaacactcaccaactgcttgctgaggtgacagagtcacaaaagtctgcattcttgtgcctgatgatgcattttgcgtacctcatacaggctccttgcccacactatggaatgacagcagccagtgcagggaggttaagtgacatttaatgagtgaagcacttagcactctctaggtaataagatagtggtaattactagtgttttggcaaatgaaaaatgccctgaaatagccaaatgtctgattaatgttggcaacttagaagtcctataatccaactaccagccaaagcagggagcctttctataatttgcctttttttttttttttttcaaaatctgagtcttctaaaatcttattattcccatttttaccaattgaggctcctgtagcaaataagacctcttgatattttcaaggactggttagaggatttctttcaaccttcacatgaacaaaacagcctatgggtcaaaataatgaaatccacccctgcctgctagatacttgtcaccttgctaaaatgcaagggcctggtccattcattttccaaatgcaggagtcttggtgcacttctcactcttcctgcctgttcatctctttcatgcccacacagacctgtttcctttttgtctcatcaacgcctcattcatcctcattactgaggcgtgtccaatgctttttgacatctttatagcagtgctgtttcctgggctcaggaaccacactgagcttgagatactgctggaaggaaccatgtggagagaaggtttgggagaactttgagagagacttagtttggcccagcatgtaaaacttcagtcctgaacatttatagggttttatagaagggcatcctccagggctggtccattcagagaaatgctgcatgctgccgtcatggaatgtggcccacaggacaccagagccgtgagaaccggagagcagacttccctcacggctgggctgagcaaaccctccaaagccctcctcacgcagttactaacaatagcatgggcttacagcacaagcacgtgttctcacctttttcctatgccctggactaaggtttggccagtgtaatcatataaggccatcctgacattgtttctgtgtttcaaaatttggatttttatttacattagaactacattgctcctagtagaacattacctttaggggactaattttccatggagaactatttcagcatattgcatgctgctcagaccccaagtcagatatgcccaccaagccagatgaagctacacaaatgtggtatttaaatgcattttgtacagtgacttcagagtatctcacatgacatgggtgtaaactggctggggagaaaatgatgcttgttcacctcttcctccagccgtggttaggtggtcctaggggtagcagagggaagggaggattttgtgcagtcaagatttgcttttccatccttgtcttctgaatgtctaaaatctctgcatctttctgaagtttaacaactgtctccagaggtttgccaggcagcagctctcagaagtttccaaagctttgcagaatcttagatctggaattaaagaattcaagcccgaattgtgagaaccagatattactcaacagaaagctctttctaaggaatctgagctgttcactggtggacagtggtggggcttgagtgctccttgttaataggatgggccatgcaccctctctggatattcaccaaggcctcttcagaatagggtttgttctggctagaagcgtggtctagaagatggctaagctctttgccagctctcatttggagttttattattgcataaaatcttcgctcactctgcaaatcttacgtaatctggcaccttcggcaccaggtggtgcaggggcacttctaagtgggctctttttgttacagcacaactctcagacagtcctgtgggtctttggattcgtcagcattccagcaaactagccctgcttagaagttagcacaagacagcagaatgcaggaccccgtaggcaaaatcacaaccttgctattaaaaaaaattttgttttacatacacatttgcaggtgttccctagagtgtggtgttttgaatttgctctttgtcatctgtataattgccaaatgattatagtgatacacatgacctgcattcacttttttctagtttccttaattatgtttagaataaattcatttccctagaccgagaaccacaaacaggtagtgtggagcatacaccgaatttagaagcatgtggataaggtcagtgctcacactgcctagtccacagggagaggatgctgcatgaatatatacttgcctctgagtggaggagaaatcgtggcatgaaagagagagtaccagtgatgacttcttatccctggagctgggctttcactgctacccatatcccagccctgcgagtctgttctagccagcacagacaccgcagatccggaactgaatgttcctaaatggcgcagccaatccaggcttttcagaaactgggcaaaaacattaaaatggggacgatcgggtcttccgcagtggtccaacacaggatttcttttaaatgtttcaaaaacatgtccttaaaatttcagcctgcttcttagcgagtgggccagttttgcttaaaactggtgggggggcgggggggaagtttttaaaaattgccaaaaagttagatgcaaatgtattactgtataaagcaaagctgtatatactaaacattttttagcagagtaatatttatttgcatagtctatttattgtattcgtatcacactgttattaaatactgggatgaaatcagtgacctgaagcaagaaatcttgccttttaatgtatcattaattagggctgctgtgatattgtcagcttgcattaacaattagaagatagagaacccgccatcagggtgtctacctaacttctcagggactacacttggtagttttccaccatttaaagaactggtaaatatgaaacatttgttgagttaccagaattgccattaacagtgttttctttcccatattccatgctttctgcctctgtgtatatatataatatatatgtatatgactgtgctgtgtatttatcgaagctagtaagcaataatttatatgtaaaaatggccaagcaatataaggttaaaacttatataagtaacccttaccttatcttgtattttcaatttttttttaaaactgcttttccaaatatgagactatgttaaagacactattcatgcctctt

SEQ ID NO: 173979 - DNA, 6159 bp, Homo sapiens
  Payload ID: 14157
  Gene Symbol: RAPGEF5
  Gene Name: Rap guanine nucleotide exchange factor (GEF) 5
  Uniprot ID: Q92565
  ENST ID: ENST00000401957
  CDS Start-End: 249-1991
agtttccctgcagccacagaggcacgcgctcccgtttccttttccctgcctgccttcccttcccttgctccatctcactcgctctctgcctcctctaccctccctccctctcttttctctccgcctctccagcgttctagctgactgcagagctcttagcagccagatggactcagttcccagtgaaaggacagggatggcaagatcttttagcatttaggggatgcctttgttagtaaccgttcacaatgggcagctcccggctgagggtctttgaccctcatttggagaggaaagattccgccgcggcgctctcagaccgagagctgcccttgcctaccttcgatgtgccttatttcaaatacatcgacgaggaggatgaggacgatgaatggagcagccgctcgcagtcttccaccgaggatgactcagtggactctctgctctctgacagatatgtggtggtgtccgggaccccggagaagattttggagcaccttttgaatgacttgcacctggaagaagtccaggacaaagaaacagagaccctcctggatgacttccttctcacgtacactgtcttcatgacaactgatgacttgtgccaggctctgttaaggcactattctgctaagaagtatcaaggcaaagaggaaaactcagacgttccgcgtaggaaacgtaaagtcttgcatcttgtttcccagtggattgctctgtacaaagactggttacctgaagatgaacattcaaaaatgtttttaaagaccatatataggaatgtactggatgatgtttatgaatatccaatacttgaaaaagaattgaaagaatttcaaaagatacttggaatgcaccgtcgtcacactgtagatgaatattcaccacaaaaaaagaataaagcccttttccaccaattcagtcttaaggagaactggctccagcatagaggaactgtgactgaaacggaggaaattttctgccacgtgtatataacagagcactcctatgtcagtgtgaaggcaaaagtttccagtatagcccaagagatcctaaaagtcgtggcagaaaagatccagtatgcagaagaggatctggctctggtggccatcacattctctggggaaaagcatgaacttcagccaaatgacttagtcatctccaaatccctcgaggcatctggtcgaatatatgtctaccggaaagacctggcggacactttgaacccatttgcagaaaatgaggaatcacagcaaaggtcgatgaggattttgggaatgaacacttgggatcttgctctggaattaatgaattttgattggagtctattcaattcaattcacgagcaagagctgatctacttcacgttcagcagacagggaagtggggaacacactgcaaatctcagccttctgctccagagatgcaatgaggtccagctttgggtggccacggagattctgctctgcagccagctgggcaagcgagtgcagctggtgaaaaaattcatcaaaattgcggctcactgcaaagcccagagaaacctgaattctttctttgccattgtgatgggtctcaacactgcttctgtcagtcgactgtcgcagacctgggagaaaatccctgggaagtttaagaaacttttctctgaacttgaaagtttaacagatccttccctaaatcacaaagcctacagagatgcattcaaaaagatgaagccaccaaaaatccctttcatgcccttattgcttaaagatgtaacatttattcatgaaggaaataaaacttttttggataatcttgtcaattttgaaaagctgcatatgatcgcagacactgtccgaaccctgagacactgcaggactaaccagtttggtgacctgtctccaaaagagcatcaagagttaaagtcctatgttaatcacctgtatgtcattgacagccagcaggctctgtttgagctctcacacaggatcgagcctcgggtgtgagccccactgcctcacctcccctgtatctgcagcactttgagctacgggaatgtctatgccaagcacgttgctttcctgtgagaaaagaagttgctgagttttatcagtataacccaagacattcacaggaaagccagccaaagcgtgttcaggaagtgatgtcagccaccagagagggggagaggtttctccatgctactctcgggacaagaaggcagaaggagagtcagaagcattcttgagatggagaaggctggtttcttatgatcacattgttgatccagtccagttttcaatatgagatgtgccagcatcaagacaagacaacgtcttgacatgcaatgaccaaatatttcattaagagcgtgcatgaaacaggaaggagtttttactttgcctagttttagattactgtccataagctgtcaaagaagtcattcttttgaacacctgatgacagagacagcatctctagatctccagggaggagaggtttctgttgatacaacctgtgacatcaccaaaagccacttgtgtctagggagttagtgaggactgcagctagcatccatgctctgatgggcagatgaacaatgtcaaggtgtgcatcactttgcaccacaatcaactattgacacatgcttgcaggtgaaattagtttctgtacaactgatttgcagctataggcaaggtagatgaagttgctttgccagtaaggaaaaatagtaatctttaagaaattgactcattgtttaatttctggggattttctttatacttctaagcaggctcttatcttttattggacataatatgattttgaaaaagcacagtgcctgacacattgcaaacactcaccaactgcttgctgaggtgacagagtcacaaaagtctgcattcttgtgcctgatgatgcattttgcgtacctcatacaggctccttgcccacactatggaatgacagcagccagtgcagggaggttaagtgacatttaatgagtgaagcacttagcactctctaggtaataagatagtggtaattactagtgttttggcaaatgaaaaatgccctgaaatagccaaatgtctgattaatgttggcaacttagaagtcctataatccaactaccagccaaagcagggagcctttctataatttgcctttttttttttttttttcaaaatctgagtcttctaaaatcttattattcccatttttaccaattgaggctcctgtagcaaataagacctcttgatattttcaaggactggttagaggatttctttcaaccttcacatgaacaaaacagcctatgggtcaaaataatgaaatccacccctgcctgctagatacttgtcaccttgctaaaatgcaagggcctggtccattcattttccaaatgcaggagtcttggtgcacttctcactcttcctgcctgttcatctctttcatgcccacacagacctgtttcctttttgtctcatcaacgcctcattcatcctcattactgaggcgtgtccaatgctttttgacatctttatagcagtgctgtttcctgggctcaggaaccacactgagcttgagatactgctggaaggaaccatgtggagagaaggtttgggagaactttgagagagacttagtttggcccagcatgtaaaacttcagtcctgaacatttatagggttttatagaagggcatcctccagggctggtccattcagagaaatgctgcatgctgccgtcatggaatgtggcccacaggacaccagagccgtgagaaccggagagcagacttccctcacggctgggctgagcaaaccctccaaagccctcctcacgcagttactaacaatagcatgggcttacagcacaagcacgtgttctcacctttttcctatgccctggactaaggtttggccagtgtaatcatataaggccatcctgacattgtttctgtgtttcaaaatttggatttttatttacattagaactacattgctcctagtagaacattacctttaggggactaattttccatggagaactatttcagcatattgcatgctgctcagaccccaagtcagatatgcccaccaagccagatgaagctacacaaatgtggtatttaaatgcattttgtacagtgacttcagagtatctcacatgacatgggtgtaaactggctggggagaaaatgatgcttgttcacctcttcctccagccgtggttaggtggtcctaggggtagcagagggaagggaggattttgtgcagtcaagatttgcttttccatccttgtcttctgaatgtctaaaatctctgcatctttctgaagtttaacaactgtctccagaggtttgccaggcagcagctctcagaagtttccaaagctttgcagaatcttagatctggaattaaagaattcaagcccgaattgtgagaaccagatattactcaacagaaagctctttctaaggaatctgagctgttcactggtggacagtggtggggcttgagtgctccttgttaataggatgggccatgcaccctctctggatattcaccaaggcctcttcagaatagggtttgttctggctagaagcgtggtctagaagatggctaagctctttgccagctctcatttggagttttattattgcataaaatcttcgctcactctgcaaatcttacgtaatctggcaccttcggcaccaggtggtgcaggggcacttctaagtgggctctttttgttacagcacaactctcagacagtcctgtgggtctttggattcgtcagcattccagcaaactagccctgcttagaagttagcacaagacagcagaatgcaggaccccgtaggcaaaatcacaaccttgctattaaaaaaaattttgttttacatacacatttgcaggtgttccctagagtgtggtgttttgaatttgctctttgtcatctgtataattgccaaatgattatagtgatacacatgacctgcattcacttttttctagtttccttaattatgtttagaataaattcatttccctagaccgagaaccacaaacaggtagtgtggagcatacaccgaatttagaagcatgtggataaggtcagtgctcacactgcctagtccacagggagaggatgctgcatgaatatatacttgcctctgagtggaggagaaatcgtggcatgaaagagagagtaccagtgatgacttcttatccctggagctgggctttcactgctacccatatcccagccctgcgagtctgttctagccagcacagacaccgcagatccggaactgaatgttcctaaatggcgcagccaatccaggcttttcagaaactgggcaaaaacattaaaatggggacgatcgggtcttccgcagtggtccaacacaggatttcttttaaatgtttcaaaaacatgtccttaaaatttcagcctgcttcttagcgagtgggccagttttgcttaaaactggtgggggggcgggggggaagtttttaaaaattgccaaaaagttagatgcaaatgtattactgtataaagcaaagctgtatatactaaacattttttagcagagtaatatttatttgcatagtctatttattgtattcgtatcacactgttattaaatactgggatgaaatcagtgacctgaagcaagaaatcttgccttttaatgtatcattaattagggctgctgtgatattgtcagcttgcattaacaattagaagatagagaacccgccatcagggtgtctacctaacttctcagggactacacttggtagttttccaccatttaaagaactggtaaatatgaaacatttgttgagttaccagaattgccattaacagtgttttctttcccatattccatgctttctgcctctgtgtatatatataatatatatgtatatgactgtgctgtgtatttatcgaagctagtaagcaataatttatatgtaaaaatggccaagcaatataaggttaaaacttatataagtaacccttaccttatcttgtattttcaatttttttttaaaactgcttttccaaatatgagactatgttaaagacactattcatgcctcttagtttcttgctttctctgtgatgtgtgtggattaaatagctctgttctggcag

SEQ ID NO: 173980 - DNA, 2800 bp, Homo sapiens
  Payload ID: 14157
  Gene Symbol: RAPGEF5
  Gene Name: Rap guanine nucleotide exchange factor (GEF) 5
  ENST ID: ENST00000405243
  CDS Start-End: 85-1287
tctcgcttcctggcgaaggcgcggacggcgcgcggaggcgagcgcggtggagaggagcccccggcgccgcagcgccgtcagggcatgaggatggccgtgggctccgtcaagatgcagccgccgtgcgagagcccggccctggccgccgcggcggcggtggtggcggcagacggccccctgcgccgcagccccagcgcccgggagcccgagcgcgagcagccgccggcgtcgctgcggccgcggctgagggacctgcccgcgctgctgcggagcgggctcacgctgcggaggaagcggagcgccgctgggggccggactctatcaagaagaatatctaatccgtaccttgaacatacgccttcccagatttatggagagaattcttcttgtgcaggaagagcattgaggaatattattatcgttcaagcagctgacctgataaaggacagagtgaacctcaaggggttttacaggaggagctgcgttgggtcagagctggtagactggcttctagaacactgtcctttcgtccagtgcagatctatggccataggagtctggcaactcctactggacatgggaattatgttatcagtggaccagcatctatactttcaagatacttatgttttctaccagttttcctctgatgaatgtagctacttgtactgtgaatttgaaagagaagaagaatggcaaaatggtgtcaagcttttactgcaacttgtgcctctcattcctgccagaggtggcatctgtgaactgtctcatcagaaaattgaagactccgaagaaagcagtgatgaaattcttgtgcgtctaacatctgcggtgcagagagagctagcagctgttattgctttgaaagcaaggaagtctgcaattgaacaagatgaagaaaacaacgacaaacatgtagctgtaacagaagccgaaagtgttccagattctcaggcaggggtgatgtgcaagctccaggaaagagatgaaatcggacgaattgaactagtccagaagctggcaaaagaaaactatcagtttttgcagacggacaaaaaagaacaggagaagtctgaacaccaagatgatgaagtgacgactgttcaggttaaagagcaagaccagagcgtcctggtgctgaagaaagtgcagtgctgtggcccagcccccacagctgggagtgcggagagccattggagcgttctagctgactgcagagctcttagcagccagatggactcagttcccagtgaaaggacagggatggcaagatcttttagcatttaggggatgcctttgttagtaaccgttcacaatgggcagctcccggctgagggtctttgaccctcatttggagaggaaagattccgccgcggcgctctcagaccgagagctgcccttgcctaccttcgatgtgccttatttcaaatacatcgacgaggaggatgaggacgatgaatggagcagccgctcgcagtcttccaccgaggatgactcagtggactctctgctctctgacagatatgtggtggtgtccgggaccccggagaagattttggagcaccttttgaatgacttgcacctggaagaagtccaggacaaagaaacaggtaaggctctgagtagctcatgcttccagactgatagcagctgatgcccttgtcagtaccctcaggggcaaggttcccactgttagctgaaaccggggtggggagaaatagcatatgctttgtgcgactcgtcccttgccttgtgctgatttgtttaaatccaataaatggacacatgtagatcccaagcagctccctgggaagtagctgtacaaagaaaatgatatgaaggcagctgttcttgtttctttggcaatttttcccaaatctcacctaaaggcagttggcaagagaccaacattcaatagcccatgttcaatggaaagaaatacaaggaggaggagggttagcaggcgttcacctggcatgtaggcagtgctgagctgggggcagcagcctccgtgctgaaatgtcaacaattaatgcaactactcagcagctacatgcttagtggcaacttctgcctttttccaagtggtttacaaactgcctggtcagaacaagccccgaggtgcagactatgatactcacagcttttcagagcagaaactgtaatgcactaaagccttatcgatcagacttcttgtattttaaatttaatctgagagtaaaacactcattttgctttttcacccatacacttttggaaacactactgttccacttacaaaatgacttacctgtaacttcctttatctcagaagggagagtacttgcttctcttaaccagaatttgtaatttgttccatgctggagcagttattccaatgaataggcctctgactgtagcctgcattttgcaacttgatcccttaactaaaatgcactgtttgctcctaccatagcacctgtgagacccacagtttccttaggtttttaccatgcaagaaggattgtgaaatgacagcttaggtgggaacaagaatttccttgtgtccctggagttttgtctgaacataggtgatgtctgggtctattttgcattctaaaggacaataagagaaacaagtatgtgtgaaatacataagtgggcaaaaaaacagtatcaaaatgacctaatcatgtatcctacagtaaagttattgtgtaattttaaaattcagatagataccttattttgcatatgtttgaagacaaaatcagtagttgtcatttatatgcactaaataaacagctaaaagaaaaacata

SEQ ID NO: 173981 - DNA, 660 bp, Homo sapiens
  Payload ID: 14157
  Gene Symbol: RAPGEF5
  Gene Name: Rap guanine nucleotide exchange factor (GEF) 5
  ENST ID: ENST00000420196
  CDS Start-End: 194-660
agtttgctctgtccttcaccctcttaaagtagggtgatacgcagactcaactttaagtcttttggcatggtgctcttaggttataataatgtaacttcaatttttgaaaggcaaaatattttaccaagaccatgatttaatccaggcagtggaaaagatgagcttattataaggtgaactttgcggtggtgtcatgtcctgggactgtggttttaagtatatcttcgctttttctccaactcttaaggcaggggtgatgtgcaagctccaggaaagagatgaaatcggacgaattgaactagtccagaagctggcaaaagaaaactatcagtttttgcagacggacaaaaaagaacaggagaagtctgaacaccaagatgatgaagtgacgactgttcaggttaaagagcaagaccagagcgtcctggtgctgaagaaagtgcagtgctgtggcccagcccccacagctgggagtgcggagagccattggagatatgtggtggtgtccgggaccccggagaagattttggagcaccttttgaatgacttgcacctggaagaagtccaggacaaagaaacagagaccctcctggatgacttccttctcacgtacactgtcttcatgacaactgatgacttgtgccaggctctgttaaggca

SEQ ID NO: 173982 - DNA, 836 bp, Homo sapiens
  Payload ID: 14157
  Gene Symbol: RAPGEF5
  Gene Name: Rap guanine nucleotide exchange factor (GEF) 5
  ENST ID: ENST00000451559
  CDS Start-End: 84-458
gatggactcagttcccagtgaaaggacagggatggcaagatcttttagcatttaggggatgcctttgttagtaaccgttcacaatgggcagctcccggctgagggtctttgaccctcatttggagaggaaagattccgccgcggcgctctcagaccgagagctgcccttgcctaccttcgatgtgccttatttcaaatacatcgacgaggaggatgaggacgatgaatggagcagccgctcgcagtcttccaccgaggatgactcagtggactctctgctctctgacagatatgtggtggtgtccgggaccccggagaagattttggagcaccttttgaatgacttgcacctggaagaagtccaggacaaagaaacagttataccaacccctgggatcacatgtgtcacttctgccatgtgctcacaaagccaagcggaccaggacttcatggcttgactctcctagcaccaacctaagtggggaagaagggagaccctcctggatgacttccttctcacgtacactgtcttcatgacaactgatgacttgtgccaggctctgttaaggcactattctgctaagaagtatcaaggcaaagaggaaaactcagacgttccgcgtaggaaacgtaaagtcttgcatcttgtttcccagtggattgctctgtacaaagactggttacctgaagatgaacattcaaaaatgtttttaaagaccatatataggaatgtactggatgatgtttatgaatatccaatacttgaaaaagaattgaaagaatttcaaaagatacttggaatgcaccgtcgtcacactgtagatgaatattcacca

SEQ ID NO: 173983 - DNA, 869 bp, Homo sapiens
  Payload ID: 14157
  Gene Symbol: RAPGEF5
  Gene Name: Rap guanine nucleotide exchange factor (GEF) 5
  ENST ID: ENST00000458533
  CDS Start-End: 444-869
gtgttcagccatctctcctttttaaaaagggactgaggtgaagaaagtctgtgcagtcatccatggcatccgaatttcagcctagatgagattctaactagagatccatttttgcttatattctggcaaaactagtacattataaatttgaaggccatctcaagtctgaaaaaaaaattgaattgaatgatggacaagatgatgaagtgacgactgttcaggttaaagagcaagaccagagcgtcctggtgctgaagaaagtgcagtgctgtggcccagcccccacagctgggagtgcggagagccattggagatatgtggtggtgtccgggaccccggagaagattttggagcaccttttgaatgacttgcacctggaagaagtccaggacaaagaaacagagaccctcctggatgacttccttctcacgtacactgtcttcatgacaactgatgacttgtgccaggctctgttaaggcactattctgctaagaagtatcaaggcaaagaggaaaactcagacgttccgcgtaggaaacgtaaagtcttgcatcttgtttcccagtggattgctctgtacaaagactggttacctgaagatgaacattcaaaaatgtttttaaagaccatatataggaatgtactggatgatgtttatgaatatccaatacttgaaaaagaattgaaagaatttcaaaagatacttggaatgcaccgtcgtcacactgtagatgaatattcaccacaaaaaaagaataaagcccttttccaccaattcagtcttaaggagaactggctccagcatagaggaactgtgactgaaacggaggaaattttctgccacgtgtatataacagagcactcctat

SEQ ID NO: 173984 - DNA, 5506 bp, Homo sapiens
  Payload ID: 14157
  Gene Symbol: RAPGEF5
  Gene Name: Rap guanine nucleotide exchange factor (GEF) 5
  Uniprot ID: Q92565
  ENST ID: ENST00000620335
  CDS Start-End: 75-1409
agttcccagtgaaaggacagggatggcaagatcttttagcatttaggggatgcctttgttagtaaccgttcacaatgggcagctcccggctgagggtctttgaccctcatttggagaggaaagattccgccgcggcgctctcagaccgagagctgcccttgcctaccttcgatgtgccttatttcaaatacatcgacgaggaggatgaggacgatgaatggagcagccgctcgcagtcttccaccgaggatgactcagtggactctctgctctctgacagatatgtggtggtgtccgggaccccggagaagattttggagcaccttttgaatgacttgcacctggaagaagtccaggacaaagaaacagagaccctcctggatgacttccttctcacgtacactgtcttcatgacaactgatgacttgtgccaggctctgttaaggcactattctgctaagaagtatcaaggcaaagaggaaaactcagacgttccgcgtaggaaacgtaaagtcttgcatcttgtttcccagtggattgctctgtacaaagactggttacctgaagatgaacattcaaaaatgtttttaaagaccatatataggaatgtactggatgatgtttatgaatatccaatacttgaaaaagaattgaaagaatttcaaaagatacttggaatgcaccgtcgtcacactgtagatgaatattcaccacaaaaaaagaataaagcccttttccaccaattcagtcttaaggagaactggctccagcatagaggaactgtgactgaaacggaggaaattttctgccacgtgtatataacagagcactcctatgtcagtgtgaaggcaaaagtttccagtatagcccaagagattctgctctgcagccagctgggcaagcgagtgcagctggtgaaaaaattcatcaaaattgcggctcactgcaaagcccagagaaacctgaattctttctttgccattgtgatgggtctcaacactgcttctgtcagtcgactgtcgcagacctgggagaaaatccctgggaagtttaagaaacttttctctgaacttgaaagtttaacagatccttccctaaatcacaaagcctacagagatgcattcaaaaagatgaagccaccaaaaatccctttcatgcccttattgcttaaagatgtaacatttattcatgaaggaaataaaacttttttggataatcttgtcaattttgaaaagctgcatatgatcgcagacactgtccgaaccctgagacactgcaggactaaccagtttggtgacctgtctccaaaagagcatcaagagttaaagtcctatgttaatcacctgtatgtcattgacagccagcaggctctgtttgagctctcacacaggatcgagcctcgggtgtgagccccactgcctcacctcccctgtatctgcagcactttgagctacgggaatgtctatgccaagcacgttgctttcctgtgagaaaagaagttgctgagttttatcagtataacccaagacattcacaggaaagccagccaaagcgtgttcaggaagtgatgtcagccaccagagagggggagaggtttctccatgctactctcgggacaagaaggcagaaggagagtcagaagcattcttgagatggagaaggctggtttcttatgatcacattgttgatccagtccagttttcaatatgagatgtgccagcatcaagacaagacaacgtcttgacatgcaatgaccaaatatttcattaagagcgtgcatgaaacaggaaggagtttttactttgcctagttttagattactgtccataagctgtcaaagaagtcattcttttgaacacctgatgacagagacagcatctctagatctccagggaggagaggtttctgttgatacaacctgtgacatcaccaaaagccacttgtgtctagggagttagtgaggactgcagctagcatccatgctctgatgggcagatgaacaatgtcaaggtgtgcatcactttgcaccacaatcaactattgacacatgcttgcaggtgaaattagtttctgtacaactgatttgcagctataggcaaggtagatgaagttgctttgccagtaaggaaaaatagtaatctttaagaaattgactcattgtttaatttctggggattttctttatacttctaagcaggctcttatcttttattggacataatatgattttgaaaaagcacagtgcctgacacattgcaaacactcaccaactgcttgctgaggtgacagagtcacaaaagtctgcattcttgtgcctgatgatgcattttgcgtacctcatacaggctccttgcccacactatggaatgacagcagccagtgcagggaggttaagtgacatttaatgagtgaagcacttagcactctctaggtaataagatagtggtaattactagtgttttggcaaatgaaaaatgccctgaaatagccaaatgtctgattaatgttggcaacttagaagtcctataatccaactaccagccaaagcagggagcctttctataatttgcctttttttttttttttttcaaaatctgagtcttctaaaatcttattattcccatttttaccaattgaggctcctgtagcaaataagacctcttgatattttcaaggactggttagaggatttctttcaaccttcacatgaacaaaacagcctatgggtcaaaataatgaaatccacccctgcctgctagatacttgtcaccttgctaaaatgcaagggcctggtccattcattttccaaatgcaggagtcttggtgcacttctcactcttcctgcctgttcatctctttcatgcccacacagacctgtttcctttttgtctcatcaacgcctcattcatcctcattactgaggcgtgtccaatgctttttgacatctttatagcagtgctgtttcctgggctcaggaaccacactgagcttgagatactgctggaaggaaccatgtggagagaaggtttgggagaactttgagagagacttagtttggcccagcatgtaaaacttcagtcctgaacatttatagggttttatagaagggcatcctccagggctggtccattcagagaaatgctgcatgctgccgtcatggaatgtggcccacaggacaccagagccgtgagaaccggagagcagacttccctcacggctgggctgagcaaaccctccaaagccctcctcacgcagttactaacaatagcatgggcttacagcacaagcacgtgttctcacctttttcctatgccctggactaaggtttggccagtgtaatcatataaggccatcctgacattgtttctgtgtttcaaaatttggatttttatttacattagaactacattgctcctagtagaacattacctttaggggactaattttccatggagaactatttcagcatattgcatgctgctcagaccccaagtcagatatgcccaccaagccagatgaagctacacaaatgtggtatttaaatgcattttgtacagtgacttcagagtatctcacatgacatgggtgtaaactggctggggagaaaatgatgcttgttcacctcttcctccagccgtggttaggtggtcctaggggtagcagagggaagggaggattttgtgcagtcaagatttgcttttccatccttgtcttctgaatgtctaaaatctctgcatctttctgaagtttaacaactgtctccagaggtttgccaggcagcagctctcagaagtttccaaagctttgcagaatcttagatctggaattaaagaattcaagcccgaattgtgagaaccagatattactcaacagaaagctctttctaaggaatctgagctgttcactggtggacagtggtggggcttgagtgctccttgttaataggatgggccatgcaccctctctggatattcaccaaggcctcttcagaatagggtttgttctggctagaagcgtggtctagaagatggctaagctctttgccagctctcatttggagttttattattgcataaaatcttcgctcactctgcaaatcttacgtaatctggcaccttcggcaccaggtggtgcaggggcacttctaagtgggctctttttgttacagcacaactctcagacagtcctgtgggtctttggattcgtcagcattccagcaaactagccctgcttagaagttagcacaagacagcagaatgcaggaccccgtaggcaaaatcacaaccttgctattaaaaaaaattttgttttacatacacatttgcaggtgttccctagagtgtggtgttttgaatttgctctttgtcatctgtataattgccaaatgattatagtgatacacatgacctgcattcacttttttctagtttccttaattatgtttagaataaattcatttccctagaccgagaaccacaaacaggtagtgtggagcatacaccgaatttagaagcatgtggataaggtcagtgctcacactgcctagtccacagggagaggatgctgcatgaatatatacttgcctctgagtggaggagaaatcgtggcatgaaagagagagtaccagtgatgacttcttatccctggagctgggctttcactgctacccatatcccagccctgcgagtctgttctagccagcacagacaccgcagatccggaactgaatgttcctaaatggcgcagccaatccaggcttttcagaaactgggcaaaaacattaaaatggggacgatcgggtcttccgcagtggtccaacacaggatttcttttaaatgtttcaaaaacatgtccttaaaatttcagcctgcttcttagcgagtgggccagttttgcttaaaactggtgggggggcgggggggaagtttttaaaaattgccaaaaagttagatgcaaatgtattactgtataaagcaaagctgtatatactaaacattttttagcagagtaatatttatttgcatagtctatttattgtattcgtatcacactgttattaaatactgggatgaaatcagtgacctgaagcaagaaatcttgccttttaatgtatcattaattagggctgctgtgatattgtcagcttgcattaacaattagaagatagagaacccgccatcagggtgtctacctaacttctcagggactacacttggtagttttccaccatttaaagaactggtaaatatgaaacatttgttgagttaccagaattgccattaacagtgttttctttcccatattccatgctttctgcctctgtgtatatatataatatatatgtatatgactgtgctgtgtatttatcgaagctagtaagcaataatttatatgtaaaaatggccaagcaatataaggttaaaacttatataagtaacccttaccttatcttgtattttcaatttttttttaaaactgcttttccaaatatgagactatgttaaag

SEQ ID NO: 173985 - DNA, 5618 bp, Homo sapiens
  Payload ID: 14158
  Gene Symbol: RAPGEF6
  Gene Name: Rap guanine nucleotide exchange factor (GEF) 6
  Uniprot ID: Q8TEU7
  ENST ID: ENST00000296859
  CDS Start-End: 82-4911
ggtaccgcacccgctacctagtgtgaatgaactgtggcgtgggctgctaagggcaggctgcggagtacccgggccgtggccatgaactcacccgtggaccctggcgctaggcaggcgttgaggaagaagccacccgagcggactcccgaggacttaaatactatttattcttatcttcatggaatggaaatattatcaaatctcagggaacatcagcttagattaatgtctgcaagagcacgctatgagagatacagtggcaatcaggttctcttttgttcagaaacgattgccagatgttggtatatcctactttctggatctgtgcttgtgaaaggctccatggtcttgcctccttgcagttttggtaagcagtttggaggaaaaagaggatgtgattgtcttgtattagagccttcagaaatgattgtggtagagaatgccaaagataatgaagatagtattctacaaagagaaattcctgccagacaatcccgaagaagatttcggaaaattaactataaaggagagcgccaaaccattactgatgatgtggaggttaacagctatctttctcttccagctgatcttaccaagatgcatctcacagaaaaccctcatccacaggtgactcatgtgtcttctagtcagtctggttgtagcattgccagtgactctggaagcagcagtttatctgatatctatcaggctacggagagtgaggtaggagatgtagatttgacacgtcttccagaaggacctgttgattctgaggatgacgaagaggaagatgaagagattgatcgaacagatccattgcaggggcgagatcttgttcgagaatgtcttgaaaaagaacctgcagacaaaactgatgatgacattgaacaattgctggagtttatgcaccagctccctgcatttgcaaacatgaccatgtctgtaaggagagaactctgctcagtgatgatttttgaagtggtagagcaggctggagctattattcttgaagatgggcaagagcttgactcatggtatgttattttaaacggcactgtggaaatcagtcatccagatggaaaagttgaaaatttgtttatgggaaatagttttggaattactcccactctggataagcagtacatgcatggaattgtcaggactaaagtagatgattgtcagtttgtctgcatagcccagcaagattattggagaattttaaaccatgtggaaaaaaatacccataaagttgaggaagagggagaaattgttatggtacatgagcatcgggaactagaccggagtggaaccaggaaaggacacattgtgatcaaggcaacacctgagcgtctcataatgcatttaatagaagaacattccatcgtggatccaacttatatagaagattttctattaacttacaggacatttcttgaaagtcctttggatgttgggatcaaactattggaatggtttaagatcgacagcttaagagataaggtgacacggattgtattattatgggtaaataatcattttaatgattttgaaggtgaccctgctatgactcgatttctagaggaatttgaaaaaaatctggaagatacaaagatgaatggtcatctccggttattgaatattgcctgtgctgcaaaggctaagtggagacaggttgtgctgcaaaaggcttcccgcgagtcccctctacaattcagccttaatggagggagtgagaagggatttggtatttttgttgaaggagtagaacctggtagcaaagctgctgattcaggactgaaacgtggtgatcagattatggaagtaaatggacaaaactttgagaatattacatttatgaaagccgttgaaattttgaggaataatactcatcttgcacttactgtgaagaccaacatttttgtgttcaaagagttactttttaggactgaacaagagaaatctggtgttcctcatattcccaaaattgctgaaaaaaaaagtaatcgccattctatccagcatgtgccaggagatattgaacagacatcacaggagaaaggaagtaagaaagttaaagcaaatactgtttcaggtggaagaaacaaaatcaggaagattttggataaaacacgatttagtatcttgcctccaaagctatttagtgatggaggcctaagccaatcacaagatgacagcattgtgggaacaaggcactgtaggcatagtctggctataatgcccatccctggaacactctcatccagcagccctgatctcctgcagcctaccaccagtatgttggatttttccaatccttcagatatccctgatcaagttataagagttttcaaagtggatcagcaaagttgctacattatcatcagtaaagacaccacagctaaagaagtagtttttcatgctgttcatgaatttggtttgaccggtgcatccgacacatattctctctgtgaagtttctgttactcctgagggtgtcataaaacagagaagacttccagatcagttctccaaattagctgatagaattcaactcaatggaaggtattacttaaaaaataacatggaaacagaaaccttatgttcagatgaagatgctcaagaactagttaaggaaagccagctatccatgctgcagctcagtaccattgaggtggccacccagctgtcaatgagggactttgatttgtttcgtaatattgaaccgactgagtacatcgatgacctttttaagttaaattccaaaacaggaaatactcatttgaagaggtttgaggacattgtaaaccaagagacattctgggttgcctcagaaattttaactgaagcaaatcagctcaaacgaatgaagattattaagcattttattaaaattgcacttcattgtcgagaatgtaagaacttcaattccatgtttgcaataataagtggcttgaacctggcatctgtagcaagactcagaggaacttgggaaaagttaccaagcaaatacgagaaacatcttcaagatctacaagacatttttgatccatctagaaacatggcaaagtatagaaatattcttagtagtcaaagtatgcagcctccaattattccactcttccctgttgtcaagaaagatatgacatttctacatgaaggaaatgactccaaagtagatggtttagtaaactttgagaagttaagaatgatttccaaggaaatccgccaagttgttcgaatgacttctgctaacatggacccagctatgatgtttcgacagaggaagaagaggtggcggagtctggggtcactgagtcaaggaagcacaaattcaaacatgctggatgttcagggaggtgctcacaaaaaaagggcacgccgcagctctctgcttaatgccaagaagctatatgaggatgcccaaatggcaaggaaggtgaagcagtatctttccagtctcgatgtagagacagatgaggagaagttccagatgatgtcattacagtgggagcctgcatatggtaccttgaccaagaatttaagtgagaaaagatcagccaaatcatctgaaatgtctccagtgcctatgaggtcagctggccaaacaactaaagcccacttgcatcaaccccacagagtaagccaggtgcttcaggtgccagctgttaatttgcaccccatcaggaagaagggacaaacaaaagaccctgcactgaatacaagtttacctcagaaagttttaggaacaactgaagaaataagtggtaagaagcatacagaagacactatttctgtggcgtcatctttacattctagtcctcctgcatctcctcaaggctcccctcacaaaggttacacacttattccatcagctaaatctgacaacttgtctgactccagccatagtgagatttcttcacggtccagcatcgtgagcaattgttctgttgactccatgtctgcagctctacaggatgaacggtgttcctctcaggccctggcagtccctgaatccactggggcattggaaaagacagagcacgcttcagggataggagatcatagtcaacatggccctgggtggacactcttgaagccatctctaatcaagtgtttagctgtctcatcgtctgtgagcaatgaagagatttctcaagagcatatcattatagaagcagctgacagtggtcgtggaagttggacttcgtgttcaagcagctcccatgacaacttccaaagccttccaaacccaaaaagctgggattttttgaactcttacagacatacccatttggatgaccccattgctgaagttgaacccactgactctgagccctattcctgttctaaaagctgctctagaacttgtgggcagtgtaaaggaagcctagagagaaagagttggacctcctccagttctctgtctgacacgtatgaaccaaactatgggacagttaaacagagagtattggagagcaccccagctgagtcatctgaaggcttggaccccaaggatgccactgacccagtttataaaactgtcacttcaagtacagaaaagggcttgattgtgtactgtgtcacctcacccaagaaggacgataggtatagggagccacctcccactcctccaggatatttggggatttctttagcggacctaaaggaaggaccccacacacacctaaaacctccagattatagtgtggcagtgcagaggtcaaagatgatgcataacagcctctctagactgccaccagcttctctcagtagcaacctcgtggcctgtgttccatcgaagattgtaactcagcctcagaggcataatttgcagccattccatcctaaactaggagatgtgactgatgcagatagcgaagcagatgaaaatgaacaagtttcagcagtctagcctttggatgacctatttgaaaaccactgaaagtcgtggaggaatgggcaagaaccacctcatgattctgcaggccattgctaacgaacagctcattgctacaaccagtccagaggttttattccctctactccgagcaatgaaatagacctgagttatgcttcctttcatttaatttctgcagataaatagtttcctgagcaatggatgctatgcctggataccagtctccactttgcacgccggaactgccttgggaccacagttacagaaaaaatgtaaactcagagtgatccttgtgtatattgctatagatttttctttaacaagctattttaaagataatggcattattatttccaagccatagcttgggctgaaggacaaattgaaattgtctgccaataccaaggatattcttgtatatttgaaaaataacttattatttgaattgttgtggttttgtttgtatttgagagctcttgttagctgatattcatgtttgaggtcataaaattgtctctggtctgaccaaacagaagtcatctttacagaggtgatatgcttgatctacacagagatgtgacttgatctgtagcaccaatgcaatgtaggtctcagtttgagagaaataggaagccctttgcagttgaggtgttaggaacctgctggtcatggtgtggaaggccaaatgaagctgccacagg

SEQ ID NO: 173986 - DNA, 4176 bp, Homo sapiens
  Payload ID: 14158
  Gene Symbol: RAPGEF6
  Gene Name: Rap guanine nucleotide exchange factor (GEF) 6
  Uniprot ID: Q8TEU7
  ENST ID: ENST00000308008
  CDS Start-End: 1-4176
atgaactcacccgtggaccctggcgctaggcaggcgttgaggaagaagccacccgagcggactcccgaggacttaaatactatttattcttatcttcatggaatggaaatattatcaaatctcagggaacatcagcttagattaatgtctgcaagagcacgctatgagagatacagtggcaatcaggttctcttttgttcagaaacgattgccagatgttggtatatcctactttctggatctgtgcttgtgaaaggctccatggtcttgcctccttgcagttttggtaagcagtttggaggaaaaagaggatgtgattgtcttgtattagagccttcagaaatgattgtggtagagaatgccaaagataatgaagatagtattctacaaagagaaattcctgccagacaatcccgaagaagatttcggaaaattaactataaaggagagcgccaaaccattactgatgatgtggaggttaacagctatctttctcttccagctgatcttaccaagatgcatctcacagaaaaccctcatccacaggtgactcatgtgtcttctagtcagtctggttgtagcattgccagtgactctggaagcagcagtttatctgatatctatcaggctacggagagtgaggtaggagatgtagatttgacacgtcttccagaaggacctgttgattctgaggatgacgaagaggaagatgaagagattgatcgaacagatccattgcaggggcgagatcttgttcgagaatgtcttgaaaaagaacctgcagacaaaactgatgatgacattgaacaattgctggagtttatgcaccagctccctgcatttgcaaacatgaccatgtctgtaaggagagaactctgctcagtgatgatttttgaagtggtagagcaggctggagctattattcttgaagatgggcaagagcttgactcatggtatgttattttaaacggcactgtggaaatcagtcatccagatggaaaagttgaaaatttgtttatgggaaatagttttggaattactcccactctggataagcagtacatgcatggaattgtcaggactaaagtagatgattgtcagtttgtctgcatagcccagcaagattattggagaattttaaaccatgtggaaaaaaatacccataaagttgaggaagagggagaaattgttatggtacatgagcatcgggaactagaccggagtggaaccaggaaaggacacattgtgatcaaggcaacacctgagcgtctcataatgcatttaatagaagaacattccatcgtggatccaacttatatagaagattttctattaacttacaggacatttcttgaaagtcctttggatgttgggatcaaactattggaatggtttaagatcgacagcttaagagataaggtgacacggattgtattattatgggtaaataatcattttaatgattttgaaggtgaccctgctatgactcgatttctagaggaatttgaaaaaaatctggaagatacaaagatgaatggtcatctccggttattgaatattgcctgtgctgcaaaggctaagtggagacaggttgtgctgcaaaaggcttcccgcgagtcccctctacaattcagccttaatggagggagtgagaagggatttggtatttttgttgaaggagtagaacctggtagcaaagctgctgattcaggactgaaacgtggtgatcagattatggaagtaaatggacaaaactttgagaatattacatttatgaaagccgttgaaattttgaggaataatactcatcttgcacttactgtgaagaccaacatttttgtgttcaaagagttactttttaggactgaacaagagaaatctggtgttcctcatattcccaaaattgctgaaaaaaaaagtaatcgccattctatccagcatgtgccaggagatattgaacagacatcacaggagaaaggaagtaagaaagttaaagcaaatactgtttcaggtggaagaaacaaaatcaggaagattttggataaaacacgatttagtatcttgcctccaaagctatttagtgatggaggcctaagccaatcacaagatgacagcattgtgggaacaaggcactgtaggcatagtctggctataatgcccatccctggaacactctcatccagcagccctgatctcctgcagcctaccaccagtatgttggatttttccaatccttcagatatccctgatcaagttataagagttttcaaagtggatcagcaaagttgctacattatcatcagtaaagacaccacagctaaagaagtagtttttcatgctgttcatgaatttggtttgaccggtgcatccgacacatattctctctgtgaagtttctgttactcctgagggtgtcataaaacagagaagacttccagatcagttctccaaattagctgatagaattcaactcaatggaaggtattacttaaaaaataacatggaaacagaaaccttatgttcagatgaagatgctcaagaactagttaaggaaagccagctatccatgctgcagctcagtaccattgaggtggccacccagctgtcaatgagggactttgatttgtttcgtaatattgaaccgactgagtacatcgatgacctttttaagttaaattccaaaacaggaaatactcatttgaagaggtttgaggacattgtaaaccaagagacattctgggttgcctcagaaattttaactgaagcaaatcagctcaaacgaatgaagattattaagcattttattaaaattgcacttcattgtcgagaatgtaagaacttcaattccatgtttgcaataataagtggcttgaacctggcatctgtagcaagactcagaggaacttgggaaaagttaccaagcaaatacgagaaacatcttcaagatctacaagacatttttgatccatctagaaacatggcaaagtatagaaatattcttagtagtcaaagtatgcagcctccaattattccactcttccctgttgtcaagaaagatatgacatttctacatgaaggaaatgactccaaagtagatggtttagtaaactttgagaagttaagaatgatttccaaggaaatccgccaagttgttcgaatgacttctgctaacatggacccagctatgatgtttcgacagaggtcactgagtcaaggaagcacaaattcaaacatgctggatgttcagggaggtgctcacaaaaaaagggcacgccgcagctctctgcttaatgccaagaagctatatgaggatgcccaaatggcaaggaaggtgaagcagtatctttccagtctcgatgtagagacagatgaggagaagttccagatgatgtcattacagtgggagcctgcatatggtaccttgaccaagaatttaagtgagaaaagatcagccaaatcatctgaaatgtctccagtgcctatgaggtcagctggccaaacaactaaagcccacttgcatcaaccccacagagtaagccaggtgcttcaggtgccagctgttaatttgcaccccatcaggaagaagggacaaacaaaagaccctgcactgaatacaagtttacctcagaaagttttaggaacaactgaagaaataagtggtaagaagcatacagaagacactatttctgtggcgtcatctttacattctagtcctcctgcatctcctcaaggctcccctcacaaagttggcagtatcatatctgatcacagcagcaagatcagtggccagagctgccccggaataggtggggcttacttgcaaaagaaaatccttcagattaccaggagcacagccaaaagaacagacagtactgagaaggccactgaggagaatagagacaggacaagttgtgagaacacaaccagaaaaagaatgacatccccgtttagaagacttagggaaagaatgctttcaagggagagactagtcaacagccaaaaagaggacacagatcacaatcaagctacagaaagctgtgagaaagtgaaggatgttggaagcaacatcaaagatgagaaagggagtgccatcttcaattcaaatagccaaggcaacagtaacactttaaactgcttctatacgcgattcaagtctaaaaggaggaagacactctga

SEQ ID NO: 173987 - DNA, 8357 bp, Homo sapiens
  Payload ID: 14158
  Gene Symbol: RAPGEF6
  Gene Name: Rap guanine nucleotide exchange factor (GEF) 6
  Uniprot ID: Q8TEU7
  ENST ID: ENST00000509018
  CDS Start-End: 207-5012
cccgcgcagacttgtctccggccagtcgcgcgtgggtagaggccttaggcgggcgttgcgaagggttgtttgctagagttcggaccttgttacggcgcgaagttccctccttggggcgggggaaaggtaccgcacccgctacctagtgtgaatgaactgtggcgtgggctgctaagggcaggctgcggagtacccgggccgtggccatgaactcacccgtggaccctggcgctaggcaggcgttgaggaagaagccacccgagcggactcccgaggacttaaatactatttattcttatcttcatggaatggaaatattatcaaatctcagggaacatcagcttagattaatgtctgcaagagcacgctatgagagatacagtggcaatcaggttctcttttgttcagaaacgattgccagatgttggtatatcctactttctggatctgtgcttgtgaaaggctccatggtcttgcctccttgcagttttggtaagcagtttggaggaaaaagaggatgtgattgtcttgtattagagccttcagaaatgattgtggtagagaatgccaaagataatgaagatagtattctacaaagagaaattcctgccagacaatcccgaagaagatttcggaaaattaactataaaggagagcgccaaaccattactgatgatgtggaggttaacagctatctttctcttccagctgatcttaccaagatgcatctcacagaaaaccctcatccacaggtgactcatgtgtcttctagtcagtctggttgtagcattgccagtgactctggaagcagcagtttatctgatatctatcaggctacggagagtgaggtaggagatgtagatttgacacgtcttccagaaggacctgttgattctgaggatgacgaagaggaagatgaagagattgatcgaacagatccattgcaggggcgagatcttgttcgagaatgtcttgaaaaagaacctgcagacaaaactgatgatgacattgaacaattgctggagtttatgcaccagctccctgcatttgcaaacatgaccatgtctgtaaggagagaactctgctcagtgatgatttttgaagtggtagagcaggctggagctattattcttgaagatgggcaagagcttgactcatggtatgttattttaaacggcactgtggaaatcagtcatccagatggaaaagttgaaaatttgtttatgggaaatagttttggaattactcccactctggataagcagtacatgcatggaattgtcaggactaaagtagatgattgtcagtttgtctgcatagcccagcaagattattggagaattttaaaccatgtggaaaaaaatacccataaagttgaggaagagggagaaattgttatggtacatgagcatcgggaactagaccggagtggaaccaggaaaggacacattgtgatcaaggcaacacctgagcgtctcataatgcatttaatagaagaacattccatcgtggatccaacttatatagaagattttctattaacttacaggacatttcttgaaagtcctttggatgttgggatcaaactattggaatggtttaagatcgacagcttaagagataaggtgacacggattgtattattatgggtaaataatcattttaatgattttgaaggtgaccctgctatgactcgatttctagaggaatttgaaaaaaatctggaagatacaaagatgaatggtcatctccggttattgaatattgcctgtgctgcaaaggctaagtggagacaggttgtgctgcaaaaggcttcccgcgagtcccctctacaattcagccttaatggagggagtgagaagggatttggtatttttgttgaaggagtagaacctggtagcaaagctgctgattcaggactgaaacgtggtgatcagattatggaagtaaatggacaaaactttgagaatattacatttatgaaagccgttgaaattttgaggaataatactcatcttgcacttactgtgaagaccaacatttttgtgttcaaagagttactttttaggactgaacaagagaaatctggtgttcctcatattcccaaaattgctgaaaaaaaaagtaatcgccattctatccagcatgtgccaggagatattgaacagacatcacaggagaaaggaagtaagaaagttaaagcaaatactgtttcaggtggaagaaacaaaatcaggaagattttggataaaacacgatttagtatcttgcctccaaagctatttagtgatggaggcctaagccaatcacaagatgacagcattgtgggaacaaggcactgtaggcatagtctggctataatgcccatccctggaacactctcatccagcagccctgatctcctgcagcctaccaccagtatgttggatttttccaatccttcagatatccctgatcaagttataagagttttcaaagtggatcagcaaagttgctacattatcatcagtaaagacaccacagctaaagaagtagtttttcatgctgttcatgaatttggtttgaccggtgcatccgacacatattctctctgtgaagtttctgttactcctgagggtgtcataaaacagagaagacttccagatcagttctccaaattagctgatagaattcaactcaatggaaggtattacttaaaaaataacatggaaacagaaaccttatgttcagatgaagatgctcaagaactagttaaggaaagccagctatccatgctgcagctcagtaccattgaggtggccacccagctgtcaatgagggactttgatttgtttcgtaatattgaaccgactgagtacatcgatgacctttttaagttaaattccaaaacaggaaatactcatttgaagaggtttgaggacattgtaaaccaagagacattctgggttgcctcagaaattttaactgaagcaaatcagctcaaacgaatgaagattattaagcattttattaaaattgcacttcattgtcgagaatgtaagaacttcaattccatgtttgcaataataagtggcttgaacctggcatctgtagcaagactcagaggaacttgggaaaagttaccaagcaaatacgagaaacatcttcaagatctacaagacatttttgatccatctagaaacatggcaaagtatagaaatattcttagtagtcaaagtatgcagcctccaattattccactcttccctgttgtcaagaaagatatgacatttctacatgaaggaaatgactccaaagtagatggtttagtaaactttgagaagttaagaatgatttccaaggaaatccgccaagttgttcgaatgacttctgctaacatggacccagctatgatgtttcgacagaggtcactgagtcaaggaagcacaaattcaaacatgctggatgttcagggaggtgctcacaaaaaaagggcacgccgcagctctctgcttaatgccaagaagctatatgaggatgcccaaatggcaaggaaggtgaagcagtatctttccagtctcgatgtagagacagatgaggagaagttccagatgatgtcattacagtgggagcctgcatatggtaccttgaccaagaatttaagtgagaaaagatcagccaaatcatctgaaatgtctccagtgcctatgaggtcagctggccaaacaactaaagcccacttgcatcaaccccacagagtaagccaggtgcttcaggtgccagctgttaatttgcaccccatcaggaagaagggacaaacaaaagaccctgcactgaatacaagtttacctcagaaagttttaggaacaactgaagaaataagtggtaagaagcatacagaagacactatttctgtggcgtcatctttacattctagtcctcctgcatctcctcaaggctcccctcacaaaggttacacacttattccatcagctaaatctgacaacttgtctgactccagccatagtgagatttcttcacggtccagcatcgtgagcaattgttctgttgactccatgtctgcagctctacaggatgaacggtgttcctctcaggccctggcagtccctgaatccactggggcattggaaaagacagagcacgcttcagggataggagatcatagtcaacatggccctgggtggacactcttgaagccatctctaatcaagtgtttagctgtctcatcgtctgtgagcaatgaagagatttctcaagagcatatcattatagaagcagctgacagtggtcgtggaagttggacttcgtgttcaagcagctcccatgacaacttccaaagccttccaaacccaaaaagctgggattttttgaactcttacagacatacccatttggatgaccccattgctgaagttgaacccactgactctgagccctattcctgttctaaaagctgctctagaacttgtgggcagtgtaaaggaagcctagagagaaagagttggacctcctccagttctctgtctgacacgtatgaaccaaactatgggacagttaaacagagagtattggagagcaccccagctgagtcatctgaaggcttggaccccaaggatgccactgacccagtttataaaactgtcacttcaagtacagaaaagggcttgattgtgtactgtgtcacctcacccaagaaggacgataggtatagggagccacctcccactcctccaggatatttggggatttctttagcggacctaaaggaaggaccccacacacacctaaaacctccagattatagtgtggcagtgcagaggtcaaagatgatgcataacagcctctctagactgccaccagcttctctcagtagcaacctcgtggcctgtgttccatcgaagattgtaactcagcctcagaggcataatttgcagccattccatcctaaactaggagatgtgactgatgcagatagcgaagcagatgaaaatgaacaagtttcagcagtctagcctttggatgacctatttgaaaaccactgaaagtcgtggaggaatgggcaagaaccacctcatgattctgcaggccattgctaacgaacagctcattgctacaaccagtccagaggttttattccctctactccgagcaatgaaatagacctgagttatgcttcctttcatttaatttctgcagataaatagtttcctgagcaatggatgctatgcctggataccagtctccactttgcacgccggaactgccttgggaccacagttacagaaaaaatgtaaactcagagtgatccttgtgtatattgctatagatttttctttaacaagctattttaaagataatggcattattatttccaagccatagcttgggctgaaggacaaattgaaattgtctgccaataccaaggatattcttgtatatttgaaaaataacttattatttgaattgttgtggttttgtttgtatttgagagctcttgttagctgatattcatgtttgaggtcataaaattgtctctggtctgaccaaacagaagtcatctttacagaggtgatatgcttgatctacacagagatgtgacttgatctgtagcaccaatgcaatgtaggtctcagtttgagagaaataggaagccctttgcagttgaggtgttaggaacctgctggtcatggtgtggaaggccaaatgaagctgccacagggtttcttgtcagtcctttgggaaatgggagggagtagtttggggaggagggtgggaaccctaatttccacagaatgaaattttgatgttaaatgacatgtatacaaattcttccttaagtgaaagttatgctgcatcgaattgtaactgaaagtatagatccaacaaatagagactgggttctagagagttctggtctatagaaacccaaaactaaaatctctcataactcaagtatggaatactttttttaaagaaattcttatcatgggtgttgtaataatgaagacgaatttgactttatgcagtgttctgcagcatgcctcccccacatctcatagcaccaggttgtgtctgacctgacataccctgcagctctcagctggctgcagtaacattttgtgggagaaagaggagctggagttacagaaatgattgtctcttggttctcagtttttagcccttgagaggacatacttttccagcctcatgggtatggcactcttaattaaaatttcagtgactgtttactggatgaggcagatttttcacatttttgcaaattaaatatattttatatatattaagtttaattttttcagtttttttaatgtaaaagcaagtgaaattttaataaacttctgtaattaccaaaaaaaaaaaaaaaaaaaaagccaaagccattaacgtgcactacccagatcaacttggagccaaaaggggtttacttctgaatggctgtccgtatgtgtccacataggatttagttggtttgtggcctcctttatagaaatgtgttgtctttccctagctgtctctgctgtctgtcttcctgcatatcccccttcattttaaaatcatgaatcagttgtaagtggtaaatggtagtagttcatctttcccatcaacatgattgtctctttattttaggaataatagcatttcaaaaattcctgtggtaaagaaacattaatctgaaacttaagccttagaaattaatcgcaggtatgatagaatgaggcttggtggttccatagctttcttggtcctttgaaatgggaaataacctgaaccaaaaatcctagtttgaaagttacacttcagtgatttggcctataaacagtggtcctatgattatacattttttccttcactgatttgcataattttgttttcatggccacagcaaaacaatgtgaaatatatttttgctatacccactttttttatcaaattcagatgtctactctcaccattttatattcatttccccagaaaaatgtgctgttttcataatgtctttatttagcaggtctttcaaaccaaatggaagccttacctgtctttgtccttaatagtgtaaatatcttgcacagagtgttgaggcctatggttttggacttgcaccttacagctgcctttgttttatctatctagctttaactgtgagtgttcagatcagctgatcacattgatcaggagccaaagccaaatgctttgtagtttgttatgtatgtatcccttaaaaaatcatgaggttttgatttttatattttaactaagggtacattcctgccttctcttagtttgtcatatgactagaacaagagaagtcttaagctgcatttactccaattccagatctccatttgtttttgttttataaatttataatcttaatgaagagactagtgccctctcttcctgccacaactctcaatctgccaagactgttgaagcagttaacgctcagtgcaaacttttgccaaatagtaagtttcaacaaaatatctttatagtgaaagattttgagaattagtaaatccagtacatgattccataaaagcttattaaagttaataattctaatttactccaaatgattactttcaatatgatctttggggagaaaaagcctttagtgaattttcttgagggtgataaatcacatcattgcgatctatatcacctccttgagaatctctcccaggctgaaaatgtgatggtaatcatgggtgtttttaagaacaaatctaatttttatcaagtgttctttcctctacaaaaaaggaaggaggagaaaaagcttccttaaaactgattattttgattcaattttaagtttctaaaaaaggtgatattaaagtatatgtattccttcagcattaccttaaaggctagaaaaacgggataaatcttcagaaaagtgtcaaaagtgtcacagtacatgttcaaatttaaacttgaatcctggttcatctttgacttttgttgtgcatttttaatgcttctttatttttgatacacagaatgcagttgaacttgatcttttaaaattgagacatgtaagctaatcagcaaaagacagaaacaaaactgcacatctgtaataatcagatagcaattctactgcacaattcattgattgtaaggtatcctgtaacaagcaatgtttgtctcctattttttgatacctcttaaacttatgtcttttagaaagacagtgcctctgtatgctttttgtatttttactgagtgtaaatatttgttatatttttggttaagagaatgtaaaaataccatttattattatcatatctactaatacattggtggaatcaataaagaatctacattaa

SEQ ID NO: 173988 - DNA, 560 bp, Homo sapiens
  Payload ID: 14158
  Gene Symbol: RAPGEF6
  Gene Name: Rap guanine nucleotide exchange factor (GEF) 6
  ENST ID: ENST00000513227
  CDS Start-End: 94-560
attagatatttcatcttactgcagagcatagaatcaataggagcttctccttagggagctgctttgaaacagcttccagctgatcttaccaagatgcatctcacagaaaaccctcatccacaggtgactcatgtgtcttctagtcagtctggttgtagcattgccagtgactctggaagcagcagtttatctgatatctatcaggctacggagagtgaggtaggagatgtagatttgacacgtcttccagaaggacctgttgattctgaggatgacgaagaggaagatgaagagattgatcgaacagatccattgcaggggcgagatcttgttcgagaatgtcttgaaaaagaacctgcagacaaaactgatgatgacattgaacaattgctggagtttatgcaccagctccctgcatttgcaaacatgaccatgtctgtaaggagagaactctgctcagtgatgatttttgaagtggtagagcaggctggagctattattcttgaagatgggcaagagcttgactcatggtatgttattttaaacggcactgtggaaat

SEQ ID NO: 173989 - DNA, 3107 bp, Homo sapiens
  Payload ID: 14158
  Gene Symbol: RAPGEF6
  Gene Name: Rap guanine nucleotide exchange factor (GEF) 6
  Uniprot ID: Q8TEU7
  ENST ID: ENST00000510071
  CDS Start-End: 202-2685
gcagacttgtctccggccagtcgcgcgtgggtagaggccttaggcgggcgttgcgaagggttgtttgctagagttcggaccttgttacggcgcgaagttccctccttggggcgggggaaaggtaccgcacccgctacctagtgtgaatgaactgtggcgtgggctgctaagggcaggctgcggagtacccgggccgtggccatgaactcacccgtggaccctggcgctaggcaggcgttgaggaagaagccacccgagcggactcccgaggacttaaatactatttattcttatcttcatggaatggaaatattatcaaatctcagggaacatcagcttagattaatgtctgcaagagcacgctatgagagatacagtggcaatcaggttctcttttgttcagaaacgattgccagatgttggtatatcctactttctggatctgtgcttgtgaaaggctccatggtcttgcctccttgcagttttggtaagcagtttggaggaaaaagaggatgtgattgtcttgtattagagccttcagaaatgattgtggtagagaatgccaaagataatgaagatagtattctacaaagagaaattcctgccagacaatcccgaagaagatttcggaaaattaactataaaggagagcgccaaaccattactgatgatgtggaggttaacagctatctttctcttccagctgatcttaccaagatgcatctcacagaaaaccctcatccacaggtgactcatgtgtcttctagtcagtctggttgtagcattgccagtgactctggaagcagcagtttatctgatatctatcaggctacggagagtgaggtaggagatgtagatttgacacgtcttccagaaggacctgttgattctgaggatgacgaagaggaagatgaagagattgatcgaacagatccattgcaggggcgagatcttgttcgagaatgtcttgaaaaagaacctgcagacaaaactgatgatgacattgaacaattgctggagtttatgcaccagctccctgcatttgcaaacatgaccatgtctgtaaggagagaactctgctcagtgatgatttttgaagtggtagagcaggctggagctattattcttgaagatgggcaagagcttgactcatggtatgttattttaaacggcactgtggaaatcagtcatccagatggaaaagttgaaaatttgtttatgggaaatagttttggaattactcccactctggataagcagtacatgcatggaattgtcaggactaaagtagatgattgtcagtttgtctgcatagcccagcaagattattggagaattttaaaccatgtggaaaaaaatacccataaagttgaggaagagggagaaattgttatggtacatgagcatcgggaactagaccggagtggaaccaggaaaggacacattgtgatcaaggcaacacctgagcgtctcataatgcatttaatagaagaacattccatcgtggatccaacttatatagaagattttctattaacttacaggacatttcttgaaagtcctttggatgttgggatcaaactattggaatggtttaagatcgacagcttaagagataaggtgacacggattgtattattatgggtaaataatcattttaatgattttgaaggtgaccctgctatgactcgatttctagaggaatttgaaaaaaatctggaagatacaaagatgaatggtcatctccggttattgaatattgcctgtgctgcaaaggctaagtggagacaggttgtgctgcaaaaggcttcccgcgagtcccctctacaattcagccttaatggagggagtgagaagggatttggtatttttgttgaaggagtagaacctggtagcaaagctgctgattcaggactgaaacgtggtgatcagattatggaagtaaatggacaaaactttgagaatattacatttatgaaagccgttgaaattttgaggaataatactcatcttgcacttactgtgaagaccaacatttttgtgttcaaagagttactttttaggactgaacaagagaaatctggtgttcctcatattcccaaaattgctgaaaaaaaaagtaatcgccattctatccagcatgtgccaggagatattgaacagacatcacaggagaaaggaagtaagaaagttaaagcaaatactgtttcaggtggaagaaacaaaatcaggaagattttggataaaacacgatttagtatcttgcctccaaagctatttagtgatggaggcctaagccaatcacaagatgacagcattgtgggaacaaggcactgtaggcatagtctggctataatgcccatccctggaacactctcatccagcagccctgatctcctgcagcctaccaccagtatgttggatttttccaatccttcagatatccctgatcaagttataagagttttcaaagtggatcagcaaagttgctacattatcatcagtaaagacaccacagctaaagaagtagtttttcatgctgttcatgaatttggtttgaccggtgcatccgacacatattctctctgtgaagtttctgttactcctgagggtgtcataaaacagagaagacttccagatcagttctccaaattagctgatagaattcaactcaatggaaggtgaataagcttattagtggatgtgcttatttgtagatgtgcttttgaagatttcctgttaaaacagctattgtaagtagaaacattatcatgttttagtgctcctaaattcactccagaagacgcttgataaaatatcttgtcactcctgctaaaataaactcttagaaccactgatataatctagttcctgtttttttatagaggaagctgaatgatacaaatcttcatatatatctgaatgactgtatctactaatttataaatttgtttttaatatggccagtatgtactttggcaaaagaagccatggttttcacagttctttttctaagtagttttcctttaatgaatatgcaggaaaattttaaaaattttaaaatgtgttctgaaaattatttaataaactagattatttctgtagta

SEQ ID NO: 173990 - DNA, 4103 bp, Homo sapiens
  Payload ID: 14158
  Gene Symbol: RAPGEF6
  Gene Name: Rap guanine nucleotide exchange factor (GEF) 6
  ENST ID: ENST00000515170
  CDS Start-End: 184-3798
agtcgcgcgtgggtagaggccttaggcgggcgttgcgaagggttgtttgctagagttcggaccttgttacggcgcgaagttccctccttggggcgggggaaaggtaccgcacccgctacctagtgtgaatgaactgtggcgtgggctgctaagggcaggctgcggagtacccgggccgtggccatgaactcacccgtggaccctggcgctaggcaggcgttgaggaagaagccacccgagcggactcccgaggacttaaatactatttattcttatcttcatggaatggaaatattatcaaatctcagggaacatcagcttagattaatgtctgcaagagcacgctatgagagatacagtggcaatcaggttctcttttgttcagaaacgattgccagatgttggtatatcctactttctggatctgtgcttgtgaaaggctccatggtcttgcctccttgcagttttggtaagcagtttggaggaaaaagaggatgtgattgtcttgtattagagccttcagaaatgattgtggtagagaatgccaaagataatgaagatagtattctacaaagagaaattcctgccagacaatcccgaagaagatttcggaaaattaactataaaggagagcgccaaaccattactgatgatgtggaggttaacagctatctttctcttccagctgatcttaccaagatgcatctcacagaaaaccctcatccacaggtgactcatgtgtcttctagtcagtctggttgtagcattgccagtgactctggaagcagcagtttatctgatatctatcaggctacggagagtgaggtaggagatgtagatttgacacgtcttccagaaggacctgttgattctgaggatgacgaagaggaagatgaagagattgatcgaacagatccattgcaggggcgagatcttgttcgagaatgtcttgaaaaagaacctgcagacaaaactgatgatgacattgaacaattgctggagtttatgcaccagctccctgcatttgcaaacatgaccatgtctgtaaggagagaactctgctcagtgatgatttttgaagtggtagagcaggctggagctattattcttgaagatgggcaagagcttgactcatggtatgttattttaaacggcactgtggaaatcagtcatccagatggaaaagttgaaaatttgtttatgggaaatagttttggaattactcccactctggataagcagtacatgcatggaattgtcaggactaaagtagatgattgtcagtttgtctgcatagcccagcaagattattggagaattttaaaccatgtggaaaaaaatacccataaagttgaggaagagggagaaattgttatggtacatgagcatcgggaactagaccggagtggaaccaggaaaggacacattgtgatcaaggcaacacctgagcgtctcataatgcatttaatagaagaacattccatcgtggatccaacttatatagaagattttctattaacttacaggacatttcttgaaagtcctttggatgttgggatcaaactattggaatggtttaagatcgacagcttaagagataaggtgacacggattgtattattatgggtaaataatcattttaatgattttgaaggtgaccctgctatgactcgatttctagaggaatttgaaaaaaatctggaagatacaaagatgaatggtcatctccggttattgaatattgcctgtgctgcaaaggctaagtggagacaggttgtgctgcaaaaggcttcccgcgagtcccctctacaattcagccttaatggagggagtgagaagggatttggtatttttgttgaaggagtagaacctggtagcaaagctgctgattcaggactgaaacgtggtgatcagattatggaagtaaatggacaaaactttgagaatattacatttatgaaagccgttgaaattttgaggaataatactcatcttgcacttactgtgaagaccaacatttttgtgttcaaagagttactttttaggactgaacaagagaaatctggtgttcctcatattcccaaaattgctgaaaaaaaaagtaatcgccattctatccagcatgtgccaggagatattgaacagacatcacaggagaaaggaagtaagaaagttaaagcaaatactgtttcaggtggaagaaacaaaatcaggaagattttggataaaacacgatttagtatcttgcctccaaagctatttagtgatggaggcctaagccaatcacaagatgacagcattgtgggaacaaggcactgtaggcatagtctggctataatgcccatccctggaacactctcatccagcagccctgatctcctgcagcctaccaccagtatgttggatttttccaatccttcagatatccctgatcaagttataagagttttcaaagtggatcagcaaagttgctacattatcatcagtaaagacaccacagctaaagaagtagtttttcatgctgttcatgaatttggtttgaccggtgcatccgacacatattctctctgtgaagtttctgttactcctgagggtgtcataaaacagagaagacttccagatcagttctccaaattagctgatagaattcaactcaatggaaggtattacttaaaaaataacatggaaacagaaaccttatgttcagatgaagatgctcaagaactagttaaggaaagccagctatccatgctgcagctcagtaccattgaggtggccacccagctgtcaatgagggactttgatttgtttcgtaatattgaaccgactgagtacatcgatgacctttttaagttaaattccaaaacaggaaatactcatttgaagaggtttgaggacattgtaaaccaagagacattctgggttgcctcagaaattttaactgaagcaaatcagctcaaacgaatgaagattattaagcattttattaaaattgcacttcattgtcgagaatgtaagaacttcaattccatgtttgcaataataagtggcttgaacctggcatctgtagcaagactcagaggaacttgggaaaagttaccaagcaaatacgagaaacatcttcaagatctacaagacatttttgatccatctagaaacatggcaaagtatagaaatattcttagtagtcaaagtatgcagcctccaattattccactcttccctgttgtcaagaaagatatgacatttctacatgaaggaaatgactccaaagtagatggtttagtaaactttgagaagttaagaatgatttccaaggaaatccgccaagttgttcgaatgacttctgctaacatggacccagctatgatgtttcgacagaggtcactgagtcaaggaagcacaaattcaaacatgctggatgttcagggaggtgctcacaaaaaaagggcacgccgcagctctctgcttaatgccaagaagctatatgaggatgcccaaatggcaaggaaggtgaagcagtatctttccagtctcgatgtagagacagatgaggagaagttccagatgatgtcattacagtgggagcctgcatatggtaccttgaccaagaatttaagtgagaaaagatcagccaaatcatctgaaatgtctccagtgcctatgaggtcagctggccaaacaactaaagcccacttgcatcaaccccacagagtaagccaggtgcttcaggtgccagctgttaatttgcaccccatcaggaagaagggacaaacaaaagaccctgcactgatgtgaatttagtgctcttgaaaagggctggactggcagccctgcagcctcttcccgtatacccacagcacagatgcaccacagatacaagtttacctcagaaagttttaggaacaactgaagaaataagtggtaagaagcatacagaagacactatttctgtggcgtcatctttacattctagtcctcctgcatctcctcaaggctcccctcacaaagttggcagtatcatatctgatcacagcagcaagatcagtggccagagctgccccggaataggtggggcttacttgcaaaagaaaatccttcag

SEQ ID NO: 173991 - DNA, 552 bp, Homo sapiens
  Payload ID: 14158
  Gene Symbol: RAPGEF6
  Gene Name: Rap guanine nucleotide exchange factor (GEF) 6
  ENST ID: ENST00000504575
  CDS Start-End: 86-552
atagaatcaataggagcttctccttagggagctgctttgaaacagctctggtttgaaaaggaaactaccctttccagcctaggaaatggcttttcttgttcgctgttatgccaattgtcttcagccatgggcctccaaacttccagctgatcttaccaagatgcatctcacagaaaaccctcatccacaggtgactcatgtgtcttctagtcagtctggttgtagcattgccagtgactctggaagcagcagtttatctgatatctatcaggctacggagagtgaggtaggagatgtagatttgacacgtcttccagaaggacctgttgattctgaggatgacgaagaggaagatgaagagattgatcgaacagatccattgcaggggcgagatcttgttcgagaatgtcttgaaaaagaacctgcagacaaaactgatgatgacattgaacaattgctggagtttatgcaccagctccctgcatttgcaaacatgaccatgtctgtaaggagagaactctgctcagtgatgatttttgaagtggtagagca

SEQ ID NO: 173992 - DNA, 5742 bp, Homo sapiens
  Payload ID: 14158
  Gene Symbol: RAPGEF6
  Gene Name: Rap guanine nucleotide exchange factor (GEF) 6
  Uniprot ID: Q8TEU7
  ENST ID: ENST00000507093
  CDS Start-End: 183-4712
gtcgcgcgtgggtagaggccttaggcgggcgttgcgaagggttgtttgctagagttcggaccttgttacggcgcgaagttccctccttggggcgggggaaaggtaccgcacccgctacctagtgtgaatgaactgtggcgtgggctgctaagggcaggctgcggagtacccgggccgtggccatgaactcacccgtggaccctggcgctaggcaggcgttgaggaagaagccacccgagcggactcccgaggacttaaatactatttattcttatcttcatggaatggaaatattatcaaatctcagggaacatcagcttagattaatgtctgcaagagcacgctatgagagatacagtggcaatcaggttctcttttgttcagaaacgattgccagatgttggtatatcctactttctggatctgtgcttgtgaaaggctccatggtcttgcctccttgcagttttggtaagcagtttggaggaaaaagaggatgtgattgtcttgtattagagccttcagaaatgattgtggtagagaatgccaaagataatgaagatagtattctacaaagagaaattcctgccagacaatcccgaagaagatttcggaaaattaactataaaggagagcgccaaaccattactgatgatgtggaggttaacagctatctttctcttccagctgatcttaccaagatgcatctcacagaaaaccctcatccacaggtgactcatgtgtcttctagtcagtctggttgtagcattgccagtgactctggaagcagcagtttatctgatatctatcaggctacggagagtgaggtaggagatgtagatttgacacgtcttccagaaggacctgttgattctgaggatgacgaagaggaagatgaagagattgatcgaacagatccattgcaggggcgagatcttgttcgagaatgtcttgaaaaagaacctgcagacaaaactgatgatgacattgaacaattgctggagtttatgcaccagctccctgcatttgcaaacatgaccatgtctgtaaggagagaactctgctcagtgatgatttttgaagtggtagagcaggctggagctattattcttgaagatgggcaagagcttgactcatggtatgttattttaaacggcactgtggaaatcagtcatccagatggaaaagttgaaaatttgtttatgggaaatagttttggaattactcccactctggataagcagtacatgcatggaattgtcaggactaaagtagatgattgtcagtttgtctgcatagcccagcaagattattggagaattttaaaccatgtggaaaaaaatacccataaagttgaggaagagggagaaattgttatggtacatgagcatcgggaactagaccggagtggaaccaggaaaggacacattgtgatcaaggcaacacctgagcgtctcataatgcatttaatagaagaacattccatcgtggatccaacttatatagaagattttctattaacttacaggacatttcttgaaagtcctttggatgttgggatcaaactattggaatggtttaagatcgacagcttaagagataaggtgacacggattgtattattatgggtaaataatcattttaatgattttgaaggtgaccctgctatgactcgatttctagaggaatttgaaaaaaatctggaagatacaaagatgaatggtcatctccggttattgaatattgcctgtgctgcaaaggctaagtggagacaggttgtgctgcaaaaggcttcccgcgagtcccctctacaattcagccttaatggagggagtgagaagggatttggtatttttgttgaaggagtagaacctggtagcaaagctgctgattcaggactgaaacgtggtgatcagattatggaagtaaatggacaaaactttgagaatattacatttatgaaagccgttgaaattttgaggaataatactcatcttgcacttactgtgaagaccaacatttttgtgttcaaagagttactttttaggactgaacaagagaaatctggtgttcctcatattcccaaaattgctgaaaaaaaaagtaatcgccattctatccagcatgtgccaggagatattgaacagacatcacaggagaaaggaagtaagaaagttaaagcaaatactgtttcaggtggaagaaacaaaatcaggaagattttggataaaacacgatttagtatcttgcctccaaagctatttagtgatggaggcctaagccaatcacaagatgacagcattgtgggaacaaggcactgtaggcatagtctggctataatgcccatccctggaacactctcatccagcagccctgatctcctgcagcctaccaccagtatgttggatttttccaatccttcagctgttggtttttattatatccctgatcaagttataagagttttcaaagtggatcagcaaagttgctacattatcatcagtaaagacaccacagctaaagaagtagtttttcatgctgttcatgaatttggtttgaccggtgcatccgacacatattctctctgtgaagtttctgttactcctgagggtgtcataaaacagagaagacttccagatcagttctccaaattagctgatagaattcaactcaatggaaggtattacttaaaaaataacatggaaacagaaaccttatgttcagatgaagatgctcaagaactagttaaggaaagccagctatccatgctgcagctcagtaccattgaggtggccacccagctgtcaatgagggactttgatttgtttcgtaatattgaaccgactgagtacatcgatgacctttttaagttaaattccaaaacaggaaatactcatttgaagaggtttgaggacattgtaaaccaagagacattctgggttgcctcagaaattttaactgaagcaaatcagctcaaacgaatgaagattattaagcattttattaaaattgcacttcattgtcgagaatgtaagaacttcaattccatgtttgcaataataagtggcttgaacctggcatctgtagcaagactcagaggaacttgggaaaagttaccaagcaaatacgagaaacatcttcaagatctacaagacatttttgatccatctagaaacatggcaaagtatagaaatattcttagtagtcaaagtatgcagcctccaattattccactcttccctgttgtcaagaaagatatgacatttctacatgaaggaaatgactccaaagtagatggtttagtaaactttgagaagttaagaatgatttccaaggaaatccgccaagttgttcgaatgacttctgctaacatggacccagctatgatgtttcgacagaggaagaagaggtggcggagtctggggtcactgagtcaaggaagcacaaattcaaacatgctggatgttcagggaggtgctcacaaaaaaagggcacgccgcagctctctgcttaatgccaagaagctatatgaggatgcccaaatggcaaggaaggtgaagcagtatctttccagtctcgatgtagagacagatgaggagaagttccagatgatgtcattacagtgggagcctgcatatggtaccttgaccaagaatttaagtgagaaaagatcagccaaatcatctgaaatgtctccagtgcctatgaggtcagctggccaaacaactaaagcccacttgcatcaaccccacagagtaagccaggtgcttcaggtgccagctgttaatttgcaccccatcaggaagaagggacaaacaaaagaccctgcactgaatacaagtttacctcagaaagttttaggaacaactgaagaaataagtggtaagaagcatacagaagacactatttctgtggcgtcatctttacattctagtcctcctgcatctcctcaaggctcccctcacaaaggttacacacttattccatcagctaaatctgacaacttgtctgactccagccatagtgagatttcttcacggtccagcatcgtgagcaattgttctgttgactccatgtctgcagctctacaggatgaacggtgttcctctcaggccctggcagtccctgaatccactggggcattggaaaagacagagcacgcttcagggataggagatcatagtcaacatggccctgggtggacactcttgaagccatctctaatcaagtgtttagctgtctcatcgtctgtgagcaatgaagagatttctcaagagcatatcattatagaagcagctgacagtggtcgtggaagttggacttcgtgttcaagcagctcccatgacaacttccaaagccttccaaacccaaaaagctgggattttttgaactcttacagacatacccatttggatgaccccattgctgaagttgaacccactgactctgagccctattcctgttctaaaagctgctctagaacttgtgggcagtgtaaaggaagcctagagagaaagagttggacctcctccagttctctgtctgacacgtatgaaccaaactatgggacagttaaacagagagtattggagagcaccccagctgagtcatctgaaggcttggaccccaaggatgccactgacccagtttataaaactgtcacttcaagtacagaaaagggcttgattgaaaatgaacaagtttcagcagtctagcctttggatgacctatttgaaaaccactgaaagtcgtggaggaatgggcaagaaccacctcatgattctgcaggccattgctaacgaacagctcattgctacaaccagtccagaggttttattccctctactccgagcaatgaaatagacctgagttatgcttcctttcatttaatttctgcagataaatagtttcctgagcaatggatgctatgcctggataccagtctccactttgcacgccggaactgccttgggaccacagttacagaaaaaatgtaaactcagagtgatccttgtgtatattgctatagatttttctttaacaagctattttaaagataatggcattattatttccaagccatagcttgggctgaaggacaaattgaaattgtctgccaataccaaggatattcttgtatatttgaaaaataacttattatttgaattgttgtggttttgtttgtatttgagagctcttgttagctgatattcatgtttgaggtcataaaattgtctctggtctgaccaaacagaagtcatctttacagaggtgatatgcttgatctacacagagatgtgacttgatctgtagcaccaatgcaatgtaggtctcagtttgagagaaataggaagccctttgcagttgaggtgttaggaacctgctggtcatggtgtggaaggccaaatgaagctgccacagggtttcttgtcagtcctttgggaaatgggagggagtagtttggggaggagggtgggaaccctaatttccacagaatgaaattttgatgttaaatgacatgtatacaaattcttccttaagtgaaagttatgctgcatcgaattgtaactgaaagtatagatccaacaaatagagactgggttctagagagttctggtctatagaaacccaaaactaaaatctctcataactcaagtatggaatactttttttaaagaaattcttatcatgggtgttgtaataatgaagacgaatttgactttatgcagtgttctgcagcatgcc

SEQ ID NO: 173993 - DNA, 3535 bp, Homo sapiens
  Payload ID: 14158
  Gene Symbol: RAPGEF6
  Gene Name: Rap guanine nucleotide exchange factor (GEF) 6
  ENST ID: ENST00000512052
  CDS Start-End: 1-3345
atgtctgtaaggagagaactctgctcagtgatgatttttgaagtggtagagcaggctggagctattattcttgaagatgggcaagagcttgactcatggtatgttattttaaacggcactgtggaaatcagtcatccagatggaaaagttgaaaatttgtttatgggaaatagttttggaattactcccactctggataagcagtacatgcatggaattgtcaggactaaagtagatgattgtcagtttgtctgcatagcccagcaagattattggagaattttaaaccatgtggaaaaaaatacccataaagttgaggaagagggagaaattgttatggtacatgagcatcgggaactagaccggagtggaaccaggaaaggacacattgtgatcaaggcaacacctgagcgtctcataatgcatttaatagaagaacattccatcgtggatccaacttatatagaagattttctattaacttacaggacatttcttgaaagtcctttggatgttgggatcaaactattggaatggtttaagatcgacagcttaagagataaggtgacacggattgtattattatgggtaaataatcattttaatgattttgaaggtgaccctgctatgactcgatttctagaggaatttgaaaaaaatctggaagatacaaagatgaatggtcatctccggttattgaatattgcctgtgctgcaaaggctaagtggagacaggttgtgctgcaaaaggcttcccgcgagtcccctctacaattcagccttaatggagggagtgagaagggatttggtatttttgttgaaggagtagaacctggtagcaaagctgctgattcaggactgaaacgtggtgatcagattatggaagtaaatggacaaaactttgagaatattacatttatgaaagccgttgaaattttgaggaataatactcatcttgcacttactgtgaagaccaacatttttgtgttcaaagagttactttttaggactgaacaagagaaatctggtgttcctcatattcccaaaattgctgaaaaaaaaagtaatcgccattctatccagcatgtgccaggagatattgaacagacatcacaggagaaaggaagtaagaaagttaaagcaaatactgtttcaggtggaagaaacaaaatcaggaagattttggataaaacacgatttagtatcttgcctccaaagctatttagtgatggaggcctaagccaatcacaagatgacagcattgtgggaacaaggcactgtaggcatagtctggctataatgcccatccctggaacactctcatccagcagccctgatctcctgcagcctaccaccagtatgttggatttttccaatccttcagatatccctgatcaagttataagagttttcaaagtggatcagcaaagttgctacattatcatcagtaaagacaccacagctaaagaagtagtttttcatgctgttcatgaatttggtttgaccggtgcatccgacacatattctctctgtgaagtttctgttactcctgagggtgtcataaaacagagaagacttccagatcagttctccaaattagctgatagaattcaactcaatggaaggtattacttaaaaaataacatggaaacagaaaccttatgttcagatgaagatgctcaagaactagttaaggaaagccagctatccatgctgcagctcagtaccattgaggtggccacccagctgtcaatgagggactttgatttgtttcgtaatattgaaccgactgagtacatcgatgacctttttaagttaaattccaaaacaggaaatactcatttgaagaggtttgaggacattgtaaaccaagagacattctgggttgcctcagaaattttaactgaagcaaatcagctcaaacgaatgaagattattaagcattttattaaaattgcacttcattgtcgagaatgtaagaacttcaattccatgtttgcaataataagtggcttgaacctggcatctgtagcaagactcagaggaacttgggaaaagttaccaagcaaatacgagaaacatcttcaagatctacaagacatttttgatccatctagaaacatggcaaagtatagaaatattcttagtagtcaaagtatgcagcctccaattattccactcttccctgttgtcaagaaagatatgacatttctacatgaaggaaatgactccaaagtagatggtttagtaaactttgagaagttaagaatgatttccaaggaaatccgccaagttgttcgaatgacttctgctaacatggacccagctatgatgtttcgacagaggaagaagaggtggcggagtctggggtcactgagtcaaggaagcacaaattcaaacatgctggatgttcagggaggtgctcacaaaaaaagggcacgccgcagctctctgcttaatgccaagaagctatatgaggatgcccaaatggcaaggaaggtgaagcagtatctttccagtctcgatgtagagacagatgaggagaagttccagatgatgtcattacagtgggagcctgcatatggtaccttgaccaagaatttaagtgagaaaagatcagccaaatcatctgaaatgtctccagtgcctatgaggtcagctggccaaacaactaaagcccacttgcatcaaccccacagagtaagccaggtgcttcaggtgccagctgttaatttgcaccccatcaggaagaagggacaaacaaaagaccctgcactgaatacaagtttacctcagaaagttttaggaacaactgaagaaataagtggtaagaagcatacagaagacactatttctgtggcgtcatctttacattctagtcctcctgcatctcctcaaggctcccctcacaaagttggcagtatcatatctgatcacagcagcaagatcagtggccagagctgccccggaataggtggggcttacttgcaaaagaaaatccttcagattaccaggagcacagccaaaagaacagacagtactgagaaggccactgaggagaatagagacaggacaagttgtgagaacacaaccagaaaaagaatgacatccccgtttagaagacttagggaaagaatgctttcaagggagagactagtcaacagccaaaaagaggacacagatcacaatcaagctacagaaagctgtgagaaagtgaaggatgttggaagcaacatcaaagatgagaaagggagtgccatcttcaattcaaatagccaaggcaacagtaacactttaaactgcttctatacgcgattcaagtctaaaaggaggaagacactctgatgaagttccttatttaattttagtgttaagtttgttttcagttattaatgtatacatggcttaaattaaaccatttgtcaaagcttaggcagacaacttagtaaaatactatttataaacacttgaaaatgcctcatttgtacataagttattttactgatgtattgagttagtaaattttatactcttg

SEQ ID NO: 173994 - DNA, 542 bp, Homo sapiens
  Payload ID: 14158
  Gene Symbol: RAPGEF6
  Gene Name: Rap guanine nucleotide exchange factor (GEF) 6
  ENST ID: ENST00000504039
  CDS Start-End: 94-542
tgatttgtaaaaagaaacttaacagaattttatcaccgtactcatcactgtagctctggtttgaaaaggaaactaccctttccagcctaggaaatggcttttcttgttcgctgttatgccaattgtcttcagccatgggcctccaaacttccagctgatcttaccaagatgcatctcacagaaaaccctcatccacaggtgactcatgtgtcttctagtcagtctggttgtagcattgccagtgactctggaagcagcagtttatctgatatctatcaggctacggagagtgaggtaggagatgtagatttgacacgtcttccagaaggacctgttgattctgaggatgacgaagaggaagatgaagagattgatcgaacagatccattgcaggggcgagatcttgttcgagaatgtcttgaaaaagaacctgcagacaaaactgatgatgacattgaacaattgctggagtttatgcaccagctccctgcatttgcaaacatgaccatgtctgtaaggagagaactctgctcagtgatgat

SEQ ID NO: 173995 - DNA, 4694 bp, Homo sapiens
  Payload ID: 14158
  Gene Symbol: RAPGEF6
  Gene Name: Rap guanine nucleotide exchange factor (GEF) 6
  Uniprot ID: Q8TEU7
  ENST ID: ENST00000627212
  CDS Start-End: 130-4644
gttcggaccttgttacggcgcgaagttccctccttggggcgggggaaaggtaccgcacccgctacctagtgtgaatgaactgtggcgtgggctgctaagggcaggctgcggagtacccgggccgtggccatgaactcacccgtggaccctggcgctaggcaggcgttgaggaagaagccacccgagcggactcccgaggacttaaatactatttattcttatcttcatggaatggaaatattatcaaatctcagggaacatcagcttagattaatgtctgcaagagcacgctatgagagatacagtggcaatcaggttctcttttgttcagaaacgattgccagatgttggtatatcctactttctggatctgtgcttgtgaaaggctccatggtcttgcctccttgcagttttggtaagcagtttggaggaaaaagaggatgtgattgtcttgtattagagccttcagaaatgattgtggtagagaatgccaaagataatgaagatagtattctacaaagagaaattcctgccagacaatcccgaagaagatttcggaaaattaactataaaggagagcgccaaaccattactgatgatgtggaggttaacagctatctttctcttccagctgatcttaccaagatgcatctcacagaaaaccctcatccacaggtgactcatgtgtcttctagtcagtctggttgtagcattgccagtgactctggaagcagcagtttatctgatatctatcaggctacggagagtgaggtaggagatgtagatttgacacgtcttccagaaggacctgttgattctgaggatgacgaagaggaagatgaagagattgatcgaacagatccattgcaggggcgagatcttgttcgagaatgtcttgaaaaagaacctgcagacaaaactgatgatgacattgaacaattgctggagtttatgcaccagctccctgcatttgcaaacatgaccatgtctgtaaggagagaactctgctcagtgatgatttttgaagtggtagagcaggctggagctattattcttgaagatgggcaagagcttgactcatggtatgttattttaaacggcactgtggaaatcagtcatccagatggaaaagttgaaaatttgtttatgggaaatagttttggaattactcccactctggataagcagtacatgcatggaattgtcaggactaaagtagatgattgtcagtttgtctgcatagcccagcaagattattggagaattttaaaccatgtggaaaaaaatacccataaagttgaggaagagggagaaattgttatggtacatgagcatcgggaactagaccggagtggaaccaggaaaggacacattgtgatcaaggcaacacctgagcgtctcataatgcatttaatagaagaacattccatcgtggatccaacttatatagaagattttctattaacttacaggacatttcttgaaagtcctttggatgttgggatcaaactattggaatggtttaagatcgacagcttaagagataaggtgacacggattgtattattatgggtaaataatcattttaatgattttgaaggtgaccctgctatgactcgatttctagaggaatttgaaaaaaatctggaagatacaaagatgaatggtcatctccggttattgaatattgcctgtgctgcaaaggctaagtggagacaggttgtgctgcaaaaggcttcccgcgagtcccctctacaattcagccttaatggagggagtgagaagggatttggtatttttgttgaaggagtagaacctggtagcaaagctgctgattcaggactgaaacgtggtgatcagattatggaagtaaatggacaaaactttgagaatattacatttatgaaagccgttgaaattttgaggaataatactcatcttgcacttactgtgaagaccaacatttttgtgttcaaagagttactttttaggactgaacaagagaaatctggtgttcctcatattcccaaaattgctgaaaaaaaaagtaatcgccattctatccagcatgtgccaggagatattgaacagacatcacaggagaaaggaagtaagaaagttaaagcaaatactgtttcaggtggaagaaacaaaatcaggaagattttggataaaacacgatttagtatcttgcctccaaagctatttagtgatggaggcctaagccaatcacaagatgacagcattgtgggaacaaggcactgtaggcatagtctggctataatgcccatccctggaacactctcatccagcagccctgatctcctgcagcctaccaccagtatgttggatttttccaatccttcagatatccctgatcaagttataagagttttcaaagtggatcagcaaagttgctacattatcatcagtaaagacaccacagctaaagaagtagtttttcatgctgttcatgaatttggtttgaccggtgcatccgacacatattctctctgtgaagtttctgttactcctgagggtgtcataaaacagagaagacttccagatcagttctccaaattagctgatagaattcaactcaatggaaggtattacttaaaaaataacatggaaacagaaaccttatgttcagatgaagatgctcaagaactagttaaggaaagccagctatccatgctgcagctcagtaccattgaggtggccacccagctgtcaatgagggactttgatttgtttcgtaatattgaaccgactgagtacatcgatgacctttttaagttaaattccaaaacaggaaatactcatttgaagaggtttgaggacattgtaaaccaagagacattctgggttgcctcagaaattttaactgaagcaaatcagctcaaacgaatgaagattattaagcattttattaaaattgcacttcattgtcgagaatgtaagaacttcaattccatgtttgcaataataagtggcttgaacctggcatctgtagcaagactcagaggaacttgggaaaagttaccaagcaaatacgagaaacatcttcaagatctacaagacatttttgatccatctagaaacatggcaaagtatagaaatattcttagtagtcaaagtatgcagcctccaattattccactcttccctgttgtcaagaaagatatgacatttctacatgaaggaaatgactccaaagtagatggtttagtaaactttgagaagttaagaatgatttccaaggaaatccgccaagttgttcgaatgacttctgctaacatggacccagctatgatgtttcgacagaggaagaagaggtggcggagtctggggtcactgagtcaaggaagcacaaattcaaacatgctggatgttcagggaggtgctcacaaaaaaagggcacgccgcagctctctgcttaatgccaagaagctatatgaggatgcccaaatggcaaggaaggtgaagcagtatctttccagtctcgatgtagagacagatgaggagaagttccagatgatgtcattacagtgggagcctgcatatggtaccttgaccaagaatttaagtgagaaaagatcagccaaatcatctgaaatgtctccagtgcctatgaggtcagctggccaaacaactaaagcccacttgcatcaaccccacagagtaagccaggtgcttcaggtgccagctgttaatttgcaccccatcaggaagaagggacaaacaaaagaccctgcactgaatacaagtttacctcagaaagttttaggaacaactgaagaaataagtggtaagaagcatacagaagacactatttctgtggcgtcatctttacattctagtcctcctgcatctcctcaaggctcccctcacaaaggttacacacttattccatcagctaaatctgacaacttgtctgactccagccatagtgagatttcttcacggtccagcatcgtgagcaattgttctgttgactccatgtctgcagctctacaggatgaacggtgttcctctcaggccctggcagtccctgaatccactggggcattggaaaagacagagcacgcttcagggataggagatcatagtcaacatggccctgggtggacactcttgaagccatctctaatcaagtgtttagctgtctcatcgtctgtgagcaatgaagagatttctcaagagcatatcattatagaagcagctgacagtggtcgtggaagttggacttcgtgttcaagcagctcccatgacaacttccaaagccttccaaacccaaaaagctgggattttttgaactcttacagacatacccatttggatgaccccattgctgaagttgaacccactgactctgagccctattcctgttctaaaagctgctctagaacttgtgggcagtgtaaaggaagcctagagagaaagagttggacctcctccagttctctgtctgacacgtatgaaccaaactatgggacagttaaacagagagtattggagagcaccccagctgagtcatctgaaggcttggaccccaaggatgccactgacccagtttataaaactgtcacttcaagtacagaaaagggcttgattgaaaatgaacaagtttcagcagtctagcctttggatgacctatttgaaaaccactgaaagtcgtggaggaatgggca

SEQ ID NO: 173996 - DNA, 3429 bp, Homo sapiens
  Payload ID: 14159
  Gene Symbol: RAPGEFL1
  Gene Name: Rap guanine nucleotide exchange factor (GEF)-like 1
  Uniprot ID: Q9UHV5
  ENST ID: ENST00000264644
  CDS Start-End: 191-1561
agaaggaagataaactccacatatttctgtgagtatgagaaaggtgcacactcttgggttcagcaatctgtaggcctgacttgggtacacagatatcctgctggatgacattgtccttacccattctctcttcctcccgacggagaaatttctgcaggagctacaccagtactttgttcgggcaggaggcatggagggccctgaagggctgggccggaagcaagcctgtctagccatgcttctccatttcttggacacctaccaggggctgcttcaagaggaagagggggccggccacatcatcaaggatctatacctgctaattatgaaggacgagtccctttaccagggcctccgagaggacactctgaggctgcaccagctggtggagacggtggaactaaagattccagaggagaaccagccacccagcaagcaggtgaagccactcttccgccacttccgccggatagactcctgtctgcagacccgggtggccttccggggctctgatgagatcttctgccgtgtatacatgcctgaccactcttatgtgaccatacgcagccgcctttcagcatctgtgcaggacattctgggctctgtgacggagaaacttcaatattcagaggagcccgcggggcgtgaggattccctcatcctggtagctgtgtcctcctctggagagaaggtccttctccagcccactgaggactgtgttttcaccgcactgggcatcaacagccacctgtttgcctgtactcgggacagctatgaggctctggtgcccctccccgaggagatccaggtctcccctggagacacagagatccaccgagtggagcctgaggacgttgccaaccacctaactgccttccactgggagctgttccgatgtgtgcatgagctggagttcgtggactacgtgttccacggggagcgcggccgccgggagacggccaacttggagctgctgctgcagcgctgcagcgaggtcacgcactgggtggccaccgaagtgctgctctgcgaggccccgggcaagcgcgcgcagctgctcaagaagttcatcaagatcgcggccctctgcaagcagaaccaggacctgctgtctttctacgccgtggtcatggggctggacaacgccgctgtcagccgccttcgactcacctgggagaagctgccagggaaattcaagaacttgtttcgcaaatttgagaacctgacggacccctgcaggaaccacaaaagctaccgagaagtgatctccaaaatgaagccccctgtgattcccttcgtgcctctgatcctcaaagacctgactttcctgcacgaagggagtaagacccttgtagatggtttggtgaacatcgagaagctgcattcagtggccgaaaaagtgaggacaatccgcaaataccggagccggcccctttgcctggacatggaggcatcccccaatcacctgcagaccaaggcctatgtgcgccagtttcaggtcatcgacaaccagaacctcctcttcgagctctcctacaagctggaggcaaacagtcagtgagagtggaggctccagtcagacccgccagatccttgggcacctggcactcaagcactttgcacgatgtctcaaccaacatctgacatctttcccgtggagcaacttcctgctccacgggaaagaggtcgatggatttacccctggacccataagtctgttcatcctgctgaagtcccctccccattgctccttcaagccaaaactacactttgctggttcctgtcccctctgagaaaggggatagaaagctccttcctctatgtcctcccatcgagatctgttctggggatggagcttccaacttcctcttgcagcaggaaagaatgctgctcacccttctgtcttgcagagtgggattgtgggagggattggcagccttcttctccaccacctgtccagcttcttcctggtcagggctgggacccccaggaatattatgttgccgtgtgtgtgtgtgtgtgtgtgtgtgtgtgtgtgtgtgtgtgtgtgtgtgtgtgtgtgtcttcttttagggagcaggagtgcatctggtaattgagggtggatgttgtgtgtgctggggaggggtccttctgtttggtgctacccttgtctactctgcccctggatggtgcggggtgctttctccacccccacactccctgctcagctcctcgtgctgccctgcatgcccaggcttgtgagccaagctgctttttggggcagggagtagcagcaggtgggaggggttacccatcagcccttgcaagtcccccactcaggcctctggaaggtccagggatgggctctgatgagagggtaaaagatgctcagggaaacacaggcctcagctgcctagaggaccctccccctgccttgcagtgggctcgggtagagcagtatcaggagctagggttgtctgctgcccacactcctgctttttgggatatctaactgctaaggagggagttgacatcccccttctggctcatgtgtctgacaccaacaacatggtctctgtccctctctctttgactctccctttgtcctccccatagagctggggtggggtggatccctatacctggggcaggcagccccaaagtgggggagggggatggcagagactgtaaaggcgccactggactctggcaaggcctttattacctttactcccctccctctcccatcaccagcctcaaggcctgaggggtgcaggggctcctggcagctactgggtgaggtttcctggcacagactcacccttctttctggcaccacctctttcccttttgaagagacagcaacagccgtagcaaaagcagctgctgctcctgctatgagggtgtatatattttttacccaaagctctggaattgtacatttattttttaaaactcaaagagggaaagagccttgtatcatatgtgaacattgtatcataggtaatgttgtacagacccttttatacagtgatctgtcttgttcctgcagcaaaaatcctctatggacataggaggtgctgtgtcccatgccctcttgccctgacagtgtcccatgggcccccttctgctccctgccccctccctgctactgctgatgcactctcctctccctgcagcccctggcttcccagccttcctcctgaccccttccaacagccttggaactccagctgccaccaccctctgggtcggacactgggacccactggcccagtcttggctgctgcttacccctagccttgatgcctgcccagggacccccagccccctcccgttgccctgcagctttaacagagtgaaccatgtgtattgtacaggcgcggttgtcattgcagaaaccgctgggtggagaagaagccgataaagtctatgaatcaacctgcc

SEQ ID NO: 173997 - DNA, 1582 bp, Homo sapiens
  Payload ID: 14159
  Gene Symbol: RAPGEFL1
  Gene Name: Rap guanine nucleotide exchange factor (GEF)-like 1
  Uniprot ID: Q9UHV5
  ENST ID: ENST00000456989
  CDS Start-End: 47-1582
attgtgccctaccagagaggacagatgggcaccgcctccagtggcaatgctaattcacccaagaggccttcccagctcttctcacagaaggaagataaactccacatatttctatatcctgctggatgacattgtccttacccattctctcttcctcccgacggagaaatttctgcaggagctacaccagtactttgttcgggcaggaggcatggagggccctgaagggctgggccggaagcaagcctgtctagccatgcttctccatttcttggacacctaccaggggctgcttcaagaggaagagggggccggccacatcatcaaggatctatacctgctaattatgaaggacgagtccctttaccagggcctccgagaggacactctgaggctgcaccagctggtggagacggtggaactaaagattccagaggagaaccagccacccagcaagcaggtgaagccactcttccgccacttccgccggatagactcctgtctgcagacccgggtggccttccggggctctgatgagatcttctgccgtgtatacatgcctgaccactcttatgtgaccatacgcagccgcctttcagcatctgtgcaggacattctgggctctgtgacggagaaacttcaatattcagaggagcccgcggggcgtgaggattccctcatcctggtagctgtgtcctcctctggagagaaggtccttctccagcccactgaggactgtgttttcaccgcactgggcatcaacagccacctgtttgcctgtactcgggacagctatgaggctctggtgcccctccccgaggagatccaggtctcccctggagacacagagatccaccgagtggagcctgaggacgttgccaaccacctaactgccttccactgggagctgttccgatgtgtgcatgagctggagttcgtggactacgtgttccacggggagcgcggccgccgggagacggccaacttggagctgctgctgcagcgctgcagcgaggtcacgcactgggtggccaccgaagtgctgctctgcgaggccccgggcaagcgcgcgcagctgctcaagaagttcatcaagatcgcggccctctgcaagcagaaccaggacctgctgtctttctacgccgtggtcatggggctggacaacgccgctgtcagccgccttcgactcacctgggagaagctgccagggaaattcaagaacttgtttcgcaaatttgagaacctgacggacccctgcaggaaccacaaaagctaccgagaagtgatctccaaaatgaagccccctgtgattcccttcgtgcctctgatcctcaaagacctgactttcctgcacgaagggagtaagacccttgtagatggtttggtgaacatcgagaagctgcattcagtggccgaaaaagtgaggacaatccgcaaataccggagccggcccctttgcctggacatggaggcatcccccaatcacctgcagaccaaggcctatgtgcgccagtttcaggtcatcgacaaccagaacctcctcttcgagctctcctacaagctggaggcaaacagtcagtga

SEQ ID NO: 173998 - DNA, 2079 bp, Homo sapiens
  Payload ID: 14159
  Gene Symbol: RAPGEFL1
  Gene Name: Rap guanine nucleotide exchange factor (GEF)-like 1
  ENST ID: ENST00000544503
  CDS Start-End: 160-1677
cttcccagctcttctcacagaaggaagataaactccacatatttctgtgagtatgagaaaggtgcacactcttgggttcagcaatctgtaggcctgacttgggtacacaggtaggtgagtgaaggtgtccaggccacagacctgtcctgactctttgaaatgatgctgagacccggttatcccttgagccaggaatccttccccattgatatcctgctggatgacattgtccttacccattctctcttcctcccgacggagaaatttctgcaggagctacaccagtactttgttcgggcaggaggcatggagggccctgaagggctgggccggaagcaagcctgtctagccatgcttctccatttcttggacacctaccaggggctgcttcaagaggaagagggggccggccacatcatcaaggatctatacctgctaattatgaaggacgagtccctttaccagggcctccgagaggacactctgaggctgcaccagctggtggagacggtggaactaaagattccagaggagaaccagccacccagcaagcaggtgaagccactcttccgccacttccgccggatagactcctgtctgcagacccgggtggccttccggggctctgatgagatcttctgccgtgtatacatgcctgaccactcttatgtgaccatacgcagccgcctttcagcatctgtgcaggacattctgggctctgtgacggagaaacttcaatattcagaggagcccgcggggcgtgaggattccctcatcctggtagctgtgtcctcctctggagagaaggtccttctccagcccactgaggactgtgttttcaccgcactgggcatcaacagccacctgtttgcctgtactcgggacagctatgaggctctggtgcccctccccgaggagatccaggtctcccctggagacacagagatccaccgagtggagcctgaggacgttgccaaccacctaactgccttccactgggagctgttccgatgtgtgcatgagctggagttcgtggactacgtgttccacggggagcgcggccgccgggagacggccaacttggagctgctgctgcagcgctgcagcgaggtcacgcactgggtggccaccgaagtgctgctctgcgaggccccgggcaagcgcgcgcagctgctcaagaagttcatcaagatcgcggccctctgcaagcagaaccaggacctgctgtctttctacgccgtggtcatggggctggacaacgccgctgtcagccgccttcgactcacctgggagaagctgccagggaaattcaagaacttgtttcgcaaatttgagaacctgacggacccctgcaggaaccacaaaagctaccgagaagtgatctccaaaatgaagccccctgtgattcccttcgtgcctctgatcctcaaagacctgactttcctgcacgaagggagtaagacccttgtagatggtttggtgaacatcgagaagctgcattcagtggccgaaaaagtgaggacaatccgcaaataccggagccggcccctttgcctggacatggaggcatcccccaatcacctgcagaccaaggcctatgtgcgccagtttcaggtcatcgacaaccagaacctcctcttcgagctctcctacaagctggaggcaaacagtcagtgagagtggaggctccagtcagacccgccagatccttgggcacctggcactcaagcactttgcacgatgtctcaaccaacatctgacatctttcccgtggagcaacttcctgctccacgggaaagaggtcgatggatttacccctggacccataagtctgttcatcctgctgaagtcccctccccattgctccttcaagccaaaactacactttgctggttcctgtcccctctgagaaaggggatagaaagctccttcctctatgtcctcccatcgagatctgttctggggatggagcttccaacttcctcttgcagcaggaaagaatgctgctcacccttctgtcttgcagagtgggattgtgggagggattggcagccttcttctccaccacctgtccagctt

SEQ ID NO: 173999 - DNA, 540 bp, Homo sapiens
  Payload ID: 14159
  Gene Symbol: RAPGEFL1
  Gene Name: Rap guanine nucleotide exchange factor (GEF)-like 1
  ENST ID: ENST00000538884
  CDS Start-End: 479-540
atatttctgtgagtatgagaaaggtgcacactcttgggttcagcaatctgtaggcctgacttgggtacacaggcgagcccttgacttcgccgccctgggcccctctgggcgcccccgagcggcccgagcatcttctgaaccgggttctggagcggcttgctggaggggctaccagggacagcgccgcctcaggcagaactcaaccttggtgtgttatctgaccaacttcccacatacgctgaagagaagtgcacatggccatcaaaggcacgcgccccccccttcccttcagctgccttggcagctgccgaacccaccctcgcagtggctgcccagaacctttacacatgtatgtgtgcgcgtgtgcagagcatgacaagatatcctgctggatgacattgtccttacccattctctcttcctcccgacggagaaatttctgcaggagctacaccagtactttgttcgggcaggaggcatggagggccctgaagggctgggccggaagcaagcctgtctagccatgcttctccatttctt

SEQ ID NO: 174000 - DNA, 560 bp, Homo sapiens
  Payload ID: 14159
  Gene Symbol: RAPGEFL1
  Gene Name: Rap guanine nucleotide exchange factor (GEF)-like 1
  ENST ID: ENST00000543876
  CDS Start-End: 114-560
aatgctaattcacccaagaggccttcccagctcttctcacagaaggaagataaactccacatatttctaaatttctgcaggagctacaccagtactttgttcgggcaggaggcatggagggccctgaagggctgggccggaagcaagcctgtctagccatgcttctccatttcttggacacctaccaggggctgcttcaagaggaagagggggccggccacatcatcaaggatctatacctgctaattatgaaggacgagtccctttaccagggcctccgagaggacactctgaggctgcaccagctggtggagacggtggaactaaagattccagaggagaaccagccacccagcaagcaggtgaagccactcttccgccacttccgccggatagactcctgtctgcagacccgggtggccttccggggctctgatgagatcttctgccgtgtatacatgcctgaccactcttatgtgaccatacgcagccgcctttcagcatctgtgcaggacattctgggctctgtgacggagaaacttcaatattcagaggagccc

SEQ ID NO: 174001 - DNA, 779 bp, Homo sapiens
  Payload ID: 14159
  Gene Symbol: RAPGEFL1
  Gene Name: Rap guanine nucleotide exchange factor (GEF)-like 1
  ENST ID: ENST00000538981
  CDS Start-End: 476-779
ctctgtgtttggaaatactctttgtctggagacacttctgtgggctacttcttttttcaggcagaactcaaccttggtgtgttatctgaccaacttcccacatacgctgaagagaagtgcacatggccatcaaaggcacgcgccccccccttcccttcagctgccttggcagctgccgaacccaccctcgcagtggctgcccagaacctttacacatgtatgtgtgcgcgtgtgcagagcatgacaaggcaggtggctggggctccagcctggctaaagagaacttgcccttaggggcaagagagggaggcactgcatttccagtttcgttctggaagtgcccacctgacatctgtggtgcccactgatctttacagatatcctgctggatgacattgtccttacccattctctcttcctcccgacggagaaatttctgcaggagctacaccagtactttgttcgggcaggaggcatggagggccctgaagggctgggccggaagcaagcctgtctagccatgcttctccatttcttggacacctaccaggggctgcttcaagaggaagagggggccggccacatcatcaaggatctatacctgctaattatgaaggacgagtccctttaccagggcctccgagaggacactctgaggctgcaccagctggtggagacggtggaactaaagattccagaggagaaccagccacccagcaagcaggtgaagccactcttccgccacttccgccggatagactcctgtctgcagacccggg

SEQ ID NO: 174002 - DNA, 382 bp, Homo sapiens
  Payload ID: 14159
  Gene Symbol: RAPGEFL1
  Gene Name: Rap guanine nucleotide exchange factor (GEF)-like 1
  ENST ID: ENST00000541245
  CDS Start-End: 196-382
gagctgtccccaggcgagcccttgacttcgccgccctgggcccctctgggcgcccccgagcggcccgagcatcttctgaaccgggttctggagcggcttgctggaggggctaccagggacagcgccgcctcaggcagaactcaaccttggtgtgttatctgaccaacttcccacatacgctgaagagaagtgcacatggccatcaaagatatcctgctggatgacattgtccttacccattctctcttcctcccgacggagaaatttctgcaggagctacaccagtactttgttcgggcaggaggcatggagggccctgaagggctgggccggaagcaagcctgtctagccatgcttctccatttcttggacacctaccagg

SEQ ID NO: 174003 - DNA, 3855 bp, Homo sapiens
  Payload ID: 14159
  Gene Symbol: RAPGEFL1
  Gene Name: Rap guanine nucleotide exchange factor (GEF)-like 1
  ENST ID: ENST00000620260
  CDS Start-End: 1-1989
atgaagccgctggagaaatttctgaagaagcagacgtcgcagctggcgggccgaacggtggcgggaggtcccggcgggggtctggggagctgcggtgggcctggagggggtgggggacccggcgggggcggcggtccagccgggggacagcggtcgttgcagcggcgtcagagcgtgtctcgcctgctgctccccgctttcctccgggagccccccgccgagccggggctggagccgccccctgaggaggaaggaggagagccggcgggggtcgcggaggagccgggcagcggggggccctgctggctgcagctggaggaggtgccggggcccgggcctctcgggggaggggggcccctgcgctccccttcctcctactcatctgacgagctgtccccaggcgagcccttgacttcgccgccctgggcccctctgggcgcccccgagcggcccgagcatcttctgaaccgggttctggagcggcttgctggaggggctaccagggacagcgccgcctcagatatcctgctggatgacattgtccttacccattctctcttcctcccgacggagaaatttctgcaggagctacaccagtactttgttcgggcaggaggcatggagggccctgaagggctgggccggaagcaagcctgtctagccatgcttctccatttcttggacacctaccaggggctgcttcaagaggaagagggggccggccacatcatcaaggatctatacctgctaattatgaaggacgagtccctttaccagggcctccgagaggacactctgaggctgcaccagctggtggagacggtggaactaaagattccagaggagaaccagccacccagcaagcaggtgaagccactcttccgccacttccgccggatagactcctgtctgcagacccgggtggccttccggggctctgatgagatcttctgccgtgtatacatgcctgaccactcttatgtgaccatacgcagccgcctttcagcatctgtgcaggacattctgggctctgtgacggagaaacttcaatattcagaggagcccgcggggcgtgaggattccctcatcctggtagctgtgtcctcctctggagagaaggtccttctccagcccactgaggactgtgttttcaccgcactgggcatcaacagccacctgtttgcctgtactcgggacagctatgaggctctggtgcccctccccgaggagatccaggtctcccctggagacacagagatccaccgagtggagcctgaggacgttgccaaccacctaactgccttccactgggagctgttccgatgtgtgcatgagctggagttcgtggactacgtgttccacggggagcgcggccgccgggagacggccaacttggagctgctgctgcagcgctgcagcgaggtcacgcactgggtggccaccgaagtgctgctctgcgaggccccgggcaagcgcgcgcagctgctcaagaagttcatcaagatcgcggccctctgcaagcagaaccaggacctgctgtctttctacgccgtggtcatggggctggacaacgccgctgtcagccgccttcgactcacctgggagaagctgccagggaaattcaagaacttgtttcgcaaatttgagaacctgacggacccctgcaggaaccacaaaagctaccgagaagtgatctccaaaatgaagccccctgtgattcccttcgtgcctctgatcctcaaagacctgactttcctgcacgaagggagtaagacccttgtagatggtttggtgaacatcgagaagctgcattcagtggccgaaaaagtgaggacaatccgcaaataccggagccggcccctttgcctggacatggaggcatcccccaatcacctgcagaccaaggcctatgtgcgccagtttcaggtcatcgacaaccagaacctcctcttcgagctctcctacaagctggaggcaaacagtcagtgagagtggaggctccagtcagacccgccagatccttgggcacctggcactcaagcactttgcacgatgtctcaaccaacatctgacatctttcccgtggagcaacttcctgctccacgggaaagaggtcgatggatttacccctggacccataagtctgttcatcctgctgaagtcccctccccattgctccttcaagccaaaactacactttgctggttcctgtcccctctgagaaaggggatagaaagctccttcctctatgtcctcccatcgagatctgttctggggatggagcttccaacttcctcttgcagcaggaaagaatgctgctcacccttctgtcttgcagagtgggattgtgggagggattggcagccttcttctccaccacctgtccagcttcttcctggtcagggctgggacccccaggaatattatgttgccgtgtgtgtgtgtgtgtgtgtgtgtgtgtgtgtgtgtgtgtgtgtgtgtgtgtgtgtgtcttcttttagggagcaggagtgcatctggtaattgagggtggatgttgtgtgtgctggggaggggtccttctgtttggtgctacccttgtctactctgcccctggatggtgcggggtgctttctccacccccacactccctgctcagctcctcgtgctgccctgcatgcccaggcttgtgagccaagctgctttttggggcagggagtagcagcaggtgggaggggttacccatcagcccttgcaagtcccccactcaggcctctggaaggtccagggatgggctctgatgagagggtaaaagatgctcagggaaacacaggcctcagctgcctagaggaccctccccctgccttgcagtgggctcgggtagagcagtatcaggagctagggttgtctgctgcccacactcctgctttttgggatatctaactgctaaggagggagttgacatcccccttctggctcatgtgtctgacaccaacaacatggtctctgtccctctctctttgactctccctttgtcctccccatagagctggggtggggtggatccctatacctggggcaggcagccccaaagtgggggagggggatggcagagactgtaaaggcgccactggactctggcaaggcctttattacctttactcccctccctctcccatcaccagcctcaaggcctgaggggtgcaggggctcctggcagctactgggtgaggtttcctggcacagactcacccttctttctggcaccacctctttcccttttgaagagacagcaacagccgtagcaaaagcagctgctgctcctgctatgagggtgtatatattttttacccaaagctctggaattgtacatttattttttaaaactcaaagagggaaagagccttgtatcatatgtgaacattgtatcataggtaatgttgtacagacccttttatacagtgatctgtcttgttcctgcagcaaaaatcctctatggacataggaggtgctgtgtcccatgccctcttgccctgacagtgtcccatgggcccccttctgctccctgccccctccctgctactgctgatgcactctcctctccctgcagcccctggcttcccagccttcctcctgaccccttccaacagccttggaactccagctgccaccaccctctgggtcggacactgggacccactggcccagtcttggctgctgcttacccctagccttgatgcctgcccagggacccccagccccctcccgttgccctgcagctttaacagagtgaaccatgtgtattgtacaggcgcggttgtcattgcagaaaccgctgggtggagaagaagccgataaagtctatgaatcaacctg

SEQ ID NO: 174004 - DNA, 1744 bp, Homo sapiens
  Payload ID: 14159
  Gene Symbol: RAPGEFL1
  Gene Name: Rap guanine nucleotide exchange factor (GEF)-like 1
  ENST ID: ENST00000613811
  CDS Start-End: 368-1744
cgcagccgccgccgccgccgccgccgcgtcctctcagccttgcgctccgcccgctgcctctgccgccgcagcgcagagccgggcgcaccggccccgcagcctgcccactcttcgggccgcgtgccggctgcagccggcatggggggttgctgagagcgagcactcctttcctctggcacctcccccggctactggccactggactctggccagcgaggctcggcccctctggcccccagtctggcgcctggcacggccctctactctgctcctccagctctgagcatcgtgtcttcgccgccccccccgcccgcgcctgggatacctgggtcccccggcgacccctaggagaggggcgggggggggcatgaagccgctggagaaatttctgaagaagcagacgtcgcagctggcgggccgaacggtggcgggaggtcccggcgggggtctggggagctgcggtgggcctggagggggtgggggacccggcgggggcggcggtccagccgggggacagcggtcgttgcagcggcgtcagagcgtgtctcgcctgctgctccccgctttcctccgggagccccccgccgagccggggctggagccgccccctgaggaggaaggaggagagccggcgggggtcgcggaggagccgggcagcggggggccctgctggctgcagctggaggaggtgccggggcccgggcctctcgggggaggggggcccctgcgctccccttcctcctactcatctgacgagctgtccccaggcgagcccttgacttcgccgccctgggcccctctgggcgcccccgagcggcccgagcatcttctgaaccgggttctggagcggcttgctggaggggctaccagggacagcgccgcctcagatatcctgctggatgacattgtccttacccattctctcttcctcccgacggagaaatttctgcaggagctacaccagtactttgttcgggcaggaggcatggagggccctgaagggctgggccggaagcaagcctgtctagccatgcttctccatttcttggacacctaccaggggctgcttcaagaggaagagggggccggccacatcatcaaggatctatacctgctaattatgaaggacgagtccctttaccagggcctccgagaggacactctgaggctgcaccagctggtggagacggtggaactaaagattccagaggagaaccagccacccagcaagcaggtgaagccactcttccgccacttccgccggatagactcctgtctgcagacccgggtggccttccggggctctgatgagatcttctgccgtgtatacatgcctgaccactcttatgtgaccatacgcagccgcctttcagcatctgtgcaggacattctgggctctgtgacggagaaacttcaatattcagaggagcccgcggggcgtgaggattccctcatcctggtagctgtgtcctcctctggagagaaggtccttctccagcccactgaggactgtgttttcaccgcactgggcatcaacagccacctgtttgcctgtactcgggacagctatgaggctctggtgcccctccccgaggagatccaggtctcccctggagacacagagatccaccgagtggagcctgaggacgttgccaaccacctaactgccttccactgggagctgttccgatgtgtgcatgagctggagttcgtggactacgtgttccacggggagcgcggccgc

SEQ ID NO: 174005 - DNA, 3584 bp, Homo sapiens
  Payload ID: 14160
  Gene Symbol: RAP1GAP
  Gene Name: RAP1 GTPase activating protein
  ENST ID: ENST00000290101
  CDS Start-End: 259-2337
ctccccgaactgcggcggcggcgagcgccggccgcatctgagcagagctgcagcggcggccgcgggcaccagagtgccgagcccaggacgcccccggcccaggcccttggggtggacaagtccttcacttctcgccggagtgtgtggaggagcgatgggcagaaccagcacttccctcaggcactagacctgtcacgagtgaacttagttccctcctatactccttcactctaccctaagaacacagatctatttgagatgattgagaagatgcagggaagcaggatggatgaacaacgctgctccttcccgccgcccctcaaaacagaggaggactacattccatacccgagcgtgcacgaggtcttggggcgagaaggacccttccccctcatcctgctgccccagtttgggggctactggattgagggcaccaaccacgaaatcaccagcatccccgagacagagccactgcagtcgcccacaaccaaggtgaagctcgagtgcaaccccacagcccgcatctaccggaagcactttctcggcaaggagcatttcaattactactcactggacgctgccctcggccaccttgtcttctcactcaagtacgatgtcatcggggaccaagagcacctgcggctgctgctcaggaccaagtgccggacataccatgatgtcatccccatctcctgcctcaccgagttccctaatgttgtccagatggcaaagttggtgtgtgaagacgtcaatgtggatcggttctatcctgtgctctaccccaaggcttcccggctcatcgtcacctttgacgagcatgtcatcagcaataacttcaagtttggcgtcatttatcagaagcttgggcagacctccgaggaagaactcttcagcaccaatgaggaaagtcccgctttcgtggagttccttgaatttcttggccagaaggtcaaactgcaggactttaaggggttccgaggaggcctggacgtgacccacgggcagacggggaccgaatctgtgtactgcaacttccgcaacaaggagatcatgtttcacgtgtccaccaagctgccatacacggaaggggacgcccagcagttgcagcggaagcggcacatcgggaacgacatcgtggctgtggtcttccaggatgagaacactcctttcgtgcccgacatgatcgcgtccaacttcctgcatgcctacgtcgtggtgcaggctgagggcgggggccctgatggccccctctacaaggtctctgtcactgcaagagatgatgtgcccttctttggaccccccctcccggaccccgctgtgttcaggaaggggcctgagttccaggaatttttgctgacaaagctgatcaatgctgaatatgcctgctacaaggcagagaagtttgccaaactggaggagcggacgcgggccgccctcctggagacgctctatgaggaactacacatccacagccagtccatgatgggcttgggcggcgacgaggacaagatggagaatggcagtgggggcggcggcttctttgagtctttcaagcgggtcatccggagccgcagccagtccatggatgccatggggctgagcaacaagaagcccaacaccgtgtccaccagccacagcgggagcttcgcgcccaacaaccccgacctggccaaggcggctggaatatcattgcttattcctgggaaaagtgcgagtagattcggacgccggggcagtgccataggcataggaaccgtggaagaggttgtcgtccgcggggccgccggctctggaggctgcctgcacgcgctgttctctgctcgctctcaggacggaggccatattggggacgttgcccctctgcccccgggacaggccccagggcgtgcgggatggagtggcggcagctccgatggcactcagcacctgctttggggcctgtcactgattgtccctgggaagagccccacgaggaagaagtcgggcccgttcggctcccgccgcagcagcgccattggcatcgagaacatacaggaggtgcaggagaagagggagagccctccggctggtcagaagaccccagacagcgggcacgtctcacaggagcccaagtcggagaactcatccactcagagctccccagagatgcccacgaccaagaacagagcggagaccgcagcgcagagagcagaggcgctcaagctcccgctcctcgtccagtgccagcagcttcgccagcgtggtggaggagacggagggtgtggacggagaggacacaggcctggagagcgtgtcatcctcaggaacaccccacaagcgggactccttcatctatagcacgtggctggaggacagtgtcagcaccactagtgggggcagctccccaggcccctctcgatcaccccacccagacgccggcaagttgggggaccctgcgtgtcccgagatcaagatccagctggaagcatctgagcagcacatgccccagctgggctgttagccgggccaccccctctgaaggtgaaactgagcagatgaggccacagaagcacaaggggaaggtgccgtgtcaagcccaggcagacgagacctctgccctgaagaccaacaccagcccgtgggctgccccctgcctccccaccctccccatggcccacccatctgggctgtctctgcagggcagagccgtccagacctgggatcagggaagctgctggcatcgtccccacccccagcctgggggtctgggctggggcagggattgctcagtggaagcaggactgggggtctggcttgccccctccctgggcctccatcacccctgagcatccctctggactcagagggaacaaggtgggagagagagtttgagacagctccgtgtggagagcttagcccctggaggcagcacaaggaggatgtgatatgtgggggagtgagcactgggttgggagccgggtcctggtttccaatttgggttctgctgtgtgactctgggcaagtcactctccctctctgggcatgtctgctacaaatggacaagattatttcagaggtcactgaagactgtgattacatgcacctgccttagaaggtaggattttcttcccagggacctcctatcaccctaccctgcttcttgaggtccctggagccccaggtgggctgaggggcagggagccggctgtgcccagtatgcctcctggaccctccagttctgccacaggtctgccgatgccctgtccactgcctacacatgacagacaagtaaccccctcatgggggatggggacctacctggctcctcagccagcacccagcttaacccctgccatcccatgctgggccctccaggccaagagtctcagctggccgagagtccaggccttgcctcccccgaccgccatggagggggcagcccggcacagctgctgggagcccttgtgtgtctggtcacactttttaggcgtcacgccaaaggccagcctcctggccccaatacccattttggaagcccctgtggccgtgtggatgtcggtaacagttgtataaaataaattctatttatcgctattgtacccaga

SEQ ID NO: 174006 - DNA, 600 bp, Homo sapiens
  Payload ID: 14160
  Gene Symbol: RAP1GAP
  Gene Name: RAP1 GTPase activating protein
  ENST ID: ENST00000317967
  CDS Start-End: 311-600
gcggccgcgggcaccagagtgccgagcccaggacgcccccggcccaggcccttgggttaatacctctgccaaccgaggccaccctccctcggacccccattcggaggaagcagacccaagttcgaattctgacattgccactgagcagccgtacaacttttgggtggacaagtccttcacttctcgccggagtgtgtggaggagcgatgggcagaaccagcacttccctcaggcactagacctgtcacgagtgaacttagttccctcctatactccttcactctaccctaagaacacagatctatttgagatgattgagaagatgcagggaagcaggatggatgaacaacgctgctccttcccgccgcccctcaaaacagaggaggactacattccatacccgagcgtgcacgaggtcttggggcgagaaggacccttccccctcatcctgctgccccagtttgggggctactggattgagggcaccaaccacgaaatcaccagcatccccgagacagagccactgcagtcgcccacaaccaaggtgaagctcgagtgcaaccccacagcccgcatctaccggaagcactttctcggcaa

SEQ ID NO: 174007 - DNA, 3318 bp, Homo sapiens
  Payload ID: 14160
  Gene Symbol: RAP1GAP
  Gene Name: RAP1 GTPase activating protein
  ENST ID: ENST00000374761
  CDS Start-End: 156-2240
cgtggggcgagcccatcgcaggcagcgccgccgccgggagccgggagcgcggagctcagcgctgcggggcccggacccgggcgcgcgcgggccaggagccggctgggccagctgaagtgccgccccggcgggggccgggccgggccgcgctcaggatggcacagctgcggcccgcggtgccacccggccgtccgcggaggggctcgctgcccgcgggggccagctggcagaacacagatctatttgagatgattgagaagatgcagggaagcaggatggatgaacaacgctgctccttcccgccgcccctcaaaacagaggaggactacattccatacccgagcgtgcacgaggtcttggggcgagaaggacccttccccctcatcctgctgccccagtttgggggctactggattgagggcaccaaccacgaaatcaccagcatccccgagacagagccactgcagtcgcccacaaccaaggtgaagctcgagtgcaaccccacagcccgcatctaccggaagcactttctcggcaaggagcatttcaattactactcactggacgctgccctcggccaccttgtcttctcactcaagtacgatgtcatcggggaccaagagcacctgcggctgctgctcaggaccaagtgccggacataccatgatgtcatccccatctcctgcctcaccgagttccctaatgttgtccagatggcaaagttggtgtgtgaagacgtcaatgtggatcggttctatcctgtgctctaccccaaggcttcccggctcatcgtcacctttgacgagcatgtcatcagcaataacttcaagtttggcgtcatttatcagaagcttgggcagacctccgaggaagaactcttcagcaccaatgaggaaagtcccgctttcgtggagttccttgaatttcttggccagaaggtcaaactgcaggactttaaggggttccgaggaggcctggacgtgacccacgggcagacggggaccgaatctgtgtactgcaacttccgcaacaaggagatcatgtttcacgtgtccaccaagctgccatacacggaaggggacgcccagcagttgcagcggaagcggcacatcgggaacgacatcgtggctgtggtcttccaggatgagaacactcctttcgtgcccgacatgatcgcgtccaacttcctgcatgcctacgtcgtggtgcaggctgagggcgggggccctgatggccccctctacaaggtctctgtcactgcaagagatgatgtgcccttctttggaccccccctcccggaccccgctgtgttcaggaaggggcctgagttccaggaatttttgctgacaaagctgatcaatgctgaatatgcctgctacaaggcagagaagtttgccaaactggaggagcggacgcgggccgccctcctggagacgctctatgaggaactacacatccacagccagtccatgatgggcttgggcggcgacgaggacaagatggagaatggcagtgggggcggcggcttctttgagtctttcaagcgggtcatccggagccgcagccagtccatggatgccatggggctgagcaacaagaagcccaacaccgtgtccaccagccacagcgggagcttcgcgcccaacaaccccgacctggccaaggcggctggaatatcactgattgtccctgggaagagccccacgaggaagaagtcgggcccgttcggctcccgccgcagcagcgccattggcatcgagaacatacaggaggtgcaggagaagagggagagccctccggctggtcagaagaccccagacagcgggcacgtctcacaggagcccaagtcggagaactcatccactcagagctccccagagatgcccacgaccaagaacagagcggagaccgcagcgcagagagcagaggcgctcaaggacttctcccgctcctcgtccagtgccagcagcttcgccagcgtggtggaggagacggagggtgtggacggagaggacacaggcctggagagcgtgtcatcctcaggaacaccccacaagcgggactccttcatctatagcacgtggctggaggacagtgtcagcaccactagtgggggcagctccccaggcccctctcgatcaccccacccagacgccggcaagttgggggaccctgcgtgtcccgagatcaagatccagctggaagcatctgagcagcacatgccccagctgggctgttagccgggccaccccctctgaaggtgaaactgagcagatgaggccacagaagcacaaggggaaggtgccgtgtcaagcccaggcagacgagacctctgccctgaagaccaacaccagcccgtgggctgccccctgcctccccaccctccccatggcccacccatctgggctgtctctgcagggcagagccgtccagacctgggatcagggaagctgctggcatcgtccccacccccagcctgggggtctgggctggggcagggattgctcagtggaagcaggactgggggtctggcttgccccctccctgggcctccatcacccctgagcatccctctggactcagagggaacaaggtgggagagagagtttgagacagctccgtgtggagagcttagcccctggaggcagcacaaggaggatgtgatatgtgggggagtgagcactgggttgggagccgggtcctggtttccaatttgggttctgctgtgtgactctgggcaagtcactctccctctctgggcatgtctgctacaaatggacaagattatttcagaggtcactgaagactgtgattacatgcacctgccttagaaggtaggattttcttcccagggacctcctatcaccctaccctgcttcttgaggtccctggagccccaggtgggctgaggggcagggagccggctgtgcccagtatgcctcctggaccctccagttctgccacaggtctgccgatgccctgtccactgcctacacatgacagacaagtaaccccctcatgggggatggggacctacctggctcctcagccagcacccagcttaacccctgccatcccatgctgggccctccaggccaagagtctcagctggccgagagtccaggccttgcctcccccgaccgccatggagggggcagcccggcacagctgctgggagcccttgtgtgtctggtcacactttttaggcgtcacgccaaaggccagcctcctggccccaatacccattttggaagcccctgtggccgtgtggatgtcggtaacagttgtataaaataaattctatttatcgctattgta

SEQ ID NO: 174008 - DNA, 3334 bp, Homo sapiens
  Payload ID: 14160
  Gene Symbol: RAP1GAP
  Gene Name: RAP1 GTPase activating protein
  ENST ID: ENST00000374763
  CDS Start-End: 10-2256
ctatttgagatgattgagaagatgcagggaagcaggatggatgaacaacgctgctccttcccgccgcccctcaaaacagaggaggactacattccatacccgagcgtgcacgaggtcttggggcgagaaggacccttccccctcatcctgctgccccagtttgggggctactggattgagggcaccaaccacgaaatcaccagcatccccgagacagagccactgcagtcgcccacaaccaaggtgaagctcgagtgcaaccccacagcccgcatctaccggaagcactttctcggcaaggagcatttcaattactactcactggacgctgccctcggccaccttgtcttctcactcaagtacgatgtcatcggggaccaagagcacctgcggctgctgctcaggaccaagtgccggacataccatgatgtcatccccatctcctgcctcaccgagttccctaatgttgtccagatggcaaagttggtgtgtgaagacgtcaatgtggatcggttctatcctgtgctctaccccaaggcttcccggctcatcgtcacctttgacgagcatgtcatcagcaataacttcaagtttggcgtcatttatcagaagcttgggcagacctccgaggaagaactcttcagcaccaatgaggaaagtcccgctttcgtggagttccttgaatttcttggccagaaggtcaaactgcaggactttaaggggttccgaggaggcctggacgtgacccacgggcagacggggaccgaatctgtgtactgcaacttccgcaacaaggagatcatgtttcacgtgtccaccaagctgccatacacggaaggggacgcccagcagttgcagcggaagcggcacatcgggaacgacatcgtggctgtggtcttccaggatgagaacactcctttcgtgcccgacatgatcgcgtccaacttcctgcatgcctacgtcgtggtgcaggctgagggcgggggccctgatggccccctctacaaggtctctgtcactgcaagagatgatgtgcccttctttggaccccccctcccggaccccgctgtgttcaggaaggggcctgagttccaggaatttttgctgacaaagctgatcaatgctgaatatgcctgctacaaggcagagaagtttgccaaactggaggagcggacgcgggccgccctcctggagacgctctatgaggaactacacatccacagccagtccatgatgggcttgggcggcgacgaggacaagatggagaatggcagtgggggcggcggcttctttgagtctttcaagcgggtcatccggagccgcagccagtccatggatgccatggggctgagcaacaagaagcccaacaccgtgtccaccagccacagcgggagcttcgcgcccaacaaccccgacctggccaaggcggctggaatatcattgcttattcctgggaaaagtgcgagtagattcggacgccggggcagtgccataggcataggaaccgtggaagaggttgtcgtccgcggggccgccggctctggaggctgcctgcacgcgctgttctctgctcgctctcaggacggaggccatattggggacgttgcccctctgcccccgggacaggccccagggcgtgcgggatggagtggcggcagctccgatggcactcagcacctgctttggggcctgtcactgattgtccctgggaagagccccacgaggaagaagtcgggcccgttcggctcccgccgcagcagcgccattggcatcgagaacatacaggaggtgcaggagaagagggagagccctccggctggtcagaagaccccagacagcgggcacgtctcacaggagcccaagtcggagaactcatccactcagagctccccagagatgcccacgaccaagaacagagcggagaccgcagcgcagagagcagaggcgctcaaggacttctcccgctcctcgtccagtgccagcagcttcgccagcgtggtggaggagacggagggtgtggacggagaggacacaggcctggagagcgtgtcatcctcaggaacaccccacaagcgggactccttcatctatagcacgtggctggaggacagtgtcagcaccactagtgggggcagctccccaggcccctctcgatcaccccacccagacgccggcaagttgggggaccctgcgtgtcccgagatcaagatccagctggaagcatctgagcagcacatgccccagctgggctgttagccgggccaccccctctgaaggtgaaactgagcagatgaggccacagaagcacaaggggaaggtgccgtgtcaagcccaggcagacgagacctctgccctgaagaccaacaccagcccgtgggctgccccctgcctccccaccctccccatggcccacccatctgggctgtctctgcagggcagagccgtccagacctgggatcagggaagctgctggcatcgtccccacccccagcctgggggtctgggctggggcagggattgctcagtggaagcaggactgggggtctggcttgccccctccctgggcctccatcacccctgagcatccctctggactcagagggaacaaggtgggagagagagtttgagacagctccgtgtggagagcttagcccctggaggcagcacaaggaggatgtgatatgtgggggagtgagcactgggttgggagccgggtcctggtttccaatttgggttctgctgtgtgactctgggcaagtcactctccctctctgggcatgtctgctacaaatggacaagattatttcagaggtcactgaagactgtgattacatgcacctgccttagaaggtaggattttcttcccagggacctcctatcaccctaccctgcttcttgaggtccctggagccccaggtgggctgaggggcagggagccggctgtgcccagtatgcctcctggaccctccagttctgccacaggtctgccgatgccctgtccactgcctacacatgacagacaagtaaccccctcatgggggatggggacctacctggctcctcagccagcacccagcttaacccctgccatcccatgctgggccctccaggccaagagtctcagctggccgagagtccaggccttgcctcccccgaccgccatggagggggcagcccggcacagctgctgggagcccttgtgtgtctggtcacactttttaggcgtcacgccaaaggccagcctcctggccccaatacccattttggaagcccctgtggccgtgtggatgtcggtaacagttgtataaaataaattctatttatcgctattgta

SEQ ID NO: 174009 - DNA, 3271 bp, Homo sapiens
  Payload ID: 14160
  Gene Symbol: RAP1GAP
  Gene Name: RAP1 GTPase activating protein
  Uniprot ID: P47736
  ENST ID: ENST00000374765
  CDS Start-End: 202-2193
ggccgcgggcaccagagtgccgagcccaggacgcccccggcccaggcccttggggtggacaagtccttcacttctcgccggagtgtgtggaggagcgatgggcagaaccagcacttccctcaggcactagacctgtcacgagtgaacttagttccctcctatactccttcactctaccctaagaacacagatctatttgagatgattgagaagatgcagggaagcaggatggatgaacaacgctgctccttcccgccgcccctcaaaacagaggaggactacattccatacccgagcgtgcacgaggtcttggggcgagaaggacccttccccctcatcctgctgccccagtttgggggctactggattgagggcaccaaccacgaaatcaccagcatccccgagacagagccactgcagtcgcccacaaccaaggtgaagctcgagtgcaaccccacagcccgcatctaccggaagcactttctcggcaaggagcatttcaattactactcactggacgctgccctcggccaccttgtcttctcactcaagtacgatgtcatcggggaccaagagcacctgcggctgctgctcaggaccaagtgccggacataccatgatgtcatccccatctcctgcctcaccgagttccctaatgttgtccagatggcaaagttggtgtgtgaagacgtcaatgtggatcggttctatcctgtgctctaccccaaggcttcccggctcatcgtcacctttgacgagcatgtcatcagcaataacttcaagtttggcgtcatttatcagaagcttgggcagacctccgaggaagaactcttcagcaccaatgaggaaagtcccgctttcgtggagttccttgaatttcttggccagaaggtcaaactgcaggactttaaggggttccgaggaggcctggacgtgacccacgggcagacggggaccgaatctgtgtactgcaacttccgcaacaaggagatcatgtttcacgtgtccaccaagctgccatacacggaaggggacgcccagcagttgcagcggaagcggcacatcgggaacgacatcgtggctgtggtcttccaggatgagaacactcctttcgtgcccgacatgatcgcgtccaacttcctgcatgcctacgtcgtggtgcaggctgagggcgggggccctgatggccccctctacaaggtctctgtcactgcaagagatgatgtgcccttctttggaccccccctcccggaccccgctgtgttcaggaaggggcctgagttccaggaatttttgctgacaaagctgatcaatgctgaatatgcctgctacaaggcagagaagtttgccaaactggaggagcggacgcgggccgccctcctggagacgctctatgaggaactacacatccacagccagtccatgatgggcttgggcggcgacgaggacaagatggagaatggcagtgggggcggcggcttctttgagtctttcaagcgggtcatccggagccgcagccagtccatggatgccatggggctgagcaacaagaagcccaacaccgtgtccaccagccacagcgggagcttcgcgcccaacaaccccgacctggccaaggcggctggaatatcactgattgtccctgggaagagccccacgaggaagaagtcgggcccgttcggctcccgccgcagcagcgccattggcatcgagaacatacaggaggtgcaggagaagagggagagccctccggctggtcagaagaccccagacagcgggcacgtctcacaggagcccaagtcggagaactcatccactcagagctccccagagatgcccacgaccaagaacagagcggagaccgcagcgcagagagcagaggcgctcaaggacttctcccgctcctcgtccagtgccagcagcttcgccagcgtggtggaggagacggagggtgtggacggagaggacacaggcctggagagcgtgtcatcctcaggaacaccccacaagcgggactccttcatctatagcacgtggctggaggacagtgtcagcaccactagtgggggcagctccccaggcccctctcgatcaccccacccagacgccggcaagttgggggaccctgcgtgtcccgagatcaagatccagctggaagcatctgagcagcacatgccccagctgggctgttagccgggccaccccctctgaaggtgaaactgagcagatgaggccacagaagcacaaggggaaggtgccgtgtcaagcccaggcagacgagacctctgccctgaagaccaacaccagcccgtgggctgccccctgcctccccaccctccccatggcccacccatctgggctgtctctgcagggcagagccgtccagacctgggatcagggaagctgctggcatcgtccccacccccagcctgggggtctgggctggggcagggattgctcagtggaagcaggactgggggtctggcttgccccctccctgggcctccatcacccctgagcatccctctggactcagagggaacaaggtgggagagagagtttgagacagctccgtgtggagagcttagcccctggaggcagcacaaggaggatgtgatatgtgggggagtgagcactgggttgggagccgggtcctggtttccaatttgggttctgctgtgtgactctgggcaagtcactctccctctctgggcatgtctgctacaaatggacaagattatttcagaggtcactgaagactgtgattacatgcacctgccttagaaggtaggattttcttcccagggacctcctatcaccctaccctgcttcttgaggtccctggagccccaggtgggctgaggggcagggagccggctgtgcccagtatgcctcctggaccctccagttctgccacaggtctgccgatgccctgtccactgcctacacatgacagacaagtaaccccctcatgggggatggggacctacctggctcctcagccagcacccagcttaacccctgccatcccatgctgggccctccaggccaagagtctcagctggccgagagtccaggccttgcctcccccgaccgccatggagggggcagcccggcacagctgctgggagcccttgtgtgtctggtcacactttttaggcgtcacgccaaaggccagcctcctggccccaatacccattttggaagcccctgtggccgtgtggatgtcggtaacagttgtataaaataaattctatttatcgctattgta

SEQ ID NO: 174010 - DNA, 429 bp, Homo sapiens
  Payload ID: 14160
  Gene Symbol: RAP1GAP
  Gene Name: RAP1 GTPase activating protein
  ENST ID: ENST00000447293
  CDS Start-End: 323-429
aaggggctcttgagggctcctgcacccaccagaatgtgcagagaagaggtcccaggtgggagccgagagggggctgagggcagatccccaagagagaagtaattggtgtgagagaggatctcaatttcttcgtgtctaaaatggggaaactgcagcgccacttaccctgcctagggtggacaagtccttcacttctcgccggagtgtgtggaggagcgatgggcagaaccagcacttccctcaggcactagacctgtcacgagtgaacttagttccctcctatactccttcactctaccctaagaacacagatctatttgagatgattgagaagatgcagggaagcaggatggatgaacaacgctgctccttcccgccgcccctcaaaacagaggaggactacattccatacccgagcgtgcacgaggt

SEQ ID NO: 174011 - DNA, 3238 bp, Homo sapiens
  Payload ID: 14160
  Gene Symbol: RAP1GAP
  Gene Name: RAP1 GTPase activating protein
  ENST ID: ENST00000471600
  CDS Start-End: 191-1999
gagcggccggaagcgcagcttcaccttcggggcctacggcggggtggacaagtccttcacttctcgccggagtgtgtggaggagcgatgggcagaaccagcacttccctcaggcactagacctgtcacgagtgaacttagttccctcctatactccttcactctaccctaagaacacagatctatttgagatgattgagaagatgcagggaagcaggatggatgaacaacgctgctccttcccgccgcccctcaaaacagaggaggactacattccatacccgagcgtgcacgaggtcttggggcgagaaggacccttccccctcatcctgctgccccagtttgggggctactggattgagggcaccaaccacgaaatcaccagcatccccgagacagagccactgcagtcgcccacaaccaaggtgaagctcgagtgcaaccccacagcccgcatctaccggaagcactttctcggcaaggagcatttcaattactactcactggacgctgccctcggccaccttgtcttctcactcaagtacgatgtcatcggggaccaagagcacctgcggctgctgctcaggaccaagtgccggacataccatgatgtcatccccatctcctgcctcaccgagttccctaatgttgtccagatggcaaagttggtgtgtgaagacgtcaatgtggatcggttctatcctgtgctctaccccaaggcttcccggctcatcgtcacctttgacgagcatgtcatcagcaataacttcaagtttggcgtcatttatcagaagcttgggcagacctccgaggaagaactcttcagcaccaatgaggaaagtcccgctttcgtggagttccttgaatttcttggccagaaggtcaaactgcaggactttaaggggttccgaggaggcctggacgtgacccacgggcagacggggaccgaatctgtgtactgcaacttccgcaacaaggagatcatgtttcacgtgtccaccaagctgccatacacggaaggggacgcccagcagttgcagcggaagcggcacatcgggaacgacatcgtggctgtggtcttccaggatgagaacactcctttcgtgcccgacatgatcgcgtccaacttcctgcatgcctacgtcgtggtgcaggctgagggcgggggccctgatggccccctctacaaggtctctgtcactgcaagagatgatgtgcccttctttggaccccccctcccggaccccgctgtgttcaggaaggggcctgagttccaggaatttttgctgacaaagctgatcaatgctgaatatgcctgctacaaggcagagaagtttgccaaactggaggagcggacgcgggccgccctcctggagacgctctatgaggaactacacatccacagccagtccatgatgggcttgggcggcgacgaggacaagatggagaatggcagtgggggcggcggcttctttgagtctttcaagcgggtcatccggagccgcagccagtccatggatgccatggggctgagcaacaagaagcccaacaccgtgtccaccagccacagcgggagcttcgcgcccaacaaccccgacctggccaaggcggctggaatatcactgattgtccctgggaagagccccacgaggaagaagtcgggcccgttcggctcccgccgcagcagcgccattggcatcgagaacatacaggaggtgcaggagaagagggagagccctccggctggtcagaagaccccagacagcgggcacgtctcacaggagcccaagtcggagaactcatccactcagagctccccagagatgcccacgaccaagaacagagcggagaccgcagcgcagagagcagaggcgctcaaggacttctcccgctcctcgtccagtgccagcagcttcgccagcgtggtggaggagacggagggtgtggacggagaggacacaggcctgcacgtggctggaggacagtgtcagcaccactagtgggggcagctccccagtgaggtggctccctcctgcccccctccccaggcccctctcgatcaccccacccagacgccggcaagttgggggaccctgcgtgtcccgagatcaagatccagctggaagcatctgagcagcacatgccccagctgggctgttagccgggccaccccctctgaaggtgaaactgagcagatgaggccacagaagcacaaggggaaggtgccgtgtcaagcccaggcagacgagacctctgccctgaagaccaacaccagcccgtgggctgccccctgcctccccaccctccccatggcccacccatctgggctgtctctgcagggcagagccgtccagacctgggatcagggaagctgctggcatcgtccccacccccagcctgggggtctgggctggggcagggattgctcagtggaagcaggactgggggtctggcttgccccctccctgggcctccatcacccctgagcatccctctggactcagagggaacaaggtgggagagagagtttgagacagctccgtgtggagagcttagcccctggaggcagcacaaggaggatgtgatatgtgggggagtgagcactgggttgggagccgggtcctggtttccaatttgggttctgctgtgtgactctgggcaagtcactctccctctctgggcatgtctgctacaaatggacaagattatttcagaggtcactgaagactgtgattacatgcacctgccttagaaggtaggattttcttcccagggacctcctatcaccctaccctgcttcttgaggtccctggagccccaggtgggctgaggggcagggagccggctgtgcccagtatgcctcctggaccctccagttctgccacaggtctgccgatgccctgtccactgcctacacatgacagacaagtaaccccctcatgggggatggggacctacctggctcctcagccagcacccagcttaacccctgccatcccatgctgggccctccaggccaagagtctcagctggccgagagtccaggccttgcctcccccgaccgccatggagggggcagcccggcacagctgctgggagcccttgtgtgtctggtcacactttttaggcgtcacgccaaaggccagcctcctggccccaatacccattttggaagcccctgtggccgtgtggatgtcggtaacagttgtataaaataaattctatttatcgctattgta

SEQ ID NO: 174012 - DNA, 2489 bp, Homo sapiens
  Payload ID: 14160
  Gene Symbol: RAP1GAP
  Gene Name: RAP1 GTPase activating protein
  Uniprot ID: P47736
  ENST ID: ENST00000495204
  CDS Start-End: 15-2198
gcggcggcggcaccatgagcggccggaagcgcagcttcaccttcggggcctacggcggggtggacaagtccttcacttctcgccggagtgtgtggaggagcgatgggcagaaccagcacttccctcaggcactagacctgtcacgagtgaacttagttccctcctatactccttcactctaccctaagaacacagatctatttgagatgattgagaagatgcagggaagcaggatggatgaacaacgctgctccttcccgccgcccctcaaaacagaggaggactacattccatacccgagcgtgcacgaggtcttggggcgagaaggacccttccccctcatcctgctgccccagtttgggggctactggattgagggcaccaaccacgaaatcaccagcatccccgagacagagccactgcagtcgcccacaaccaaggtgaagctcgagtgcaaccccacagcccgcatctaccggaagcactttctcggcaaggagcatttcaattactactcactggacgctgccctcggccaccttgtcttctcactcaagtacgatgtcatcggggaccaagagcacctgcggctgctgctcaggaccaagtgccggacataccatgatgtcatccccatctcctgcctcaccgagttccctaatgttgtccagatggcaaagttggtgtgtgaagacgtcaatgtggatcggttctatcctgtgctctaccccaaggcttcccggctcatcgtcacctttgacgagcatgtcatcagcaataacttcaagtttggcgtcatttatcagaagcttgggcagacctccgaggaagaactcttcagcaccaatgaggaaagtcccgctttcgtggagttccttgaatttcttggccagaaggtcaaactgcaggactttaaggggttccgaggaggcctggacgtgacccacgggcagacggggaccgaatctgtgtactgcaacttccgcaacaaggagatcatgtttcacgtgtccaccaagctgccatacacggaaggggacgcccagcagttgcagcggaagcggcacatcgggaacgacatcgtggctgtggtcttccaggatgagaacactcctttcgtgcccgacatgatcgcgtccaacttcctgcatgcctacgtcgtggtgcaggctgagggcgggggccctgatggccccctctacaaggtctctgtcactgcaagagatgatgtgcccttctttggaccccccctcccggaccccgctgtgttcaggaaggggcctgagttccaggaatttttgctgacaaagctgatcaatgctgaatatgcctgctacaaggcagagaagtttgccaaactggaggagcggacgcgggccgccctcctggagacgctctatgaggaactacacatccacagccagtccatgatgggcttgggcggcgacgaggacaagatggagaatggcagtgggggcggcggcttctttgagtctttcaagcgggtcatccggagccgcagccagtccatggatgccatggggctgagcaacaagaagcccaacaccgtgtccaccagccacagcgggagcttcgcgcccaacaaccccgacctggccaaggcggctggaatatcactgattgtccctgggaagagccccacgaggaagaagtcgggcccgttcggctcccgccgcagcagcgccattggcatcgagaacatacaggaggtgcaggagaagagggagagccctccggctggtcagaagaccccagacagcgggcacgtctcacaggagcccaagtcggagaactcatccactcagagctccccagagatgcccacgaccaagaacagagcggagaccgcagcgcagagagcagaggcgctcaaggacttctcccgctcctcgtccagtgccagcagcttcgccagcgtggtggaggagacggagggtgtggacggagaggacacaggcctggagagcgtgtcatcctcaggaacaccccacaagcgggactccttcatctatagcacgtggctggaggacagtgtcagcaccactagtgggggcagctccccaggcccctctcgatcaccccacccagacgccggcaagttgggggaccctgcgtgtcccgagatcaagatccagctggaagcatctgagcagcacatgccccagctgggctgttagccgggccaccccctctgaaggtgaaactgagcagatgaggccacagaagcacaaggggaaggtgccgtgtcaagcccaggcagacgagacctctgccctgaagaccaacaccagcccgtgggctgccccctgcctccccaccctccccatggcccacccatctgggctgtctctgcagggcagagccgtccagacctgggatcagggaagctgctggcatcgtccccacccccagcctgggggtctgggctggggcagggattgctcagtggaagcaggactgggggtctg

SEQ ID NO: 174013 - DNA, 3426 bp, Homo sapiens
  Payload ID: 14160
  Gene Symbol: RAP1GAP
  Gene Name: RAP1 GTPase activating protein
  Uniprot ID: P47736
  ENST ID: ENST00000542643
  CDS Start-End: 304-2349
cgggcaccagagtgccgagcccaggacgcccccggcccaggcccttgggttaatacctctgccaaccgaggccaccctccctcggacccccattcggaggaagcagacccaagttcgaattctgacattgccactgagcagccgtacaacttttgggtggacaagtccttcacttctcgccggagtgtgtggaggagcgatgggcagaaccagcacttccctcaggcactagacctgtcacgagtgaacttagttccctcctatactccttcactctaccctaagaacacagatctatttgagatgattgagaagatgcagggaagcaggatggatgaacaacgctgctccttcccgccgcccctcaaaacagaggaggactacattccatacccgagcgtgcacgaggtcttggggcgagaaggacccttccccctcatcctgctgccccagtttgggggctactggattgagggcaccaaccacgaaatcaccagcatccccgagacagagccactgcagtcgcccacaaccaaggtgaagctcgagtgcaaccccacagcccgcatctaccggaagcactttctcggcaaggagcatttcaattactactcactggacgctgccctcggccaccttgtcttctcactcaagtacgatgtcatcggggaccaagagcacctgcggctgctgctcaggaccaagtgccggacataccatgatgtcatccccatctcctgcctcaccgagttccctaatgttgtccagatggcaaagttggtgtgtgaagacgtcaatgtggatcggttctatcctgtgctctaccccaaggcttcccggctcatcgtcacctttgacgagcatgtcatcagcaataacttcaagtttggcgtcatttatcagaagcttgggcagacctccgaggaagaactcttcagcaccaatgaggaaagtcccgctttcgtggagttccttgaatttcttggccagaaggtcaaactgcaggactttaaggggttccgaggaggcctggacgtgacccacgggcagacggggaccgaatctgtgtactgcaacttccgcaacaaggagatcatgtttcacgtgtccaccaagctgccatacacggaaggggacgcccagcagttgcagcggaagcggcacatcgggaacgacatcgtggctgtggtcttccaggatgagaacactcctttcgtgcccgacatgatcgcgtccaacttcctgcatgcctacgtcgtggtgcaggctgagggcgggggccctgatggccccctctacaaggtctctgtcactgcaagagatgatgtgcccttctttggaccccccctcccggaccccgctgtgttcaggaaggggcctgagttccaggaatttttgctgacaaagctgatcaatgctgaatatgcctgctacaaggcagagaagtttgccaaactggaggagcggacgcgggccgccctcctggagacgctctatgaggaactacacatccacagccagtccatgatgggcttgggcggcgacgaggacaagatggagaatggcagtgggggcggcggcttctttgagtctttcaagcgggtcatccggagccgcagccagtccatggatgccatggggctgagcaacaagaagcccaacaccgtgtccaccagccacagcgggagcttcgcgcccaacaaccccgacctggccaaggcggctggaatatcattgcttattcctgggaaaagtgcgagtagattcggacgccggggcagtgccataggcataggaaccgtggaagagtcactgattgtccctgggaagagccccacgaggaagaagtcgggcccgttcggctcccgccgcagcagcgccattggcatcgagaacatacaggaggtgcaggagaagagggagagccctccggctggtcagaagaccccagacagcgggcacgtctcacaggagcccaagtcggagaactcatccactcagagctccccagagatgcccacgaccaagaacagagcggagaccgcagcgcagagagcagaggcgctcaaggacttctcccgctcctcgtccagtgccagcagcttcgccagcgtggtggaggagacggagggtgtggacggagaggacacaggcctggagagcgtgtcatcctcaggaacaccccacaagcgggactccttcatctatagcacgtggctggaggacagtgtcagcaccactagtgggggcagctccccagacgccggcaagttgggggaccctgcgtgtcccgagatcaagatccagctggaagcatctgagcagcacatgccccagctgggctgttagccgggccaccccctctgaaggtgaaactgagcagatgaggccacagaagcacaaggggaaggtgccgtgtcaagcccaggcagacgagacctctgccctgaagaccaacaccagcccgtgggctgccccctgcctccccaccctccccatggcccacccatctgggctgtctctgcagggcagagccgtccagacctgggatcagggaagctgctggcatcgtccccacccccagcctgggggtctgggctggggcagggattgctcagtggaagcaggactgggggtctggcttgccccctccctgggcctccatcacccctgagcatccctctggactcagagggaacaaggtgggagagagagtttgagacagctccgtgtggagagcttagcccctggaggcagcacaaggaggatgtgatatgtgggggagtgagcactgggttgggagccgggtcctggtttccaatttgggttctgctgtgtgactctgggcaagtcactctccctctctgggcatgtctgctacaaatggacaagattatttcagaggtcactgaagactgtgattacatgcacctgccttagaaggtaggattttcttcccagggacctcctatcaccctaccctgcttcttgaggtccctggagccccaggtgggctgaggggcagggagccggctgtgcccagtatgcctcctggaccctccagttctgccacaggtctgccgatgccctgtccactgcctacacatgacagacaagtaaccccctcatgggggatggggacctacctggctcctcagccagcacccagcttaacccctgccatcccatgctgggccctccaggccaagagtctcagctggccgagagtccaggccttgcctcccccgaccgccatggagggggcagcccggcacagctgctgggagcccttgtgtgtctggtcacactttttaggcgtcacgccaaaggccagcctcctggccccaatacccattttggaagcccctgtggccgtgtggatgtcggtaacagttgtataaaataaattctatttatcgctattgt

SEQ ID NO: 174014 - DNA, 6661 bp, Homo sapiens
  Payload ID: 14161
  Gene Symbol: RAP1GAP2
  Gene Name: RAP1 GTPase activating protein 2
  Uniprot ID: Q684P5
  ENST ID: ENST00000254695
  CDS Start-End: 91-2283
actgaccccgctgtaccacggccctcttgcggacagccccggggacgtcgttgggacatcgctgggaccccgggctctgcagccacaaccatgtttggccggaagcgcagtgtctcctttgggggcttcggatggatcgacaagaccatgctggcaagtctgaaggtcaagaagcaggagctggccaacagctcggatgcgaccctcccagaccggccgctctcccctcctctcacggcacctcccaccatgaagtcgtcggagttctttgagatgctggagaaaatgcaggggatcaagcttgaagagcagaagccgggaccccagaagaacaaggacgactatatcccataccccagcatcgacgaggttgtggagaagggaggcccgtaccctcaggtcatcctgccacagtttgggggctattggatcgaggacccggagaacgtgggcaccccaacatcgctggggagcagcatctgtgaggaggaggaagaggacaacctcagccccaacacatttggctacaagctcgagtgcaagggtgaagccagggcctaccggaggcacttcctggggaaggatcatctaaacttttactgtaccggcagcagcctggggaacttgatcctgtccgtcaagtgcgaggaagcagaggggatcgagtacctccgggtcatccttaggtccaaactgaagacggtacatgagcggatccccttggctggactgagcaagcttcccagtgtccctcagattgcaaaggctttctgtgatgatgcagtgggactgagattcaatcctgtcctgtaccccaaggcctcccaaatgattgtgtcctatgatgagcatgaagtcaacaacacattcaaattcggagtcatttatcaaaaagccaggcagaccctggaggaggagctatttgggaacaatgaggagagcccagcttttaaggagttcttggacctgctgggggacacgatcacactgcaggatttcaaaggtttccgaggaggcctggacgtgacccacggacagacaggggtggaatcagtgtacacaacattccgggacagggagatcatgtttcacgtttccacaaagctgccatttaccgacggagacgcccagcagctccagagaaagagacacattggaaatgacatcgtggccatcatcttccaagaggaaaacacgccgtttgtcccagacatgatagcctccaatttcttacatgcctacatcgtcgtgcaggtcgagaccccaggcacagagaccccatcctacaaggtctctgtcactgcgcgggaagatgtgcccacctttggtccacctctgcccagtccccccgttttccagaagggcccggaattcagggagtttctgctcaccaagctcaccaatgccgagaacgcctgctgcaagtcggacaagtttgcaaagctggaggaccggaccagggctgccctcctggacaaccttcacgatgagctccacgcccacacacaggccatgctgggactgggcccagaggaggacaagtttgagaatggaggccacggggggttcctggagtcttttaagagggccatccgcgtacgcagccactccatggagaccatggtgggcggccagaagaagtcgcacagtgggggcatccctggcagcctcagcgggggcatctcccacaacagcatggaggtcaccaagaccaccttctcgcctccagtggtggcggcaacggtgaagaaccagtcacggagtcccatcaagcgacgctcggggctcttcccccgcctgcacacgggctcagaaggccagggcgacagccgggcacgatgtgacagcacatccagcacacccaagaccccagatggtggacactcctctcaggagataaagtctgagacctcatccaatcccagctctccggaaatctgccccaacaaggagaagcccttcatgaagttgaaggaaaacggccgtgccatctcccgctcctcctccagcaccagcagcgtcagcagcactgcaggggagggcgaggccatggaggagggcgacagtgggggcagccagccgtccacgacctcacccttcaagcaggaggtgtttgtctacagcccgtccccgagcagcgagagccccagcctgggggcagctgccaccccgatcatcatgagccggagtcccacagatgccaaaagcagaaactccccgagatcgaacctgaaattccgctttgacaagctcagccatgccagctctggtgcgggtcactaatgtgaaagtggagtccttcgcctgtccaagggaatcccctcttctgtcctggaaaaggctcctgtaccagcagtttgggagtgccgtccacgaccctgacagtcccagccctgctgccccatggccacgtgcccacagatgtgctgttggtccaggtgtcccagtctggccacagccctgcctccgccctcacctacatgccctcccagcccctcccatctctggacgaggcctccttcctcaggttcctcctgctcctgacctcccagtgtgatgtccgggtcctttatcatcctattcatcctggagaggaaaagtgtcgggcaaagggggatctggggggagctcagcagtgactggggagctggtctgcctcagagacagagtagggggtgggagcagagcctcggtgagggtcttggccacagggcagtgccttcctgaacgtggcaggctttactaccaggaacgcactcggtggtggaggccccatgttcccaggagccaagattcgtagcatccttgaggccatcctgataaaattcggcgctattgcccccgtagctctggagctctaaaccgtctatctgcttctgtgctgaacgcctttcccatctgctgacgtaggcccagggctgccctgcccctgctgccagtgtaccgtgagcggggctccagccagttcaagctcagagccagagctggacgggccagaactgcgctgcacacttcctggactgaggcggggactttgggtcccacccggtttctcctgattatggctgctgtggggtgaggggagggaggggcagccccgaggcagtctcttccctttgagaagatattttcccacaaaggggtgggaagccaggagtgagaaggaattcagggagagcaaaggagccagtgctgagatgctgctgtgttggttgaggaaaacctcgggcctgagggccaggccggagcccaggtctctgctgacaatgggggttcaaggaagacgtcgttatctcccctccccacttactcgaggagagaggtgagggggggatgacttgcgggttctgatcaggcccctgggtggggaaggggcacagtgtccctcagcagcttacgcccctggagtcttggggggcccagcctggccctggggccttttccagctactgtgcccttgggcagctgcgtctggggctcaaccccccaatcctgttcccctctccagctgcgggtctgtaggcagctgtcacatctgaagggtttctgcaacctggaccccatctgggtgtgggtcagaccctgtgacccacatgccacccccaccctccacagagcccccttgctgggacagccagctcacctccaaggacatcccctcctggcttctcccccttccgagtctgcagcgccgtgggcttctctgccgatgggcccgggttggggttaaggtgggcatcctccaggtacaacgagcctgaagagcccctttcagtgcagacggggctgcagagtgacactggctgggcacctgccccacgaccaatgacaaggatttccagctgaatgctttattcccatagggatctggacctgtgcccaagatataaatactacactttttttttttttttttaactgacattgtgaaattctccctatagcttttgccattcaagcaacattgtgatctttcttccccgccacgtgtgtgggaatgattgagtcctgtttgcaagctggagaggagctctccctttgctagtactttctctaaagtactagtctagtaaaatttattcttgttagaaggtcaacaaaatatctgtttagcttttatgaagagtcaccgtagcagcccccacggctggaaagaggcctgtacgttctggacgcgttttgttggctgggcttctggaggcactggcaaggtcaaactgcatttctttaagaacagttgcaggatctggctcgcctctgtgggaagccggcattacaggtgcttggtggatgggccgtgtcacattgccatctggggtcctttggggtttccaggttgtcaccatgctgtcccatttgggaatcccatacctgcctgtccccactgcgctggctgacccttgctgcctgctgcctcttgggagggctttgtccctgcctctgagctggtgggcaggatggctgggtggcccccagagaagcacagacctgagatggggtctccatgcccggtttgctgttggaatgatctgaacaggaccccaaatgcctcttccctctggtcatgcctcactatctctaggagctccatcctgtggcttccagagtgtgcacttccagcccacccgggcagtgctgagagggaggaggagaacaaggatggcccagcctcccctccctcccctagaccacggggcgggcagctcgggttcctggagggctgtttcccccacgctgtccctacatctgctctgatctaaaatgtctttccttttatgctgcgcccagtcttggggctcaaagatttgcccaaacctcattggccctcgtgactaggctcatctagatggtgctcacgctggtgtttgaggcatttccactgtgatctccacgaggggatgttttccgggacacatctctggctctgggaactgcctgactcactgaagaaactacttttcaggcactgtagggtcacccatatgcctccagctcagttgacgcttaaaaacaggtgcagaaaagctcgcgatggaaggtcttaatgagagtgtctgtctatgccaatcatgtaaaatgacgtttcttgaaaaagattcagtggttcagctttgtcagcatcatctcaacacaagcctgctggctctttttagcatctcatccaaccatgtcatcgtccagatgagaaatcttagcccaggtgaggggagtaacttgcttgaggtcacacagctggctgttggcaaagctgggattagaaccctcaacccagggtcccttcctctgcagcgcctacatggttggttgaataagtggctgcgtttcctggggccctgggttttggggaagccagttagctgctgctttggcactggcatggaggtgagcagtcaaggatgctggtgaggctgcagtttctgctctttttcatcaggggggatagtctctaggatttttcagtgaggacccttgggctttggatgcagcttgaaccaagaaaacgaggagggaaagggattcagtgaactattcctcagtgggatcggttcttcagctcctgatgggggctgtgtaatgggggcagaggccagggaaaaagatgctgttcacccaccctcagcttcccttttcctaaattaagaggaaaagtggtcaaagaaaaactcttcatttctccctgattcttaaacgaaggtggttaatagaaactcaggctcccgtgacaaggcaggacaagagcctgtttcgctttcctccctgaccctgccaggtgccaactcaaacactacctttctcattggtttctaagtcagtagagacagatctgttttaagcagttgggggttcgagtagatctcatgggtacaggaggccagcagggaccaggccagtcagccatgctcaggacccctcggctcctcccccagcctctagctaccctgtatcgaggcaaggggaggccagtaaagtttgccaagcctgatcctgcagcctggtggggctggctggggtattcttttaccaaactctgttttaccgccagccccttgtacaccccaatcccatgtctccctcccttcagctggaccgtgtgcccctttgggaggaagaagacaagccccactagggccaagggcagcagagccctgccgagtgagaggctgtggggcagcggctctgtcctgtgccttaccagccctggggaggggggcatttggctggaagactggaatttaattgccatcgtctttgattttgtgacatttctgcttggaagtgtgaactacccccccccccccgcttcctgctccttagcatgcgtgcagctctctcctgttttgggtgttccccttggacactccagctcggggactgctggcgtgtgaatgtgcagattcccctgtgtggtcgaacctaagaactgtggcttggaagtgatgctccatgtgacgacgactttgctttctttcctcttagtgaggaggtgattcgtagatcccaactgcctatgtaatgtaaataatgtacatttaatttattgctatggtagcacattgtatttgttaatgtacaaaacaaattctaaaaggttgacaaatgtatattttgttgcttaaatgtgtctttgcagaaattgacaataaataacatattttgtgtc

SEQ ID NO: 174015 - DNA, 6616 bp, Homo sapiens
  Payload ID: 14161
  Gene Symbol: RAP1GAP2
  Gene Name: RAP1 GTPase activating protein 2
  Uniprot ID: Q684P5
  ENST ID: ENST00000366401
  CDS Start-End: 91-2238
actgaccccgctgtaccacggccctcttgcggacagccccggggacgtcgttgggacatcgctgggaccccgggctctgcagccacaaccatgtttggccggaagcgcagtgtctcctttgggggcttcggatggatcgacaagaccatgctggcaagtctgaaggtcaagaagcaggagctggccaacagctcggatgcgaccctcccagaccggccgctctcccctcctctcacggcacctcccaccatgaagtcgtcggagttctttgagatgctggagaaaatgcaggacgactatatcccataccccagcatcgacgaggttgtggagaagggaggcccgtaccctcaggtcatcctgccacagtttgggggctattggatcgaggacccggagaacgtgggcaccccaacatcgctggggagcagcatctgtgaggaggaggaagaggacaacctcagccccaacacatttggctacaagctcgagtgcaagggtgaagccagggcctaccggaggcacttcctggggaaggatcatctaaacttttactgtaccggcagcagcctggggaacttgatcctgtccgtcaagtgcgaggaagcagaggggatcgagtacctccgggtcatccttaggtccaaactgaagacggtacatgagcggatccccttggctggactgagcaagcttcccagtgtccctcagattgcaaaggctttctgtgatgatgcagtgggactgagattcaatcctgtcctgtaccccaaggcctcccaaatgattgtgtcctatgatgagcatgaagtcaacaacacattcaaattcggagtcatttatcaaaaagccaggcagaccctggaggaggagctatttgggaacaatgaggagagcccagcttttaaggagttcttggacctgctgggggacacgatcacactgcaggatttcaaaggtttccgaggaggcctggacgtgacccacggacagacaggggtggaatcagtgtacacaacattccgggacagggagatcatgtttcacgtttccacaaagctgccatttaccgacggagacgcccagcagctccagagaaagagacacattggaaatgacatcgtggccatcatcttccaagaggaaaacacgccgtttgtcccagacatgatagcctccaatttcttacatgcctacatcgtcgtgcaggtcgagaccccaggcacagagaccccatcctacaaggtctctgtcactgcgcgggaagatgtgcccacctttggtccacctctgcccagtccccccgttttccagaagggcccggaattcagggagtttctgctcaccaagctcaccaatgccgagaacgcctgctgcaagtcggacaagtttgcaaagctggaggaccggaccagggctgccctcctggacaaccttcacgatgagctccacgcccacacacaggccatgctgggactgggcccagaggaggacaagtttgagaatggaggccacggggggttcctggagtcttttaagagggccatccgcgtacgcagccactccatggagaccatggtgggcggccagaagaagtcgcacagtgggggcatccctggcagcctcagcgggggcatctcccacaacagcatggaggtcaccaagaccaccttctcgcctccagtggtggcggcaacggtgaagaaccagtcacggagtcccatcaagcgacgctcggggctcttcccccgcctgcacacgggctcagaaggccagggcgacagccgggcacgatgtgacagcacatccagcacacccaagaccccagatggtggacactcctctcaggagataaagtctgagacctcatccaatcccagctctccggaaatctgccccaacaaggagaagcccttcatgaagttgaaggaaaacggccgtgccatctcccgctcctcctccagcaccagcagcgtcagcagcactgcaggggagggcgaggccatggaggagggcgacagtgggggcagccagccgtccacgacctcacccttcaagcaggaggtgtttgtctacagcccgtccccgagcagcgagagccccagcctgggggcagctgccaccccgatcatcatgagccggagtcccacagatgccaaaagcagaaactccccgagatcgaacctgaaattccgctttgacaagctcagccatgccagctctggtgcgggtcactaatgtgaaagtggagtccttcgcctgtccaagggaatcccctcttctgtcctggaaaaggctcctgtaccagcagtttgggagtgccgtccacgaccctgacagtcccagccctgctgccccatggccacgtgcccacagatgtgctgttggtccaggtgtcccagtctggccacagccctgcctccgccctcacctacatgccctcccagcccctcccatctctggacgaggcctccttcctcaggttcctcctgctcctgacctcccagtgtgatgtccgggtcctttatcatcctattcatcctggagaggaaaagtgtcgggcaaagggggatctggggggagctcagcagtgactggggagctggtctgcctcagagacagagtagggggtgggagcagagcctcggtgagggtcttggccacagggcagtgccttcctgaacgtggcaggctttactaccaggaacgcactcggtggtggaggccccatgttcccaggagccaagattcgtagcatccttgaggccatcctgataaaattcggcgctattgcccccgtagctctggagctctaaaccgtctatctgcttctgtgctgaacgcctttcccatctgctgacgtaggcccagggctgccctgcccctgctgccagtgtaccgtgagcggggctccagccagttcaagctcagagccagagctggacgggccagaactgcgctgcacacttcctggactgaggcggggactttgggtcccacccggtttctcctgattatggctgctgtggggtgaggggagggaggggcagccccgaggcagtctcttccctttgagaagatattttcccacaaaggggtgggaagccaggagtgagaaggaattcagggagagcaaaggagccagtgctgagatgctgctgtgttggttgaggaaaacctcgggcctgagggccaggccggagcccaggtctctgctgacaatgggggttcaaggaagacgtcgttatctcccctccccacttactcgaggagagaggtgagggggggatgacttgcgggttctgatcaggcccctgggtggggaaggggcacagtgtccctcagcagcttacgcccctggagtcttggggggcccagcctggccctggggccttttccagctactgtgcccttgggcagctgcgtctggggctcaaccccccaatcctgttcccctctccagctgcgggtctgtaggcagctgtcacatctgaagggtttctgcaacctggaccccatctgggtgtgggtcagaccctgtgacccacatgccacccccaccctccacagagcccccttgctgggacagccagctcacctccaaggacatcccctcctggcttctcccccttccgagtctgcagcgccgtgggcttctctgccgatgggcccgggttggggttaaggtgggcatcctccaggtacaacgagcctgaagagcccctttcagtgcagacggggctgcagagtgacactggctgggcacctgccccacgaccaatgacaaggatttccagctgaatgctttattcccatagggatctggacctgtgcccaagatataaatactacactttttttttttttttttaactgacattgtgaaattctccctatagcttttgccattcaagcaacattgtgatctttcttccccgccacgtgtgtgggaatgattgagtcctgtttgcaagctggagaggagctctccctttgctagtactttctctaaagtactagtctagtaaaatttattcttgttagaaggtcaacaaaatatctgtttagcttttatgaagagtcaccgtagcagcccccacggctggaaagaggcctgtacgttctggacgcgttttgttggctgggcttctggaggcactggcaaggtcaaactgcatttctttaagaacagttgcaggatctggctcgcctctgtgggaagccggcattacaggtgcttggtggatgggccgtgtcacattgccatctggggtcctttggggtttccaggttgtcaccatgctgtcccatttgggaatcccatacctgcctgtccccactgcgctggctgacccttgctgcctgctgcctcttgggagggctttgtccctgcctctgagctggtgggcaggatggctgggtggcccccagagaagcacagacctgagatggggtctccatgcccggtttgctgttggaatgatctgaacaggaccccaaatgcctcttccctctggtcatgcctcactatctctaggagctccatcctgtggcttccagagtgtgcacttccagcccacccgggcagtgctgagagggaggaggagaacaaggatggcccagcctcccctccctcccctagaccacggggcgggcagctcgggttcctggagggctgtttcccccacgctgtccctacatctgctctgatctaaaatgtctttccttttatgctgcgcccagtcttggggctcaaagatttgcccaaacctcattggccctcgtgactaggctcatctagatggtgctcacgctggtgtttgaggcatttccactgtgatctccacgaggggatgttttccgggacacatctctggctctgggaactgcctgactcactgaagaaactacttttcaggcactgtagggtcacccatatgcctccagctcagttgacgcttaaaaacaggtgcagaaaagctcgcgatggaaggtcttaatgagagtgtctgtctatgccaatcatgtaaaatgacgtttcttgaaaaagattcagtggttcagctttgtcagcatcatctcaacacaagcctgctggctctttttagcatctcatccaaccatgtcatcgtccagatgagaaatcttagcccaggtgaggggagtaacttgcttgaggtcacacagctggctgttggcaaagctgggattagaaccctcaacccagggtcccttcctctgcagcgcctacatggttggttgaataagtggctgcgtttcctggggccctgggttttggggaagccagttagctgctgctttggcactggcatggaggtgagcagtcaaggatgctggtgaggctgcagtttctgctctttttcatcaggggggatagtctctaggatttttcagtgaggacccttgggctttggatgcagcttgaaccaagaaaacgaggagggaaagggattcagtgaactattcctcagtgggatcggttcttcagctcctgatgggggctgtgtaatgggggcagaggccagggaaaaagatgctgttcacccaccctcagcttcccttttcctaaattaagaggaaaagtggtcaaagaaaaactcttcatttctccctgattcttaaacgaaggtggttaatagaaactcaggctcccgtgacaaggcaggacaagagcctgtttcgctttcctccctgaccctgccaggtgccaactcaaacactacctttctcattggtttctaagtcagtagagacagatctgttttaagcagttgggggttcgagtagatctcatgggtacaggaggccagcagggaccaggccagtcagccatgctcaggacccctcggctcctcccccagcctctagctaccctgtatcgaggcaaggggaggccagtaaagtttgccaagcctgatcctgcagcctggtggggctggctggggtattcttttaccaaactctgttttaccgccagccccttgtacaccccaatcccatgtctccctcccttcagctggaccgtgtgcccctttgggaggaagaagacaagccccactagggccaagggcagcagagccctgccgagtgagaggctgtggggcagcggctctgtcctgtgccttaccagccctggggaggggggcatttggctggaagactggaatttaattgccatcgtctttgattttgtgacatttctgcttggaagtgtgaactacccccccccccccgcttcctgctccttagcatgcgtgcagctctctcctgttttgggtgttccccttggacactccagctcggggactgctggcgtgtgaatgtgcagattcccctgtgtggtcgaacctaagaactgtggcttggaagtgatgctccatgtgacgacgactttgctttctttcctcttagtgaggaggtgattcgtagatcccaactgcctatgtaatgtaaataatgtacatttaatttattgctatggtagcacattgtatttgttaatgtacaaaacaaattctaaaaggttgacaaatgtatattttgttgcttaaatgtgtctttgcagaaattgacaataaataacatattttgtgtc

SEQ ID NO: 174016 - DNA, 3218 bp, Homo sapiens
  Payload ID: 14161
  Gene Symbol: RAP1GAP2
  Gene Name: RAP1 GTPase activating protein 2
  Uniprot ID: Q684P5
  ENST ID: ENST00000540393
  CDS Start-End: 237-2372
gcagacagacatcggcacgtatggacggcgcgagccggtactgcgttccggaggagccatccggcgtcacaggctgtgctggggaggtggggtgaccgtcctcagaaacccccgcgggcggggcgctgcacacacgtccacctatagggtgtgtgtgcgtgcgtgaggtgtgcagcccctgtcaggatctggcgagagaagctgaccgggatggaggtcagaggatcgacaagaccatgctggcaagtctgaaggtcaagaagcaggagctggccaacagctcggatgcgaccctcccagaccggccgctctcccctcctctcacggcacctcccaccatgaagtcgtcggagttctttgagatgctggagaaaatgcaggggatcaagcttgaagagcagaagccgggaccccagaagaacaaggacgactatatcccataccccagcatcgacgaggttgtggagaagggaggcccgtaccctcaggtcatcctgccacagtttgggggctattggatcgaggacccggagaacgtgggcaccccaacatcgctggggagcagcatctgtgaggaggaggaagaggacaacctcagccccaacacatttggctacaagctcgagtgcaagggtgaagccagggcctaccggaggcacttcctggggaaggatcatctaaacttttactgtaccggcagcagcctggggaacttgatcctgtccgtcaagtgcgaggaagcagaggggatcgagtacctccgggtcatccttaggtccaaactgaagacggtacatgagcggatccccttggctggactgagcaagcttcccagtgtccctcagattgcaaaggctttctgtgatgatgcagtgggactgagattcaatcctgtcctgtaccccaaggcctcccaaatgattgtgtcctatgatgagcatgaagtcaacaacacattcaaattcggagtcatttatcaaaaagccaggcagaccctggaggaggagctatttgggaacaatgaggagagcccagcttttaaggagttcttggacctgctgggggacacgatcacactgcaggatttcaaaggtttccgaggaggcctggacgtgacccacggacagacaggggtggaatcagtgtacacaacattccgggacagggagatcatgtttcacgtttccacaaagctgccatttaccgacggagacgcccagcagctccagagaaagagacacattggaaatgacatcgtggccatcatcttccaagaggaaaacacgccgtttgtcccagacatgatagcctccaatttcttacatgcctacatcgtcgtgcaggtcgagaccccaggcacagagaccccatcctacaaggtctctgtcactgcgcgggaagatgtgcccacctttggtccacctctgcccagtccccccgttttccagaagggcccggaattcagggagtttctgctcaccaagctcaccaatgccgagaacgcctgctgcaagtcggacaagtttgcaaagctggaggaccggaccagggctgccctcctggacaaccttcacgatgagctccacgcccacacacaggccatgctgggactgggcccagaggaggacaagtttgagaatggaggccacggggggttcctggagtcttttaagagggccatccgcgtacgcagccactccatggagaccatggtgggcggccagaagaagtcgcacagtgggggcatccctggcagcctcagcgggggcatctcccacaacagcatggaggtcaccaagaccaccttctcgcctccagtggtggcggcaacggtgaagaaccagtcacggagtcccatcaagcgacgctcggggctcttcccccgcctgcacacgggctcagaaggccagggcgacagccgggcacgatgtgacagcacatccagcacacccaagaccccagatggtggacactcctctcaggagataaagtctgagacctcatccaatcccagctctccggaaatctgccccaacaaggagaagcccttcatgaagttgaaggaaaacggccgtgccatctcccgctcctcctccagcaccagcagcgtcagcagcactgcaggggagggcgaggccatggaggagggcgacagtgggggcagccagccgtccacgacctcacccttcaagcaggaggtgtttgtctacagcccgtccccgagcagcgagagccccagcctgggggcagctgccaccccgatcatcatgagccggagtcccacagatgccaaaagcagaaactccccgagatcgaacctgaaattccgctttgacaagctcagccatgccagctctggtgcgggtcactaatgtgaaagtggagtccttcgcctgtccaagggaatcccctcttctgtcctggaaaaggctcctgtaccagcagtttgggagtgccgtccacgaccctgacagtcccagccctgctgccccatggccacgtgcccacagatgtgctgttggtccaggtgtcccagtctggccacagccctgcctccgccctcacctacatgccctcccagcccctcccatctctggacgaggcctccttcctcaggttcctcctgctcctgacctcccagtgtgatgtccgggtcctttatcatcctattcatcctggagaggaaaagtgtcgggcaaagggggatctggggggagctcagcagtgactggggagctggtctgcctcagagacagagtagggggtgggagcagagcctcggtgagggtcttggccacagggcagtgccttcctgaacgtggcaggctttactaccaggaacgcactcggtggtggaggccccatgttcccaggagccaagattcgtagcatccttgaggccatcctgataaaattcggcgctattgcccccgtagctctggagctctaaaccgtctatctgcttctgtgctgaacgcctttcccatctgctgacgtaggcccagggctgccctgcccctgctgccagtgtaccgtgagcggggctccagccagttcaagctcagagccagagctggacgggccagaactgcgctgcacacttcctggactgaggcggggactttgggtcccacccggtttctcctgattatggctgctgtggggtgaggggagggaggggcagccccgaggcagtctcttccctttgagaagatatt

SEQ ID NO: 174017 - DNA, 3110 bp, Homo sapiens
  Payload ID: 14161
  Gene Symbol: RAP1GAP2
  Gene Name: RAP1 GTPase activating protein 2
  Uniprot ID: Q684P5
  ENST ID: ENST00000542807
  CDS Start-End: 47-2239
acgtcgttgggacatcgctgggaccccgggctctgcagccacaaccatgtttggccggaagcgcagtgtctcctttgggggcttcggatggatcgacaagaccatgctggcaagtctgaaggtcaagaagcaggagctggccaacagctcggatgcgaccctcccagaccggccgctctcccctcctctcacggcacctcccaccatgaagtcgtcggagttctttgagatgctggagaaaatgcaggggatcaagcttgaagagcagaagccgggaccccagaagaacaaggacgactatatcccataccccagcatcgacgaggttgtggagaagggaggcccgtaccctcaggtcatcctgccacagtttgggggctattggatcgaggacccggagaacgtgggcaccccaacatcgctggggagcagcatctgtgaggaggaggaagaggacaacctcagccccaacacatttggctacaagctcgagtgcaagggtgaagccagggcctaccggaggcacttcctggggaaggatcatctaaacttttactgtaccggcagcagcctggggaacttgatcctgtccgtcaagtgcgaggaagcagaggggatcgagtacctccgggtcatccttaggtccaaactgaagacggtacatgagcggatccccttggctggactgagcaagcttcccagtgtccctcagattgcaaaggctttctgtgatgatgcagtgggactgagattcaatcctgtcctgtaccccaaggcctcccaaatgattgtgtcctatgatgagcatgaagtcaacaacacattcaaattcggagtcatttatcaaaaagccaggcagaccctggaggaggagctatttgggaacaatgaggagagcccagcttttaaggagttcttggacctgctgggggacacgatcacactgcaggatttcaaaggtttccgaggaggcctggacgtgacccacggacagacaggggtggaatcagtgtacacaacattccgggacagggagatcatgtttcacgtttccacaaagctgccatttaccgacggagacgcccagcagctccagagaaagagacacattggaaatgacatcgtggccatcatcttccaagaggaaaacacgccgtttgtcccagacatgatagcctccaatttcttacatgcctacatcgtcgtgcaggtcgagaccccaggcacagagaccccatcctacaaggtctctgtcactgcgcgggaagatgtgcccacctttggtccacctctgcccagtccccccgttttccagaagggcccggaattcagggagtttctgctcaccaagctcaccaatgccgagaacgcctgctgcaagtcggacaagtttgcaaagctggaggaccggaccagggctgccctcctggacaaccttcacgatgagctccacgcccacacacaggccatgctgggactgggcccagaggaggacaagtttgagaatggaggccacggggggttcctggagtcttttaagagggccatccgcgtacgcagccactccatggagaccatggtgggcggccagaagaagtcgcacagtgggggcatccctggcagcctcagcgggggcatctcccacaacagcatggaggtcaccaagaccaccttctcgcctccagtggtggcggcaacggtgaagaaccagtcacggagtcccatcaagcgacgctcggggctcttcccccgcctgcacacgggctcagaaggccagggcgacagccgggcacgatgtgacagcacatccagcacacccaagaccccagatggtggacactcctctcaggagataaagtctgagacctcatccaatcccagctctccggaaatctgccccaacaaggagaagcccttcatgaagttgaaggaaaacggccgtgccatctcccgctcctcctccagcaccagcagcgtcagcagcactgcaggggagggcgaggccatggaggagggcgacagtgggggcagccagccgtccacgacctcacccttcaagcaggaggtgtttgtctacagcccgtccccgagcagcgagagccccagcctgggggcagctgccaccccgatcatcatgagccggagtcccacagatgccaaaagcagaaactccccgagatcgaacctgaaattccgctttgacaagctcagccatgccagctctggtgcgggtcactaatgtgaaagtggagtccttcgcctgtccaagggaatcccctcttctgtcctggaaaaggctcctgtaccagcagtttgggagtgccgtccacgaccctgacagtcccagccctgctgccccatggccacgtgcccacagatgtgctgttggtccaggtgtcccagtctggccacagccctgcctccgccctcacctacatgccctcccagcccctcccatctctggacgaggcctccttcctcaggttcctcctgctcctgacctcccagtgtgatgtccgggtcctttatcatcctattcatcctggagaggaaaagtgtcgggcaaagggggatctggggggagctcagcagtgactggggagctggtctgcctcagagacagagtagggggtgggagcagagcctcggtgagggtcttggccacagggcagtgccttcctgaacgtggcaggctttactaccaggaacgcactcggtggtggaggccccatgttcccaggagccaagattcgtagcatccttgaggccatcctgataaaattcggcgctattgcccccgtagctctggagctctaaaccgtctatctgcttctgtgctgaacgcctttcccatctgctgacgtaggcccagggctgccctgcccctgctgccagtgtaccgtgagcggggctccagccagttcaagctcagagccagagctggacgggccagaactgcgctgcacacttcctggactgaggcggggactttgggtcccacccggtttctcctgattatggctgctgtggggtgaggggagggaggggcagccccgaggcagtctcttccctttgagaagatattttcccccttccgagtctgcagcgcc

SEQ ID NO: 174018 - DNA, 1686 bp, Homo sapiens
  Payload ID: 14162
  Gene Symbol: RAP1GDS1
  Gene Name: RAP1, GTP-GDP dissociation stimulator 1
  Uniprot ID: P52306
  ENST ID: ENST00000264572
  CDS Start-End: 136-1686
ctccccggcggccgccccccgcgggtccctccctggctgcgggagagacggaggtagagggaggacacagagccgcgccgcccgcaccacagaccttcgcctcgccccgccggttcctcaccctcggggagcaacatggcagataatctcagtgataccttgaagaagctgaagataacagctgttgacaagactgaggatagtttagaaggatgcttggattgtctgcttcaagccctggctcaaaataatacggaaacaagtgaaaaaatccaagcaagtggaatacttcagctgtttgcaagtctgttgactccacagtcttcctgcaaagccaaagtagctaacatcatagcagaagtagccaaaaatgagtttatgcgaattccatgtgtggatgctggattgatttcaccactggtgcagctgctaaatagcaaagaccaggaagtgctgcttcaaacgggcagggctctaggaaacatatgttacgatagccagtcaagtaaagaacagtttgccagtacaaacattgctgaagagctagtaaaactcttcaagaaacaaatagaacatgataagagagaaatgatttttgaagttcttgctccattggcagaaaatgatgctattaaactacagctggttgaagcaggcctagtagagtgtctactagagattgttcagcaaaaagtggatagtgacaaagaagatgatattactgagctcaaaactggttcagatctcatggttttattacttcttggagatgaatccatgcagaagttatttgaaggaggaaaaggtagtgtatttcaaagggtactctcttggatcccatcaaataaccaccagctacagcttgctggagcattggcaattgcaaattttgccagaaatgatgcaaattgtattcatatggtagacaatgggattgtagaaaaacttatggatttactggacagacatgtagaagatggaaatgtaacagtacagcatgcagcactaagtgccctcagaaacctggccattccagttataaataaagcaaagatgttatcagctggggtcacagaggcagttttgaaatttcttaaatctgaaatgcctcctgttcagttcaaacttctgggaacattaagaatgttaatagatgcacaagcagaagctgctgaacaattgggaaagaatgttaagttagtggagcgtttggtggaatggtgtgaagccaaagatcatgctggtgtgatgggggagtcaaacagactgctgtctgcccttatacgacacagtaaatcaaaagatgtaattaaaaccattgtgcagagtggtggcatcaagcatctagttaccatggcaactagtgaacatgtaataatgcagaatgaagctcttgttgctttggcattaatagcagctttagaattgggcactgctgagaaagatctagaaagtgctaaacttgtacagattttacatagactgctagcagatgagagaagtgctcctgaaatcaaatataattccatggtcctgatatgtgctcttatgggatctgaatgtctacacaaggaagtacaggatttggcttttctagatgtcgtatccaaacttcgcagtcatgagaacaaaagtgttgcccagcaggcctctctcacagagcagagacttactgtggaaagctga

SEQ ID NO: 174019 - DNA, 2092 bp, Homo sapiens
  Payload ID: 14162
  Gene Symbol: RAP1GDS1
  Gene Name: RAP1, GTP-GDP dissociation stimulator 1
  Uniprot ID: P52306
  ENST ID: ENST00000339360
  CDS Start-End: 49-1875
cacagaccttcgcctcgccccgccggttcctcaccctcggggagcaacatggcagataatctcagtgataccttgaagaagctgaagataacagctgttgacaagactgaggatagtttagaaggatgcttggattgtctgcttcaagccctggctcaaaataatacggaaacaagtgaaaaaatccaagcaagtggaatacttcagctgtttgcaagtctgttgactccacagtcttcctgcaaagccaaagtagctaacatcatagcagaagtagccaaaaatgagtttatgcgaattccatgtgtggatgctggattgatttcaccactggtgcagctgctaaatagcaaagaccaggaagtgctgcttcaaacgggcagggctctaggaaacatatgttacgatagccatgagggcagaagtgcagttgaccaagcaggtggtgcacagattgtaattgaccatttaaggtcactgtgcagtataacagatcccgccaatgagaagctcttgactgtcttttgtggcatgctgatgaactatagcaatgagaatgattcgcttcaagctcagcttatcaatatgggtgttattcctaccttagtgaaattactgggcatccactgccaaaatgcagctcttacagaaatgtgtcttgttgcatttggtaatttagcagaacttgagtcaagtaaagaacagtttgccagtacaaacattgctgaagagctagtaaaactcttcaagaaacaaatagaacatgataagagagaaatgatttttgaagttcttgctccattggcagaaaatgatgctattaaactacagctggttgaagcaggcctagtagagtgtctactagagattgttcagcaaaaagtggatagtgacaaagaagatgatattactgagctcaaaactggttcagatctcatggttttattacttcttggagatgaatccatgcagaagttatttgaaggaggaaaaggtagtgtatttcaaagggtactctcttggatcccatcaaataaccaccagctacagcttgctggagcattggcaattgcaaattttgccagaaatgatgcaaattgtattcatatggtagacaatgggattgtagaaaaacttatggatttactggacagacatgtagaagatggaaatgtaacagtacagcatgcagcactaagtgccctcagaaacctggccattccagttataaataaagcaaagatgttatcagctggggtcacagaggcagttttgaaatttcttaaatctgaaatgcctcctgttcagttcaaacttctgggaacattaagaatgttaatagatgcacaagcagaagctgctgaacaattgggaaagaatgttaagttagtggagcgtttggtggaatggtgtgaagccaaagatcatgctggtgtgatgggggagtcaaacagactgctgtctgcccttatacgacacagtaaatcaaaagatgtaattaaaaccattgtgcagagtggtggcatcaagcatctagttaccatggcaactagtgaacatgtaataatgcagaatgaagctcttgttgctttggcattaatagcagctttagaattgggcactgctgagaaagatctagaaagtgctaaacttgtacagattttacatagactgctagcagatgagagaagtgctcctgaaatcaaatataattccatggtcctgatatgtgctcttatgggatctgaatgtctacacaaggaagtacaggatttggcttttctagatgtcgtatccaaacttcgcagtcatgagaacaaaagtgttgcccagcaggcctctctcacagagcagagacttactgtggaaagctgagaactgcccgatacacggcatcatcccatctctaatttcccctctgtcctccatccagcggcttcttccgcttcattctctaccataccacttgtgcatgcatgtgatgttctaataccaattgaagaaccgctgtaggtacctccctaataagatttctaaacctatagttagtgtgatcatgactttgtcaaaggcaagtctccacccataaccg

SEQ ID NO: 174020 - DNA, 2085 bp, Homo sapiens
  Payload ID: 14162
  Gene Symbol: RAP1GDS1
  Gene Name: RAP1, GTP-GDP dissociation stimulator 1
  Uniprot ID: P52306
  ENST ID: ENST00000380158
  CDS Start-End: 150-1829
agcaccagctgctcctccccggcggccgccccccgcgggtccctccctggctgcgggagagacggaggtagagggaggacacagagccgcgccgcccgcaccacagaccttcgcctcgccccgccggttcctcaccctcggggagcaacatggcagataatctcagtgataccttgaagaagctgaagataacagctgttgacaagactgaggatagtttagaaggatgcttggattgtctgcttcaagccctggctcaaaataatacggaaacaagtgaaaaaatccaagcaagtggaatacttcagctgtttgcaagtctgttgactccacagtcttcctgcaaagccaaagtagctaacatcatagcagaagtagccaaaaatgagtttatgcgaattccatgtgtggatgctggattgatttcaccactggtgcagctgctaaatagcaaagaccaggaagtgctgcttcaaacgggcagggctctaggaaacatatgttacgatagccattcgcttcaagctcagcttatcaatatgggtgttattcctaccttagtgaaattactgggcatccactgccaaaatgcagctcttacagaaatgtgtcttgttgcatttggtaatttagcagaacttgagtcaagtaaagaacagtttgccagtacaaacattgctgaagagctagtaaaactcttcaagaaacaaatagaacatgataagagagaaatgatttttgaagttcttgctccattggcagaaaatgatgctattaaactacagctggttgaagcaggcctagtagagtgtctactagagattgttcagcaaaaagtggatagtgacaaagaagatgatattactgagctcaaaactggttcagatctcatggttttattacttcttggagatgaatccatgcagaagttatttgaaggaggaaaaggtagtgtatttcaaagggtactctcttggatcccatcaaataaccaccagctacagcttgctggagcattggcaattgcaaattttgccagaaatgatgcaaattgtattcatatggtagacaatgggattgtagaaaaacttatggatttactggacagacatgtagaagatggaaatgtaacagtacagcatgcagcactaagtgccctcagaaacctggccattccagttataaataaagcaaagatgttatcagctggggtcacagaggcagttttgaaatttcttaaatctgaaatgcctcctgttcagttcaaacttctgggaacattaagaatgttaatagatgcacaagcagaagctgctgaacaattgggaaagaatgttaagttagtggagcgtttggtggaatggtgtgaagccaaagatcatgctggtgtgatgggggagtcaaacagactgctgtctgcccttatacgacacagtaaatcaaaagatgtaattaaaaccattgtgcagagtggtggcatcaagcatctagttaccatggcaactagtgaacatgtaataatgcagaatgaagctcttgttgctttggcattaatagcagctttagaattgggcactgctgagaaagatctagaaagtgctaaacttgtacagattttacatagactgctagcagatgagagaagtgctcctgaaatcaaatataattccatggtcctgatatgtgctcttatgggatctgaatgtctacacaaggaagtacaggatttggcttttctagatgtcgtatccaaacttcgcagtcatgagaacaaaagtgttgcccagcaggcctctctcacagagcagagacttactgtggaaagctgagaactgcccgatacacggcatcatcccatctctaatttcccctctgtcctccatccagcggcttcttccgcttcattctctaccataccacttgtgcatgcatgtgatgttctaataccaattgaagaaccgctgtaggtacctccctaataagatttctaaacctatagttagtgtgatcatgactttgtcaaaggcaagtctccacccataaccgttctcttgtattcctgttgcttgagctacattaagtaga

SEQ ID NO: 174021 - DNA, 3681 bp, Homo sapiens
  Payload ID: 14162
  Gene Symbol: RAP1GDS1
  Gene Name: RAP1, GTP-GDP dissociation stimulator 1
  Uniprot ID: P52306
  ENST ID: ENST00000408927
  CDS Start-End: 114-1937
gggtccctccctggctgcgggagagacggaggtagagggaggacacagagccgcgccgcccgcaccacagaccttcgcctcgccccgccggttcctcaccctcggggagcaacatggataatctcagtgataccttgaagaagctgaagataacagctgttgacaagactgaggatagtttagaaggatgcttggattgtctgcttcaagccctggctcaaaataatacggaaacaagtgaaaaaatccaagcaagtggaatacttcagctgtttgcaagtctgttgactccacagtcttcctgcaaagccaaagtagctaacatcatagcagaagtagccaaaaatgagtttatgcgaattccatgtgtggatgctggattgatttcaccactggtgcagctgctaaatagcaaagaccaggaagtgctgcttcaaacgggcagggctctaggaaacatatgttacgatagccatgagggcagaagtgcagttgaccaagcaggtggtgcacagattgtaattgaccatttaaggtcactgtgcagtataacagatcccgccaatgagaagctcttgactgtcttttgtggcatgctgatgaactatagcaatgagaatgattcgcttcaagctcagcttatcaatatgggtgttattcctaccttagtgaaattactgggcatccactgccaaaatgcagctcttacagaaatgtgtcttgttgcatttggtaatttagcagaacttgagtcaagtaaagaacagtttgccagtacaaacattgctgaagagctagtaaaactcttcaagaaacaaatagaacatgataagagagaaatgatttttgaagttcttgctccattggcagaaaatgatgctattaaactacagctggttgaagcaggcctagtagagtgtctactagagattgttcagcaaaaagtggatagtgacaaagaagatgatattactgagctcaaaactggttcagatctcatggttttattacttcttggagatgaatccatgcagaagttatttgaaggaggaaaaggtagtgtatttcaaagggtactctcttggatcccatcaaataaccaccagctacagcttgctggagcattggcaattgcaaattttgccagaaatgatgcaaattgtattcatatggtagacaatgggattgtagaaaaacttatggatttactggacagacatgtagaagatggaaatgtaacagtacagcatgcagcactaagtgccctcagaaacctggccattccagttataaataaagcaaagatgttatcagctggggtcacagaggcagttttgaaatttcttaaatctgaaatgcctcctgttcagttcaaacttctgggaacattaagaatgttaatagatgcacaagcagaagctgctgaacaattgggaaagaatgttaagttagtggagcgtttggtggaatggtgtgaagccaaagatcatgctggtgtgatgggggagtcaaacagactgctgtctgcccttatacgacacagtaaatcaaaagatgtaattaaaaccattgtgcagagtggtggcatcaagcatctagttaccatggcaactagtgaacatgtaataatgcagaatgaagctcttgttgctttggcattaatagcagctttagaattgggcactgctgagaaagatctagaaagtgctaaacttgtacagattttacatagactgctagcagatgagagaagtgctcctgaaatcaaatataattccatggtcctgatatgtgctcttatgggatctgaatgtctacacaaggaagtacaggatttggcttttctagatgtcgtatccaaacttcgcagtcatgagaacaaaagtgttgcccagcaggcctctctcacagagcagagacttactgtggaaagctgagaactgcccgatacacggcatcatcccatctctaatttcccctctgtcctccatccagcggcttcttccgcttcattctctaccataccacttgtgcatgcatgtgatgttctaataccaattgaagaaccgctgtaggtacctccctaataagatttctaaacctatagttagtgtgatcatgactttgtcaaaggcaagtctccacccataaccgttctcttgtattcctgttgcttgagctacattaagtagaatgtgcatgttgtagtcctatgatgatgtaaacttggtactacataatgacttgctccacacatgcagtaaactacataatgatgtactggtaaactagaaacaaagaatgcagcaggatctgtctagcttattaaagatgaaactgaattggaaaaatagctccattttttggtgcttgggaagcacagtgaccaaaaaagttgtatggctgcttattcattagtctttcctactgatgtcaaatccatggtacctagagttaaataaaattccaatgctcttactctttaacttctggtttctcctttttcctttttagactattgaaactgccacaaacttggcaagactttctgaggtttctgattccatatttaattgactattatcaatagcctgatattgaaaaacatttgtagttttcagtgtgaaactaaggggttgaagaatcactattacaatccctattacagagcatttcgggttttgcttgtattttagattctgatacatacgctgtttcactcaggaactacttctaccagttaatcagcattatccagcacttgtctttaaaattcatttggcgcttgtttgttttcaactgaggaaattgagtatagttcattgaagaatggaatttttttttttttttttttttttgctgtttttcatcattcagctagaaagtgagaagttttatcttccatagtccttttaaatcttatgttagaactagcaggacgtaggtggaaagatgaagaaataagcttgtctagactaaagaaaggaaagcaggttataaaagccatagtagccagtccagttcattctgcagatggccccataccaatcgctgttagagtttgccacctccactttcccactgagaactgcagcaattttaaaggatatgagaaagccaagactcaagagatgagaagacccccttggcgaaatatagtgtactcttcactgccactgccaccaccaaatgggtttttagagctttgaaacacaatctttgtaaattaatcaaaacctccctgtgacccacctgccttctccccatacccaaatttgaccactactggcctaaaaggcaagatgggcttcgatatagaaggactgcaagacagtagaaagggctgccacggaggtgacagtagctccttcctctccaacatgtgatgctacacatctctgtggataatctaagttggacttttgactctaaaacagctataatccaagaaagttaaattctaatggaggtaaagaatcttgactgattgttccctttgatgtccaaataagggaactattgtgagtacgtatgctacacttactataagaatgatactgtttgttgtctttctcctgggctggatagtggactatattttattacaggctttgaaagacatctgtaatgttgcatatctgttcatattaataacttaataaatagtatatgaagctataa

SEQ ID NO: 174022 - DNA, 1942 bp, Homo sapiens
  Payload ID: 14162
  Gene Symbol: RAP1GDS1
  Gene Name: RAP1, GTP-GDP dissociation stimulator 1
  Uniprot ID: P52306
  ENST ID: ENST00000408900
  CDS Start-End: 49-1725
cacagaccttcgcctcgccccgccggttcctcaccctcggggagcaacatggataatctcagtgataccttgaagaagctgaagataacagctgttgacaagactgaggatagtttagaaggatgcttggattgtctgcttcaagccctggctcaaaataatacggaaacaagtgaaaaaatccaagcaagtggaatacttcagctgtttgcaagtctgttgactccacagtcttcctgcaaagccaaagtagctaacatcatagcagaagtagccaaaaatgagtttatgcgaattccatgtgtggatgctggattgatttcaccactggtgcagctgctaaatagcaaagaccaggaagtgctgcttcaaacgggcagggctctaggaaacatatgttacgatagccattcgcttcaagctcagcttatcaatatgggtgttattcctaccttagtgaaattactgggcatccactgccaaaatgcagctcttacagaaatgtgtcttgttgcatttggtaatttagcagaacttgagtcaagtaaagaacagtttgccagtacaaacattgctgaagagctagtaaaactcttcaagaaacaaatagaacatgataagagagaaatgatttttgaagttcttgctccattggcagaaaatgatgctattaaactacagctggttgaagcaggcctagtagagtgtctactagagattgttcagcaaaaagtggatagtgacaaagaagatgatattactgagctcaaaactggttcagatctcatggttttattacttcttggagatgaatccatgcagaagttatttgaaggaggaaaaggtagtgtatttcaaagggtactctcttggatcccatcaaataaccaccagctacagcttgctggagcattggcaattgcaaattttgccagaaatgatgcaaattgtattcatatggtagacaatgggattgtagaaaaacttatggatttactggacagacatgtagaagatggaaatgtaacagtacagcatgcagcactaagtgccctcagaaacctggccattccagttataaataaagcaaagatgttatcagctggggtcacagaggcagttttgaaatttcttaaatctgaaatgcctcctgttcagttcaaacttctgggaacattaagaatgttaatagatgcacaagcagaagctgctgaacaattgggaaagaatgttaagttagtggagcgtttggtggaatggtgtgaagccaaagatcatgctggtgtgatgggggagtcaaacagactgctgtctgcccttatacgacacagtaaatcaaaagatgtaattaaaaccattgtgcagagtggtggcatcaagcatctagttaccatggcaactagtgaacatgtaataatgcagaatgaagctcttgttgctttggcattaatagcagctttagaattgggcactgctgagaaagatctagaaagtgctaaacttgtacagattttacatagactgctagcagatgagagaagtgctcctgaaatcaaatataattccatggtcctgatatgtgctcttatgggatctgaatgtctacacaaggaagtacaggatttggcttttctagatgtcgtatccaaacttcgcagtcatgagaacaaaagtgttgcccagcaggcctctctcacagagcagagacttactgtggaaagctgagaactgcccgatacacggcatcatcccatctctaatttcccctctgtcctccatccagcggcttcttccgcttcattctctaccataccacttgtgcatgcatgtgatgttctaataccaattgaagaaccgctgtaggtacctccctaataagatttctaaacctatagttagtgtgatcatgactttgtcaaaggcaagtctccacccataaccg

SEQ ID NO: 174023 - DNA, 2470 bp, Homo sapiens
  Payload ID: 14162
  Gene Symbol: RAP1GDS1
  Gene Name: RAP1, GTP-GDP dissociation stimulator 1
  Uniprot ID: P52306
  ENST ID: ENST00000453712
  CDS Start-End: 98-1921
gcgggagagacggaggtagagggaggacacagagccgcgccgcccgcaccacagaccttcgcctcgccccgccggttcctcaccctcggggagcaacatggcagataatctcagtgataccttgaagaagctgaagataacagctgttgacaagactgaggatagtttagaaggatgcttggattgtctgcttcaagccctggctcaaaataatacggaaacaagtgaaaaaatccaagcaagtggaatacttcagctgtttgcaagtctgttgactccacagtcttcctgcaaagccaaagtagctaacatcatagcagaagtagccaaaaatgagtttatgcgaattccatgtgtggatgctggattgatttcaccactggtgcagctgctaaatagcaaagaccaggaagtgctgcttcaaacgggcagggctctaggaaacatatgttacgatagccatgagggcagaagtgcagttgaccaagcaggtggtgcacagattgtaattgaccatttaaggtcactgtgcagtataacagatcccgccaatgagaagctcttgactgtcttttgtggcatgctgatgaactatagcaatgagaatgattcgcttcaagctcagcttatcaatatgggtgttattcctaccttagtgaaattactgggcatccactgccaaaatgcagctcttacagaaatgtgtcttgttgcatttggtaatttagcagaacttgagtcaagtaaagaacagtttgccagtacaaacattgctgaagagctagtaaaactcttcaagaaacaaatagaacatgataagagagaaatgatttttgaagttcttgctccattggcagaaaatgatgctattaaactacagctggttgaagcaggcctagtagagtgtctactagagattgttcagcaaaaagtggatagtgacaaagaagatgatattactgagctcaaaactggttcagatctcatggttttattacttcttggagatgaatccatgcagaagttatttgaaggaggaaaaggtagtgtatttcaaagggtactctcttggatcccatcaaataaccaccagctacagcttgctggagcattggcaattgcaaattttgccagaaatgatgcaaattgtattcatatggtagacaatgggattgtagaaaaacttatggatttactggacagacatgtagaagatggaaatgtaacagtacagcatgcagcactaagtgccctcagaaacctggccattccagttataaataaagcaaagatgttatcagctggggtcacagaggcagttttgaaatttcttaaatctgaaatgcctcctgttcagttcaaacttctgggaacattaagaatgttaatagatgcacaagaagctgctgaacaattgggaaagaatgttaagttagtggagcgtttggtggaatggtgtgaagccaaagatcatgctggtgtgatgggggagtcaaacagactgctgtctgcccttatacgacacagtaaatcaaaagatgtaattaaaaccattgtgcagagtggtggcatcaagcatctagttaccatggcaactagtgaacatgtaataatgcagaatgaagctcttgttgctttggcattaatagcagctttagaattgggcactgctgagaaagatctagaaagtgctaaacttgtacagattttacatagactgctagcagatgagagaagtgctcctgaaatcaaatataattccatggtcctgatatgtgctcttatgggatctgaatgtctacacaaggaagtacaggatttggcttttctagatgtcgtatccaaacttcgcagtcatgagaacaaaagtgttgcccagcaggcctctctcacagagcagagacttactgtggaaagctgagaactgcccgatacacggcatcatcccatctctaatttcccctctgtcctccatccagcggcttcttccgcttcattctctaccataccacttgtgcatgcatgtgatgttctaataccaattgaagaaccgctgtaggtacctccctaataagatttctaaacctatagttagtgtgatcatgactttgtcaaaggcaagtctccacccataaccgttctcttgtattcctgttgcttgagctacattaagtagaatgtgcatgttgtagtcctatgatgatgtaaacttggtactacataatgacttgctccacacatgcagtaaactacataatgatgtactggtaaactagaaacaaagaatgcagcaggatctgtctagcttattaaagatgaaactgaattggaaaaatagctccattttttggtgcttgggaagcacagtgaccaaaaaagttgtatggctgcttattcattagtctttcctactgatgtcaaatccatggtacctagagttaaataaaattccaatgctcttactctttaa

SEQ ID NO: 174024 - DNA, 757 bp, Homo sapiens
  Payload ID: 14162
  Gene Symbol: RAP1GDS1
  Gene Name: RAP1, GTP-GDP dissociation stimulator 1
  ENST ID: ENST00000509501
  CDS Start-End: 1-757
cgccaatgagaagctcttgactgtcttttgtggcatgctgatgaactatagcaatgagaatgattcgcttcaagctcagcttatcaatatgggtgttattcctaccttagtgaaattactgggcatccactgccaaaatgcagctcttacagaaatgtgtcttgttgcatttggtaatttagcagaacttgatgctattaaactacagctggttgaagcaggcctagtagagtgtctactagagattgttcagcaaaaagtggatagtgacaaagaagatgatattactgagctcaaaactggttcagatctcatggttttattacttcttggagatgaatccatgcagaagttatttgaaggaggaaaaggtagtgtatttcaaagggtactctcttggatcccatcaaataaccaccagctacagcttgctggagcattggcaattgcaaattttgccagaaatgatgcaaattgtattcatatggtagacaatgggattgtagaaaaacttatggatttactggacagacatgtagaagatggaaatgtaacagtacagcatgcagcactaagtgccctcagaaacctggccattccagttataaataaagcaaagatgttatcagctggggtcacagaggcagttttgaaatttcttaaatctgaaatgcctcctgttcagttcaaacttctgggaacattaagaatgttaatagatgcacaagcagaagctgctgaacaattgggaaagaat

SEQ ID NO: 174025 - DNA, 555 bp, Homo sapiens
  Payload ID: 14162
  Gene Symbol: RAP1GDS1
  Gene Name: RAP1, GTP-GDP dissociation stimulator 1
  ENST ID: ENST00000511212
  CDS Start-End: 81-555
agagggaggacacagagccgcgccgcccgcaccacagaccttcgcctcgccccgccggttcctcaccctcggggagcaacatggcagataatctcagtgataccttgaagaagctgaagataacagctgttgacaagactgaggatagtttagaaggatgcttggattgtctgcttcaagccctggctcaaaataatacggaaacaagtgaaaaaatccaagcaagtggaatacttcagctgtttgcaagtctgttgactccacagtcttcctgcaaagccaaagtagctaacatcatagcagaagtagccaaaaatgatgagggcagaagtgcagttgaccaagcaggtggtgcacagattgtaattgaccatttaaggtcactgtgcagtataacagatcccgccaatgagaagctcttgactgtcttttgtggcatgctgatgaactatagcaatgagaatgattcgcttcaagctcagcttatcaatatgggtgttattcctaccttagtgaaattactgggcatccactgccaaaatgcagctcttacag

SEQ ID NO: 174026 - DNA, 573 bp, Homo sapiens
  Payload ID: 14162
  Gene Symbol: RAP1GDS1
  Gene Name: RAP1, GTP-GDP dissociation stimulator 1
  ENST ID: ENST00000503667
  CDS Start-End: 171-290
cgcggccgcgccgcctgcagcagcaccagctgctcctccccggcggccgccccccgcgggtccctccctggctgcgggagagacggaggtagagggaggacacagagccgcgccgcccgcaccacagaccttcgcctcgccccgccggttcctcaccctcggggagcaacatggcagataatctcagtgataccttgaagaagctgaagataacagctgttgacaagactgaggatagtttagaaggatgcttggattgtctgcttcaagccctggctcaaaatagatgaagaccattttgtgttgccggggggaccataaagtgtgccatacagctttaaactctctccctgaagaaatacggaaacaagtgaaaaaatccaagcaagtggaatacttcagctgtttgcaagtctgttgactccacagtcttcctgcaaagccaaagtagctaacatcatagcagaagtagccaaaaatgagtttatgcgaattccatgtgtggatgctggattgatttcaccactggtgcagctgctaaatagcaaagaccaggaagtgctgcttcaaacg

SEQ ID NO: 174027 - DNA, 544 bp, Homo sapiens
  Payload ID: 14162
  Gene Symbol: RAP1GDS1
  Gene Name: RAP1, GTP-GDP dissociation stimulator 1
  ENST ID: ENST00000508490
  CDS Start-End: 144-260
agctgctcctccccggcggccgccccccgcgggtccctccctggctgcgggagagacggaggtagagggaggacacagagccgcgccgcccgcaccacagaccttcgcctcgccccgccggttcctcaccctcggggagcaacatggataatctcagtgataccttgaagaagctgaagataacagctgttgacaagactgaggatagtttagaaggatgcttggattgtctgcttcaagccctggctcaaaatagatgaagaccattttgtgttgccggggggaccataaagtgtgccatacagctttaaactctctccctgaagaaatacggaaacaagtgaaaaaatccaagcaagtggaatacttcagctgtttgcaagtctgttgactccacagtcttcctgcaaagccaaagtagctaacatcatagcagaagtagccaaaaatgagtttatgcgaattccatgtgtggatgctggattgatttcaccactggtgcagctgctaaatagcaaagaccaggaagtgctgcttcaaacgg

SEQ ID NO: 174028 - DNA, 537 bp, Homo sapiens
  Payload ID: 14162
  Gene Symbol: RAP1GDS1
  Gene Name: RAP1, GTP-GDP dissociation stimulator 1
  ENST ID: ENST00000510870
  CDS Start-End: 81-437
agagggaggacacagagccgcgccgcccgcaccacagaccttcgcctcgccccgccggttcctcaccctcggggagcaacatggataatctcagtgataccttgaagaagctgaagataacagctgttgacaagactgaggatagtttagaaggatgcttggattgtctgcttcaagccctggctcaaaataatacggaaacaagtgaaaaaatccaagcaagtggaatacttcagctgtttgcaagtctgttgactccacagtcttcctgcaaagccaaagtagctaacatcatagcagaagtagccaaaaatggtgaggtttacctcaagaacttttctgctgggaacgtcttcagttttacatcttacttagtttatgcgaattccatgtgtggatgctggattgatttcaccactggtgcagctgctaaatagcaaagaccaggaagtgctgcttcaaacgggcagggctctaggaaacatatgttacgatagccattcgcttcaagctcagcttatcaatatgggtgttatt

SEQ ID NO: 174029 - DNA, 579 bp, Homo sapiens
  Payload ID: 14162
  Gene Symbol: RAP1GDS1
  Gene Name: RAP1, GTP-GDP dissociation stimulator 1
  ENST ID: ENST00000514122
  CDS Start-End: 106-579
ccctggctgcgggagagacggaggtagagggaggacacagagccgcgccgcccgcaccacagaccttcgcctcgccccgccggttcctcaccctcggggagcaacatggataatctcagtgataccttgaagaagctgaagataacagctgttgacaagactgaggatagtttagaaggatgcttggattgtctgcttcaagccctggctcaaaataatacggaaacaagtgaaaaaatccaagcaagtggaatacttcagctgtttgcaagtctgttgactccacagtcttcctgcaaagccaaagtagctaacatcatagcagaagtagccaaaaatgattcgcttcaagctcagcttatcaatatgggtgttattcctaccttagtgaaattactgggcatccactgccaaaatgcagctcttacagaaatgtgtcttgttgcatttggtaatttagcagaacttgagtcaagtaaagaacagtttgccagtacaaacattgctgaagagctagtaaaactcttcaagaaacaaatagaacatgataagagagaaatgatttttgaagttcttgct

SEQ ID NO: 174030 - DNA, 549 bp, Homo sapiens
  Payload ID: 14162
  Gene Symbol: RAP1GDS1
  Gene Name: RAP1, GTP-GDP dissociation stimulator 1
  ENST ID: ENST00000509011
  CDS Start-End: 183-549
gctcgtccccgccgcggccgcgccgcctgcagcagcaccagctgctcctccccggcggccgccccccgcgggtccctccctggctgcgggagagacggaggtagagggaggacacagagccgcgccgcccgcaccacagaccttcgcctcgccccgccggttcctcaccctcggggagcaacatggataatctcagtgataccttgaagaagctgaagataacagctgttgacaagactgaggatagtttagaaggatgcttggattgtctgcttcaagccctggctcaaaataagtttatgcgaattccatgtgtggatgctggattgatttcaccactggtgcagctgctaaatagcaaagaccaggaagtgctgcttcaaacgggcagggctctaggaaacatatgttacgatagccattcgcttcaagctcagcttatcaatatgggtgttattcctaccttagtgaaattactgggcatccactgccaaaatgcagctcttacagaaatgtgtcttgttgcatttggtaatttagcagaacttg

SEQ ID NO: 174031 - DNA, 558 bp, Homo sapiens
  Payload ID: 14162
  Gene Symbol: RAP1GDS1
  Gene Name: RAP1, GTP-GDP dissociation stimulator 1
  ENST ID: ENST00000508213
  CDS Start-End: 116-558
gcgggtccctccctggctgcgggagagacggaggtagagggaggacacagagccgcgccgcccgcaccacagaccttcgcctcgccccgccggttcctcaccctcggggagcaacatggataatctcagtgataccttgaagaagctgaagataacagctgttgacaagactgaggatagtttagaaggatgcttggattgtctgcttcaagccctggctcaaaataagtttatgcgaattccatgtgtggatgctggattgatttcaccactggtgcagctgctaaatagcaaagaccaggaagtgctgcttcaaacgggcagggctctaggaaacatatgttacgatagccatgagggcagaagtgcagttgaccaagcaggtggtgcacagattgtaattgaccatttaaggtcactgtgcagtataacagatcccgccaatgagaagctcttgactgtcttttgtggcatgctgatgaactatagcaatgagaatgattcgcttcaagctcagcttatcaatatgggtgttattcctaccttagtgaaattact

SEQ ID NO: 174032 - DNA, 1103 bp, Homo sapiens
  Payload ID: 14162
  Gene Symbol: RAP1GDS1
  Gene Name: RAP1, GTP-GDP dissociation stimulator 1
  ENST ID: ENST00000514139
  CDS Start-End: 1-304
gaatgattcgcttcaagctcagcttatcaatatgggtgttattcctaccttagtgaaattactgggcatccactgccaaaatgcagctcttacagaaatgtgtcttgttgcatttggtaatttagcagaacttgggtgtacaggaagtgtggtgcctgcatctgcttctggtgagggactcaggaagcttacaatcatggcagaaggtgaagagggagcaggcgtgtcacatggtgagacagggagcgagagagagagacaaaggggaagtcacagactcttaaccagatctcatatgaactaactcacttatcaccaaggggatggtactaaccattcatgagggacctgcccccattatctaattacctcctgcctggcctcacctccaatattggaaattacgtttcaacatgagatttggaagggacaaacagccaaaccacatcagggagttttcattggacaaataaggaaaaataatatgaggacaaaagcagagcacagtatactgagggagccctggcctggtaggagagaaaagaggtaagtaaagagttgcaaagacaaccttgtctaccttgctgatttctctggtatacagggaaaataagccattgaaaacagtttgatacaagttgctgtgctaagatagcagatttgtttgagaggctgcgtagaccacctctattcagcctagtctcccccagtctatgttaaaagataaatatgcagctaatttagttcagcccaggttcatactataatttcagtggttactgccctaccccatttggaggaagaaaggataagagaaaaatatgtgtatctaagacttctcgagtttatataatgagtcagttatgcccatgtaatagctaggttgtatacatcaacacgggagtggaacatgtatgcaccagaataatgtttctcctttcagagtgagctttcttgcctgttaacaagtaatgtatttttattgattcgtgtaaatatcaagtgtttaaaattcatgtcacatacttctgaatatgacatattactaaatgctacagttactttttgtcaaaatgtttttaataaaagtgttaaataacaaa

SEQ ID NO: 174033 - DNA, 1586 bp, Homo sapiens
  Payload ID: 14163
  Gene Symbol: RAP1A
  Gene Name: RAP1A, member of RAS oncogene family
  Uniprot ID: P62834
  ENST ID: ENST00000356415
  CDS Start-End: 320-874
atccttcgcgtactgacggaaacactggcggcacatattgaggccgtatttcaggatcagacctgccggttcgaacacacgcgacaagagcaaagaagttaaaagagaagtgtctgtgtggctccttccacgtgggtgaaggactgtgccagctgagaggtggtagagcaggaagctgcctgaggacctccatttatttggtgaaaaactgggctccgcccttaagagagcaagtcgagggccgtgtaggagttggaggagagaaatgaaattttggaagagtcagcagaagatcgtcagtatttaaacagatcacatcatgcgtgagtacaagctagtggtccttggttcaggaggcgttgggaagtctgctctgacagttcagtttgttcagggaatttttgttgaaaaatatgacccaacgatagaagattcctacagaaagcaagttgaagtcgattgccaacagtgtatgctcgaaatcctggatactgcagggacagagcaatttacagcaatgagggatttgtatatgaagaacggccaaggttttgcactagtatattctattacagctcagtccacgtttaacgacttacaggacctgagggaacagattttacgggttaaggacacggaagatgttccaatgattttggttggcaataaatgtgacctggaagatgagcgagtagttggcaaagagcagggccagaatttagcaagacagtggtgtaactgtgcctttttagaatcttctgcaaagtcaaagatcaatgttaatgagatattttatgacctggtcagacagataaataggaaaacaccagtggaaaagaagaagcctaaaaagaaatcatgtctgctgctctaggcccatagtcagcagcagctctgagccagattacaggaatgaagaactgttgcctaattggaaagtgccagcattccagacttcaaaaataaaaaatctgaagaggcttctcctgttttatatattatgtgaagaatttagatcttatattggtttgcacaagttccctggagaaaaaaattgctctgtgtatatctcttggaaaataagacaatagtatttctcctttgcaatagcagttataacagatgtgaaaatatacttgactctaatatgattatacaaaagagcatggatgcatttcaaatgttagatattgctactataatcaaatgatttcatattgatctttttatcatgatcctccctatcaagcactaaaaagttgaaccattatactttatatctgtaatgatactgattatgaaatgtcccctcaaactcattgcagcagataacttttttgagtcattgacttcattttatatttaaaaaattatggaatatcatctgtcattatattctaattaaaattgtgcataatgctttggaaaaatgggtcttttataggaaaaaaactgggataactgatttctatggctttcaaagctaaaatatataatatactaaaccaactctaatattgcttcttgtgttttactgtcagattaaattacagcttttatggatgattaaattttagtacattttc

SEQ ID NO: 174034 - DNA, 5024 bp, Homo sapiens
  Payload ID: 14163
  Gene Symbol: RAP1A
  Gene Name: RAP1A, member of RAS oncogene family
  Uniprot ID: P62834
  ENST ID: ENST00000369709
  CDS Start-End: 180-734
ggcgccgccgccgctcccgaggcccctgccgccgccgctcccgctgctgtcgccgcgcagagccggagcaggagccacggccgagaggagggaggaggaggaggaggaggtggaggaggtggaggaggtggaggaggcgccggaccggggggatcgtcagtatttaaacagatcacatcatgcgtgagtacaagctagtggtccttggttcaggaggcgttgggaagtctgctctgacagttcagtttgttcagggaatttttgttgaaaaatatgacccaacgatagaagattcctacagaaagcaagttgaagtcgattgccaacagtgtatgctcgaaatcctggatactgcagggacagagcaatttacagcaatgagggatttgtatatgaagaacggccaaggttttgcactagtatattctattacagctcagtccacgtttaacgacttacaggacctgagggaacagattttacgggttaaggacacggaagatgttccaatgattttggttggcaataaatgtgacctggaagatgagcgagtagttggcaaagagcagggccagaatttagcaagacagtggtgtaactgtgcctttttagaatcttctgcaaagtcaaagatcaatgttaatgagatattttatgacctggtcagacagataaataggaaaacaccagtggaaaagaagaagcctaaaaagaaatcatgtctgctgctctaggcccatagtcagcagcagctctgagccagattacaggaatgaagaactgttgcctaattggaaagtgccagcattccagacttcaaaaataaaaaatctgaagaggcttctcctgttttatatattatgtgaagaatttagatcttatattggtttgcacaagttccctggagaaaaaaattgctctgtgtatatctcttggaaaataagacaatagtatttctcctttgcaatagcagttataacagatgtgaaaatatacttgactctaatatgattatacaaaagagcatggatgcatttcaaatgttagatattgctactataatcaaatgatttcatattgatctttttatcatgatcctccctatcaagcactaaaaagttgaaccattatactttatatctgtaatgatactgattatgaaatgtcccctcaaactcattgcagcagataacttttttgagtcattgacttcattttatatttaaaaaattatggaatatcatctgtcattatattctaattaaaattgtgcataatgctttggaaaaatgggtcttttataggaaaaaaactgggataactgatttctatggctttcaaagctaaaatatataatatactaaaccaactctaatattgcttcttgtgttttactgtcagattaaattacagcttttatggatgattaaattttagtacattttcatttggtttgtgtgtttttgttattgtttatagattaaagcgtttattttataatgaccacattgttttaaatgcgacagtagctcctttctgcctagtatctgcagaacactggctttaaactatactaagtaactggtgatttctctaggaacagacctcgcactttctgttctaaatatatttattcctactatacagtaaaatacatcagacaacatagaatagttttgtatattctctcttgatcttaaagattgtatcttattgaatatcccactgtatattatttttatatgtaaaaagataagtttaatactgtatcagggtttaacttttactatttcagatcttccacagcttgtaatttcatcaagggaatccttttgcattgttaatttgttgggtgtgagtccaccaatgaagtgttatgtgaaaaatttcaaacttgctttataatagattgaagaatttgagagaagtgagagaaagttaaaacacataaaaggaatgtgttacttttgcttaaactacttatgaaatagtatggtagtagtaatatggaagagattgctaagttaaaattgtagcttcctatatagtggtgctttttcttttccttcccagttattttcctctttacaaaagatagggcttaagtaagacatggacccagggtgatactacttatgtagtctctataaagagaggtagaacaaaaagcttgttagccaattaagttctggaaaaggaaagaaacaagcttagaaaaccctgtgccttgtcctcaaatattaaggaggagacagaccagtcctagaaagtctaagtcattgctcagggatctctagatactgtctctttgcaactaggtatgaagaagtgttcatgccttgctgagattttccaggcatgtggtcagcctgtcacttactaaactgaaattttaaaatcaggtttcaaatgttaagctttgaccaacctgagaaaatgttaaagtattgtttttaaaaaaatggaaattttttttgtttgtgtttttgttttagtttcgaataaacttagttaccttacacttcccttctacttatccaattatgcatatgtctgggattgaggggccaaaactatagcgaacttgaatgaagtattagggccagttgtcaggtcagggtggcatcttttattttaaggtcctctaaagtcattctgctttaaaacacccctcaaacatacctttaaacttaagatcatagacagacatctcatcaaccagtaaaactttctaaatactaccttgtcacatctattgtgtagttatttaacagattaaatagaagtcatttaataagactccaagtctcagtctgcttgactagtagcataaactcagtctattctattttagaatgtggtggagaaagatgatagttattagattcctttgtcacatcttatacagtccacttgggttaaaggtggaactgtcaagaaaaacgcctttctggcacacagtgatatgcagagcaggaccagctgaagtcagatgtgcaaggaaatctgtggttgctgagcaggatgaaaagtatcctgttagaaagtgagataggtgtgtttttatattgtcctaatgtgaactccttagtcttggttccaaagggaagggtacctgaaaataaatgtatttttatagctgaaaaatcaagagtttctaggatattgtgtgaatgtcaaatgataaatatctagaaactgatttcatattagtatgtgtggctatttaaagtataatgactttggtttggttatatgagtgacacagaatttaaggaggcttcatgccatagttcatagtttgctctaatggcttggtggtatccctgaacagtctacttttagaaattaacagtaaatacacaatccagctgtaatcttaccctccaccagggggagcttcaacatcggttaatactttttttttttttgagatggagtctcgccctgtcgcccaggctagagtgcaatggctcagtctccgctcactgcaacctctgcctcccgggttcaaacagttgtgcctcagtcttccaagtagctgggattacaggcacccgccaccacgcccagctaatttttgtatttttagtagagacggggtttcatcatgttggcgaggctggtcttgaactcctgacttcgtgatccgcccccccctcagcctcccaaagtgctgggattacaggcgtgagccaccgcgcctggcccggttaatactttcataagcattgaagtaactatttaagtcctagtacataaacactgtgtggttcacaaaaaggcatagagacattctctcaagagtttacaatctaattgggcagggaagatactacagttcatcaaagatatgaataacaccctagttttctgaactgcagctgcatgggtaattatcttaagaacttttggcaaaatatggatgttggtgtgttactctcttctccctacaactctgaactaatctgtgtttggcaccttgatttgccatcataaatggccaccatttactcctcactgaaatattcttcttctttgaggttataatgtacttggaaaagttaatacttatagaaaataatgatctttattaccaactttattaaaacaggcttggaacatttttctccatagaagaatagtaataagacattctacatttcctggacatggccagtttaaaatattttgccccattacccttgtagatacacatgtatttgtcagtttatgtgcctcagttttgtcttaggcactgagggacagaaagagaaataaggaataccttggtattttcctttgcaagcaatcacagcagaatgctagaaaacataaaatatactcttataaattgtatgtgtgttgaaaccaaagtgtgaagaaattgtcaggtatttggaggaggaaaataatttgtaaaataacctttttaagaatttggattttgtacttatttaaggtgctaaatatgtgttaaaatatcccctcttgaatcagctccaggcttaaaagggcagagtggtttggattcttgtccagggtctggaaagagctcatcttgccgagagggaaataaatgtgagctttgaggcggtctaactacccagcttttagtatttatgttccccaaaatgtaaaaactgtaagttattcttgaaaatgtagtccagacatttctttgatcctggattttactgcagtttcatcatgggtttgttgaatgtgcagtccatttattgccctgtcttgcttaaatattcttgttgagaacagctggaggctttgactgggttcctagttctgttttctgggaaggcaacgtggattctgttttgtagacattaatgagctttaaatgggaattggggatgatgtatgttcgttgggcatgctgagaagcggcctcctgtggttctgggcccaaggtgtgacatacatttcccactaattgcttctctcaagaagcaagagattggctgttcctcttgaggaaaaaccttaataaaccttcccattttaaa

SEQ ID NO: 174035 - DNA, 666 bp, Homo sapiens
  Payload ID: 14163
  Gene Symbol: RAP1A
  Gene Name: RAP1A, member of RAS oncogene family
  ENST ID: ENST00000433097
  CDS Start-End: 280-666
ggaggaggcgccgccgccgctcccgaggcccctgccgccgccgctcccgctgctgtcgccgcgcagagccggagcaggagccacggccgagaggagggaggaggaggaggaggaggtggaggaggtggaggaggtggaggaggcgccggaccgggggggatagattcccagaagtgggataactggatcagagggtgattaccctgtgtataagagtatgtgtctcactgcaccttcaatggcattgagtagatcgtcagtatttaaacagatcacatcatgcgtgagtacaagctagtggtccttggttcaggaggcgttgggaagtctgctctgacagttcagtttgttcagggaatttttgttgaaaaatatgacccaacgatagaagattcctacagaaagcaagttgaagtcgattgccaacagtgtatgctcgaaatcctggatactgcagggacagagcaatttacagcaatgagggatttgtatatgaagaacggccaaggttttgcactagtatattctattacagctcagtccacgtttaacgacttacaggacctgagggaacagattttacgggttaaggacacggaagatgttccaatgattttggttggcaataaatgtgacctggaagatgagcgagtagttggcaaagag

SEQ ID NO: 174036 - DNA, 13438 bp, Homo sapiens
  Payload ID: 14164
  Gene Symbol: RAP1B
  Gene Name: RAP1B, member of RAS oncogene family
  Uniprot ID: P61224
  ENST ID: ENST00000250559
  CDS Start-End: 232-786
acccgcgcgccccgcccgcgggcggaagctggagcgaggctgaacgcctgacgtcaaggcgacatcgccaaacctcgcccagattcaggcgtgtaaaccagccggagcggcgcggcagcggcaggaccgccgtggcgcctagagtagcgacccggggggagcgcggggcgacgctggctgcagggacccggtgacagcgtgagaggtactaggttttgacaagcttgcatcatgcgtgagtataagctagtcgttcttggctcaggaggcgttggaaagtctgctttgactgtacaatttgttcaaggaatttttgtagaaaaatacgatcctacgatagaagattcttatagaaagcaagttgaagtagatgcacaacagtgtatgcttgaaatcttggatactgcaggaacggagcaatttacagcaatgagggatttatacatgaaaaatggacaaggatttgcattagtttattccatcacagcacagtccacatttaacgatttacaagacctgagagaacagattcttcgagttaaagacactgatgatgttccaatgattcttgttggtaataagtgtgacttggaagatgaaagagttgtagggaaggaacaaggtcaaaatctagcaagacaatggaacaactgtgcattcttagaatcttctgcaaaatcaaaaataaatgttaatgagatcttttatgacctagtgcggcaaattaacagaaaaactccagtgcctgggaaggctcgcaaaaagtcatcatgtcagctgctttaatatactaaatgcattgtagctctgagccaggtctgaagaactgttgcccaattcaacagtgccagcattccaactttgttaaacctaccaacatcttaaatggactttcctgtggtggtaccctttaagaggcggatgaaagctactatatcagtttgcacattctaatcactttccagtatcacaagagagatttttacttatataatagtcctagagtttgcagctggtaaaaccagaggctacatccagtattactgctaagagacattcttcatccaccaatgttgtacatgtatgaaaatggtgtactgtatactttaacatgccccatactttgtattggagagtacaataatgtaaatcctaaaagcaccactattttagcataataaaagaaagtccaaagagctcctatatagactactccagataacttcgcttctttgatacttgtagcttattgtaattttttttaagaaattcaaggtcattattattgtacaaaataagcgctttgattaacacagctatatagtttttttaatttttaaaaaacctgtggagacggtgatcttgtctttaaaacatgatagtcctttcagtataatgtcttagattaaagacgttgcctttaatatctgttgggaaggaaatgtccagacttttcaaatctcttattatatgtttcctttttttgtttacatagggaacaatgtttatagtcgtgtgtacagtgggggtctacaacaagaagtgtatattttcaaacaattttttaatgatttaacaatttttgtaaatcattttcaggcttctgcagctgtagattctcactgtgaatcccttgcttgctcatgcataagtgtatttgcaataccaaatatacaggtttagtatttttgcctgttagtgattgtttcacatgtgtaacgttttggttgagatgttaaatggtggacgagtactgtggatgtgaatgtgggaagtaattttaatcatatgtaattggtcacaaggcctaatttgcagtaactattgctgttttatttaacaatgccttgttgctttgtatgcattaatgtttggatgtaaagattgtgtgtctatccaacagggagccacagtatttaaattgaccaacctaatgttacaactactttgaggtggccaaatgtaaactaaaagccttaattaaagtggtgcaattttgtataacttagcatcagtagttcaataaatttggattgccatgcaagggcttgcattataattacttgccacttgaatgtgttttgtgtaatgttttaacagtgctagtaaataaatacgggtttaccctggttttaattgtaataggtgcattttacacagcatggtttcataatttaacatctgggcaagccagactcattaattacaggaataaggaagtagcgagttttctggtattgtttgaatatccacataaccaccttttgaacttttccttgagaaataattttgtaaatcaagcagtattacttacgaataaatgcctttgggtaatgttcagtagctatttgatgaggtaggtaaaagaggaacgatttaacatactttcatggatgttacactatggattttttaaaatacaggattgaagttagaatattgtggttataaaaatctttgagtgatgtggattaagcacttagagaatcgatatttttcttaaatatgctataattgaattctgtaagaactgaattcttatagaattattttaaaactttttaaaaattgtaaagctcttaaaaaactttttgaaagtatttgccagctactggagcaattaatcagtgataatatctaatagaggggtatctgctaatcccctaaatacacgctgtttgaatgatacatttttaaaggctttcatgttaagaaaaagtctgattctttacaaaagggacttgttttggcagaactggttttatttataatcatttgggaaaaaaattaagcccaaaaaactgggactgtgaaacactaaaattacttcaatttactatgtcctgttacatccattgataccgccattattcaataattacttttaataaatgtttgctgcctaccagctatgtaccaggcccagttctaggctcaaacagctaaatattcattcattggacaaattaagtacttaagtataaaaattgttctaggcctaaggatgtagcagcaaccaagatcaactataaaatgctgccctcctagaatttatattctattgaagagtttctcagcctcagcactattgatgttttatgtttgataatgtattctggcgactctcctgtgcattataggaattttaatatctgcccactagatgccagtcacaccaccccagcccccaagttgtggcaaccaaaaatgtttccagacattgccagatgttccccagttggattgttgggggacaagggaggtgaacttggagggcaaaatcaccctggtgaagaactactgctctggtgggaaacaacacattagttacagatgagtgttagggttacaagatggatggtttactatatagtgaataagaatataaagtttggagccagacttcctgggtttttaatcccagctcttccagttcctactatatgcctttggttgggtgccttggtttcctcatctgtaaaatgagaatgataatacctacttcataggagagtgaaatgaatgccagtgctatcctctaggtctatatatatatatatatatatatattatatatagtacatatatagagagagtatatatatatatgtagtacagtggaggtctatataatactatatatataatttatttttttcaatgctgataggaataaggctgtggtttggcaaaaagcaccattttctcctatacaaaatagtaactgcagtttgggagcacaactcatgtagattgacttttctggtgcttaatgggaaaatactaaaataattgagtcagaaaaggcatgaattccttttcacgtccccaaggatacttgaagaaacttgagttttaggagaaaatcagagtggtctttcacttacatttttctaaaaagtgtaaaaaccctgtattgactttcttgttgattcagttgtttcttaaacgtaaatagctcatctttaccatatgtgggcattacaaatagaaatttttaaaattccatttataaaatgaagttttgccgtttttttttttaaatcattccgtctttagttgtgggacagcaaacttagaatcgaaactcatcactacaacttttctttgagttaaactcttatctgtgttttcattgaatttaatctccatctattctatctcttcttaaatcttggaaatgtaaaagggagttatagtgttttacaattaatactcttactattaccttagaagccttaaaagtgcttgcaggcttgtctcataatctgtcagtgagccttaacattgtgatttgtaagactaaaatttttttttcaaacaaaacaaatctgacagcctgggcaacatagaccccatctctacaaaaaaaaatttttttttaattagctgggcatggtggtgcacgtctgtacctgtagtcccagctattcagaaggattgcttgatcccaggagatcaaggatacagtgaactgtgttcgcgccactgcacccccacgatggcaatagagtgagaccctgtcttagaaaaaaaagataaataagtctgttctatttgttacagtgcatcaacacatttgaattttctttttttttctttttcttttttttttttgagactgagtttcgctcttgttgcccaggctggcgtacagtggtgcgatcttggctcaccccaacctctgcctcccaggttcaagcaattcttctgcctcagcctcctgaatagctgggattacaagcatgcaccaccacgcctggctaattttgtattttttggtagagatgaggtttctccatgttggttaggctggtttcgaactcccgacccaggtgatccgcctgcgtcagcctcccaaagtgctgggattacaggtgtgagccaccgcacccagcctaatcaatacatttgatatttcaagaatacatgagagaagagaggtagattgagaacagaactaaactttatatatgtttccttaactattgggaggaaaatggatgagtctgtgttgggatacctgttgaaacaagactactaaacagattaatcaactaattccataggcttgacattagtttatctttgaaaagtaaaagtaaagtgcttattgctaaataggtctgtattctaaatgctgccattttttaaaaaaagtattccatgttacacacattttaaacttgcttcttaaaacatccctgttggtggcctgtaggttactgaccttaggaattacaggctttatccaaaattaggcatatctacctgatttttgtatctgagaatcaataaatgcattcagtattctctaccgtgtttcaggcgctgtttacaatatcggaggtacagcagggattttctgcccacgtggggaaaacacacagcaaatgaacaaagctctattggtaacagtctgttaaactttctaagagctttccaactttctaagagaaaattgtaatgattttagaaaagtgagctgtcatttttcatatatataaatttttttattcataggtaatctaatttttctcatttctccaaaagggtacgaagacagtttttactatgttgttttactatgaacctagtttaacctgactttccttacagacccacataaatgagacaatccaaatttagtatttgggtcaaaatgcagggttttttcctgaaaacaaaacagcacacacatatattacaggatttttatgtaataatatattcacttcagtcaggtttcagtttttaaataggcagagatcaaaagcctctaatgtttttgtcatccgccattattacccattcaaatttctatttatgtctggtagttatgtcccctgtgagcactaatttcagaacaggaaattctattaactgtcaaactctttaatgtgcagtgcagtaggtttggagcagaggggagtaggaaggagtaaatgatataatccagtctggcctggcatggtggctcacacttgtaatcccaatgctttgggaggccgagatgggtggatcactggaagccaggagtttgagacaagcctggccaacatggtgaaaccccgtctctactaaaaataacaaaaattagacgggcacggtggtgtgtgcctgtaatcccagctactcaggaggctgaggcaggagaatcacttgaacctgggaggccgaggttgcagtgagctgagatcacaccactgcacttcagcatgggcaacagagtgagactgcaaaaaaaagaaaaagaaaaaaaaatccagtctctgctggcaaggtgtttaacaagtcaatgatgggaaagaccagtcaaataaactatcagatctaataacttttctaaccataggtgattcttcttccattatccatactaaagcaagtgactcataataaaaattgttattttgtaaaatatatggactgtttgctttatattcccaactattacatctggttgactattaacaggtcaatgtcagatttcctgagcaaatcaaccaataatgaaaaactatgtggctggcagaaaaaaataagtgcgtgtggtggtgcttgcctgtaatcccagctgcttgggaggctgaggtaggaggaactcttgagctccggtggtttgaggccagcatggataacatagggagaccctgtcacttgacaaaagtatctttccctactggaaatggaatagaatcggatgggtatggtacagcaggtagttatggggagacctctactgttctaaatgagactaatagtaaatgttacataactaaagcaacagatttgccagctgtgtgaaagataacccagagaggggtaatggtagagccagaattaacacagccagcttgtcagctacctttgaacatgtattttctgtgcagtcagatttgaagggttggaccttggagttactgacattggaggcaactgaaaccatgagtgtgaatgaaattattttcgtaagaattacttggggttaaaaatagtaataaaaaggaaagcctggcctaaacagtcttgggatggggagaagggttggagtacaaaggattgctattacaaagacatgggcagagaacaaggcaaatagctgagcagcaattgagaatacagcatcttttatggcaaagagcaaaatactattgttcctcttctagtatgctatagaccagcagtaattttgtgctctaaaatgcttatttttatctctctgtatatacttggtggtgaatttgctacaaatgtaaggagatgatgggatagtttttggaaataccatcctctaattagtaccaggtctatgtatatctgcagcaactataaagtctgtttcagagtcagtattggcaaacttatatttaaattcagctgtaacaagacatctttttttttttttttgagagagtctggctctgtcacccaggctggtgtgcagtggcgcgatctcggctcactgcaacctccgcctcccaggttcaagcagttctctgcctcagcctcccgagcagctgggattacaggcatctgccaccaagccctgctaatttttctatttttagtagagacggggtttcgccatcttggccaggctggtcttgaactcctgacctcgtgatccatctgcttcagcctcccaaagtgctgggattactggcatgagccactgcgcccggcaagttgtctttcaaatatatgcctttgcagtatttctctacttccccagtaatgtaaactttattttctctcaattttcgtaagtggtattttggtgctttacccaaaatattagggagaaaattcttctttttaattggattctcgtatgttgatctatttctattgttttctaaaaaaaagttagtgtcctagtttaaaagtatatattagtttcctagggctgctgtaacaaattatcacaaatttggtggcttaaagcaacagaaatgtactctttcacagttctgaaggtcgaagtccaaaatcaaagtgttaggatgtactcctagaggctctcggagagaacctgttcccatggcattatgccacatcacatgtgcctctatctttgtatctcctcctctctataatctttcttttaaaaggacaattgttttgacatttagggcttacccacatacttcaggataatctcatctcaaaatgcttaatcacatctgcaaagacacttttttcaaataaagttaacagacagaagtttgggggttgggatgtggacatgcctttgggagccattaacaacctaccaaaacattttaacaatttttcagtaccaaagactagtatgggtctgctccaagataactcaaaacattctgaactgaatcagcagaccctcaggtctccctagagagatcctgagcacctaggaaagccccagaattaagctactctacaaggattctgagggaagtctgggattaggtgagactttaatgagtccatcagaggtttagtatggactagttctacagttccagaagcaacatactgggtatggaatattgttaaccattgtcatcccacagaattaccttctacttgtgtcagtatatatcctgcctaccctacatattttatatttatcaatgatgacagaaacttccccccttttacttagatctaatagtaatataacaaacttttctttttcattttcagacatatccagagggttttctcttcatctcacgcatcccacctttaatcagacatatgtgattcatatgagagaaaattagtgtttctgagaccaaatggtggtgtttataagattttgcttctgcactgaattcaatgttttatttactgcttggttattttgtttttgttttttaagaaatgggaggagtgtaatatctagaggtacatgaaaaaaagaaatggaaggaatggacaggcccagaattaaatgataaaaactcatctggttggaatgaagtacactgaacatttgaggaagttagagattaattcaacccagtgggttttggggtttttatatgtgttagtacattcagcgttagggttgggtttcttgtctctgtaatcacttctcaaaaatgaatttgggcttctccagatagcctttttatccatttattatttcaagtaatggtataaggaaattgtaaccatttgtgtgctttacatgtttaagatacaaacttacagttcccagaagtcaattcagtcattctctataagagctgttgtggaaaaagttctcacttcacttactcattcctttgcattttccaactttagtaaagcatgacttcatgccttggatcatacaggatttcaacgggagatttataagtctattttgttagaataaaaagcaataatacttcctgaaatacatcttgggctctttgcagaagctgaactatctggtaattactatttagcaaacagctaacagctagctcttaatttttcagaaataagaggacatcattggccactatcataccactaattttattccaccaatgctttcacagaggatgtcaccaaagaaagaagtggcatccactacccctcccccatccttccactctgaaccagtacaggatattctcatggtcagggcattctctccttggcaggatgtagttaatgacatatgcagaattaatgacttggttgccctaggccccccgtcaaggcttttgttcaagggagagtaaagaggataggtctcagtatgtcatccaaacaggatggatacagaatgccaaccaggttagccctggcaagttaagacattttacagtgccactacctacctccatactgtatcagaggagccagttgcacagtgttgatctccctaagactattataataaggaaggggtttttttcttagcccagttactactaaaactcactcagaggagcaagtgaaatttgtcacaattggctcgactgctttatctcactttgaaaaagaaaagttacaaattctagtaagcaaaagattttttgtgaccaggtctccctgacctgcacaaaataaactcttcatgagttaaaccaaaacagatttaatgtctaaacttaaatctagtttgacattaacttcttttccaaagagaaataacgttaacaatctgaaatcatccctgcacagactttcttggctcttcttttctgccgtcctatgaatcacaaatagaagtttaagaaagctgtcaggtaggcgcctcaaattcatttaaaatgaggaatgatgaaagaataagaaaaaccagcaaatgatagcttacttattcagttatttggcttgatactgcttgaaagtgacatttctagattaaagatctgataagctctgatagttgggaaataatactagttatttcttggacaccctaagatgtgccaccattgctctaagcactttacatgtgttgttcaaccctcagcaatgctatgaaataggggctgagtctcctaatagagctaatgaatgcattatatcaaaagaatgaaatgttaaatatagacactggaaaataaaattacttttgcttgtattataagtgaataccttgaaagctcaaaaaaatctattagaagtattcaggaacttggctggatataagataagcatgccaaaaatcaatagcttttctttatatttataaaaaatacctacaagttgatatagtaaacacgacagataaaaactaaatgccttaaggtataaggctaagaaagaactattataaactcttattgaaggacataaatcaagatctgaacaaatacactgggaagataatatcataaaaatatcaattcccccaaattagcatgttaatgtataatgattacaatttaaatttcaactggctgaggctttgtttttgtttttgattttttaatagactggatgttggtcttgaactcctgggctcaagcaagtgtcacaccttggcctcccaaagtggattataggcatgagccaccgtgccagacttgggtgaggttttgaaattgaaattaagcaaaatgggccgggcacggtggctcacacctgtaatcccagcactttcggaggccgaggggggcggatcacgaggtcaggagatggagaccatcctggctaacatggtgaaaccccgtctctactaaaaatacaaaaattagccaggcatggtggcaggtgcctgtaatcccagctactctggaggctgaggcaggagaatcgcttgaacccaggaggcagagggtgcagtagctgagattgtaccactgcactccagcctgggtgacagagcaaatctctatctcaagaaaaagaaaaaagaaaagaaattaagcaaaatgatcttaaagttcaagtgaaagagtagagtagaactgagtccagaactagattccagtatatgacgtttatacgtgacaaaaatatatttctttttctttcttttttttttttttttttttgagacagtttccctcttgttgcccagactggagtataatggcacgatcttggttcaccacaacctccgcctcccaggttcaagtgattctcctgcctcagcctcccgagtagctgggattacaggcatgtgccaccacgcctgggctaattttgtattttagtagagatggggtttctccatgttggtcaggctagttgcgaactcccaacctcaggtcatctgcccgcctcagcctcccaaagtactgggattacaggtgtgagccactgtgcccggccgacaaaaatatatttcaatagaaaatagtatcagtaaaatgctagcacaactaactatctgtctaaagacaataaaagttcaacccctatatcatgcaaaaagcactttccagatatattaaaatgttttcaagctataaagtaaaacagtagaagtcttagaagaaaatctaagagactagaaatctagagatagggtagaccttcttagctaatttttaaaaatgaagctatatttaagatatatatttcaagtaaataataagtgtgtgtgtgtgtacacacagatgcttctcagcttacaatggggttatgtcccaataagcccatcagaagtcaaaaatgtaagtcgaaaatgcatttaataccctgataaatccatcacaaagctgaaaaattataagtaaaactgtaagtcacagactgtatatataaatttaaaatttggcaaaatatattgcaaagtcaaatttgggaaagtatagcacagataaaagattaaactattcacggccaggcacggtggatcatgcctgtaatcccaacactttgggaggccgaggcgggtggatcacctgaggtcaggagtttgagactagcctggccaacgtggagaaaccccatctctactaaaaatacaaaattagctgggtgtggtggtgcatgcctgtaatcctagctactcaggaggctgaggcaggagaattgcttgaacctaggaggcgaaagttgcagtgagccaagatggtgccattgcactccagcctgggcaacaagagtgatactccgtttaaaaaaaaaaaaaaaaaaaaaggtaaactattcaaaagataaatggttgaaagatatataactaggcagtttagataagaacaaatccaaatggcccatcaacataaaaagatgctctaactgtagccagagaaatacgaatcaaagtaccaacgagcccaacacatggacgaaaacttcagagaacactacagtcccagaagagaggtaaagggcaagaaatgaatcatttattgctgatggaaatgtgcattgtagagctgatatctgttcaaattaaatatgcatatttgacctcaattctactactgatatctacaccaaggaaatgaaaggaaatgcacaagattatttattgccacactctagaaggaaaaacagagtgcatgcccatcaatagaatagttgaataaattatgattcatgcataatatagaacattatgcattcatttaaaaatgagtttgatgtttaaaggttgacttagaaggattcccgtgcaaagtgaacaaaacagaataccgagaaggatgtatgtgagggatgcatgtgggcacctgggaaaggagatgaagaaagcaactgaaggatatttaccaagttgttaatatgcattacctgacatggtgatataggagtaggggtgaggaagtgaaggatctgagtaggtggaaaaagaaaagcaaaagtacaacagcgggagaaaaaacaggatgactcgtctagaagagacattgtcagtaacaagtaaataacattttctggaatataaaaaaaaaagctatatgaatgtcatcattatatgtaaaatatgaatgtaaaatacatgggaggataatatgcattaataaaaattatggtgctggcaacagta

SEQ ID NO: 174037 - DNA, 1017 bp, Homo sapiens
  Payload ID: 14164
  Gene Symbol: RAP1B
  Gene Name: RAP1B, member of RAS oncogene family
  ENST ID: ENST00000378985
  CDS Start-End: 135-491
aggcgtgtaaaccagccggagcggcgcggcagcggcaggaccgccgtggcgcctagagtagcgacccggggggagcgcggggcgacgctggctgcagggacccggtgacagcgtgagaggagcaatttacagcaatgagggatttatacatgaaaaatggacaaggatttgcattagtttattccatcacagcacagtccacatttaacgatttacaagacctgagagaacagattcttcgagttaaagacactgatgatgttccaatgattcttgttggtaataagtgtgacttggaagatgaaagagttgtagggaaggaacaaggtcaaaatctagcaagacaatggaacaactgtgcattcttagaatcttctgcaaaatcaaaaataaatgttaatgagatcttttatgacctagtgcggcaaattaacagaaaaactccagtgcctgggaaggctcgcaaaaagtcatcatgtcagctgctttaatatactaaatgcattgtagctctgagccaggtatgttcacttatctttcctctaacttttaatcactcaaccttattaagggcactctgtcatgaaagcaagtatagacttctttttgttggttctgaaaaataaatggtttatttttataagatatccatgagttagtatgctatcttattaattatttacttatcatcatgagtaaagtatttcacataagtattctttttttgagatggagtttcactctgtcacccaggctggagtgcagtggcgcaatatcagctccctgcaacctccgcctcccaggttcaagcaatgcttctgcctcagcctcccgagtagctgggattacaggcacgtgccaccacgcccggctagtttttttgtatttttagtagagatggtgtttcaccattgttggccaggatggtctcaatctcttgacctcgtgatctgcccacctcggcctcccaaagtgctgagattacaggcgtgagccaccactcccagccaaccccgt

SEQ ID NO: 174038 - DNA, 2049 bp, Homo sapiens
  Payload ID: 14164
  Gene Symbol: RAP1B
  Gene Name: RAP1B, member of RAS oncogene family
  Uniprot ID: P61224
  ENST ID: ENST00000393436
  CDS Start-End: 222-776
gggcggaagctggagcgaggctgaacgcctgacgtcaaggcgacatcgccaaacctcgcccagattcaggcgtgtaaaccagccggagcggcgcggcagcggcaggaccgccgtggcgcctagagtagcgacccggggggagcgcggggcgacgctggctgcagggacccggtgacagcgtgagaggttcgcagagtactaggttttgacaagcttgcatcatgcgtgagtataagctagtcgttcttggctcaggaggcgttggaaagtctgctttgactgtacaatttgttcaaggaatttttgtagaaaaatacgatcctacgatagaagattcttatagaaagcaagttgaagtagatgcacaacagtgtatgcttgaaatcttggatactgcaggaacggagcaatttacagcaatgagggatttatacatgaaaaatggacaaggatttgcattagtttattccatcacagcacagtccacatttaacgatttacaagacctgagagaacagattcttcgagttaaagacactgatgatgttccaatgattcttgttggtaataagtgtgacttggaagatgaaagagttgtagggaaggaacaaggtcaaaatctagcaagacaatggaacaactgtgcattcttagaatcttctgcaaaatcaaaaataaatgttaatgagatcttttatgacctagtgcggcaaattaacagaaaaactccagtgcctgggaaggctcgcaaaaagtcatcatgtcagctgctttaatatactaaatgcattgtagctctgagccaggtctgaagaactgttgcccaattcaacagtgccagcattccaactttgttaaacctaccaacatcttaaatggactttcctgtggtggtaccctttaagaggcggatgaaagctactatatcagtttgcacattctaatcactttccagtatcacaagagagatttttacttatataatagtcctagagtttgcagctggtaaaaccagaggctacatccagtattactgctaagagacattcttcatccaccaatgttgtacatgtatgaaaatggtgtactgtatactttaacatgccccatactttgtattggagagtacaataatgtaaatcctaaaagcaccactattttagcataataaaagaaagtccaaagagctcctatatagactactccagataacttcgcttctttgatacttgtagcttattgtaattttttttaagaaattcaaggtcattattattgtacaaaataagcgctttgattaacacagctatatagtttttttaatttttaaaaaacctgtggagacggtgatcttgtctttaaaacatgatagtcctttcagtataatgtcttagattaaagacgttgcctttaatatctgttgggaaggaaatgtccagacttttcaaatctcttattatatgtttcctttttttgtttacatagggaacaatgtttatagtcgtgtgtacagtgggggtctacaacaagaagtgtatattttcaaacaattttttaatgatttaacaatttttgtaaatcattttcaggcttctgcagctgtagattctcactgtgaatcccttgcttgctcatgcataagtgtatttgcaataccaaatatacaggtttagtatttttgcctgttagtgattgtttcacatgtgtaacgttttggttgagatgttaaatggtggacgagtactgtggatgtgaatgtgggaagtaattttaatcatatgtaattggtcacaaggcctaatttgcagtaactattgctgttttatttaacaatgccttgttgctttgtatgcattaatgtttggatgtaaagattgtgtgtctatccaacagggagccacagtatttaaattgaccaacctaatgttacaactactttgaggtggccaaatgtaaactaaaagccttaattaaagtggtgcaattttgtataacttagcatcagtagttcaataaatttggattgccatgcaagggcttgcattataa

SEQ ID NO: 174039 - DNA, 468 bp, Homo sapiens
  Payload ID: 14164
  Gene Symbol: RAP1B
  Gene Name: RAP1B, member of RAS oncogene family
  ENST ID: ENST00000422358
  CDS Start-End: 371-468
aaacctcgcccagattcaggcgtgtaaaccagccggagcggcgcggcagcggcaggaccgccgtggcgcctagagtagcgacccggggggagcgcggggcgacgctggctgcagggacccggtgacagcgtgagaggttcgcagagcatggtggtgtgttcctgtagtcccagctactcgggaggctgagcaggagaatcgctggaacctggcaggcagaacttgcagtgagctgagatcgtgccactgcactccagcctaggcgacagagtgagactccgtctcaaacaacaacaacaacaaaagctcctcgatggaaccatttgatagtgacaaggattgaagtactaggttttgacaagcttgcatcatgcgtgagtataagctagtcgttcttggctcaggaggcgttggaaagtctgctttgactgtacaatttgttcaaggaatttttgtagaaaaatacga

SEQ ID NO: 174040 - DNA, 1466 bp, Homo sapiens
  Payload ID: 14164
  Gene Symbol: RAP1B
  Gene Name: RAP1B, member of RAS oncogene family
  Uniprot ID: P61224
  ENST ID: ENST00000450214
  CDS Start-End: 163-591
aaacctcgcccagattcaggcgtgtaaaccagccggagcggcgcggcagcggcaggaccgccgtggcgcctagagtagcgacccggggggagcgcggggcgacgctggctgcagggacccggtgacagcgtgagaggtactaggttttgacaagcttgcatcatgcgtgagtataagctagtcgttcttggctcaggaggcgttggaaagtctgctttggagcaatttacagcaatgagggatttatacatgaaaaatggacaaggatttgcattagtttattccatcacagcacagtccacatttaacgatttacaagacctgagagaacagattcttcgagttaaagacactgatgatgttccaatgattcttgttggtaataagtgtgacttggaagatgaaagagttgtagggaaggaacaaggtcaaaatctagcaagacaatggaacaactgtgcattcttagaatcttctgcaaaatcaaaaataaatgttaatgagatcttttatgacctagtgcggcaaattaacagaaaaactccagtgcctgggaaggctcgcaaaaagtcatcatgtcagctgctttaatatactaaatgcattgtagctctgagccaggtctgaagaactgttgcccaattcaacagtgccagcattccaactttgttaaacctaccaacatcttaaatggactttcctgtggtggtaccctttaagaggcggatgaaagctactatatcagtttgcacattctaatcactttccagtatcacaagagagatttttacttatataatagtcctagagtttgcagctggtaaaaccagaggctacatccagtattactgctaagagacattcttcatccaccaatgttgtacatgtatgaaaatggtgtactgtatactttaacatgccccatactttgtattggagagtacaataatgtaaatcctaaaagcaccactattttagcataataaaagaaagtccaaagagctcctatatagactactccagataacttcgcttctttgatacttgtagcttattgtaattttttttaagaaattcaaggtcattattattgtacaaaataagcgctttgattaacacagctatatagtttttttaatttttaaaaaacctgtggagacggtgatcttgtctttaaaacatgatagtcctttcagtataatgtcttagattaaagacgttgcctttaatatctgttgggaaggaaatgtccagacttttcaaatctcttattatatgtttcctttttttgtttacatagggaacaatgtttatagtcgtgtgtacagtgggggtctacaacaagaagtgtatattttcaaacaattttttaatgatttaacaatttttgtaaatcattttcaggcttctgcagctgtagattctcactgtgaatcccttgcttgctcatgcataagtgtatttgc

SEQ ID NO: 174041 - DNA, 855 bp, Homo sapiens
  Payload ID: 14164
  Gene Symbol: RAP1B
  Gene Name: RAP1B, member of RAS oncogene family
  ENST ID: ENST00000425247
  CDS Start-End: 384-855
gacatcgccaaacctcgcccagattcaggcgtgtaaaccagccggagcggcgcggcagcggcaggaccgccgtggcgcctagagtagcgacccggggggagcgcggggcgacgctggctgcagggacccggtgacagcgtgagaggttcgcagaccaggcatggtggtgtgttcctgtagtcccagctactcgggaggctgagcaggagaatcgctggaacctggcaggcagaacttgcagtgagctgagatcgtgccactgcactccagcctaggcgacagagtgagactccgtctcaaacaacaacaacaacaaaagctcctcgatggaaccatttgatagtgacaaggattgaagtactaggttttgacaagcttgcatcatgcgtgagtataagctagtcgttcttggctcaggaggcgttggaaagtctgctttgactgtacaatttgttcaaggaatttttgtagaaaaatacgatcctacgatagaagattcttatagaaagcaagttgaagtagatgcacaacagtgtatgcttgaaatcttggatactgcaggaacggagcaatttacagcaatgagggatttatacatgaaaaatggacaaggatttgcattagtttattccatcacagcacagtccacatttaacgatttacaagacctgagagaacagattcttcgagttaaagacactgatgatgttccaatgattcttgttggtaataagtgtgacttggaagatgaaagagttgtagggaaggaacaaggtcaaaatctagcaagacaatggaacaactgtgcattcttagaatcttctgcaaaatcaaaaataaatgttaatgaggtct

SEQ ID NO: 174042 - DNA, 640 bp, Homo sapiens
  Payload ID: 14164
  Gene Symbol: RAP1B
  Gene Name: RAP1B, member of RAS oncogene family
  ENST ID: ENST00000545270
  CDS Start-End: 274-640
tcgcccagattcaggcgtgtaaaccagccggagcggcgcggcagcggcaggaccgccgtggcgcctagagtagcgacccggggggagcgcggggcgacgctggctgcagggacccggtgacagcgtgagagggtctcacttgtcacccaggctggagtgcagtggcacaaacatgggtcactgcagcctcgactcctgggctcgagtgatgctcccacctcagcctctcaagtagctgggactacaggtactaggttttgacaagcttgcatcatgcgtgagtataagctagtcgttcttggctcaggaggcgttggaaagtctgctttgactgtacaatttgttcaaggaatttttgtagaaaaatacgatcctacgatagaagattcttatagaaagcaagttgaagtagatgcacaacagtgtatgcttgaaatcttggatactgcaggaacggagcaatttacagcaatgagggatttatacatgaaaaatggacaaggatttgcattagtttattccatcacagcacagtccacatttaacgatttacaagacctgagagaacagattcttcgagttaaagacactgatgatgttccaatgattcttgttggtaataagtgtgacttggaagatg

SEQ ID NO: 174043 - DNA, 633 bp, Homo sapiens
  Payload ID: 14164
  Gene Symbol: RAP1B
  Gene Name: RAP1B, member of RAS oncogene family
  ENST ID: ENST00000542018
  CDS Start-End: 340-633
agattcaggcgtgtaaaccagccggagcggcgcggcagcggcaggaccgccgtggcgcctagagtagcgacccggggggagcgcggggcgacgctggctgcagggacccgccaggcatggtggtgtgttcctgtagtcccagctactcgggaggctgagcaggagaatcgctggaacctggcaggcagaacttgcagtgagctgagatcgtgccactgcactccagcctaggcgacagagtgagactccgtctcaaacaacaacaacaacaaaagctcctcgatggaaccatttgatagtgacaaggattgaagtactaggttttgacaagcttgcatcatgcgtgagtataagctagtcgttcttggctcaggaggcgttggaaagtctgctttgactgtacaatttgttcaaggaatttttgtagaaaaatacgatcctacgatagaagattcttatagaaagcaagttgaagtagatgcacaacagtgtatgcttgaaatcttggatactgcaggaacggagcaatttacagcaatgagggatttatacatgaaaaatggacaaggatttgcattagtttattccatcacagcacagtccacatttaacgatttacaagacctgagagaa

SEQ ID NO: 174044 - DNA, 552 bp, Homo sapiens
  Payload ID: 14164
  Gene Symbol: RAP1B
  Gene Name: RAP1B, member of RAS oncogene family
  ENST ID: ENST00000545720
  CDS Start-End: 299-552
aggaccgccgtggcgcctagagtagcgacccggggggagcgcggggcgacgctggctgcagggacccggtgacagcgtgagaggttcgcagaccaggcatggtggtgtgttcctgtagtcccagctactcgggaggctgagcaggagaatcgctggaacctggcaggcagaacttgctggagtgcagtggcacaaacatgggtcactgcagcctcgactcctgggctcgagtgatgctcccacctcagcctctcaagtagctgggactacaggtactaggttttgacaagcttgcatcatgcgtgagtataagctagtcgttcttggctcaggaggcgttggaaagtctgctttgactgtacaatttgttcaaggaatttttgtagaaaaatacgatcctacgatagaagattcttatagaaagcaagttgaagtagatgcacaacagtgtatgcttgaaatcttggatactgcaggaacggagcaatttacagcaatgagggatttatacatgaaaaatggacaaggatttgcattagtttattccatcac

SEQ ID NO: 174045 - DNA, 1072 bp, Homo sapiens
  Payload ID: 14164
  Gene Symbol: RAP1B
  Gene Name: RAP1B, member of RAS oncogene family
  Uniprot ID: P61224
  ENST ID: ENST00000537460
  CDS Start-End: 366-920
aaacctcgcccagattcaggcgtgtaaaccagccggagcggcgcggcagcggcaggaccgccgtggcgcctagagtagcgacccggggggagcgcggggcgacgctggctgcagggacccggtgacagcgtgagagccaggcatggtggtgtgttcctgtagtcccagctactcgggaggctgagcaggagaatcgctggaacctggcaggcagaacttgcagtgagctgagatcgtgccactgcactccagcctaggcgacagagtgagactccgtctcaaacaacaacaacaacaaaagctcctcgatggaaccatttgatagtgacaaggattgaagtactaggttttgacaagcttgcatcatgcgtgagtataagctagtcgttcttggctcaggaggcgttggaaagtctgctttgactgtacaatttgttcaaggaatttttgtagaaaaatacgatcctacgatagaagattcttatagaaagcaagttgaagtagatgcacaacagtgtatgcttgaaatcttggatactgcaggaacggagcaatttacagcaatgagggatttatacatgaaaaatggacaaggatttgcattagtttattccatcacagcacagtccacatttaacgatttacaagacctgagagaacagattcttcgagttaaagacactgatgatgttccaatgattcttgttggtaataagtgtgacttggaagatgaaagagttgtagggaaggaacaaggtcaaaatctagcaagacaatggaacaactgtgcattcttagaatcttctgcaaaatcaaaaataaatgttaatgagatcttttatgacctagtgcggcaaattaacagaaaaactccagtgcctgggaaggctcgcaaaaagtcatcatgtcagctgctttaatatactaaatgcattgtagctctgagccaggtctgaagaactgttgcccaattcaacagtgccagcattccaactttgttaaacctaccaacatcttaaatggactttcctgtggtggtaccctttaagaggcggatgaaagctactatatc

SEQ ID NO: 174046 - DNA, 1060 bp, Homo sapiens
  Payload ID: 14164
  Gene Symbol: RAP1B
  Gene Name: RAP1B, member of RAS oncogene family
  Uniprot ID: P61224
  ENST ID: ENST00000542145
  CDS Start-End: 142-555
gtgtaaaccagccggagcggcgcggcagcggcaggaccgccgtggcgcctagagtagcgacccggggggagcgcggggcgacgctggctgcagggacccggtgacagcgtgagaggtactaggttttgacaagcttgcatcatgcgtgagtataagctagtcgttcttggctcaggaggcgttggaaagtctgctttgactgtacaatttgttcaaggaatttttgtagaaaaatacgatcctacgatagaagattcttatagaaagcaagttgaagtagatgcacaacagtgtatgcttgaaatcttggatactgcaggaacggttccaatgattcttgttggtaataagtgtgacttggaagatgaaagagttgtagggaaggaacaaggtcaaaatctagcaagacaatggaacaactgtgcattcttagaatcttctgcaaaatcaaaaataaatgttaatgagatcttttatgacctagtgcggcaaattaacagaaaaactccagtgcctgggaaggctcgcaaaaagtcatcatgtcagctgctttaatatactaaatgcattgtagctctgagccaggtctgaagaactgttgcccaattcaacagtgccagcattccaactttgttaaacctaccaacatcttaaatggactttcctgtggtggtaccctttaagaggcggatgaaagctactatatcagtttgcacattctaatcactttccagtatcacaagagagatttttacttatataatagtcctagagtttgcagctggtaaaaccagaggctacatccagtattactgctaagagacattcttcatccaccaatgttgtacatgtatgaaaatggtgtactgtatactttaacatgccccatactttgtattggagagtacaataatgtaaatcctaaaagcaccactattttagcataataaaagaaagtccaaagagctcctatatagactactccagataacttcgcttctttgatacttgtagcttattgtaattttttttaagaaattcaaggtcattattattgtac

SEQ ID NO: 174047 - DNA, 571 bp, Homo sapiens
  Payload ID: 14164
  Gene Symbol: RAP1B
  Gene Name: RAP1B, member of RAS oncogene family
  ENST ID: ENST00000540781
  CDS Start-End: 155-571
gtgtaaaccagccggagcggcgcggcagcggcaggaccgccgtggcgcctagagtagcgacccggggggagcgcggggcgacgctggctgcagggacccggtgacagcgtgagaggttcgcagagtgagtactaggttttgacaagcttgcatcatgcgtgagtataagctagtcgttcttggctcaggaggcgttggaaagtctgctttgactgtacaatttgttcaaggaatttttgtagaaaaatacgatcctacgatagaagattcttatagaaagcaagttgaagtagatgcacaacagtgtatgcttgaaatcttggatactgcaggaacggagcaatttacagcaatgagggatttatacatgaaaaatggacaaggatttgcattagtttattccatcacagcacagtccacatttaacgatttacaagacctgagagaacagattcttcgagttaaagacactgatgatgttccaatgattcttgttggtaataagtgtgacttggaagatgaaagagttgtagggaaggaacaaggtcaaaatctagcaagacaatggaac

SEQ ID NO: 174048 - DNA, 550 bp, Homo sapiens
  Payload ID: 14164
  Gene Symbol: RAP1B
  Gene Name: RAP1B, member of RAS oncogene family
  ENST ID: ENST00000538877
  CDS Start-End: 391-550
agccggagcggcgcggcagcggcaggaccgccgtggcgcctagagtagcgacccggggggagcgcggggcgacgctggctgcagggacccggtgacagcgtgagaggttcgcagagagctctcaacttaatcatccttcagcaaaaaagaattaagactagccaggcatggtggtgtgttcctgtagtcccagctactcgggaggctgagcaggagaatcgctggaacctggcaggcagaacttgcagtgagctgagatcgtgccactgcactccagcctaggcgacagagtgagactccgtctcaaacaacaacaacaacaaaagctcctcgatggaaccatttgatagtgacaaggattgaagtactaggttttgacaagcttgcatcatgcgtgagtataagctagtcgttcttggctcaggaggcgttggaaagtctgctttgactgtacaatttgttcaaggaatttttgtagaaaaatacgatcctacgatagaagattcttatagaaagcaagttgaagtagatgcacaacagtgtatgcttg

SEQ ID NO: 174049 - DNA, 734 bp, Homo sapiens
  Payload ID: 14164
  Gene Symbol: RAP1B
  Gene Name: RAP1B, member of RAS oncogene family
  ENST ID: ENST00000543697
  CDS Start-End: 132-542
gccggagcggcgcggcagcggcaggaccgccgtggcgcctagagtagcgacccggggggagcgcggggcgacgctggctgcagggacccggtgacagcgtgagaggtactaggttttgacaagcttgcatcatgcgtgagtataagctagtcgttcttggctcaggaggcgttggaaagtctgctttgactgtacaatttgttcaaggaatttttgtagaaaaatacgatcctacgatagaagattcttatagaaagcaagttgaagtagatgcacaacagtgtatgcttgaaatcttggatactgcaggaacggagcaatttacagcaatgagggatttatacatgaaaaatggacaaggatttgcattagtttattccatcacagcacagtccacatttaacgatttacaagacctgagagaacagattcttcgagttaaagacactgatgatatcttttatgacctagtgcggcaaattaacagaaaaactccagtgcctgggaaggctcgcaaaaagtcatcatgtcagctgctttaatatactaaatgcattgtagctctgagccaggtctgaagaactgttgcccaattcaacagtgccagcattccaactttgttaaacctaccaacatcttaaatggactttcctgtggtggtaccctttaagaggcggatgaaagctactatatcagtttgcacattctaatcactttccagtatcacaagagag

SEQ ID NO: 174050 - DNA, 714 bp, Homo sapiens
  Payload ID: 14164
  Gene Symbol: RAP1B
  Gene Name: RAP1B, member of RAS oncogene family
  Uniprot ID: P61224
  ENST ID: ENST00000341355
  CDS Start-End: 156-710
aaacctcgcccagattcaggcgtgtaaaccagccggagcggcgcggcagcggcaggaccgccgtggcgcctagagtagcgacccggggggagcgcggggcgacgctggctgcagggacccggtgacagcgtgagaggttttgacaagcttgcatcatgcgtgagtataagctagtcgttcttggctcaggaggcgttggaaagtctgctttgactgtacaatttgttcaaggaatttttgtagaaaaatacgatcctacgatagaagattcttatagaaagcaagttgaagtagatgcacaacagtgtatgcttgaaatcttggatactgcaggaacggagcaatttacagcaatgagggatttatacatgaaaaatggacaaggatttgcattagtttattccatcacagcacagtccacatttaacgatttacaagacctgagagaacagattcttcgagttaaagacactgatgatgttccaatgattcttgttggtaataagtgtgacttggaagatgaaagagttgtagggaaggaacaaggtcaaaatctagcaagacaatggaacaactgtgcattcttagaatcttctgcaaaatcaaaaataaatgttaatgagatcttttatgacctagtgcggcaaattaacagaaaaactccagtgcctgggaaggctcgcaaaaagtcatcatgtcagctgctttaatata

SEQ ID NO: 174051 - DNA, 606 bp, Homo sapiens
  Payload ID: 14164
  Gene Symbol: RAP1B
  Gene Name: RAP1B, member of RAS oncogene family
  ENST ID: ENST00000534899
  CDS Start-End: 345-606
aggcgtgtaaaccagccggagcggcgcggcagcggcaggaccgccgtggcgcctagagtagcgacccggggggagcgcggggcgacgctggctgcagggacccggtgacagcgtgagaggcatggtggtgtgttcctgtagtcccagctactcgggaggctgagcaggagaatcgctggaacctggcaggcagaacttgcagtgagctgagatcgtgccactgcactccagcctaggcgacagagtgagactccgtctcaaacaacaacaacaacaaaagctcctcgatggaaccatttgatagtgacaaggattgaagtactaggttttgacaagcttgcatcatgcgtgagtataagctagtcgttcttggctcaggaggcgttggaaagtctgctttgactgtacaatttgttcaaggaatttttgtagaaaaatacgatcctacgatagaagattcttatagaaagcaagttgaagtagatgcacaacagtgtatgcttgaaatcttggatactgcaggaacggagcaatttacagcaatgagggatttatacatgaaaaatggacaaggatttgcattagtttattccatcacagcacagt

SEQ ID NO: 174052 - DNA, 509 bp, Homo sapiens
  Payload ID: 14164
  Gene Symbol: RAP1B
  Gene Name: RAP1B, member of RAS oncogene family
  ENST ID: ENST00000535492
  CDS Start-End: 201-509
gtgtaaaccagccggagcggcgcggcagcggcaggaccgccgtggcgcctagagtagcgacccggggggagcgcggggcgacgctggctgcagggacccggtgacagcgtgagaggtactaggttttgacaagcttgcatcatgcgtgagtataagctagtcgttcttggctcaggaggcgttggaaagtctgctttgcaatgagggatttatacatgaaaaatggacaaggatttgcattagtttattccatcacagcacagtccacatttaacgatttacaagacctgagagaacagattcttcgagttaaagacactgatgatgttccaatgattcttgttggtaataagtgtgacttggaagatgaaagagttgtagggaaggaacaaggtcaaaatctagcaagacaatggaacaactgtgcattcttagaatcttctgcaaaatcaaaaataaatgttaatgagatcttttatgacctagtgcggcaaattaacagaaaaact

SEQ ID NO: 174053 - DNA, 701 bp, Homo sapiens
  Payload ID: 14164
  Gene Symbol: RAP1B
  Gene Name: RAP1B, member of RAS oncogene family
  ENST ID: ENST00000541216
  CDS Start-End: 46-585
cccggtgacagcgtgagaggtactaggttttgacaagcttgcatcatgcgtgagtataagctagtcgttcttggctcaggaggcgttggaaagtctgctttgactgtacaatttgttcaaggaatttttgtagaaaaatacgatcctacgatagaagattcttatagaaagcaagttgaagtagatgcacaacagtgtatgcttgaaatcttggatactgcaggaacggagcaatttacagcaatgagggatttatacatgaaaaatggacaaggatttgcattagtttattccatcacagcacagtccacatttaacgatttacaagacctgagagaacagattcttcgagttaaagacactgatgatgttccaatgattcttgttggtaataagtgtgacttggaagatgaaagagttgtagggaaggaacaaggtcaaaatctagcaagacaatggaacaactgtgcattcttagaatcttctgcaaaatcaaaaataaatgttaatgaggtatggtcaaatatacttaaaatgggtcttcatttgaagtacaacattgaagatgaatggaaaatgtcttaaccccaagttaatatgtactcagggtaatatgttgatgttacaggcaaaaaaaaaaaaccctcatgttaaatgtatctatgtagtaaataaacaatactatttcagtctctattaaa

SEQ ID NO: 174054 - DNA, 530 bp, Homo sapiens
  Payload ID: 14164
  Gene Symbol: RAP1B
  Gene Name: RAP1B, member of RAS oncogene family
  ENST ID: ENST00000453560
  CDS Start-End: 148-530
aggcgtgtaaaccagccggagcggcgcggcagcggcaggaccgccgtggcgcctagagtagcgacccggggggagcgcggggcgacgctggctgcagggacccggtgacagcgtgagaggttcgcagagttttgacaagcttgcatcatgcgtgagtataagctagtcgttcttggctcaggaggcgttggaaagtctgctttgactgtacaatttgttcaaggaatttttgtagaaaaatacgatcctacgatagaagattcttatagaaagcaagttgaagtagatgcacaacagtgtatgcttgaaatcttggatactgcaggaacggagcaatttacagcaatgagggatttatacatgaaaaatggacaaggatttgcattagtttattccatcacagcacagtccacatttaacgatttacaagacctgagagaacagattcttcgagttaaagacactgatgatgttccaatgattcttgttggtaataagtgtgacttggaagatgaaagagttgtagggaa

SEQ ID NO: 174055 - DNA, 587 bp, Homo sapiens
  Payload ID: 14164
  Gene Symbol: RAP1B
  Gene Name: RAP1B, member of RAS oncogene family
  ENST ID: ENST00000538980
  CDS Start-End: 223-587
cagattcaggcgtgtaaaccagccggagcggcgcggcagcggcaggaccgccgtggcgcctagagtagcgacccggggggagcgcggggcgacgctggctgcagggacccggtgacagcgtgagagactgtacaatttgttcaaggaatttttgtagaaaaatacgatcctacgatagaagattcttatagaaagcaagttgaagtagatgcacaacagtgtatgcttgaaatcttggatactgcaggaacggagcaatttacagcaatgagggatttatacatgaaaaatggacaaggatttgcattagtttattccatcacagcacagtccacatttaacgatttacaagacctgagagaacagattcttcgagttaaagacactgatgatgttccaatgattcttgttggtaataagtgtgacttggaagatgaaagagttgtagggaaggaacaaggtcaaaatctagcaagacaatggaacaactgtgcattcttagaatcttctgcaaaatcaaaaataaatgttaatgagatcttttatgacctagtgcggcaaattaacagaaaaactccagtgcctgg

SEQ ID NO: 174056 - DNA, 591 bp, Homo sapiens
  Payload ID: 14164
  Gene Symbol: RAP1B
  Gene Name: RAP1B, member of RAS oncogene family
  ENST ID: ENST00000538283
  CDS Start-End: 288-591
aaacctcgcccagattcaggcgtgtaaaccagccggagcggcgcggcagcggcaggaccgccgtggcgcctagagtagcgacccggggggagcgcggggcgacgctggctgcagggacccggtgacagcgtgagaggttcgcagaggtctcacttgtcacccaggctggagtgcagtggcacaaacatgggtcactgcagcctcgactcctgggctcgagtgatgctcccacctcagcctctcaagtagctgggactacaggtactaggttttgacaagcttgcatcatgcgtgagtataagctagtcgttcttggctcaggaggcgttggaaagtctgctttgactgtacaatttgttcaaggaatttttgtagaaaaatacgatcctacgatagaagattcttatagaaagcaagttgaagtagatgcacaacagtgtatgcttgaaatcttggatactgcaggaacggagcaatttacagcaatgagggatttatacatgaaaaatggacaaggatttgcattagtttattccatcacagcacagtccacatttaacgatttacaagacctgagagaacagattcttc

SEQ ID NO: 174057 - DNA, 977 bp, Homo sapiens
  Payload ID: 14164
  Gene Symbol: RAP1B
  Gene Name: RAP1B, member of RAS oncogene family
  Uniprot ID: P61224
  ENST ID: ENST00000539091
  CDS Start-End: 151-579
gtgtaaaccagccggagcggcgcggcagcggcaggaccgccgtggcgcctagagtagcgacccggggggagcgcggggcgacgctggctgcagggacccggtgacagcgtgagaggttcgcagagtactaggttttgacaagcttgcatcatgcgtgagtataagctagtcgttcttggctcaggaggcgttggaaagtctgctttggagcaatttacagcaatgagggatttatacatgaaaaatggacaaggatttgcattagtttattccatcacagcacagtccacatttaacgatttacaagacctgagagaacagattcttcgagttaaagacactgatgatgttccaatgattcttgttggtaataagtgtgacttggaagatgaaagagttgtagggaaggaacaaggtcaaaatctagcaagacaatggaacaactgtgcattcttagaatcttctgcaaaatcaaaaataaatgttaatgagatcttttatgacctagtgcggcaaattaacagaaaaactccagtgcctgggaaggctcgcaaaaagtcatcatgtcagctgctttaatatactaaatgcattgtagctctgagccaggtctgaagaactgttgcccaattcaacagtgccagcattccaactttgttaaacctaccaacatcttaaatggactttcctgtggtggtaccctttaagaggcggatgaaagctactatatcagtttgcacattctaatcactttccagtatcacaagagagatttttacttatataatagtcctagagtttgcagctggtaaaaccagaggctacatccagtattactgctaagagacattcttcatccaccaatgttgtacatgtatgaaaatggtgtactgtatactttaacatgccccatactttgtattggagagtacaataatgtaaatcctaaaagcaccactattttagcataataaaag

SEQ ID NO: 174058 - DNA, 312 bp, Homo sapiens
  Payload ID: 14164
  Gene Symbol: RAP1B
  Gene Name: RAP1B, member of RAS oncogene family
  ENST ID: ENST00000485252
  CDS Start-End: 167-312
aaaccagccggagcggcgcggcagcggcaggaccgccgtggcgcctagagtagcgacccggggggagcgcggggcgacgctggctgcagggacccggtgacagcgtgagagaattctttttttttttttcctttaataaggtactaggttttgacaagcttgcatcatgcgtgagtataagctagtcgttcttggctcaggaggcgttggaaagtctgctttgactgtacaatttgttcaaggaatttttgtagaaaaatacgatcctacgatagaagattcttatagaaagcaagttgaagtagatgcaca

SEQ ID NO: 174059 - DNA, 874 bp, Homo sapiens
  Payload ID: 14164
  Gene Symbol: RAP1B
  Gene Name: RAP1B, member of RAS oncogene family
  ENST ID: ENST00000543393
  CDS Start-End: 141-497
agattcaggcgtgtaaaccagccggagcggcgcggcagcggcaggaccgccgtggcgcctagagtagcgacccggggggagcgcggggcgacgctggctgcagggacccggtgacagcgtgagaggagcaatttacagcaatgagggatttatacatgaaaaatggacaaggatttgcattagtttattccatcacagcacagtccacatttaacgatttacaagacctgagagaacagattcttcgagttaaagacactgatgatgttccaatgattcttgttggtaataagtgtgacttggaagatgaaagagttgtagggaaggaacaaggtcaaaatctagcaagacaatggaacaactgtgcattcttagaatcttctgcaaaatcaaaaataaatgttaatgagatcttttatgacctagtgcggcaaattaacagaaaaactccagtgcctgggaaggctcgcaaaaagtcatcatgtcagctgctttaatatactaaatgcattgtagctctgagccaggtctgaagaactgttgcccaattcaacagtgccagcattccaactttgttaaacctaccaacatcttaaatggactttcctgtggtggtaccctttaagaggcggatgaaagctactatatcagtttgcacattctaatcactttccagtatcacaagagagatttttacttatataatagtcctagagtttgcagctggtaaaaccagaggctacatccagtattactgctaagagacattcttcatccaccaatgttgtacatgtatgaaaatggtgtactgtatactttaacatgccccatactttgtattggagagtacaataatgtaaatcctaaaagcacc

SEQ ID NO: 174060 - DNA, 561 bp, Homo sapiens
  Payload ID: 14164
  Gene Symbol: RAP1B
  Gene Name: RAP1B, member of RAS oncogene family
  ENST ID: ENST00000541167
  CDS Start-End: 283-561
aaacctcgcccagattcaggcgtgtaaaccagccggagcggcgcggcagcggcaggaccgccgtggcgcctagagtagcgacccggggggagcgcggggcgacgctggctgcagggacccggtgacagcgtgagagacagggtctcacttgtcacccaggctggagtgcagtggcacaaacatgggtcactgcagcctcgactcctgggctcgagtgatgctcccacctcagcctctcaagtagctgggactacaggtactaggttttgacaagcttgcatcatgcgtgagtataagctagtcgttcttggctcaggaggcgttggaaagtctgctttgactgtacaatttgttcaaggaatttttgtagaaaaatacgatcctacgatagaagattcttatagaaagcaagttgaagtagatgcacaacagtgtatgcttgaaatcttggatactgcaggaacggagcaatttacagcaatgagggatttatacatgaaaaatggacaaggatttgcattagtttattccatcacagcacagtccacatttaacgattta

SEQ ID NO: 174061 - DNA, 480 bp, Homo sapiens
  Payload ID: 14164
  Gene Symbol: RAP1B
  Gene Name: RAP1B, member of RAS oncogene family
  ENST ID: ENST00000541386
  CDS Start-End: 448-480
agccggagcggcgcggcagcggcaggaccgccgtggcgcctagagtagcgacccggggggagcgcggggcgacgctggctgcagggacccggtgacagcgtgagaggttcgcagaccaggcatggtggtgtgttcctgtagtcccagctactcgggaggctgagcaggagaatcgctggaacctggcaggcagaacttgcagtgagctgagatcgtgccactgcactccagcctaggcgacagagtgagactccgtctcaaacaacaacaacaacaaaagctcctcgatggaaccatttgatagtgacaaggattgaagaatgtaggagccttttattctcatgtaatgcccccaccctggaatccttgaagaccttctgtctattgttcatatactgaaattttataatgataagccttggtactaggttttgacaagcttgcatcatgcgtgagtataagctagtcgttcttggctca

SEQ ID NO: 174062 - DNA, 561 bp, Homo sapiens
  Payload ID: 14164
  Gene Symbol: RAP1B
  Gene Name: RAP1B, member of RAS oncogene family
  ENST ID: ENST00000489473
  CDS Start-End: 529-561
aaacctcgcccagattcaggcgtgtaaaccagccggagcggcgcggcagcggcaggaccgccgtggcgcctagagtagcgacccggggggagcgcggggcgacgctggctgcagggacccggtgacagcgtgagagaccagacacggtggctcacgtctgtaatcccagcactttgggaggccaaggcaggcagagcactttgggaggccagggcgggcggatcacttgaggccagaagttcgagaccagtctggccaacatggtgaaaccccatctttactaaaaatatgaaaattagccaggcatggtggtgtgttcctgtagtcccagctactcgggaggctgagcaggagaatcgctggaacctggcaggcagaacttgcagtgagctgagatcgtgccactgcactccagcctaggcgacagagtgagactccgtctcaaacaacaacaacaacaaaagctcctcgatggaaccatttgatagtgacaaggattgaagtactaggttttgacaagcttgcatcatgcgtgagtataagctagtcgttcttggctca

SEQ ID NO: 174063 - DNA, 1264 bp, Homo sapiens
  Payload ID: 14164
  Gene Symbol: RAP1B
  Gene Name: RAP1B, member of RAS oncogene family
  Uniprot ID: P61224
  ENST ID: ENST00000540209
  CDS Start-End: 146-643
aggcgtgtaaaccagccggagcggcgcggcagcggcaggaccgccgtggcgcctagagtagcgacccggggggagcgcggggcgacgctggctgcagggacccggtgacagcgtgagaggtactaggttttgacaagcttgcatcatgcgtgagtataagctagtcgttcttggctcaggaggcgttggaaagtctgctttgactgtacaatttgttcaaggaatttttgtagaaaaatacgatcctacgatagaagattcttatagaaaggagcaatttacagcaatgagggatttatacatgaaaaatggacaaggatttgcattagtttattccatcacagcacagtccacatttaacgatttacaagacctgagagaacagattcttcgagttaaagacactgatgatgttccaatgattcttgttggtaataagtgtgacttggaagatgaaagagttgtagggaaggaacaaggtcaaaatctagcaagacaatggaacaactgtgcattcttagaatcttctgcaaaatcaaaaataaatgttaatgagatcttttatgacctagtgcggcaaattaacagaaaaactccagtgcctgggaaggctcgcaaaaagtcatcatgtcagctgctttaatatactaaatgcattgtagctctgagccaggtctgaagaactgttgcccaattcaacagtgccagcattccaactttgttaaacctaccaacatcttaaatggactttcctgtggtggtaccctttaagaggcggatgaaagctactatatcagtttgcacattctaatcactttccagtatcacaagagagatttttacttatataatagtcctagagtttgcagctggtaaaaccagaggctacatccagtattactgctaagagacattcttcatccaccaatgttgtacatgtatgaaaatggtgtactgtatactttaacatgccccatactttgtattggagagtacaataatgtaaatcctaaaagcaccactattttagcataataaaagaaagtccaaagagctcctatatagactactccagataacttcgcttctttgatacttgtagcttattgtaattttttttaagaaattcaaggtcattattattgtacaaaataagcgctttgattaacacagctatatagtttttttaatttttaaaaaacctgtggagacggtgatcttgtctttaaaacatgatagtcctttcagtataatgtcttagatt

SEQ ID NO: 174064 - DNA, 5487 bp, Homo sapiens
  Payload ID: 14165
  Gene Symbol: RAP2A
  Gene Name: RAP2A, member of RAS oncogene family
  Uniprot ID: P10114
  ENST ID: ENST00000245304
  CDS Start-End: 250-801
tcgccctcagtcccacccggtgcctacggggccgcatcgccgcccggctcggcccggcccatgcccagggccgctgctccctcagttgccgccgccgccgccggcgcccagggggccgccgcggctgtgaggtgggggcggcagcgggaggcggcggggcgggccgccggggccggggctgggggcgcagcgcggccggcgtaggtctatgtcgcgggcggcggcggcggcggcggccgcggagggacgatgcgcgagtacaaagtggtggtgctgggctcgggcggggtaggcaaatccgccctgaccgtgcagttcgtgaccggcaccttcatcgagaaatacgaccccaccatcgaggacttctaccgcaaggagatcgaggtggattcgtcgccgtcggtgctggagatcctggacacggcgggcaccgagcagttcgcgtccatgcgggacctgtacatcaagaacggccagggcttcatcctcgtctacagcctcgtcaaccagcagagcttccaggacatcaagcccatgcgggaccagatcatccgcgtgaagcggtatgagaaagtgccagtcatcttggttgggaacaaagtggacctggaaagtgagagagaagtatcgtccagcgaaggcagagcccttgctgaagagtggggctgcccctttatggaaacttccgctaagagtaaaacaatggtggacgaactctttgcagaaattgtgaggcagatgaactatgctgctcagcctgacaaagatgacccatgctgttctgcatgtaacatacaatagcatccaaatatggctgtcctggatgggatttgcccaatgtcgtaggtgatagaaaactcgcctactccactgcagaacttgcagaatgcgtggtgttaatctacagagaactgcagcccttattcagaattgagcagtgattgtcagttgatatctctgagtaacatttgggttcagtaactacagttttcaccatttgtcctcagtctcctttatgcatctgcaactttaaggcatagtccatcgatctacagggtgatctcatttgaaagctatgatggcattgtcgctgagttgacagaagcaactattgtacaaattaaaaataaccataagggagaaaccagaagaattcctctgaccacttacaattaaaatattttgtcttctttaaaaaaataagtaaaggagaaatattttcctacaagagtactgaatttcaggaaatgggatagagcttctaaccaatgtattccgtcaagtaagataataacagctgacctgccaacagcattacagggagattctttgctcagctaacacatttctgtttttcaaaattgatgcttaattgtagctgttattctaatttgtgacatggaactaactcatgcttcaatccttgatagagcaaaactcagaacaggttatgtaaaaatatagtctggctttagaatttgttaattcacctgctttgccacagaaaatggaggctttcacaagggtttgatcagaattaaaaccccaaacccgccctctgttaggggtggtctttataactttactgaacaagagggaagcaactgtgatgggaagagattacctagccttactaacaagaagcattctaatagataaactagtaccatcatgtaaggaagatgaagccatgttgcatccacatgttcccgtttgcagaaacctcacaggacagtacgaatatctggcatttttaagttcattaaagcagcaaattccttctcgcctttaagggctatggttgtagtgtgacccgtggctaacctgctttcaaaatcaagtatttgctgtagcagagctttattgcaggcattttaaaaattgaataaccatgtgaaataatttgggcttaaaagtgaacataaattatagagtggaaggtaagggacaaaagccttttacctttaattttcctggagaattatataaaggttttcttagaacaattttgccctgattactgaagcgtcaaataaagctggagtgaaaattttgttttgaaaaggtgctcaagctctgacatttttggttttcatagtcgtgaagtatttatcatttgcatgactaatggcacaggaaaaacctattcataagttttacaatcaagtatagaggggtcttcagctaacttagttatacataaatgctgaaaagattatcttgagctgggccttgggagaagaatttggccttcagaactgcaatatcactgagcctgcgatctatacaccaccccacattttgttggtttcacagtcttgtgcaagtaacctctggtcttacgtgtgtaactgagagaagagtgtgtgtttgtgtgtgcatgtgtgtttattgttcctaagaatttggcacaagtcagagataattgcctatactaagaatctatactgcagaatatagtgtatcaaaaacttttttcttttaaattattaaagtgtcttttatacttttatgaaatcattggtagccccccaagtgtttaataactggcattaagcttagagggtgaaaaaaaaaaaaaagattgatagtatttttcataatgaaaaaactgaagagatacgtgaatgaaaccaggccatagctgtcataaatctttgacttttgaatatttacattcttcagtataattttttataatcctcaattatgaaccaccttgtttataggacaaaaaaatttaaccaattttattgaaacgaatttcactgtgtaaaagttggtttgattcaaacatgtagagaagttgtagattcaagatatatgatttctctatggaaataaaaatatttgttagtgaattggttgagttttgattcctctaacttctcagaatgattctttagaattctataattcatagcaatttttgacaagtaagattgcaaaatagaaatatctataaagattccacagtttgacattatggcttgctatgcagatgtgaaaataggttaaataatatgaaagatatggcagaatgtaaagtggaaaagatgacctaaaattttgagttgtattaatagttaaaaacatttgtgtcagatgacagggtgggcttttactgtcaagacatgaataagaactgatctggctgcctgatgagtgtttccacgcagccctgcatatttagtgaccaaggcatcaaggacatcccgaaactggaaattcatatccatctggtatgaatatataactcagctggcaaatgaatgtgtttgttgagatattacagtaataaaacacttaagaacaggaagattacatttgttggcatacgaaaccttagtggctacagaagaaagttgaccttgtgtcactatttattttatgccctgatcagactagcaacttagataagtgaaagtttttctaacatgccttaaaaatattatggtttgatccaaagacccactttttctttagctcttgtgataagattttcttttttttacttttatacaaaggcagcatctttgaatttttttttcttttgatgttgcaacttttgggttcttttaaactgtgatagtgatggtaactgatgcctttcattttgttcaacttatacaaaacaagccagcatctgatcaaaagtattacataaaatattttcttaaactattgaaaggtgctttgatgattttctcctttggtttgtagaattaggactgaacttttgactcaaattgctacagttgccatcacctttctgtggtaatactactgatatttgcttttctatataaagaaatgttgcctaaggctgtctggtatttcttttcaagggttttccagtatgaatgttaatgttgtcagtgtatgtatgaatatgaaagtgctttgttttgtttgttgctgttttttgtttatgtgtgtgtttttaatttttttgttcttatcagcagtcttgtgttagcactgggtaagctttaattgtcccttagccaatcaaacattaaggactatggaggtctttttttttttatttaacatgtcattgttcatctattaaatcttgatcagggtttcaagaatgactgcagtgggttttggaaacagacttatcattattgatttgaggtttcccagagatatagttcacagttaattgttgcgctctaatacaactgaccatttaaaattgaacaagtttattgttttgtaacaatgtcagttgttaaaccttgacatttcaattaaaacatgaattgtagttataactcaatgcaaattcaacagttgtatttggagttaaattattttaacaaataaatttatttaatgaaactctggatttgctttgttttgtacatgctcatgagagaaatgtattatatacaaaaacaattaaaaattgccatataatgaatttagtactcttcatacaaaaatattttagctgatttgagagttcatcatataaaaaggcaggtaggtagataattttcatagtctttaaaaataaaaataacatgtaagagactgtaaaatcagttattataaatataaacttatctctacaaatgattttatattttgaatggtagctggttaatttaaagcctgatgctaaggttaacagaattgttcaaataattaacattaattagcaatatcactaaaatgattcagaggccttctagtgatggcttgaagccgtctttctgttttcaggtcatgtggatccgaaggtgccagaagctgaaggttgccgccaggctgtagggcctgcttgttctatatggggccctatgaaagttgacagatgctgttaattgtatacagccttcagctgctctgataaggagcccattcatttcctaagccaatttaaactatgccttttggttatgttgccttcaaactctgttgaaatcctctggcagcattccaccagttgagaagcttcattgttttagattataagaataatttgaatgaatataacagaggcactgtagatagaatcccagatatttaaaggaaaacatgcctatattttaggaatatcttctgaagaacttcataattttatttgaagtgtttgtaaattttttaataaattatttaaatgtatcaatagtggatagttggaagaacgtctttgaggctaaaaagtagtactctgaaattctctcaagttatattatttgtctgttagaggtccacgaatgaaaatatatgtagctaaaggagtaaggtgctgcccaatttggaacccaactgacctctaggatctatgaagcagagaatattaccacaaacttctgaaagaagctgttgacctcgtttcttaatttaaaatatgttgccacataaatactaataaaacatagttgctcttcatctcttaaatggatcattccaactggttttacatcgttgaatattatctagtatttttaataaatattttcataaata

SEQ ID NO: 174065 - DNA, 903 bp, Homo sapiens
  Payload ID: 14165
  Gene Symbol: RAP2A
  Gene Name: RAP2A, member of RAS oncogene family
  ENST ID: ENST00000476869
  CDS Start-End: 1-327
atgcgcgagtacaaagtggtggtgctgggctcgggcggggtaggcaaatccgccctgaccgtgcagttcgtgaccggcaccttcatcgagaaatacgaccccaccatcgaggacttctaccgcaaggagatcgaggtggattcgtcgccgtcggtgctggagatcctggacacggcgggcaccgagcagttcgcgtccatgcgggacctgtacatcaagaacggccagggcttcatcctcgtctacagcctcgtcaaccagcagagcttccaggacatcaagcccatgcgggaccagatcatccgcgtgaagcggcctatgttgtaaaaagagttttaagtactctaagtttttttggagtaataagagtttgaatacgagcagactttcaaacaaggtatgagaaagtgccagtcatcttggttgggaacaaagtggacctggaaagtgagagagaagtatcgtccagcgaaggcagagcccttgctgaagagtggggctgcccctttatggaaacttccgctaagagtaaaacaatggtggacgaactctttgcagaaattgtgaggcagatgaactatgctgctcagcctgacaaagatgacccatgctgttctgcatgtaacatacaatagcatccaaatatggctgtcctggatgggatttgcccaatgtcgtaggtgatagaaaactcgcctactccactgcagaacttgcagaatgcgtggtgttaatctacagagaactgcagcccttattcagaattgagcagtgattgtcagttgatatctctgagtaacatttgggttcagtaactacagttttcaccatttgtcctcagtctcctttatgcatctgcaactttaaggcatagtccatcgatctacagggtgatctcatttg

SEQ ID NO: 174066 - DNA, 4904 bp, Homo sapiens
  Payload ID: 14166
  Gene Symbol: RAP2B
  Gene Name: RAP2B, member of RAS oncogene family
  Uniprot ID: P61225
  ENST ID: ENST00000323534
  CDS Start-End: 425-976
gcacgttccgcggggactcatgccacgcgcgtcccggcccgacgcgcaattagcagccacctccgcagcccgccgccaccgcctccctgccctcccgggctgccgcagctaggagctccagccgtcgcctcgcgcaggctgcgggcattgtcctctcggttcgccgcccgggctgctgctgccgccgcggactgctgcggggcccggacccgcaccccagggatacgctgccgccgccgccggccggcccggcgcccggcctccgttcggtggtttccgccctgcgttctctgggttgctctctcctgggtttttcctgcgtagctgaggaaggggaagagaagtccagccgccaagcccagccttccccggcgcgcagccccgacggggccgcggcaggcgcggcgagagcgctgacggagccatgagagagtacaaagtggtggtgctgggctcgggcggcgtgggcaagtccgcgctcaccgtgcagttcgtgacgggctccttcatcgagaagtacgacccgaccatcgaagacttttaccgcaaggagattgaggtggactcgtcgccgtcggtgctggagatcctggatacggcgggcaccgagcagttcgcgtccatgcgggacctgtacatcaagaacggccagggcttcatcctggtctacagcctcgtcaaccagcagagcttccaggacatcaagcccatgcgggaccagatcatccgcgtgaagcggtacgagcgcgtgcccatgatcctggtgggcaacaaggtggacctggagggtgagcgcgaggtctcgtacggggagggcaaggccctggctgaggagtggagctgccccttcatggagacgtcggccaaaaacaaagcctcggtagacgagctatttgccgagatcgtgcggcagatgaactacgcggcgcagcccaacggcgatgagggctgctgctcggcctgcgtgatcctctgaggcggccaccgcgcgccggccgcgctctgcgcacaaaagccaaacgcatccgactctctaaatgtgatttatttcttgctttgagattggagaccactttgcattggccagggtgtcttgggagcccggctggcctccgcggccggcgtcccctgcctccaccctgtgcccgagggggtgtccggtcctgcccatccgatactctggtggaaatgtggctctttgcagcatgtacgtttctccctgattttggttgatgcatatttccccgtttaagtagccgttagggcgcagtatcggcagcttgacacccaccaagcaaaagtttcagcctggaaaaaaaatgggggggaagggtggatgaaaaggagggagagaaggtggaaatggtttttttttttttttttctattttctttctttttttttttttttttttttggtcaacagccgtttttctagttccaagttttaaatacatggaaggaagtccgggagaaccatatgaaggagcaggaggagaggaagaaactttttttccttcttttccaggagtagctggaaattaagatcgggttccttttctgccagcttggaagggcaaccccatgactgattgcgattctgaggatgtctatgcaaagttggattcttgttacagtgtatccaatctgaagtattgcacatctgaactgggactgttaacactgatgccaatacagtgtggggtgccagaaagtgtctgctgatatttgtggaaaaaaaatctattttgtttacctactgtatcaaaggggagtctgggggagaatggtagtattttttttttttatcagctgtgaaaaaaatgttacagatctgcacattttcgtgtgtactatggtgtgtgtgtgtatgtgtgtggtgtgtgtgtgttttaagtttagccttttgtttttgttttttggttggcagtaaccgattttaatgactagcttttaaaaatacagtacaaagactttgtaaatgtgattcagggcccccagcacccctgtgtctgcagagtgccttcaaaactcagctgttccagccggtgccaacctgtgaacttcccaccatatcccagaatctgctattccccaaaccacttcccagtttcctttcagtaatctttctgaaggagccaggacaatagggcctgttgtttagtgaatttctttattattttcagcctttaaaatgtaatttccatctcttgcaatgaatttgtttcccttttttttgcttcattttgtttaaattttcaggtatttagctcccctttcatattatttttaaattttttaattacctgttgtagggtgttcctccagaagcaaagagcaaaattttactgttgtgatgtaccaattctaactaattgtaatttttaatttcatgcgtttaatcattgtctcttcattttaagacttttaatacaaatgtcatttttaaagaaacaaacccaaaactattgtttgtgtttctgtgtttcatattcagtgatttaatacagtatcatggctgaggtggatggggcaggtgcatgatactcttcagagctatttgtgaaattttaaagacagaagtgtctcagtgacaagttggatgacactactcccaactttttaaatttggagaaaaccatcaaggtcgaggaagccctgggtatggccattaccatctgattagaagatgaacaggtattttgaatctgatctgacatggaacagtttacctcattgtaggtagggaacaagagaacccatctattaaaattgccttagatctgggaaagtaaccatccttctggcaaagtaggatggcacttttaagtttttcttccttttttccctctgtttatattgcacatcaagtcaaaaacatgtttgggaaagatggttttcaattctgaagttatacctagtgatgttttttgcagtacatttgaatggattgtagacactgcctcaacccttttgaggttttgatttggaaatagatttaaaagaaaacaggctaagataatatccttgttctcatttacaccctgcagtttggaccacatttgacctcataagtttttccttttaacagtaggaggcagtgtgagctttttattttttatttttcttaaggtggtcttagtaatataacatgttcatacatatcaagagagtacttggtataccttaggtctatgaagtgtagctgaaatctgaagagtcttgacaaagggatttacacccttgacaaaaccaaaagaaattaacaggccacaggtttctttaaagctgtgttaacatatcttgccttaaaatgtgtgtgtgtgtttttgctttgcttttttttttttgcccaagaggcatctcagtactccagcaatggaggaagaatagagaattttgcctggcaatggtcctactgccattttttttttcccactctgatctcacttaagtttgatatcaaacacaattgggaggcaatagtatcaatatcctaaatgtagaaattaaaagatactgtataattttatgcctttgcaaagattcgttcttgtatttgaataaattcagttgctaaagtagatccaaagtgttaaaaatgctgaagtcatgtcaagtactgtctggagggtttttttaagaaaaggcatttggcatttaactgtctcttgttttatttttaagtttttggaaaccttttgacataaaatgctgccaagtatctaagaaatgtatatactgacagaagatatttgaaagtggaaaattggaaatgaaatatgttgctgggtgcgttaatcacctccgcccaggatttagtcacttgcaggacctctttatagtctaggatggcagagcagaagattttaatatgcttttattaagtgatgtaaaataaatgctttttggattatcaatgaaagcaattttatgtgtgcctgaagcaagaaaatagcgtttttggttttatctcatattttcttggcaaaattgagagaaattaggaacactgctatttttttcttaaaaatgtttttaagaatatgttcgtttctttgactattaagaaccccttgtggtattagtgtgtgaagagataagggcatttgtttcaatgaaaaagttagtgttaaaggaagtgagtcagggagggcggagtttgttgtaaggcaatcacctgtcaaaacagaaattgggtgggaaaggagtctttatcttggggagcaaaagctgacttttaaacttgacccctgctgtttttaaacagcttttccttttggtctctgacagtcaatccaggttttatgttatttcaaaagggttatttttgtcctccttttttaatagcttcaggaaagttaaaggtatcatcttaggtctaacactctagtctttgagagttacggttctttcgtagaacaatttccatgttgttaactgttgtagacttaattgaatcacattttgggaccagatgtatttggggatagaattctttaaatgtatgggacttcatgcttcctgattatgtaatatttcctgtggttgggaatcctagaatgcctgatctattttatctgttcaggtagttttgttattgtaccctcttttgggtcatattctagtatttctcacagggggtatgagaaacagaaagctatatgtagcagctggtcttgagaagtagaagcatcttaactgtcataagagcatagattttttgtttttcacaacagctggaataagttcctgcattataagtataaagggaaccgagatttaatttggagatcatcactgttaaaacgataccagacatttgtcacagtgtcttatttggggaaagtttgctaatatacattttgtctgtgaaaatatagtaaattttaaaatactaatata

SEQ ID NO: 174067 - DNA, 3896 bp, Homo sapiens
  Payload ID: 14167
  Gene Symbol: RAP2C
  Gene Name: RAP2C, member of RAS oncogene family
  Uniprot ID: Q9Y3L5
  ENST ID: ENST00000342983
  CDS Start-End: 748-1299
ggtgggggtgggggtgggggtggggggtgggtgagaaaaaaaagaggtgggttcgcctggagtccctgcggccgccgcggaaggcccccgcttctttccccgcggcgagcagcagcgctggggcagcggagagacagaggagccagcgggtggccatggccttggcgtgacagagcctccccggcggccgggcgggtgcggacggcggggccggacgacccccgcgggagccggggcccagaaacccgcccgggcagcggtaactggaacggagccctcaggcctgagccggctgggctgcgcgagcaggaagcggggtccctgggcccctttgtgtgaagggcgggggaggagtgccgggcagccccgggctgcgggctcctccgacgtccgcctcgccgcagggtcccctcgccgcagcccccaccctttccctcccgggggcacgcgcctcctcgccaccctcgccgggcttttcccaggctcgccctcctccccacgccccctgctcgggctgcagttcctataggaagggcattaccatcccttccccaccctccccgactctacgctctttcccctccccctcctgtaacttcctcttcttccccggttgggccctctgctcctctgcactctcctccccagttcgcagatttccgcccaccttccgcctcgtctagccgcgccacagctagcggggtgatctttccccccctctggtaggagttggtgaaggtgagactcatgagggaatacaaggtagtggtgttagggagtggaggggttggcaaatctgcccttactgtgcagtttgtcactgggactttcattgagaaatatgaccccaccattgaagatttctaccgcaaagagatcgaagtggactcttccccctccgtgctggaaattctggacaccgcaggaactgagcagtttgcctccatgagagatctctacatcaaaaacggccaaggtttcatcctggtttatagcctggttaatcaacagtcttttcaggatatcaagccaatgagagatcaaattgtcagagtgaagagatatgaaaaagtcccactaatcctagtaggaaataaagtggatctggaaccagaaagagaggttatgtcttcagaaggcagagctctggctcaagaatggggctgtcctttcatggagacatcggcaaaaagtaaatcaatggtggatgaactttttgctgagatcgtcaggcaaatgaactattcatccctgccggagaagcaagatcagtgttgtacaacttgtgtcgtccagtaaagaagataacctcaatcatggccataccgagcagataaaactcagaggaaatttgcacagatgctgctttggagaactttacaacctgggttgcagaactgagccttggtaaacctgtctctattacagcatgttgccatacatctatttaagtgcataaggtctttggccttcaagatccatcgaccttaaacaggaatgcttagcacgtttaccatacgtttaaaatccattctttatcaatcagtccttttatagctttctaagttcttattgatggctaatatacaagggttaatttttaatattttaattgatttctttaatcagtttctcgacttgtatttattaaatactcaaactcagtattacctactcaatgccttttaaaagaaagttataatggagaaaaaattgagccttaaacaaatggttacttctgtatattacctcgtaccagtgcttcatcctatttgtaaaatctttctcctttaaaattattggttaatactttgagactttgtttacgtgtggcagtgttgtaaaaagaaactaaagatcacattttacctgtatggatggaatatcccttttcttcaagtgcagtttgtgatgtgttttgtttttttttttttttttttgtaattaacatgttctgaaggttacaattgatatttgaaattgactgtagagcatttagttgaagagttaagcattcagttccattaggttttcacatgtgttaatctcatttacagcattgaattgcggcagtaacattttcctttctgtgaagttctaaatttagttatgacctatttagcaatgcctttgaaaagggatattgtatccatggtaaattaattgtatacctaaacagagatagctcatctttgcctatcaggcttgtaattgacatctagtagacttctgcacatgtaaaattgaattcaaataaaatcatacacactttctagttcttaatatttgtctttctgaataatagtttaaagcaatatttgttaaagttttcttgcactatcacaattgctttttagttatttctcaagaagcatgttcgtattagagacaaaatctgtgtaacaggagggagaatagcgccaagtctctgggctattttttatttttgcaaatgtgctttctaatagccattgccttccatgttgtttacctaatcagcatatttttgtctgaatacttgaacattttaacagtaacgcaggtgtagaatcagaaaggaaacttatgcagagtaatattttggttcagttttaacatcgtgacaatgagggctttttctagcaatgatttttaaattgtgtaagtttgacagtattttattgttgggtttttatttgattttagttgtgtgcttttcatttgcagaagttagtaactgcagctcacctactgcaccaaagttctcgattttaggagcccagctttagtcatttgaacatgcttctaaataaaataaaacaaaaccaaaactatacttttgatctataataagagctcaataactttgtcaaggaaagctctaatatatgcagtgatggtttatgaaagggtgtggcaattttaaatttatattgtgtgtgatgttcaaataaagtggtatctacattcatgtgatttatgggtcagcatgaccattaattactgagtagaaattgactaaactttgatttcctttttttaaatcgtgttgcatttgattcctgagcaaattccctcaaagtgaactcttgttcttaaattttgaattttatggtgagattgtaaagatagaggcaattgaaacattgttccttatttatgaactgcttgaagtgaatacttaatttaagtttgcactttaataccaaacttaaaaccaaacactcatttaaaagtaggttaagtgatcatggatcattgttattagctttgtggctttgtgaaattctaaaggaatcaaataattcatcatgatttaaattttctagagattttgatttttttataatgtttctttcctgtagattgtgttcttgtttctctctctctctctctctctctctctctctctctctctctctctctctctctctcaaaattacagtgttcattgtcattgacctcagcagcaaatttgacttgaattcacttaggatcgcaggaatcaggggaaagtgattttaaaggtggtttctccagcacattttaagaaaagggaccaaaagttattttagcttcctcaatagattgcatgttgcttattaggataataaattaatattaaatgcaatatatgtcttgtctttattatggcatctatttaggagttgttcaaatcactgcagtagggctctgcaaataaaataatgtaacctattatcatggatctaatgtactgtaactttatcagtgaaaggtaaaatctcaaataacaagtacaaacattgaacaattacctataaagatttgtaaaagtaaaatttttccaatagatttcattcttgtcattttgtaagacgaccctgcagtccacctgtttgtaacttttttaataaaatagacatctgtattactga

SEQ ID NO: 174068 - DNA, 2333 bp, Homo sapiens
  Payload ID: 14167
  Gene Symbol: RAP2C
  Gene Name: RAP2C, member of RAS oncogene family
  Uniprot ID: Q9Y3L5
  ENST ID: ENST00000370874
  CDS Start-End: 810-1361
cgctggagagatggcaccggcctgaggtcaaggagaaattgaactaaactctcctttgaagactgtttccagaggcccgttcccgaagccggagtcccgacccgaaaccgtccccggccggctcgctcgctcagcagggcgcggctccagcgccacccggctcgccccgaagagcagcgctggggcagcggagagacagaggagccagcgggtggccatggccttggcgtgacagagcctccccggcggccgggcgggtgcggacggcggggccggacgacccccgcgggagccggggcccagaaacccgcccgggcagcggtaactggaacggagccctcaggcctgagccggctgggctgcgcgagcaggaagcggggtccctgggcccctttgtgtgaagggcgggggaggagtgccgggcagccccgggctgcgggctcctccgacgtccgcctcgccgcagggtcccctcgccgcagcccccaccctttccctcccgggggcacgcgcctcctcgccaccctcgccgggcttttcccaggctcgccctcctccccacgccccctgctcgggctgcagttcctataggaagggcattaccatcccttccccaccctccccgactctacgctctttcccctccccctcctgtaacttcctcttcttccccggttgggccctctgctcctctgcactctcctccccagttcgcagatttccgcccaccttccgcctcgtctagccgcgccacagctagcggggtgatctttccccccctctggtaggagttggtgaaggtgagactcatgagggaatacaaggtagtggtgttagggagtggaggggttggcaaatctgcccttactgtgcagtttgtcactgggactttcattgagaaatatgaccccaccattgaagatttctaccgcaaagagatcgaagtggactcttccccctccgtgctggaaattctggacaccgcaggaactgagcagtttgcctccatgagagatctctacatcaaaaacggccaaggtttcatcctggtttatagcctggttaatcaacagtcttttcaggatatcaagccaatgagagatcaaattgtcagagtgaagagatatgaaaaagtcccactaatcctagtaggaaataaagtggatctggaaccagaaagagaggttatgtcttcagaaggcagagctctggctcaagaatggggctgtcctttcatggagacatcggcaaaaagtaaatcaatggtggatgaactttttgctgagatcgtcaggcaaatgaactattcatccctgccggagaagcaagatcagtgttgtacaacttgtgtcgtccagtaaagaagataacctcaatcatggccataccgagcagataaaactcagaggaaatttgcacagatgctgctttggagaactttacaacctgggttgcagaactgagccttggtaaacctgtctctattacagcatgttgccatacatctatttaagtgcataaggtctttggccttcaagatccatcgaccttaaacaggaatgcttagcacgtttaccatacgtttaaaatccattctttatcaatcagtccttttatagctttctaagttcttattgatggctaatatacaagggttaatttttaatattttaattgatttctttaatcagtttctcgacttgtatttattaaatactcaaactcagtattacctactcaatgccttttaaaagaaagttataatggagaaaaaattgagccttaaacaaatggttacttctgtatattacctcgtaccagtgcttcatcctatttgtaaaatctttctcctttaaaattattggttaatactttgagactttgtttacgtgtggcagtgttgtaaaaagaaactaaagatcacattttacctgtatggatggaatatcccttttcttcaagtgcagtttgtgatgtgttttgtttttttttttttttttttgtaattaacatgttctgaaggttacaattgatatttgaaattgactgtagagcatttagttgaagagttaagcattcagttccattaggttttcacatgtgttaatctcatttacagcattgaattgcggcagtaacattttcctttctgtgaagttctaaatttagttatgacctatttagcaatgcctttgaaaagggatattgtatccatggtaaattaattgtatacctaaacagagatagctcatctttgcctatcaggcttgtaattgacatctagtagacttctgcacatgtaaaattgaattcaaataaaatcatacacactt

SEQ ID NO: 174069 - DNA, 3341 bp, Homo sapiens
  Payload ID: 14167
  Gene Symbol: RAP2C
  Gene Name: RAP2C, member of RAS oncogene family
  ENST ID: ENST00000620646
  CDS Start-End: 390-743
tgatacgacacagggcccaggccagctggagccagagctggggacttcgctggagagatggcaccggcctgaggtcaaggagaaattgaactaaactctcctttgaagactaggcccgttcccgaagccggagtcccgacccgaaaccgtccccggccggctcgctcgctcagcagggcgcggctccagcgccacccggctcgccccgaagagttcgcagatttccgcccaccttccgcctcgtctagccgcgccacagctagcggggtgatctttccccccctctggtaggagttggtgaagatttctaccgcaaagagatcgaagtggactcttccccctccgtgctggaaattctggacaccgcaggaactgagcagtttgcctccatgagagatctctacatcaaaaacggccaaggtttcatcctggtttatagcctggttaatcaacagtcttttcaggatatcaagccaatgagagatcaaattgtcagagtgaagagatatgaaaaagtcccactaatcctagtaggaaataaagtggatctggaaccagaaagagaggttatgtcttcagaaggcagagctctggctcaagaatggggctgtcctttcatggagacatcggcaaaaagtaaatcaatggtggatgaactttttgctgagatcgtcaggcaaatgaactattcatccctgccggagaagcaagatcagtgttgtacaacttgtgtcgtccagtaaagaagataacctcaatcatggccataccgagcagataaaactcagaggaaatttgcacagatgctgctttggagaactttacaacctgggttgcagaactgagccttggtaaacctgtctctattacagcatgttgccatacatctatttaagtgcataaggtctttggccttcaagatccatcgaccttaaacaggaatgcttagcacgtttaccatacgtttaaaatccattctttatcaatcagtccttttatagctttctaagttcttattgatggctaatatacaagggttaatttttaatattttaattgatttctttaatcagtttctcgacttgtatttattaaatactcaaactcagtattacctactcaatgccttttaaaagaaagttataatggagaaaaaattgagccttaaacaaatggttacttctgtatattacctcgtaccagtgcttcatcctatttgtaaaatctttctcctttaaaattattggttaatactttgagactttgtttacgtgtggcagtgttgtaaaaagaaactaaagatcacattttacctgtatggatggaatatcccttttcttcaagtgcagtttgtgatgtgttttgtttttttttttttttttttgtaattaacatgttctgaaggttacaattgatatttgaaattgactgtagagcatttagttgaagagttaagcattcagttccattaggttttcacatgtgttaatctcatttacagcattgaattgcggcagtaacattttcctttctgtgaagttctaaatttagttatgacctatttagcaatgcctttgaaaagggatattgtatccatggtaaattaattgtatacctaaacagagatagctcatctttgcctatcaggcttgtaattgacatctagtagacttctgcacatgtaaaattgaattcaaataaaatcatacacactttctagttcttaatatttgtctttctgaataatagtttaaagcaatatttgttaaagttttcttgcactatcacaattgctttttagttatttctcaagaagcatgttcgtattagagacaaaatctgtgtaacaggagggagaatagcgccaagtctctgggctattttttatttttgcaaatgtgctttctaatagccattgccttccatgttgtttacctaatcagcatatttttgtctgaatacttgaacattttaacagtaacgcaggtgtagaatcagaaaggaaacttatgcagagtaatattttggttcagttttaacatcgtgacaatgagggctttttctagcaatgatttttaaattgtgtaagtttgacagtattttattgttgggtttttatttgattttagttgtgtgcttttcatttgcagaagttagtaactgcagctcacctactgcaccaaagttctcgattttaggagcccagctttagtcatttgaacatgcttctaaataaaataaaacaaaaccaaaactatacttttgatctataataagagctcaataactttgtcaaggaaagctctaatatatgcagtgatggtttatgaaagggtgtggcaattttaaatttatattgtgtgtgatgttcaaataaagtggtatctacattcatgtgatttatgggtcagcatgaccattaattactgagtagaaattgactaaactttgatttcctttttttaaatcgtgttgcatttgattcctgagcaaattccctcaaagtgaactcttgttcttaaattttgaattttatggtgagattgtaaagatagaggcaattgaaacattgttccttatttatgaactgcttgaagtgaatacttaatttaagtttgcactttaataccaaacttaaaaccaaacactcatttaaaagtaggttaagtgatcatggatcattgttattagctttgtggctttgtgaaattctaaaggaatcaaataattcatcatgatttaaattttctagagattttgatttttttataatgtttctttcctgtagattgtgttcttgtttctctctctctctctctctctctctctctctctctctctctctctctctctctctcaaaattacagtgttcattgtcattgacctcagcagcaaatttgacttgaattcacttaggatcgcaggaatcaggggaaagtgattttaaaggtggtttctccagcacattttaagaaaagggaccaaaagttattttagcttcctcaatagattgcatgttgcttattaggataataaattaatattaaatgcaatatatgtcttgtctttattatggcatctatttaggagttgttcaaatcactgcagtagggctctgcaaataaaataatgtaacctattatcatggatctaatgtactgtaactttatcagtgaaaggtaaaatctcaaataacaagtacaaacattgaacaattacctataaagatttgtaaaagtaaaatttttccaatagatttcattcttgtcattttgtaagacgaccctgcagtccacctgtttgtaacttttttaataaaatagacatctgtattactgag

SEQ ID NO: 174070 - DNA, 1951 bp, Homo sapiens
  Payload ID: 14168
  Gene Symbol: RORA
  Gene Name: RAR-related orphan receptor A
  Uniprot ID: P35398
  ENST ID: ENST00000261523
  CDS Start-End: 90-1760
ccatctgtctgatcaccttggactccatagtacactggggcaaagcacagccccagtttctggaggcagatgggtaaccaggaaaaggcatgaatgagggggccccaggagacagtgacttagagactgaggcaagagtgccgtggtcaatcatgggtcattgtcttcgaactggacaggccagaatgtctgccacacccacacctgcaggtgaaggagccagaagggatgaactttttgggattctccaaatactccatcagtgtatcctgtcttcaggtgatgcttttgttcttactggcgtctgttgttcctggaggcagaatggcaagccaccatattcacaaaaggaagataaggaagtacaaactggatacatgaatgctcaaattgaaattattccatgcaagatctgtggagacaaatcatcaggaatccattatggtgtcattacatgtgaaggctgcaagggctttttcaggagaagtcagcaaagcaatgccacctactcctgtcctcgtcagaagaactgtttgattgatcgaaccagtagaaaccgctgccaacactgtcgattacagaaatgccttgccgtagggatgtctcgagatgctgtaaaatttggccgaatgtcaaaaaagcagagagacagcttgtatgcagaagtacagaaacaccggatgcagcagcagcagcgcgaccaccagcagcagcctggagaggctgagccgctgacgcccacctacaacatctcggccaacgggctgacggaacttcacgacgacctcagtaactacattgacgggcacacccctgaggggagtaaggcagactccgccgtcagcagcttctacctggacatacagccttccccagaccagtcaggtcttgatatcaatggaatcaaaccagaaccaatatgtgactacacaccagcatcaggcttctttccctactgttcgttcaccaacggcgagacttccccaactgtgtccatggcagaattagaacaccttgcacagaatatatctaaatcgcatctggaaacctgccaatacttgagagaagagctccagcagataacgtggcagacctttttacaggaagaaattgagaactatcaaaacaagcagcgggaggtgatgtggcaattgtgtgccatcaaaattacagaagctatacagtatgtggtggagtttgccaaacgcattgatggatttatggaactgtgtcaaaatgatcaaattgtgcttctaaaagcaggttctctagaggtggtgtttatcagaatgtgccgtgcctttgactctcagaacaacaccgtgtactttgatgggaagtatgccagccccgacgtcttcaaatccttaggttgtgaagactttattagctttgtgtttgaatttggaaagagtttatgttctatgcacctgactgaagatgaaattgcattattttctgcatttgtactgatgtcagcagatcgctcatggctgcaagaaaaggtaaaaattgaaaaactgcaacagaaaattcagctagctcttcaacacgtcctacagaagaatcaccgagaagatggaatactaacaaagttaatatgcaaggtgtctaccttaagagccttatgtggacgacatacagaaaagctaatggcatttaaagcaatatacccagacattgtgcgacttcattttcctccattatacaaggagttgttcacttcagaatttgagccagcaatgcaaattgatgggtaaatgttatcacctaagcacttctagaatgtctgaagtacaaacatgaaaaacaaacaaaaaaattaaccgagacactttatatggccctgcacagacctggagcgccacacactgcacatcttttggtgatcggggtcaggcaaaggaggggaaacaatgaaaacaaataaaagttgaacttgtttttctca

SEQ ID NO: 174071 - DNA, 1908 bp, Homo sapiens
  Payload ID: 14168
  Gene Symbol: RORA
  Gene Name: RAR-related orphan receptor A
  ENST ID: ENST00000309157
  CDS Start-End: 71-1717
ggactccatagtacactggggcaaagcacagccccagtttctggaggcagatgggtaaccaggaaaaggcatgaatgagggggccccaggagacagtgacttagagactgaggcaagagtgccgtggtcaatcatgggtcattgtcttcgaactggacaggccagaatgtctgccacacccacacctgcaggtgaaggagccagaagctcttcaacctgtagctccctgagcaggctgttctggtctcaacttgagcacataaactgggatggagccacagccaagaactttattaatttaagggagttcttctcttttctgctccctgcattgagaaaagctcaaattgaaattattccatgcaagatctgtggagacaaatcatcaggaatccattatggtgtcattacatgtgaaggctgcaagggctttttcaggagaagtcagcaaagcaatgccacctactcctgtcctcgtcagaagaactgtttgattgatcgaaccagtagaaaccgctgccaacactgtcgattacagaaatgccttgccgtagggatgtctcgagatgctgtaaaatttggccgaatgtcaaaaaagcagagagacagcttgtatgcagaagtacagaaacaccggatgcagcagcagcagcgcgaccaccagcagcagcctggagaggctgagccgctgacgcccacctacaacatctcggccaacgggctgacggaacttcacgacgacctcagtaactacattgacgggcacacccctgaggggagtaaggcagactccgccgtcagcagcttctacctggacatacagccttccccagaccagtcaggtcttgatatcaatggaatcaaaccagaaccaatatgtgactacacaccagcatcaggcttctttccctactgttcgttcaccaacggcgagacttccccaactgtgtccatggcagaattagaacaccttgcacagaatatatctaaatcgcatctggaaacctgccaatacttgagagaagagctccagcagataacgtggcagacctttttacaggaagaaattgagaactatcaaaacaagcagcgggaggtgatgtggcaattgtgtgccatcaaaattacagaagctatacagtatgtggtggagtttgccaaacgcattgatggatttatggaactgtgtcaaaatgatcaaattgtgcttctaaaagcaggttctctagaggtggtgtttatcagaatgtgccgtgcctttgactctcagaacaacaccgtgtactttgatgggaagtatgccagccccgacgtcttcaaatccttaggttgtgaagactttattagctttgtgtttgaatttggaaagagtttatgttctatgcacctgactgaagatgaaattgcattattttctgcatttgtactgatgtcagcagatcgctcatggctgcaagaaaaggtaaaaattgaaaaactgcaacagaaaattcagctagctcttcaacacgtcctacagaagaatcaccgagaagatggaatactaacaaagttaatatgcaaggtgtctaccttaagagccttatgtggacgacatacagaaaagctaatggcatttaaagcaatatacccagacattgtgcgacttcattttcctccattatacaaggagttgttcacttcagaatttgagccagcaatgcaaattgatgggtaaatgttatcacctaagcacttctagaatgtctgaagtacaaacatgaaaaacaaacaaaaaaattaaccgagacactttatatggccctgcacagacctggagcgccacacactgcacatcttttggtgatcggggtcaggcaaaggaggggaaacaatgaaaacaaataaaagttgaacttgtttttctca

SEQ ID NO: 174072 - DNA, 10844 bp, Homo sapiens
  Payload ID: 14168
  Gene Symbol: RORA
  Gene Name: RAR-related orphan receptor A
  Uniprot ID: P35398
  ENST ID: ENST00000335670
  CDS Start-End: 102-1673
ttttttttttttttttggtaccatagagttgctctgaaaacagaagatagagggagtctcggagctcgccatctccagcgatctctacattgggaaaaaacatggagtcagctccggcagcccccgaccccgccgccagcgagccaggcagcagcggcgcggacgcggccgccggctccagggagaccccgctgaaccaggaatccgcccgcaagagcgagccgcctgccccggtgcgcagacagagctattccagcaccagcagaggtatctcagtaacgaagaagacacatacatctcaaattgaaattattccatgcaagatctgtggagacaaatcatcaggaatccattatggtgtcattacatgtgaaggctgcaagggctttttcaggagaagtcagcaaagcaatgccacctactcctgtcctcgtcagaagaactgtttgattgatcgaaccagtagaaaccgctgccaacactgtcgattacagaaatgccttgccgtagggatgtctcgagatgctgtaaaatttggccgaatgtcaaaaaagcagagagacagcttgtatgcagaagtacagaaacaccggatgcagcagcagcagcgcgaccaccagcagcagcctggagaggctgagccgctgacgcccacctacaacatctcggccaacgggctgacggaacttcacgacgacctcagtaactacattgacgggcacacccctgaggggagtaaggcagactccgccgtcagcagcttctacctggacatacagccttccccagaccagtcaggtcttgatatcaatggaatcaaaccagaaccaatatgtgactacacaccagcatcaggcttctttccctactgttcgttcaccaacggcgagacttccccaactgtgtccatggcagaattagaacaccttgcacagaatatatctaaatcgcatctggaaacctgccaatacttgagagaagagctccagcagataacgtggcagacctttttacaggaagaaattgagaactatcaaaacaagcagcgggaggtgatgtggcaattgtgtgccatcaaaattacagaagctatacagtatgtggtggagtttgccaaacgcattgatggatttatggaactgtgtcaaaatgatcaaattgtgcttctaaaagcaggttctctagaggtggtgtttatcagaatgtgccgtgcctttgactctcagaacaacaccgtgtactttgatgggaagtatgccagccccgacgtcttcaaatccttaggttgtgaagactttattagctttgtgtttgaatttggaaagagtttatgttctatgcacctgactgaagatgaaattgcattattttctgcatttgtactgatgtcagcagatcgctcatggctgcaagaaaaggtaaaaattgaaaaactgcaacagaaaattcagctagctcttcaacacgtcctacagaagaatcaccgagaagatggaatactaacaaagttaatatgcaaggtgtctaccttaagagccttatgtggacgacatacagaaaagctaatggcatttaaagcaatatacccagacattgtgcgacttcattttcctccattatacaaggagttgttcacttcagaatttgagccagcaatgcaaattgatgggtaaatgttatcacctaagcacttctagaatgtctgaagtacaaacatgaaaaacaaacaaaaaaattaaccgagacactttatatggccctgcacagacctggagcgccacacactgcacatcttttggtgatcggggtcaggcaaaggaggggaaacaatgaaaacaaataaaagttgaacttgtttttctcatgcatatgatttccattatgcctacagatatggaccctttttctgtcttgacttcttgatcattgacctctgtttacaacaggaggagggtactaaagtcggaggatttccttttcttgtagctcactgcccacagactttctacagagtcaccaatctgtcagtaacaacagagagtccagcaataatcggtgactggtgtgcatagcggaggttgcggcattactttgcacaactagctctttgtttcatgaaggaagtttttattttttcaccgattattgccagtccgcaggatggcatgaaaagggtccatagcagtagcaacaatagcattataatatattacagggtaaatgggcatgaagactatatatagctaaaagagatattgtttatatattgttttaagtaatataaaatgtagttactggtgtagcttttcctgttgaattgataaggcactttcattttgcacctttttctttaaattaaatgctagcgtgttcactgtcgtgtcgcatgtgcaccagaaacacaagtttaactgagaaggcttggaaggtacgttgggaggtatttatgctgctgtttacaaaattatttttaagagactggctggtcatatctagaaatcaccacgttggattttttttttaacatgtgaatttggaattagaaacggaactctccctaaattatactttgctttttggtaagtttaatgatagatgtgtttatgcttcatacaaagttgaatgattgattggcgtggtggacatataccatcatgctcattttttttttttaaagctttttaaaatgccacctcatggaggcgagggggaggagaagctcattttacacaattcagtagttaaatatggactcggtctcaacttggaattcttatgctttgagaacaaatcaacaaccagaatatttattggaatctagcttttattataagaaggacccaaagattatatcctgagcaaatgcacactccccatgtgaggacatgaagtatttactttgtgaatgtttatgttcttggtataatctaggaaccctatgagtttatctcagagtgaactaattctagatttgttgtcaatagatgctataattcaagaatgttgctctccatatttgaaaaacgatggataggagggtgagggaagcatacaatgttgaaccagtttctcttatttaaatattaaatactttaagcctttaaagtgaagttgatgctagctgcaaacatttactcttgtatttatcttcactaggaaactgtggactgtaatttattttattaaatatttagaagattatttggcttgtgtgttcaggtgagaaatactgagttgtttttgtttaatttcatggtttttttttttttaatgatccctagtgggggaaggggaaaggaatagtctgataaacagatgtgcatattttaaaaacaagtgaccttttgggaatgtaggcatttagacgatgattttagtcgcactaggggtgggattcaaactactggtcaaagaccattttgtacagaaaagggaacatctccgatgggtgttaaggtaggagtttccatgcagccctttatgtctgagaaatagtctcctctgccattggggtccctgcggaatcttctacaggaattgcagctcttcacgtcatgctaggttaccagcatgggcttcccagagcacttcactctgtttctaactccactgacttttctgacttgtttcttgagggacttggaaaaggggaaggtattattcacacagatgtgtgtatgaagcctaaataacatccaactttttttccaaaaacatagtaagagtttaaccataaatagaagagtaatattcctttaaatttcttacaggcatgtaaaattttatgtgtttatagagagatgctaactgtcagcatatagtatttatattggggcaagaagggttaaatcaaatctttaatttaagtaagcatagttcctttaaagatcagtagtatttatactctgaaaagagtaccaagcttagttcagttatttattcatccattttttttctattgtttctcctctggggggaaatggtgttttgtttttgtttgagttttgtgttttagttttttggttttggttttgttttgtttttttgtcattcagattcactaaatttggggatggttttattaaagtatattaacttctttttaaccaaagctttctgaatatgaccagcctcaggtgctagcgcattaaagagcaactaaacctaattccagtgtcgatttgtgaaataataaaagctaattgaatttctctaagggtgagagagaacataatgatgaacttaaaaagaaattccttttcccagaagggattctgcatgtacctacaaacaatcatgctctaaccacagtaatagtcatgccatggtgacattgcttttacggtaaaccaagataggtaatatgatgcttcttcccaggtgtttctgaaagaaaagcagcggtggagcttaagagccaagtccactgattgacataataggatggaattgtagacagagacatgctccatgaaacaaggaaacaactgactactatttggatctaagttgggatctgatgttaaacaataaattcagtttaaaaaaaatatggagctcagaaaaggatgtgaaaaactttgcattttcctttcttcattattacaaaaacacctatgtgatgacataaaatacttgggtgatatcagaacaattatccttaatagtttttataattaaagtttcctaaacttcagtctccaatagtcttttaaggattggaaccacatcactgtcagccccgctgctacaatgcctttgtacaatttttttacataaggcaaataaggcttttgtacaaagcctgaataccttctgttccaatggtgtccaaatggttattatattgtgaaaaacctggccttggtcacaatgcaaacaaaagtacagatgaaagtgctttttggacagtttgcaaattgtgttaaagctacggattttttttaaagtgttcagcatcttaacgtgtattaaagctatggatttttttttaaagtcttcagcatcctaattcaccctttctaacttaagaaaaacatgacttaagacactgcttctaagtttggttgttctttatagtgtggatacccagttatctgtgagcgtatgggggtgggctgagggtcaggtgaggaaggagtgtgtgtgtgtgtgtgtgtgtgtgtgtgtgtgtgtgtgatttgcatgtgtatgatgtgtgtgcgtcggaccgcttctaggctactaagtgtcaatggaaaagaaaatgtattcaaaatacttaaatcaaaactagaagatggggaaaaaaagatttattctatacaaagccttgtctggaccactttagagagacttctatttttttaacccttctataaatatttgatggcacttgaaatattcctgcaataaaatgtgatttgtgtaaagaaaaaaagattttgtaatgtgaaacaaagaaagaaagtaatgtaattttctaaaaaaaaaaatacaaacaaacaaactttgtattattttcttgatggaatttgtctatctgtctttggaaaactttttatttcattgaatgtgccatagtagaaatgtgtgtttttagttttagactaaggaatagctagttgttgtgttccgacattccaaaatgcaaaacaacctagtagtatctttcatgaaaaggtttaagtagtatgtaagcttctctcattgttgcttttttgcacatgttcttcattcctctctagtgcaatatgtacatagagcacttgcgggtgtaccttgatccctcagggaaaaatacatatttgtacagttttttggggtttttttgttttttggttttttttgttttgccttttgtttttggctaaggaatgtcgatcgaatcacttgttattgttgaggggcagccagataataatcctaaagccactgtttccaacattgattgtttaaatcatatgtccttccaatgctattattttaagataataataaaaagttattttctgacagttctttgtgctgactggtgaaaaacaagggtaaataagcaccttataattgacttactgtgaatgacaatccatcttggtatcaacgatagaagccctatcattttggagttggggttaagagtcagaaacaatgtgctcagggatctcctaaaactcttaaaacagggtggccagtactactgggacaaattgtgttttttattattaataataatgataataatactatccctccaaggcacaagtgaactatatagaactgcgtgtgtgtaaactctttactctcgtctcattttgttgagtttagaacttgatgtgctcgtcagtcttgtgtttcaaaacactgaataacttccaaagcaaagttatgccagtgtgttcaaaagataaattaataatgtaccagcaaagagcatcattcaaagtatagtccttgcatattccagttaccatttctctaataattaaaatattcatgataaatatatatatagcatcatatgttaaaaactatttcaaattctacatattaaggatgaaaattttaaaatccagtaataagaggagagacctgcctatcagtacagtgatataggtaaaagatgaaatatgtttttaaaataccagcaattaactattgttttcatgggttctcctctagaagcaaaccaaaaattccttcatggaaaacaattcttacttctacatgtgtagtttatatctgatgcattacaagagctaatgtttaaagacaaaacaaaacctgcctgtatgacagcagcaactcgagccaacatttagtgttacatgttatatttttgaaataccgttttgttatcatattccacatattactttccataaagtcagagaagttcaatgtaattgttggctctgattcttccaccttgggatacacattcacaagaagatttatatattttcttactatgatagaggaacataatctgggaaaacttcccatgtctgtaagatgaaaaggatacctttaccatgttgtttttgataataaagaatatggaaaatggtagaaatctctcctctctatgtgtatttgtatatgtgtgtatacacacacacgttgacatttttacataacatgtgattgccacttcttataaagttatgatatagaaccccatgaaaacaactttatattatagatcaaataatgtgcccagaaacgcaattgcaacagtaaatcttgatctattggtaagagtctatgatacaggtcttcattctatccctaaacataatgttagtaaagaggttccatcagattgtattatagagaccttcctattgctatttatttttaagagatgagaagactgactagcaatgtctccacagtgcaattggtttcacttctgggtctgtctgtctgtttgtgtaggtgagatcagtgttgtcaggctctcagaataatttttaaaagaatccagaagcctgacttcacaccaagtagccatcctagatgggcgggggggatctccatgttcaaccaaaccctcagaacttagagcaataaatacattcagtcatttatttataaatgaatgacagaatattcaatccaaatagaaacaaccttttgtcagtgatgcaacataacatggagtcttatattgagaaagtgaatatgaatattttaaatagatgcctaggaaatctgtgtttgctgtttacatttaatgtactttgccacattagcagtaccacacttcttttactttcatccttctaagaactaatgaaagatagcttgctattagctttgacatgttgcacatgccattatgttgttctctaagaacaactaaattctctccagtgttcatgtgtgattcctttttcatcattattactttaatgtggatgaatactatttctaggaacttgattatcactgaacagattgcatatgtaaatgcagataattcttgagcaatatagtgaaaatgatttcacaaaaaaaatccatatgtactgtatacatcttcctgaatccaaaattctcctgttatccacacagtttgaaatctcatattaaacagtggtaaatttttaaacattaggacattagctggctgcttctataaatgtacctgtattgtctgcctgctccttttgtggagatgtgtttttgtattggatgtttgggccaatgggaggcttcaagctacaacatattttcccactttaaataatatttaacatatgacaaaccccagacaaggcttttaatatgtataaagaactgcagtgttaggtggtttatttgcaaactgttttcagtgttgtccatttttatggcacctttaacaatattcttgtttccaaagtacaaaaaaaataggttaaataatctagccataactgaatgtcaagcaataaaacaaatgacttttgtgcatagacttaaaaaatacaaattttagacatctgcatgtaaatgcaatctcttgtttactgctttcttcaacttgagcaatcgattccttatttactattaacttaagaacttgtaacggcctgtaaacattttctctcttactcttctttcaaatttacctgtccctgcttttgagtcataatatttaatgttgttctgcacatctctatacagttaactttttggctttcattctgtatagataagaaaatgttatattataaacagcctactcagtgcaaatatttatctgtttatcaaatccacaatatgctgtataataccggttttactatataatctattttagacatagctgtttagaactagagtgtgctatttttgtgtttttctgatgtgtggtgctagacaagttacttttgtgaacaacaaaaattatcccttttattcctagacaataccacctttgggtcttgttaatttcactgagtataactatatatttgtatatatatacatatatatatatatctacctatgcccaactggcagctgtatcagagtgctggatttgggacatgcttttctctttaaatacataatatcattatataaattattctagagtgtatttaattaggataaaattacttccttagtatggatatttgacatctatagggtgaatttgtttataaatatggctatatggaaacttattagcatttactttatgtttgctacttggctttacagcatatctcctaagctgaaaaataatttgccaggccttcaagatcctaaagaaacttgtttaatggagtaatatacttttttttcttattaaggaattgtattactggcacctaacacagttgtattcttagctcctattatagataatgggcatttacataaaatatcctagatggcttgatggcagaataaacctttcccctcctacctgagtcatgagaaggatggagacgtcctctgccataacatgggccataaagcaaattcgacatgggatgttctgtttcagtatgacctcaaccagttccatgaactgagtgaaggaccttcattttcaaagttatttaataagtagcttaattaagcctttctacccattctcccaagatctactggcattattgaaaagcaaagtttatcaaatatctaactaaggatgtagttaaccttattaaatattgattagaattgttctgtaatattactgaatttgtaagatctttagcaaagatttttgagcaatttataaatgtagagcaaatgtttctgtttactgcactttttgtaactgaaggtgataaattctcaagccatgattattggcttccatgcactgcaatatttatccacaattctagacattttccatttttgtggaagagttgctgttaccttaattataaatgcaattgtgtggttaatgagagctaatgctagtagttaaccttttaaagtggattggctacagttgagggagaaatctcttttaatataaatcacatcattccttaactgcctctcttggaaagagattgaaaccttttttttaaagcacgatttagcatcctaagcttcctgagggtagagattgtatctttttgcgtctgcacaatggctagcacatgtcagcatttgacaattgttaaatgataacaagtgtgccccaattaaaacgtttttcctgggttgttttgttaaatttacaaagtaagccaagccttacggttaacattctcctctacaaccaagtattaaagccacatttaaaaagaccacatgaaatgctgattctaattgtgtgtaggtcttgaggattaagcacacaaatttcacaaacttctgtttgagtaaacaaactcagccttctgtaaatatacatgcaagtttggaaacagtaatactgtacctataaatatatgctgtctgttttgtgtacagtatgtaaaaactccttttctgccacactaaaaatgcaagccatttatgggaatcctaaaactagtattgaactaaaactttgctaatgatctttattagaggatcgtccaacttttcacttaccttgggttttcttttcaattcactcttacactagtctgcttatttccagctgtttattttattgagtcctgaatttaaaaaaaaaatattttgattcattttgtaaatacaagctgtacaaaaaagagagatttaatgttgtcttttaaatactccaattttcattctaatatgaatgttgttatattgtacttagaaactgtacctttaatattacattacctttattaaaagtgcattgaacacatcaattttagatgtgctttatgtactgttatcctataataaaacttcagcttctaatggaa

SEQ ID NO: 174073 - DNA, 1701 bp, Homo sapiens
  Payload ID: 14168
  Gene Symbol: RORA
  Gene Name: RAR-related orphan receptor A
  ENST ID: ENST00000449337
  CDS Start-End: 125-1531
tctcggcgggcgggcagctgcggcagctgctgctgtggctcgggcggcggcggcgcggcggcggcagagggggctccggggtcggaccatccgctctccctgcgctctccgcaccgcggcttaaatgatgtattttgtgatcgcagcgatgaaagctcaaattgaaattattccatgcaagatctgtggagacaaatcatcaggaatccattatggtgtcattacatgtgaaggctgcaagggctttttcaggagaagtcagcaaagcaatgccacctactcctgtcctcgtcagaagaactgtttgattgatcgaaccagtagaaaccgctgccaacactgtcgattacagaaatgccttgccgtagggatgtctcgagatgctgtaaaatttggccgaatgtcaaaaaagcagagagacagcttgtatgcagaagtacagaaacaccggatgcagcagcagcagcgcgaccaccagcagcagcctggagaggctgagccgctgacgcccacctacaacatctcggccaacgggctgacggaacttcacgacgacctcagtaactacattgacgggcacacccctgaggggagtaaggcagactccgccgtcagcagcttctacctggacatacagccttccccagaccagtcaggtcttgatatcaatggaatcaaaccagaaccaatatgtgactacacaccagcatcaggcttctttccctactgttcgttcaccaacggcgagacttccccaactgtgtccatggcagaattagaacaccttgcacagaatatatctaaatcgcatctggaaacctgccaatacttgagagaagagctccagcagataacgtggcagacctttttacaggaagaaattgagaactatcaaaacaagcagcgggaggtgatgtggcaattgtgtgccatcaaaattacagaagctatacagtatgtggtggagtttgccaaacgcattgatggatttatggaactgtgtcaaaatgatcaaattgtgcttctaaaagcaggttctctagaggtggtgtttatcagaatgtgccgtgcctttgactctcagaacaacaccgtgtactttgatgggaagtatgccagccccgacgtcttcaaatccttaggttgtgaagactttattagctttgtgtttgaatttggaaagagtttatgttctatgcacctgactgaagatgaaattgcattattttctgcatttgtactgatgtcagcagatcgctcatggctgcaagaaaaggtaaaaattgaaaaactgcaacagaaaattcagctagctcttcaacacgtcctacagaagaatcaccgagaagatggaatactaacaaagttaatatgcaaggtgtctaccttaagagccttatgtggacgacatacagaaaagctaatggcatttaaagcaatatacccagacattgtgcgacttcattttcctccattatacaaggagttgttcacttcagaatttgagccagcaatgcaaattgatgggtaaatgttatcacctaagcacttctagaatgtctgaagtacaaacatgaaaaacaaacaaaaaaattaaccgagacactttatatggccctgcacagacctggagcgccacacactgcacatcttttggtgatcggggtcaggcaaaggaggggaaacaatgaaaacaaataa

SEQ ID NO: 174074 - DNA, 749 bp, Homo sapiens
  Payload ID: 14168
  Gene Symbol: RORA
  Gene Name: RAR-related orphan receptor A
  ENST ID: ENST00000551975
  CDS Start-End: 1-188
ccccgctgaaccaggaatccgcccgcaagagcgagccgcctgccccggtgcgcagacagagctattccagcaccagcagaggtatctcagtaacgaagaagacacatacatggcaggcatggtacagagcgcttccttgcacagccttgcccatgagctcgtccctggcccggagggacccactctagaggtgctcaaattgaaattattccatgcaagatctgtggagacaaatcatcaggaatccattatggtgtcattacatgtgaaggctgcaagggctttttcaggagaagtcagcaaagcaatgccacctactcctgtcctcgtcagaagaactgtttgattgatcgaaccagtagaaaccgctgccaacactgtcgattacagaaatgccttgccgtagggatgtctcgagatgctgtaaaatttggccgaatgtcaaaaaagcagagagacagcttgtatgcagaagtacagaaacaccggatgcagcagcagcagcgcgaccaccagcagcagcctggagaggctgagccgctgacgcccacctacaacatctcggccaacgggctgacggaacttcacgacgacctcagtaactacattgacgggcacacccctgaggggagtaaggcagactccgccgtcagcagcttctacctggacatacagccttccccagaccagtcaggtcttgatatcaatggaatcaaaccagaaccaatatgtgactacacaccagcatc

SEQ ID NO: 174075 - DNA, 577 bp, Homo sapiens
  Payload ID: 14168
  Gene Symbol: RORA
  Gene Name: RAR-related orphan receptor A
  ENST ID: ENST00000559343
  CDS Start-End: 118-577
ctctccagaaagacttcggaggagcttactccactccccggacggtcccagtggcttcgttctccacggcccagaagtgggccgtaccttccgattagagctggggcactctaggaaatgcgggtgaccgtagctccccagaccaaacctgtcttttccaccaacgagctggcgcatttatcgcccccgagtgctccggcaagccagcgggagagtggcgtcgggttgcgagcctcttgccccaccgagtgggggcagaaagtggtcagaggcgcgttccgcggggcgctgcgtgcagaaaagcgaccggcggccacagctcaaattgaaattattccatgcaagatctgtggagacaaatcatcaggaatccattatggtgtcattacatgtgaaggctgcaagggctttttcaggagaagtcagcaaagcaatgccacctactcctgtcctcgtcagaagaactgtttgattgatcgaaccagtagaaaccgctgccaacactgtcgattacagaaatgccttgccgtagggatgtctcgagatgctgtaaaatttggccgaatgtcaaaaaagc

SEQ ID NO: 174076 - DNA, 492 bp, Homo sapiens
  Payload ID: 14168
  Gene Symbol: RORA
  Gene Name: RAR-related orphan receptor A
  ENST ID: ENST00000558904
  CDS Start-End: 1-117
gcggccgccggctccagggagaccccgctgaaccaggaatccgcccgcaagagcgagccgcctgccccggtgcgcagacagagctattccagcaccagcagagattggcatgcttaaagggctgaccatctgatgtacaggaaatggaaactactctctgaaaagcaagtgatctcccagccgcacccatttaggagaccaggattttattttgatccacaggagactaaatgagttagaggccactcctgtatcaacagagtttgttacttaaatgacagtagggcggttcgcagaaggaacaccaaatagtctgactatctaccaagaagagagtgtttgaacacatgtgcaacctcttgactgtggtgtgtggggcagcatttaataagaaagagctaaatctgcttgatgtgggaatatattcaacacatgttaagtgctaaaatattcaaagtaaataaatgtctatgtactccatattgttaaaga

SEQ ID NO: 174077 - DNA, 9551 bp, Homo sapiens
  Payload ID: 14169
  Gene Symbol: RORB
  Gene Name: RAR-related orphan receptor B
  Uniprot ID: Q92753
  ENST ID: ENST00000376896
  CDS Start-End: 613-1992
cccttcctccctgtaactgaacagtgaaaattcacattgtggatccgctaacaggcacagatgtcatgtgaaaacgcacatgctctgccatccacaccgcctttctttcttttctttctgtttccttttttcccccttgttccttctccctcttctttgtaactaacaaaaccaccaccaactcctcctcctgctgctgcccttcctcctcctcctcagtccaagtgatcacaaaagaaatcttctgagccggaggcggtggcattttttaaaaagcaagcacattggagagaaagaaaaagaaaaacaaaaccaaaacaaaacccaggcaccagacagccagaacatttttttttcacccttcctgaaaacaaacaaacaaacaaacaatcatcaaaacagtcaccaccaacatcaaaactgttaacatagcggcggcggcggcaaacgtcaccctgcagccacggcgtccgcctaaagggatggttttctcggcagagcagctcttcgccgaccaccttcttcactcgtgctgagcgggatttttgggctctccggggttcgggctgggagcagcttcatgactacgcggagcgggagagcggccacaccatgcgagcacaaattgaagtgataccatgcaaaatttgtggcgataagtcctctgggatccactacggagtcatcacatgtgaaggctgcaagggattctttaggaggagccagcagaacaatgcttcttattcctgcccaaggcagagaaactgtttaattgacagaacgaacagaaaccgttgccaacactgccgactgcagaagtgtcttgccctaggaatgtcaagagatgctgtgaagtttgggaggatgtccaagaagcaaagggacagcctgtatgctgaggtgcagaagcaccagcagcggctgcaggaacagcggcagcagcagagtggggaggcagaagcccttgccagggtgtacagcagcagcattagcaacggcctgagcaacctgaacaacgagaccagcggcacttatgccaacgggcacgtcattgacctgcccaagtctgagggttattacaacgtcgattccggtcagccgtcccctgatcagtcaggacttgacatgactggaatcaaacagataaagcaagaacctatctatgacctcacatccgtacccaacttgtttacctatagctctttcaacaatgggcagttagcaccagggataaccatgactgaaatcgaccgaattgcacagaacatcattaagtcccatttggagacatgtcaatacaccatggaagagctgcaccagctggcgtggcagacccacacctatgaagaaattaaagcatatcaaagcaagtccagggaagcactgtggcaacaatgtgccatccagatcactcacgccatccaatacgtggtggagtttgcaaagcggataacaggcttcatggagctctgtcaaaatgatcaaattctacttctgaagtcaggttgcttggaagtggttttagtgagaatgtgccgtgccttcaacccattaaacaacactgttctgtttgaaggaaaatatggaggaatgcaaatgttcaaagccttaggttctgatgacctagtgaatgaagcatttgactttgcaaagaatttgtgttccttgcagctgaccgaggaggagatcgctttgttctcatctgctgttctgatatctccagaccgagcctggcttatagaaccaaggaaagtccagaagcttcaggaaaaaatttattttgcacttcaacatgtgattcagaagaatcacctggatgatgagaccttggcaaagttaatagccaagataccaaccatcacggcagtttgcaacttgcacggggagaagctgcaggtatttaagcaatctcatccagagatagtgaatacactgtttcctccgttatacaaggagctctttaatcctgactgtgccaccggctgcaaatgaaggggacaagagaactgtctcatagtcatggaatgcatcaccattaagacaaaagcaatgtgttcatgaagacttaagaaaaatgtcactactgcaacattaggaatgtcctgcacttaatagaattatttttcaccgctacagtttgaagaatgtaaatatgcacctgagtggggctcttttatttgtttgtttgtttttgaaatgaccataaatatacaaatataggacactgggtgttatcctttttttaattttattcgggtatgttttgggagacaactgtttatagaattttattgtagatatatacaagaaaagagcggtactttacatgattacttttcctgttgattgttcaaatataatttaagaaaattccacttaataggcttacctatttctatgtttttaggtagttgatgcatgtgtaaatttgtagctgtcttggaaagtactgtgcatgtatgtaataagtatataatatgtgagaatattatatatgactattacttatacatgcacatgcactgtggcttaaataccatacctactagcaatggaggttcagtcaggctctcttctatgatttaccttctgtgttatatgttacctttatgttagacaatcaggattttgttttcccagccagagttttcatctatagtcaatggcaggacggtaccaactcagagttaagtctacaaaggaataaacataatgtgtggcctctatatacaaactctatttctgtcaatgacatcaaagccttgtcaagatggttcatattgggaaggagacagtattttaagccattttcctgtttcaagaattaggccacagataacattgcaaggtccaagacttttttgaccaaacagtagatattttctatttttcaccagaacacataaaaacactttttttcttttggatttctggttgtgaaacaagcttgatttcagtgcttattgtgtcttcaactgaaaaatacaatctgtggattatgactaccagcaatttttttctaggaaagttaaaagaataaatcagaacccagggcaacaatgccatttcatgtaaacattttctctctcaccatgttttggcaagaaaaggtagaaagagaagacccagagtgaagaagtaattctttatattcctttctttaatgtatttgttaggaaaagtggcaataaagggggaggcatattataaaatgctataatataaaaatgtagcaaaaacttgacagactagaaaaaaaaagatctgtgttattctagggaactaatgtaccccaaagccaaaactaattcctgtgaagtttacagttacatcatccatttaccctagaattatttttttagcaacttttagaaataaagaatacaactgtgacattaggatcagagattttagacttccttgtacaaattctcacttctccacctgctcaccaatgaaattaatcataagaaaagcatatattccaagaaatttgttctgcctgtgtcctggaggcctatacctctgttattttctgatacaaaataaaacttaaaaaaaagaaaacaagctaagagagaagtttgtgtataagacaatgaaaattatggtctcctgtaagtatatcccagccaccaactcctaaagaactgcccttttctccatattaaacacacacacacttacacacacacacatacaaacccctgctttgtaaagtttccatcagtggaaactttgatttctttttttaatctcttatgctctcctgaagttcatggttgagcaccatctccaagataccacagaactcttgattgatgatcaaaacagtagtgtcatcttttccttttagaaaacggaacattttctcacctcatgattgatgaattctaaaccaatggggaaaaacaaaaaggctttaaaataatgaatctgtttctcaactactgttatattcaattaatttaactacattgaaccaaattacctttggttctaagaagacagctgtagactgcttattatgctgctacagggactcaattctttttggtgtaaatgtcactcctgctagctctttgtataaagaattaattcccagagtcatatttccttctaatggaaagattactctactgattgctaggaaaacagggtaatggaaggcactcaattaaaccaagccgtttccaaatgcaatgtatgttttatgattggcttgtgataggcgatgcttcatgtgtctacttggtgtttccctttgagctttgaacttatgtcaaactttgttttcattgttctgttggcctagtgttttccattgtcagcctgtaattcctgctcagttgcagagggaattatttatttcctccaatttaccttagaggatttaaattggctcaattgatgaagtggctcagaattttttcctcccttttcccatgggtgatataggaaaaagattgttccccacatttaccttgggaggtactgctttgaatttgtgttgtttccactagcgttaagcatttcactgggacggcatggaccttttgaagctgggaggaaggaaacagagctagcatctgaaccagagcaaaacaatggcaaccaggacatactcatcccacttagttgagagaagagatttctagtttgggttacagttgcccaaccttccctttaaagagaatccagtcatgttttcaatggtaaaaagccttaaaaagctgcccttcgaagatctcctatgactgcatgtcaaggtattttgtacctacaatcccagaacttggttccttccccatgaggactaacaaatgttcacaacaatcatgatcaagtgtgcactggaagaaaaaatccacaatctgggcttctcacttcgtgcttcataaatgacaatcactgcttgatgcagatgttgcactgtatccactcagggatgtttccttaaaaaaaaaaaatacatcaagaaggaggaaaaaattaaaaacaggaaaatgacaacaaaatgtgaatggtataaattaaatatgttgctgagagcacctctctgacaaggctttcagaccaacaagcagtaacttcatgtcataaactagattgacttatttggacttgctgaaaagttgcacccaagtaaggacaacttggtctcattttctaaactctgctaagagccaaataatctagctgtcccattcagaggaatttttatctccctgcaaatccaaactttctatacaaatcctgaacaaggaaaatacagaaatctaactggcattagataaaatggacaagggaggtgaaaccgggtgaattcaaacttcagtgtatttgtggtccataaaaagaaagggaaattttggagggaaaataggacaggaaaggattccaaatctggtttgacacccgtatatgcccgtactgtccatgactcaactaatctctttgcccctttttctgtggctccttttttgttttgagacagatcttgttcaacatgttgctcaggctggagtgcagtggcatgagatcttggctcgctgcaatctctgcctcctgggttcaagcgattctcctgcttcagcctcctgagtagctgggattacaggcacacgcccccacacccggctaatttttgtattttaggtagagatggggtttcaccatgttggccaggctggtcctgaactcctgacctcaagtgatccacccgccttggcctcccaaagtgcaaggattacaggcctgagccactgcgccctgccttcagtggctcttttatcccccaaagactgaaagctgaaggtggagatgttctccacaaacataccctttctgaatttcccttgttttagcactgtgttcagggctctggactaaagtacctctgagtaggtaaaatcagagaatataacgatctcctgagtgattagatttctttggtagattccaagagatcttaaatcataataaactctgaatattaacaagaggtgccagggaggtgtcagtacatttcctatcatagctgccttgttcaaagcataatctcagagcagtcaagctaaactgtttgtagaaaaccatgaagatcaactcatgctcactctctacaatgcaatgtgtacgaggcttgaaggcaaaaacaattcttgggtcccaaggacaacctaaaacttaccagcttttttcaaaaacaacaatcagatgcaaataatggcagtgttgttctatgttctttgtttctgttcattatagaagcaaggaaaaattctatttctattggaaattagaagaaataatttcttcctgactctttttttttctataaacttttatttccaaggaagctgctacaatttgcagtcaattcaggccatggacgtctgtgccctaacagaagcaccgttcaatagaacagcaataaccttaaagtgtgcatctgtagtgaaactctgcacaaagtcccctgcataaagaagagaggaaagcctaccatctgctttagacgaagtgttatttgatgttctgtttccaactgtcagtataagcagcaactagagtaaaggcctgatgtgggaaactatggggggtctttcaaaaaaaagctgacactctattcatttttgggtctcaggaccagagggtacagggtagagggtagtttaccatttaaagcaggggttgaaaattcgaaagcctaaaagggccagggggcttaatgcaaatgggtgaagcagcccaggggcaagctggccaggaaatgccctgtggaaaaagggacatccacgatttacctgaaactgaatgctgctagagcttctgaattttataaaatctctgaaattatacatgatggcagttgattcagagcttagtgcagaccaaacaaatacatcactgagcagaagagggcccatagatcgtcagcttgcagcctctggtttaaagcaaaatcgcatctggggccagctcaactgcagcaagtctggtcagattcaaccctggacgatattagaatgatattagttttggaaggaggggatggagatcttccccttctaatactcaattttgttttggtatttgattgtcacaactagaggatataacaggaggtcagtttaaaaaatagcaaacagtctaaaaatgaaaactattcaatttagtgatggcttataaaagacactccaacttgtcttgcccaaactcccttcttcatagagccagggggctggatttcttgccactttttttctgaaaggcaaatgcatgacttttattcttttgggtctcagtgtgtttcttgaactgtgtgacttcaatatctgtgacaagtttttattttcccttagttgtatgtgaagaatttattctatagtcgtgatcatgtagtcctccattgtttggaagtgcagaccatggattcctatgcagcagatgggggttgtctgtttgtgcacttttttcctaagctgctgaaattcctccgatgtgaatgggccatagtaatctttgcctcctgcgtgactgtaagcatggcctccagtggatcagagaaagcagctcagtgattgttctcatggccaaaaataaagcacaagggttaccggaattgaatgagccctgttcagggcagcacggggcatctgcaccccagctgggcagcatgatccttgtattcaactatactcttctggcagtagttggtggcaagcattcgcgtgcctctgtcacaaccatacgtagaaacacattaggtatgtctggaaagctacaaatcccacatccaagcacagtaccgtctgcttcatctgattaacacacacacaagaaagaaaaattacacccacagaaaactgagtatgtattgtagaaatgtagaggaaaaataaaaatattttttcaaatgtaattacttttaatatatgcttgtggaaggtctaatacaatgtatgctgtctctgtaatttttgctgtaaataactggagacggtgagtacactgatttttctatgtctctgtttaagcataagactttgtaacaatttttttagagggggaaaatcaacaaagagcaaatatgtacttgcttcctttctgcgtgttatgtacttctcagttttttaatggaaactggttgtaacagtttaagcatcttgacgggtcattggtgttaagtgtatgcttctttttgtaatatgactgagaaagggacagggctgtcaattaaatctgctccaaagaatttgtattgaagattggcctaagacctgcaaactccatctataactagaaaatacgaaaaaggaaaattaaaaaaaaaagttgcctgagttaagtcatctttccttgtagcaaatggctttgtccaaatcctttctgcatggaatagcttaaggaaaacaaactccgctttctgatgaacaagatatttttgtacacatttatttcttgttaataacctgaggtcagaccactcatttgctgaagccataactgaccttcaccaaataaatgttgtaaagaacctaggggagggttggggagagactgagagggaggaaaatccaaggtgtcatgagctatagcaacacaggcaggagcaagttgttgaaactgatgcttttcctgcatcccaaatatgactttaaaaggctagtattttatgatgatcgatttataatgataaaaagatatttagatttaaatgagacattccaatatttttgaaatccctaacaatgcttccttgcttttaggattgagagaaatgattttcatatacttccaacattcagagatttaatgtttttaccttagctccagcctacgcttgtaaagtgaagagtgattctaagtcccgtgaaaccgtgggctgcctggggcttggctgtgcccactaacctactgcgcctggggggcagcatgggaggggtacagtttgcatctcattagcatgcacaccactgttggcaatgcataaaagttgcattgccacaagtatgtaaaataaaaatattcactctaaaaagaataataattctacttttttaaaagaataatgtctcttatagtcaccattgatttttctggagtttaattacattattaccatgtattcttattggcctgtagaggaaaaaggcaaaccacaaataaacccagtgacatatatagttttaaaatctacaattttctgatctctctctccttgtttaatatataagccctaatttctgtgtatgtgagtaaaactgcagcctgagtcatttaggaagtaagtattgagtttttttaatcataaatatactagaataaaacagcactccctaacaattaaaaaagagttttatattactttagaatgtaataggtttttgtccttattttatgtcctgtaaattattagttcaatactgttagcattcccggataatgcacacatgatttctgaatgttttctgtaaatgacaatcaatgtttatgaagtttcctcctttaatgctgaacaaaattaaaagaagaaaaagaaaaaa

SEQ ID NO: 174078 - DNA, 2996 bp, Homo sapiens
  Payload ID: 14169
  Gene Symbol: RORB
  Gene Name: RAR-related orphan receptor B
  Uniprot ID: Q92753
  ENST ID: ENST00000396204
  CDS Start-End: 1-1413
atgtgtgagaaccagctcaaaactaaagctgacgccactgcacaaattgaagtgataccatgcaaaatttgtggcgataagtcctctgggatccactacggagtcatcacatgtgaaggctgcaagggattctttaggaggagccagcagaacaatgcttcttattcctgcccaaggcagagaaactgtttaattgacagaacgaacagaaaccgttgccaacactgccgactgcagaagtgtcttgccctaggaatgtcaagagatgctgtgaagtttgggaggatgtccaagaagcaaagggacagcctgtatgctgaggtgcagaagcaccagcagcggctgcaggaacagcggcagcagcagagtggggaggcagaagcccttgccagggtgtacagcagcagcattagcaacggcctgagcaacctgaacaacgagaccagcggcacttatgccaacgggcacgtcattgacctgcccaagtctgagggttattacaacgtcgattccggtcagccgtcccctgatcagtcaggacttgacatgactggaatcaaacagataaagcaagaacctatctatgacctcacatccgtacccaacttgtttacctatagctctttcaacaatgggcagttagcaccagggataaccatgactgaaatcgaccgaattgcacagaacatcattaagtcccatttggagacatgtcaatacaccatggaagagctgcaccagctggcgtggcagacccacacctatgaagaaattaaagcatatcaaagcaagtccagggaagcactgtggcaacaatgtgccatccagatcactcacgccatccaatacgtggtggagtttgcaaagcggataacaggcttcatggagctctgtcaaaatgatcaaattctacttctgaagtcaggttgcttggaagtggttttagtgagaatgtgccgtgccttcaacccattaaacaacactgttctgtttgaaggaaaatatggaggaatgcaaatgttcaaagccttaggttctgatgacctagtgaatgaagcatttgactttgcaaagaatttgtgttccttgcagctgaccgaggaggagatcgctttgttctcatctgctgttctgatatctccagaccgagcctggcttatagaaccaaggaaagtccagaagcttcaggaaaaaatttattttgcacttcaacatgtgattcagaagaatcacctggatgatgagaccttggcaaagttaatagccaagataccaaccatcacggcagtttgcaacttgcacggggagaagctgcaggtatttaagcaatctcatccagagatagtgaatacactgtttcctccgttatacaaggagctctttaatcctgactgtgccaccggctgcaaatgaaggggacaagagaactgtctcatagtcatggaatgcatcaccattaagacaaaagcaatgtgttcatgaagacttaagaaaaatgtcactactgcaacattaggaatgtcctgcacttaatagaattatttttcaccgctacagtttgaagaatgtaaatatgcacctgagtggggctcttttatttgtttgtttgtttttgaaatgaccataaatatacaaatataggacactgggtgttatcctttttttaattttattcgggtatgttttgggagacaactgtttatagaattttattgtagatatatacaagaaaagagcggtactttacatgattacttttcctgttgattgttcaaatataatttaagaaaattccacttaataggcttacctatttctatgtttttaggtagttgatgcatgtgtaaatttgtagctgtcttggaaagtactgtgcatgtatgtaataagtatataatatgtgagaatattatatatgactattacttatacatgcacatgcactgtggcttaaataccatacctactagcaatggaggttcagtcaggctctcttctatgatttaccttctgtgttatatgttacctttatgttagacaatcaggattttgttttcccagccagagttttcatctatagtcaatggcaggacggtaccaactcagagttaagtctacaaaggaataaacataatgtgtggcctctatatacaaactctatttctgtcaatgacatcaaagccttgtcaagatggttcatattgggaaggagacagtattttaagccattttcctgtttcaagaattaggccacagataacattgcaaggtccaagacttttttgaccaaacagtagatattttctatttttcaccagaacacataaaaacactttttttcttttggatttctggttgtgaaacaagcttgatttcagtgcttattgtgtcttcaactgaaaaatacaatctgtggattatgactaccagcaatttttttctaggaaagttaaaagaataaatcagaacccagggcaacaatgccatttcatgtaaacattttctctctcaccatgttttggcaagaaaaggtagaaagagaagacccagagtgaagaagtaattctttatattcctttctttaatgtatttgttaggaaaagtggcaataaagggggaggcatattataaaatgctataatataaaaatgtagcaaaaacttgacagactagaaaaaaaaagatctgtgttattctagggaactaatgtaccccaaagccaaaactaattcctgtgaagtttacagttacatcatccatttaccctagaattatttttttagcaacttttagaaataaagaatacaactgtgacattaggatcagagattttagacttccttgtacaaattctcacttctccacctgctcaccaatgaaattaatcataagaaaagcatatattccaagaaatttgttctgcctgtgtcctggaggcctatacctctgttattttctgatacaaaataaaacttaaaaaaaagaaaacaagctaa

SEQ ID NO: 174079 - DNA, 2180 bp, Homo sapiens
  Payload ID: 14170
  Gene Symbol: RORC
  Gene Name: RAR-related orphan receptor C
  Uniprot ID: P51449
  ENST ID: ENST00000318247
  CDS Start-End: 109-1665
gccaggtgctcccgccttccaccctccgccctcctccctcccctgggccctgctccctgccctcctgggcagccagggcagccaggacggcaccaagggagctgccccatggacagggccccacagagacagcaccgagcctcacgggagctgctggctgcaaagaagacccacacctcacaaattgaagtgatcccttgcaaaatctgtggggacaagtcgtctgggatccactacggggttatcacctgtgaggggtgcaagggcttcttccgccggagccagcgctgtaacgcggcctactcctgcacccgtcagcagaactgccccatcgaccgcaccagccgaaaccgatgccagcactgccgcctgcagaaatgcctggcgctgggcatgtcccgagatgctgtcaagttcggccgcatgtccaagaagcagagggacagcctgcatgcagaagtgcagaaacagctgcagcagcggcaacagcagcaacaggaaccagtggtcaagacccctccagcaggggcccaaggagcagataccctcacctacaccttggggctcccagacgggcagctgcccctgggctcctcgcctgacctgcctgaggcttctgcctgtccccctggcctcctgaaagcctcaggctctgggccctcatattccaacaacttggccaaggcagggctcaatggggcctcatgccaccttgaatacagccctgagcggggcaaggctgagggcagagagagcttctatagcacaggcagccagctgacccctgaccgatgtggacttcgttttgaggaacacaggcatcctgggcttggggaactgggacagggcccagacagctacggcagccccagtttccgcagcacaccggaggcaccctatgcctccctgacagagatagagcacctggtgcagagcgtctgcaagtcctacagggagacatgccagctgcggctggaggacctgctgcggcagcgctccaacatcttctcccgggaggaagtgactggctaccagaggaagtccatgtgggagatgtgggaacggtgtgcccaccacctcaccgaggccattcagtacgtggtggagttcgccaagaggctctcaggctttatggagctctgccagaatgaccagattgtgcttctcaaagcaggagcaatggaagtggtgctggttaggatgtgccgggcctacaatgctgacaaccgcacggtcttttttgaaggcaaatacggtggcatggagctgttccgagccttgggctgcagcgagctcatcagctccatctttgacttctcccactccctaagtgccttgcacttttccgaggatgagattgccctctacacagcccttgttctcatcaatgcccatcggccagggctccaagagaaaaggaaagtagaacagctgcagtacaatctggagctggcctttcatcatcatctctgcaagactcatcgccaaagcatcctggcaaagctgccacccaaggggaagcttcggagcctgtgtagccagcatgtggaaaggctgcagatcttccagcacctccaccccatcgtggtccaagccgctttccctccactctacaaggagctcttcagcactgaaaccgagtcacctgtggggctgtccaagtgacctggaagagggactccttgcctctccctatggcctgctggcccacctccctggaccccgttccaccctcacccttttcctttcccatgaaccctggagggtggtccccaccagctctttggaagtgagcagatgctgcggctggctttctgtcagcaggccggcctggcagtgggacaatcgccagagggtggggctggcagaacaccatctccagcctcagctttgacctgtctcatttcccatattccttcacacccagcttctggaaggcatggggtggctgggatttaaggacttctgggggaccaagacatcctcaagaaaacaggggcatccagggctccctggatgaatagaatgcaattcattcagaagctcagaagctaagaataagcctttgaaatacctcattgcatttccctttgggcttcggcttggggagatggatcaagctcagagactggcagtgagagcccagaaggacctgtataaaatgaatctggagctttaca

SEQ ID NO: 174080 - DNA, 3050 bp, Homo sapiens
  Payload ID: 14170
  Gene Symbol: RORC
  Gene Name: RAR-related orphan receptor C
  Uniprot ID: P51449
  ENST ID: ENST00000356728
  CDS Start-End: 156-1649
agaagcactgggggagagagctaggtgcagagcttcaggctgaggcgctgctgagagggcctcgccccgcctctgccgccagctgcaccccactcctggaccaccccctgctgagaaggacagggagccaaggccggcagagccaaggctcagtcatgagaacacaaattgaagtgatcccttgcaaaatctgtggggacaagtcgtctgggatccactacggggttatcacctgtgaggggtgcaagggcttcttccgccggagccagcgctgtaacgcggcctactcctgcacccgtcagcagaactgccccatcgaccgcaccagccgaaaccgatgccagcactgccgcctgcagaaatgcctggcgctgggcatgtcccgagatgctgtcaagttcggccgcatgtccaagaagcagagggacagcctgcatgcagaagtgcagaaacagctgcagcagcggcaacagcagcaacaggaaccagtggtcaagacccctccagcaggggcccaaggagcagataccctcacctacaccttggggctcccagacgggcagctgcccctgggctcctcgcctgacctgcctgaggcttctgcctgtccccctggcctcctgaaagcctcaggctctgggccctcatattccaacaacttggccaaggcagggctcaatggggcctcatgccaccttgaatacagccctgagcggggcaaggctgagggcagagagagcttctatagcacaggcagccagctgacccctgaccgatgtggacttcgttttgaggaacacaggcatcctgggcttggggaactgggacagggcccagacagctacggcagccccagtttccgcagcacaccggaggcaccctatgcctccctgacagagatagagcacctggtgcagagcgtctgcaagtcctacagggagacatgccagctgcggctggaggacctgctgcggcagcgctccaacatcttctcccgggaggaagtgactggctaccagaggaagtccatgtgggagatgtgggaacggtgtgcccaccacctcaccgaggccattcagtacgtggtggagttcgccaagaggctctcaggctttatggagctctgccagaatgaccagattgtgcttctcaaagcaggagcaatggaagtggtgctggttaggatgtgccgggcctacaatgctgacaaccgcacggtcttttttgaaggcaaatacggtggcatggagctgttccgagccttgggctgcagcgagctcatcagctccatctttgacttctcccactccctaagtgccttgcacttttccgaggatgagattgccctctacacagcccttgttctcatcaatgcccatcggccagggctccaagagaaaaggaaagtagaacagctgcagtacaatctggagctggcctttcatcatcatctctgcaagactcatcgccaaagcatcctggcaaagctgccacccaaggggaagcttcggagcctgtgtagccagcatgtggaaaggctgcagatcttccagcacctccaccccatcgtggtccaagccgctttccctccactctacaaggagctcttcagcactgaaaccgagtcacctgtggggctgtccaagtgacctggaagagggactccttgcctctccctatggcctgctggcccacctccctggaccccgttccaccctcacccttttcctttcccatgaaccctggagggtggtccccaccagctctttggaagtgagcagatgctgcggctggctttctgtcagcaggccggcctggcagtgggacaatcgccagagggtggggctggcagaacaccatctccagcctcagctttgacctgtctcatttcccatattccttcacacccagcttctggaaggcatggggtggctgggatttaaggacttctgggggaccaagacatcctcaagaaaacaggggcatccagggctccctggatgaatagaatgcaattcattcagaagctcagaagctaagaataagcctttgaaatacctcattgcatttccctttgggcttcggcttggggagatggatcaagctcagagactggcagtgagagcccagaaggacctgtataaaatgaatctggagctttacattttctgcctctgccttcctcccagctcagcaaggaagtatttgggcaccctaccctttacctggggtctaaccaaaaatggatgggatgaggatgagaggctggagataattgttttatgggatttgggtgtgggactagggtacaatgaaggccaagagcatctcagacatagagttaaaactcaaacctcttatgtgcactttaaagatagactttaggggctggcacaaatctgatcagagacacatatccatacacaggtgaaacacatacagactcaacagcaatcatgcagttccagagacacatgaacctgacacaatctctcttatccttgaggccacagcttggaggagcctagaggcctcaggggaaagtcccaatcctgagggaccctcccaaacatttccatggtgctccagtccactgatcttgggtctggggtgatccaaataccaccccagctccagctgtcttctaccactagaagacccaagagaagcagaagtcgctcgcactggtcagtcggaaggcaagatcagatcctggaggactttcctggcctgcccgccagccctgctcttgttgtggagaaggaagcagatgtgatcacatcaccccgtcattgggcaccgctgactccagcatggaggacaccagggagcagggcctgggcctgtttccccagctgtgatcttgcccagaacctctcttggcttcataaacagctgtgaaccctcccctgagggattaacagcaatgatgggcagtcgtggagttgggggggttgggggtgggattgtgtcctctaaggggacgggttcatctgagtaaacataaaccccaacttgtgccattctttataaaatgattttaaaggcaa

SEQ ID NO: 174081 - DNA, 1923 bp, Homo sapiens
  Payload ID: 14171
  Gene Symbol: REM2
  Gene Name: RAS (RAD and GEM)-like GTP binding 2
  Uniprot ID: Q8IYK8
  ENST ID: ENST00000267396
  CDS Start-End: 124-1146
atgtgtgtgtgtcgggggggggggtggtatttaaagggaaaagctgacagtgctgctgagtgagggagagggtgctgcgagctgctgggctgcacacgcacacgcacacgcacacgcacactgatgcacacggacctggacacagacatggacatggacacagaaaccacagcactctgcccctctggcagccgccgggcctcccctccagggacgcccacaccagaagcagatgccacgctactaaagaagtcagagaaactgttggcagagttggaccggagcgggttaccctctgcccctggggcccccagacgaagaggcagtatgcctgtcccctacaagcaccagctccggcgggcccaggctgtagatgaacttgactggccacctcaggcctcatcctctggctcgtctgactccttgggctcaggggaggcagcccctgctcaaaaggatggcatcttcaaggtcatgctagtgggggagagcggcgtgggcaagagcaccctagcaggcacttttggtggtctccagggagacagtgctcacgaaccggagaacccagaggatacctatgagagacgcatcatggtggataaggaggaagtgactctagtcgtttatgacatctgggaacagggggatgcaggagggtggctgcgggaccactgccttcagaccggggacgcctttctcatcgtcttctcagtcaccgaccgacggagtttctccaaagttccagagaccctacttcggctccgggctgggaggccgcaccacgacctacccgttatcctcgttggaaacaagagcgacttggcccgctcccgggaggtatcactggaggagggccgccacctggccgggacgctgagctgcaagcacatcgagacgtcggccgcactgcaccacaacacgagggagctcttcgagggcgcggtgcgccagatccggctgcggcggggccgaaaccacgccggaggccagaggcccgatccgggcagccccgagggccctgcgccacctgcacgccgcgagagcctcaccaagaaagccaagaggttcctcgccaacctggtgccgcgcaacgccaagttcttcaagcagcgctccaggtcgtgtcacgacctctcggtgctctgagccgcggtcgccatggccactgcggtcgccatggtcaccgcgccctccgctcgccccccctcgccccgccccgcccccgtccggcttccttggtggaggccgtctaggaaaccaaaaactcccaggatgccccggtgtgaccgccgggggcggcccggggccgctcggcggcacctccacacccgccccaacgcgttctctggagctttgggcctcagggcgcctagaaggcgaggacgcagacctgaaggcggccggtgagcggggcgggttctgctgggtcgggaagaaaaataattctgcaaggtattttgttttttattaattcgcgcttggccacctcatctgtaaagagattctaaaagcaagatctggaaaagtgcttcgtagactccttgacggagtttgcctcctttgtacgctgcgtgaacatgcctcacctttaagagagtcttaaaggtaaagacacgaaaacacttcctccagggaccttcccgaaaacgttctggctctcatctggtgcggcatgtgtccactttgcctttaaggagttcttaaaggcaagggcctggaagtgctgttcctgagatggattctcttgacttaccagtccaccacggcacttcccctttaaggttattaaaggtaaggggtggacagactttctgcattcagataatgagcagtggcaaccccttttggccagggccaggggggcaccagcaaggggccaccctttcccttttcaataaataatttttgtactgcctctgttca

SEQ ID NO: 174082 - DNA, 1331 bp, Homo sapiens
  Payload ID: 14171
  Gene Symbol: REM2
  Gene Name: RAS (RAD and GEM)-like GTP binding 2
  Uniprot ID: Q8IYK8
  ENST ID: ENST00000536884
  CDS Start-End: 67-732
gagtgagggagagggtgctgcgagctgctgggctgcacacgcacacgcacacgcacacgcacactgatgcacacggacctggacacagacatggacatggacacagaaaccacagcactctgcccctctggcagccgccgggcctcccctccagggacgcccacaccagaagcagatgccacgctactaaagaagtcagagaaactgttggcagagttggaccggagcgggttaccctctgcccctggggcccccagacgaagaggcagtatgcctgtcccctacaagcaccagctccggcgggcccaggctgtagatgaacttgactggccacctcaggcctcatcctctggctcgtctgactccttgggctcaggggaggcagcccctgctcaaaaggatggcatcttcaaggtcatgctagtgggggagagcggcgtgggcaagagcaccctagcaggcacttttggtggtctccagggagacagtgctcacgaaccggagaacccagggggatgcaggagggtggctgcgggaccactgccttcagaccggggacgcctttctcatcgtcttctcagtcaccgaccgacggagtttctccaaagttccagagaccctacttcggctccgggctgggaggccgcaccacgacctacccgttatcctcgttggaaacaagagcgacttggcccgctcccgggaggtatcactggagggtgtgtatcctgaacagattccatacttgcgatctcaggggaatgctctcccttccaagtcacctcttctccctaaggcctttttaccatcgcggacgcactcacttgcaatcagacccaggctagggggacactcccaatgccccactcgaggatcctgagaatcccttcttgtcacttcccctcacctctctcctaggcctccttctccctctccttcgcacctccacagacccaccatatgagctcagccatgttctctcggttgcaagattcactagtaccaatcccttgccaccgcacgcccaggccctccctagacccaccctcgccccgggtcccgtacagcccagcgggcgcctgagccggtgccttcctgcagagggccgccacctggccgggacgctgagctgcaagcacatcgagacgtcggccgcactgcaccacaacacgagggagctcttcgagggcgcggtgcgccagatccggctgcggcggggccgaaaccacgccggaggccagaggcccgatccgggcagccccgagggccctgcgccacctgcacgccgcgagagcctcaccaagaaagccaagaggttcctcgccaacctg

SEQ ID NO: 174083 - DNA, 1665 bp, Homo sapiens
  Payload ID: 14172
  Gene Symbol: REM1
  Gene Name: RAS (RAD and GEM)-like GTP-binding 1
  Uniprot ID: O75628
  ENST ID: ENST00000201979
  CDS Start-End: 294-1190
ctgaggcgggtggtacagcctggagcatccagccgctggagctgcgagggaccctggacccctcccacgccgaggtttatgcagagcctgaggccagaaaacctagggactttctgccccaagaagctgaggcacctcctactcccatctgaacaagagggggatctggaagaagccatacagcagctcatcaggacactatagaaagaagcagctcaaagcaattggctgacagccaattcccccttctttcagaaggaaagaaggaagaagcaaacccccccctaccaaagatgacactcaacaccgagcaggaagcaaagacccctctgcaccggcgagccagcaccccactgcccctgtccccacggggccaccagcctggccgcctgagcacagtgccttccactcaatcccagcatccccggctgggccaatcagcctccctcaaccctcccacccagaaaccttcacctgccccagatgattggtcttctgaatccagcgactctgaaggctcctgggaggctctctaccgtgtggtgctacttggagatcctggagtggggaagaccagcttggccagcctctttgcagggaagcaagagagggacctccatgaacagctgggagaagatgtatatgagaggaccctcacggtggatggagaagacaccacactggtggtcgtggacacctgggaggccgagaaactggataaaagctggagccaggagtcatgcctgcaggggggcagtgcctatgtcatcgtatactccatcgcagaccgaggcagctttgagagtgcctctgagctccgcatccagctgcggcgcacacatcaggcagaccatgtgcccatcatcctcgtgggcaacaaggcagacttggcccgctgccgagaagtctctgtggaagagggccgcgcctgcgctgtggtgttcgactgtaaattcatcgagacatccgccacgctgcagcacaatgtggccgagctcttcgagggcgtggtgcgccaactgcgcttgcgccgccgggacagtgcggccaaggaacccccagcaccccgacggccggccagcctagcccagcgcgctcgtcgcttcctggcacgcctgacagcccgcagcgcacgccgccgggcactcaaggcccgctccaagtcctgccacaatctggccgtgctctgaagccccccgcccttctgagagttggcgggtcactgaggtgcattctgggctccagggacgccactgcggggcaaaggcgccgttacctggagtctgcatcatgggtcttgcttgcctgctgccctgatggcctgagcatcccccagatccaagcctgggggatcccgggaaagcgatggacagacagacgatggggccgaagccccaagctgggcacaaagtagttttttacgtggtgggtgtctttttgtaaaaaaatcttccttgtccctgggctctggccaaccctcagaaaccctcacaataaaccagaccagaaggatgtcccatctgaatgcccagacctctccatctcggctcttccaggcgtctccacctactgccctcccatctacacttgactgtagactggtctggcctgctggcctgggcgtcagggcgcatcaataaagtacttggaccagttttgtgctca

SEQ ID NO: 174084 - DNA, 1765 bp, Homo sapiens
  Payload ID: 14173
  Gene Symbol: RASEF
  Gene Name: RAS and EF-hand domain containing
  Uniprot ID: Q8IZ41
  ENST ID: ENST00000340717
  CDS Start-End: 311-880
aaagtggcgagagccacctcggcgcttgggcgctcagtcgcaggaggcgctccttggcggtgcctggagcccgggcgcaccccaccgctcccgggacctgttgggggctggcccgaaccgtcgtcgaagggagccgctcggccacccccgacgttcctcgccccgcccgacgttccctcaagtggccgaaccagccggacgagccaaactcgccgggcctcccggcggcagcaggtggccccgtccttccagggagggccctgcgccccgcggcgctccggagccctctcggccgcccccgccaggcgggatggaggcggatggggacggagaggagctggcccggctgcgctcagtcttcgccgcctgcgacgcgaaccgctcggggcgcctggagcgcgaggagttccgggcactgtgcacggagctgcgggtgcggccggccgacgccgaggcagtattccagcggctggacgccgaccgtgacggcgccatcaccttccaggagttcgcgcgtggcttcctcgggtccctccgcggggggcggcgccgggactggggtcctctggatcccgcgcccgccgtgtctgaggcggggccggagacacacgacagcgaggaggacgaaggcgacgaggacgcggcggcggcgctggccacctcgtgcggcccggcgagtcccggccgggcttggcaggatttccaggcgcgacttggggacgaagccaagttcattcccagatttggctacacaatttcaaaacctgcatttgtgttcgtgaggcatctcataacactgtgtgcattgtcatgggctaaaaaggaaggcagagaaacactttggacaatcgaggagggaggagccaagatggccgaataggaacagctccggtctacagctcccagcgtgagcgacgcagaagacgggtgatttctgcatttccatctgaggtaccgggttcatctcactacggagtgcgagacagtgggcgcaggccagtgtgtgcgcgcaccgtgcgcgagccgaagcagggcgaggcattgcctcacctgggaagcgcaaggggtcagggagttccctttccgagtcaaagaaaggggtgacggacgcacctggaaaatcgggtcactcccacccgaatattgcgcttttcagaccggcttaagaaacggcgcaccacaagactatatcccacacctggctcagagggtcctacgcccacggaatctcgctgattgctagcacagcagtctgagatcaaactgcaaggcggcaacgaggctgggggaggggcgcccgccattgcccaggcttgcttaggtaaacaaagcagcctggaagctcgaactgggtggagcccaccacagctcaaggaggcctgcctgcctctgtaggctccacctctgggggcagggcacagacaaacaaaaagacagcagtaacctctgcagacttaagtgtccctgtctgacagctttgaagagagcagtggttctcccagcacgcagatggagatctgagaacgggcagactgcctcctcaagtgggtccctgacccctgacccccaagcagcctaactgggaggcaccccccaacaggggcacactgacacctcacacggcagggtattccaacagacctgcagctgagggtcctgtctgttagaaggaaaactaacaaccagaaaggacatctacaccgaaaacccatctgtacatcaccatcatcaaagaccaaaagtagataaaaccacaaagatgggg

SEQ ID NO: 174085 - DNA, 5576 bp, Homo sapiens
  Payload ID: 14173
  Gene Symbol: RASEF
  Gene Name: RAS and EF-hand domain containing
  Uniprot ID: Q8IZ41
  ENST ID: ENST00000376447
  CDS Start-End: 262-2484
ctccttggcggtgcctggagcccgggcgcaccccaccgctcccgggacctgttgggggctggcccgaaccgtcgtcgaagggagccgctcggccacccccgacgttcctcgccccgcccgacgttccctcaagtggccgaaccagccggacgagccaaactcgccgggcctcccggcggcagcaggtggccccgtccttccagggagggccctgcgccccgcggcgctccggagccctctcggccgcccccgccaggcgggatggaggcggatggggacggagaggagctggcccggctgcgctcagtcttcgccgcctgcgacgcgaaccgctcggggcgcctggagcgcgaggagttccgggcactgtgcacggagctgcgggtgcggccggccgacgccgaggcagtattccagcggctggacgccgaccgtgacggcgccatcaccttccaggagttcgcgcgtggcttcctcgggtccctccgcggggggcggcgccgggactggggtcctctggatcccgcgcccgccgtgtctgaggcggggccggagacacacgacagcgaggaggacgaaggcgacgaggacgcggcggcggcgctggccacctcgtgcggcccggcgagtcccggccgggcttggcaggatttccaggcgcgacttggggacgaagccaagttcattcccagagaagagcaagttagtaccttgtaccaaaacatcaaccttgtggagccaagattaattcagccatatgaacatgttataaagaacttcatccgtgagatcagacttcaaagcacagaaatggaaaatttggccattgcggtgaagagagcccaggacaaggcagctatgcagttgagtgagttggaagaggaaatggatcagaggattcaggctgcagaacataagacacggaaagacgaaaaacgcaaagctgaggaagccctcagtgacctcagacgtcagtatgaaactgaagtaggagatctgcaggtgaccattaaaaagctaagaaagctcgaagaacaatcaaaacgcgtaagtcaaaaggaagatgtggctgcattgaaaaaacaaatttatgatttatcaatggaaaaccagaaagttaagaaagaccttttagaagcacagacaaacatagcctttcttcagagtgagttagatgctttgaaaagtgattatgctgatcagagtctgaatactgaaagggatctggaaataatccgagcatacacagaagatcgaaatagtcttgagaggcaaattgaaatactccaaacagctaaccggaagctacatgacagtaatgatggccttagaagtgcccttgaaaacagttatagcaagttcaacagatctttgcatataaataatatctcaccagggaatacaatttctagaagcagtcccaaattcattggtcattcccctcaacctctaggctatgacaggtcatcccgctcttcctatgtggatgaggactgtgactccctggccctctgtgatcctctgcagaggacaaattgtgaagttgacagcctgcctgaaagctgcttcgacagcggcttgtctaccttgagagatcccaatgagtatgactcagaagtggaatacaagcaccagaggggatttcagaggtcacacggggtgcaggagagctttggaggtgatgcttcagacacagatgttcctgacataagggatgaagagacatttggtttagaagatgtggcttccgtcttagactggaagccccaagggtctgttagtgaaggcagcattgttagttcatcaagaaagcccatctcagcactctcgccccagacagacctggtagatgacaacgctaaatcttttagctcacagaaggcttacaagattgtacttgctggggacgctgcagtggggaagtctagtttcctcatgagactttgcaagaatgaatttcgagaaaatataagcgccaccctgggagttgatttccaaatgaaaaccctcattgtggatggagaacgaacagttctgcagctctgggatacagctggtcaggagagattcagaagtattgccaagtcttacttcagaaaggcagatggtgttttgctgctgtatgatgttacatgtgagaaaagctttcttaacatacgagaatgggtagatatgattgaggatgcagcccatgagactgttcccattatgctggtaggaaacaaggctgacattcgtgacactgctgctacagagggacaaaaatgtgtcccagggcactttggagagaaactggccatgacgtatggggcattattctgtgaaacaagtgccaaagatggttctaacatagtggaggctgttctgcaccttgctcgagaagtgaaaaagagaactgacaaggatgacagcagatccattaccaatctaaccgggaccaattccaaaaagtcaccacagatgaagaattgttgcaatggctaaatcccaaacatccttggcctgtgaagtcttcatttccagaatactgaatttgtgtgacttatttggctcttaacagagtggcacatcctactgacactgtcctatggagagttacagtgcaggaaacctgaacccagctctcaggtccctctggaactttggctcttctttgttttgtctcagtgagtgatttgggccctctggctaaatagactagtcatgtccttacaggtcttaaaagataacatgtaaatgtttttaaaatggtaaaaaaaaagaaaagaaaagaaatcacatgctcagatcaaagctgtagaggaaactgacataattagattcatgtggtagctgaattaggttacccacaaagtcagcatttaaatatttgatactaaagttctagtaagaagggattctcatcctagctttgctgttaactggccttgtgaccttggacatgtcacaagcccatgtcggatctgtttcttcatctgtaaaatgtgcagcttgccctcaaaggccttgcagcccttggcacctcagattctgtgggaagcagtaggacagagagtgtggtggcccacagttaataatagaactatggttattcctgctttttaatattggagtattgatttttctcacttctgaaataaggacagaatttgattaaaaaatggaaacagaaatatctattttttatgtataaagaaacatgtttgagacaaaaatagttgtatataaaaggatatttcataatctcagaatagttacaaagctcactgcttgaatttggtgttaaaaattctaatggaaacatgtaaagccacatactactgaaagcacaatgcccaggaaagttgtcactcttcacttaagggagtggttgccaggggctgagaaagggaggatggggagtgactgctaataggtatgtggtttctttgggcgatgatgagaatgttctggaattggaatagtggtgatagttgtataactgtttgaatgtactaggaaccactgaattgtatactttgaaagggtgaattttatggttgtgaattatctcactaaaaaaaatgctagtacttagagtgatgtaacattttgcaaaattttcattttcgtatccctgctgatttcaaaccttcccatggtttagaagcataacctgtaatgtaatgcaagtcccctaactccctggttgctaacattaacttccttaagtaataatcaatgaaagaaattctatgcatggttttgaaataatatccttgaaagaggaatcaccattaggaaaggtgagtcagggtcctttgtttaatgtgactagtggctcatcatcaccagtgacctggttgggcctactctccttccagaacctgcattgcttcccagacctccccactgagatgcctctaagagccaaaggagtcaacacttgagcctagggtgggctacaacaaaagattctaatttaccttgcttcatctaggtccaggccccaagtagcttgctgaaggaacttaaaaagtagctgttatttattgtattgtataagctaaaaacatttatttttgttgaatcgaaacaattccatgtagcaatcttttttctgttcacggtgtttgtgatagaaccttaaattccgcaagcatcagttttttgaaaaaatgggaattgaccggatagttacaggcaaagattataaatagctacaacatcatttaacttttataaacatgccttctctctattgaagacatctgatatttttgctggaaagttggatctatcctcagtaactctgccatgaattcctgtttcctggttccagaaaaagaaaagattacatttctgatcataaagaatgtcttgcatatgggaaatttttcaaaataaggggggtattatttatgtggcatgggaaaacttttgccatggctgtttgtcttagtggcatcttttgatgacattggatcagatatatgtagatgctgatatatgggacacatgtttaggttttggtgcagttgcacaaaactgtgttagtttatatgttactgtgttgcctttatttattctctccaaagtgtctctttatatttgttttacaatctgtgaaagagtataccataatacagaagtattttcatagtctttacctctggattgtcctgtcagtatagccacgttgatgagattacaccagtgcctttgatggtcaaccaatcatctttaagtatttgagccctgataaatattttggtaacataatccaaattagagacttagagctctggttagcaatcatgtttaaagagaagcttcttaaagctctgtatgctgggagattcatgattattaccaacgttttgatttcatgaaggtgttctcaaatttaaagcacattttcagtaagaacaaaaatatttaatgtttttatcttagacttgatacatttgcatattactatggaagttattcaccttgtccctgtttttctttaagatattttaaaatcatagttatactacagtccttttttaaatgtatcctgatacattgtaaaatattttaatttcattgtggaaaataatgttggataaggagatatttttcactgttaacttttagcccatgcattttcataatttatttttttcacttgctgctttatatgacatatgtgacatttgattatttaacacttgatgtgatctgcataaacccaagttgcacaaccctcctgctgaagataaaattgaggttaaagataaagatttattttcatatttgtacagtgatcggcttcagtgatggtttttgtgggcatttattgtgtgtgtgtaagaaatttcatatgtatatattaagtaggcctctgagtattgaataattgttttatgattttgatttatatggtttacattttcattgtgtgggccatatttcgtttatactgtttatttctcttcaaaccttaataattataccataaagtgtaatttttatagcaatgcaaatgtctaaggaactacaaatattttctacgttgtaaattcaataaagcttgcttcctttggcctttt

SEQ ID NO: 174086 - DNA, 2693 bp, Homo sapiens
  Payload ID: 14174
  Gene Symbol: RIN1
  Gene Name: Ras and Rab interactor 1
  Uniprot ID: Q13671
  ENST ID: ENST00000311320
  CDS Start-End: 128-2479
gtggacacacaagagttaactggcgggtgtgacaggcggaccgccctcaggaagtgttactcactggggatgtgcgtgccttgccttgggactggattctcttcctgaagcgaaggagctcccagccatggaaagccctggagagtcaggcgcgggctctcctggagcccccagcccgtccagcttcactactgggcacctggcgagagaaaagccagcccaggacccactgtatgacgtgcccaatgccagcggcgggcaggcaggcgggccgcagcggccggggcgcgttgtgagcctgcgggagcgcctgctgctcacccggcccgtgtggctgcagctgcaagccaacgcagcggccgcactgcacatgctgaggaccgagcccccggggacgttcctcgtgcggaaatctaacacccgccagtgccaggccctgtgcatgcggttgcctgaagccagtggcccctccttcgtctccagccactacatcctggagagccctggcggcgtctccttggagggctcggagctcatgttcccagacctagtccagctcatctgtgcctactgccacacccgggacatccttctcctcccgctgcagctccccagagccatccaccacgcagccactcacaaagagctggaggccatctcccatctgggcattgagttctggagctcctccctcaacatcaaggctcagcggggcccggctggaggcccagtgttgccccagctgaaggcccggtcccctcaagagctggaccagggcaccggagccgccttgtgcttcttcaaccccctgttcccgggggacctagggcccaccaagcgggagaaattcaagagaagcttcaaagtgcgcgtgtccacagagacctccagccccctgtctccacctgccgtgccacctccccccgtccccgtgctgccaggggcagtccccagccagacagagcggctgcccccttgccagctgctacggagggagagctcagtggggtaccgcgtgccagcaggcagtggccctagccttccgcctatgccctccctccaagaggtggactgcggctcccccagcagctccgaggaggagggggtgccagggtcccgggggagcccagcgacctcaccccacctgggccgccgacgacctctgcttcggtccatgagcgccgccttctgctccctactggcaccggagcggcaggtgggccgggctgcggcagcactgatgcaggaccgacacacagccgcgggccagctggtgcaggacctactgacccaggtgcgggctgggcccgagccccaggagctgcagggcatccgtcaggcgctgagccgggcccgggccatgctgagtgcggagctgggccctgagaagctgctgtcgcctaagaggctggaacatgtcctggagaagtcattgcattgctctgtgctcaagcctctccggcccatcctggcagcccgcctgcggcgccggcttgccgcagacggctccctgggccgcctagctgagggcctccgcctggcccgggcccagggccccggagccttcgggtcccacctgagcctgccctccccagtagagttggagcaagtgcgccagaagctgctgcagctgctccgcacctactcacccagcgcccaggtcaagcggctcctgcaggcctgcaagctgctctacatggccctgaggacccaggaaggggagggcgcgggtgccgacgagttcctgcctctgctgagcctcgtcttggcccactgtgaccttcctgagctgctgctggaggccgagtacatgtcggagctgctggagcccagcctgcttactggagagggtggctactacctgaccagcctctctgccagcctggccctgctgagtggcctgggtcaggcccacaccctcccactgagccccgtgcaggagctacggcgctccctcagcctctgggagcagcgccgcctgcctgccacccactgcttccagcacctcctccgagtagcctatcaggatcccagcagtggctgcacctccaagaccctggccgtgcccccagaagcctcgattgccaccctgaaccagctctgtgccaccaagttccgagtgacccagcccaacacttttggcctcttcctgtacaaggagcagggctaccaccgcctgccccctggggccctggcccacaggctgcccaccactggctacctcgtctaccgccgggcggagtggcctgagacccagggggctgtgacagaggaggagggcagtgggcagtcagaggcaagaagcagaggggaggagcaagggtgccagggagatggggatgctggggtcaaagccagccccagggacattcgggaacagtctgagacaactgctgaagggggccagggtcaagcccaggaaggccctgctcagccaggggaaccagaggcagagggaagccgggcagcagaggagtagcttgaagtggccagaagggtcattcggggcgggagaccctgagcctgctgagaaatccttttagcgccagcaagccccacccagggccctgtcctgtgtctgccaccacctttgtctgatacttgtttccagggaagctgggggaactgccacatctgaggaactggaataaagatgagggggcttcgggggcccccagactgtgtgcccaagg

SEQ ID NO: 174087 - DNA, 1872 bp, Homo sapiens
  Payload ID: 14174
  Gene Symbol: RIN1
  Gene Name: Ras and Rab interactor 1
  ENST ID: ENST00000530745
  CDS Start-End: 35-277
ggattctcttcctgaagcgaaggagctcccagccatggaaagccctggagagtcaggcgcgggctctcctggagcccccagcccgtccagcttcactactgggcacctggcgagagaaaaacgttcctcgtgcggaaatctaacacccgccagtgccaggccctgtgcatgcggttgcctgaagccagtggcccctccttcgtctccagccactacatcctggagagccctggcggcgtctccttggagggctcggagctcatgttcccagacctagtccagctcatctgtgcctactgccacacccgggacatccttctcctcccgctgcagctccccagagccatccaccacgcagccactcacaaagagctggaggccatctcccatctgggcattgagttctggagctcctccctcaacatcaaggctcagcggggcccggctggaggcccagtgttgccccagctgaaggcccggtcccctcaagagctggaccagggcaccggagccgccttgtgcttcttcaaccccctgttcccgggggacctagggcccaccaagcgggagaaattcaagagaagcttcaaagtgcgcgtgtccacagagacctccagccccctgtctccacctgccgtgccacctccccccgtccccgtgctgccaggggcagtccccagccagacagagcggctgcccccttgccagctgctacggagggagagctcagtggggtaccgcgtgccagcaggcagtggccctagccttccgcctatgccctccctccaagaggtggactgcggctcccccagcagctccgaggaggagggggtgccagggtcccgggggagcccagcgacctcaccccacctgggccgccgacgacctctgcttcggtccatgagcgccgccttctgctccctactggcaccggagcggcaggtgggccgggctgcggcagcactgatgcaggaccgacacacagccgcgggccagctggtgcaggacctactgacccaggtgcgggctgggcccgagccccaggagctgcagggcatccgtcaggcgctgagccgggcccgggccatgctgagtgcggagctgggccctgagaagctgctgtcgcctaagaggctggaacatgtcctggagaagtcattgcattgctctgtgctcaagcctctccggcccatcctggcagcccgcctgcggcgccggcttgccgcagacggctccctgggccgcctagctgagggcctccgcctggcccgggcccagggccccggagccttcgggtcccacctgagcctgccctccccagtagagttggagcaagtgcgccagaagctgctgcagctgctccgcacctactcacccagcgcccaggtcaagcggctcctgcaggcctgcaagctgctctacatggccctgaggacccaggaaggggagggcgcgggtgccgacgagttcctgcctctgctgagcctcgtcttggcccactgtgaccttcctgagctgctgctggaggccgagtacatgtcggagctgctggagcccagcctgcttactggagagggtggctactacctgaccagcctctctgccagcctggccctgctgagtggcctgggtcaggcccacaccctcccactgagccccgtgcaggagctacggcgctccctcagcctctgggagcagcgccgcctgcctgccacccactgcttccagcacctcctccgagtagcctatcaggatcccagcagtggctgcacctccaagaccctggccgtgcccccagaagcctcgattgccaccctgaaccagctctgtgccaccaagttccgagtgacccagcccaacacttttggcctc

SEQ ID NO: 174088 - DNA, 1834 bp, Homo sapiens
  Payload ID: 14174
  Gene Symbol: RIN1
  Gene Name: Ras and Rab interactor 1
  ENST ID: ENST00000534824
  CDS Start-End: 1-221
ctctctcaggcgtctccttggagggctcggagctcatgttcccagacctagtccagctcatctgtgcctactgccacacccgctccccagagccatccaccacgcagccactcacaaagagctggaggccatctcccatctgggcattgagttctggagctcctccctcaacatcaaggctcagcggggcccggctggaggcccagtgttgccccagctgaaggcccggtcccctcaagagctggaccagggcaccggagccgccttgtgcttcttcaaccccctgttcccgggggacctagggcccaccaagcgggagaaattcaagagaagcttcaaagtgcgcgtgtccacagagacctccagccccctgtctccacctgccgtgccacctccccccgtccccgtgctgccaggggcagtccccagccagacagagcggctgcccccttgccagctgctacggagggagagctcagtggggtaccgcgtgccagcaggcagtggccctagccttccgcctatgccctccctccaagaggtggactgcggctcccccagcagctccgaggaggagggggtgccagggtcccgggggagcccagcgacctcaccccacctgggccgccgacgacctctgcttcggtccatgagcgccgccttctgctccctactggcaccggagcggcaggtgggccgggctgcggcagcactgatgcaggaccgacacacagccgcgggccagctggtgcaggacctactgacccaggtgcgggctgggcccgagccccaggagctgcagggcatccgtcaggcgctgagccgggcccgggccatgctgagtgcggagctgggccctgagaagctgctgtcgcctaagaggctggagttggagcaagtgcgccagaagctgctgcagctgctccgcacctactcacccagcgcccaggtcaagcggctcctgcaggcctgcaagctgctctacatggccctgaggacccaggaaggggagggcgcgggtgccgacgagttcctgcctctgctgagcctcgtcttggcccactgtgaccttcctgagctgctgctggaggccgagtacatgtcggagctgctggagcccagcctgcttactggagagggtggctactacctgaccagcctctctgccagcctggccctgctgagtggcctgggtcaggcccacaccctcccactgagccccgtgcaggagctacggcgctccctcagcctctgggagcagcgccgcctgcctgccacccactgcttccagcacctcctccgagtagcctatcaggatcccagcagtggctgcacctccaagaccctggccgtgcccccagaagcctcgattgccaccctgaaccagctctgtgccaccaagttccgagtgacccagcccaacacttttggcctcttcctgtacaaggagcagggctaccaccgcctgccccctggggccctggcccacaggctgcccaccactggctacctcgtctaccgccgggcggagtggcctgagacccagggggctgtgacagaggaggagggcagtgggcagtcagaggcaagaagcagaggggaggagcaagggtgccagggagatggggatgctggggtcaaagccagccccagggacattcgggaacagtctgagacaactgctgaagggggccagggtcaagcccaggaaggccctgctcagccaggggaaccagaggcagagggaagccgggcagcagaggagtagcttgaagtggccagaagggtcattcggggcgggagaccctgagcctgctgagaaatccttttagcg

SEQ ID NO: 174089 - DNA, 2122 bp, Homo sapiens
  Payload ID: 14174
  Gene Symbol: RIN1
  Gene Name: Ras and Rab interactor 1
  ENST ID: ENST00000530056
  CDS Start-End: 216-2069
gttcaggaatgagtcatctatggacagtagagggtgctctcccacaaggctgacctgaggccaggggcagatgagcaactgaccacagagccaaaggtgcccccagagcatggctggggcctgtggggactgaggccgcttaaccacttcccgcccacgtgtgcaatacgttcctcgtgcggaaatctaacacccgccagtgccaggccctgtgcatgcggttgcctgaagccagtggcccctccttcgtctccagccactacatcctggagagccctggcggcgtctccttggagggctcggagctcatgttcccagacctagtccagctcatctgtgcctactgccacacccgggacatccttctcctcccgctgcagctccccagagccatccaccacgcagccactcacaaagagctggaggccatctcccatctgggcattgagttctggagctcctccctcaacatcaaggctcagcggggcccggctggaggcccagtgttgccccagctgaaggcccggtcccctcaagagctggaccagggcaccggagccgccttgtgcttcttcaaccccctgttcccgggggacctagggcccaccaagcgggagaaattcaagagaagcttcaaagtgcgcgtgtccacagagacctccagccccctgtctccacctgccgtgccacctccccccgtccccgtgctgccaggggcagtccccagccagacagagcggctgcccccttgccagctgctacggagggagagctcagtggggtaccgcgtgccagcaggcagtggccctagccttccgcctatgccctccctccaagaggtggactgcggctcccccagcagctccgaggaggagggggtgccagggtcccgggggagcccagcgacctcaccccacctgggccgccgacgacctctgcttcggtccatgagcgccgccttctgctccctactggcaccggagcggcaggtgggccgggctgcggcagcactgatgcaggaccgacacacagccgcgggccagctggtgcaggacctactgacccaggtgcgggctgggcccgagccccaggagctgcagggcatccgtcaggcgctgagccgggcccgggccatgctgagtgcggagctgggccctgagaagctgctgtcgcctaagaggctggtagagttggagcaagtgcgccagaagctgctgcagctgctccgcacctactcacccagcgcccaggtcaagcggctcctgcaggcctgcaagctgctctacatggccctgaggacccaggaaggggagggcgcgggtgccgacgagttcctgcctctgctgagcctcgtcttggcccactgtgaccttcctgagctgctgctggaggccgagtacatgtcggagctgctggagcccagcctgcttactggagagggtggctactacctgaccagcctctctgccagcctggccctgctgagtggcctgggtcaggcccacaccctcccactgagccccgtgcaggagctacggcgctccctcagcctctgggagcagcgccgcctgcctgccacccactgcttccagcacctcctccgagtagcctatcaggatcccagcagtggctgcacctccaagaccctggccgtgcccccagaagcctcgattgccaccctgaaccagctctgtgccaccaagttccgagtgacccagcccaacacttttggcctcttcctgtacaaggagcagggctaccaccgcctgccccctggggccctggcccacaggctgcccaccactggctacctcgtctaccgccgggcggagtggcctgagacccagggggctgtgacagaggaggagggcagtgggcagtcagaggcaagaagcagaggggaggagcaagggtgccagggagatggggatgctggggtcaaagccagccccagggacattcgggaacagtctgagacaactgctgaagggggccagggtcaagcccaggaaggccctgctcagccaggggaaccagaggcagagggaagccgggcagcagaggagtagcttgaagtggccagaagggtcattcggggcgggagaccctgagcctgctgaga

SEQ ID NO: 174090 - DNA, 243 bp, Homo sapiens
  Payload ID: 14174
  Gene Symbol: RIN1
  Gene Name: Ras and Rab interactor 1
  ENST ID: ENST00000627248
  CDS Start-End: 1-243
atggaaagccctggagagtcaggcgcgggctctcctggagcccccagcccgtccagcttcactactgggcacctggcgagagaaaaacgttcctcgtgcggaaatctaacacccgccagtgccaggccctgtgcatgcggttgcctgaagccagtggcccctccttcgtctccagccactacatcctggagagccctggcggcgtctccttggagggctcggagctcatgttcccagacctag

SEQ ID NO: 174091 - DNA, 4505 bp, Homo sapiens
  Payload ID: 14175
  Gene Symbol: RIN2
  Gene Name: Ras and Rab interactor 2
  Uniprot ID: Q8WYP3
  ENST ID: ENST00000255006
  CDS Start-End: 150-2984
ctttcagtggtgttgttgaaagggcttggcagctcccaaatgtttgcagtgtccttagtcctatgagggctgccttcttcttcttcttcttctttttttttttttttttttgctagcttttagctagtatctggaaacatctactggacatgttggactcattttctcaagaatccactttacccttcagggaagccaggaaaagaacaagcttccaaccggtacaagtctggaggaatttcacagcctctcaaactacggagtccccggcgtgcagtggagcctcgctgggggaaatgacagcttggaccatgggcgcccgcggtctggacaagcgaggaagtttctttaagctcattgacacaattgcctcggagatcggagaactgaaacaggagatggtgcggacagatgtcaacctggaaaatggcctggaacccgctgaaacccacagcatggtaagacacaaggatggtggctattccgaggaagaggacgtgaagacctgtgcccgggactcaggctatgacagcctctccaacaggctcagcatcttggaccggctcctccacacccaccccatatggctgcagctgagtctgagtgaggaggaggcagcagaggtcctgcaggcccagcctccggggatcttcctggttcataaatctaccaagatgcagaagaaagtcctctccctccgcctgccctgtgaatttggggccccactcaaggaatttgccataaaggaaagcacatacaccttttccctggaaggctcaggaatcagtttcgcagatttattccggctcattgctttctactgcatcagcagggatgttctaccatttaccttgaagttgccttatgccatttcaacagccaagtcggaggctcagcttgaagaactggcccagatgggactaaatttctggagctccccagctgacagcaaacccccgaaccttccacctccccataggcctctttcctccgacggtgtctgtcctgcctccctgcgtcagctctgccttataaatggagtgcattctatcaaaaccaggacgccttcagagctggagtgcagccagaccaacggggccctgtgctttattaatccccttttcttgaaagtgcacagccaggacctcagtggaggcctgaaacggccgagcacaaggactcccaacgcgaatggcacggagcggactcggtcccccccacccaggcccccgccacccgctattaatagtctccacacaagccctcggctggccaggactgaaacccagacgagcatgccagaaacagtcaaccataacaaacatgggaacgtagctctgcctggaacgaaaccaactcccatccctccaccccggctgaagaagcaggcttcttttctggaagcagagggcggtgcaaagaccttgagcggcggccggccgggcgcaggcccggagctggagctgggcacagctggcagcccaggtggggccccgcctgaggccgccccgggggattgcacaagggccccgccgcccagctctgaatcacggcccccgtgccatggaggccggcagcggctgagcgacatgagcatttctacttcctcctccgactcgctggagttcgaccggagcatgcctctgtttggctacgaggcggacaccaacagcagcctggaggactacgagggggaaagtgaccaagagaccatggcgccccccatcaagtccaaaaagaaaaggagcagctccttcgtgctgcccaagctcgtcaagtcccagctgcagaaggtgagcggggtgttcagctccttcatgaccccggagaagcggatggtccgcaggatcgccgagctttcccgggacaaatgcacctacttcgggtgcttagtgcaggactacgtgagcttcctgcaggagaacaaggagtgccacgtgtccagcaccgacatgctgcagaccatccggcagttcatgacccaggtcaagaactatttgtctcagagctcggagctggacccccccatcgagtcgctgatccctgaagaccaaatagatgtggtgctggaaaaagccatgcacaagtgcatcttgaagcccctcaaggggcacgtggaggccatgctgaaggactttcacatggccgatggctcatggaagcaactcaaggagaacctgcagcttgtgcggcagaggaatccgcaggagctgggggtcttcgccccgacccctgattttgtggatgtggagaaaatcaaagtcaagttcatgaccatgcagaagatgtattcgccggaaaagaaggtcatgctgctgctgcgggtctgcaagctcatttacacggtcatggagaacaactcagggaggatgtatggcgctgatgacttcttgccagtcctgacctatgtcatagcccagtgtgacatgcttgaattggacactgaaatcgagtacatgatggagctcctagacccatcgctgttacatggagaaggaggctattacttgacaagcgcatatggagcactttctctgataaagaatttccaagaagaacaagcagcgcgactgctcagctcagaaaccagagacaccctgaggcagtggcacaaacggagaaccaccaaccggaccatcccctctgtggacgacttccagaattacctccgagttgcatttcaggaggtcaacagtggttgcacaggaaagaccctccttgtgagaccttacatcaccactgaggatgtgtgtcagatctgcgctgagaagttcaaggtgggggaccctgaggagtacagcctctttctcttcgttgacgagacatggcagcagctggcagaggacacttaccctcaaaaaatcaaggcggagctgcacagccgaccacagccccacatcttccactttgtctacaaacgcatcaagaacgatccttatggcatcattttccagaacggggaagaagacctcaccacctcctagaagacaggcgggacttcccagtggtgcatccaaaggggagctggaagccttgccttcccgcttctacatgcttgagcttgaaaagcagtcacctcctcggggacccctcagtgtagtgactaagccatccacaggccaactcggccaagggcaactttagccacgcaaggtagctgaggtttgtgaaacagtaggattctcttttggcaatggagaattgcatctgatggttcaagtgtcctgagattgtttgctacctacccccagtcaggttctaggttggcttacaggtatgtatatgtgcagaagaaacacttaagatacaagttcttttgaattcaacagcagatgcttgcgatgcagtgcgtcaggtgattctcactcctgtggatggcttcatccctgccttccttcctttctttttccttttttttttttttttttttttttttacaaagagccttcatgtttttatatatttcatagaaatttttatagcagttgcaggtaaactgtcaggattggttttaaaatatttttgtaactttaaaatattctataattatgcatgtgattttaacatttaatattcaaaaataaatctcttgctggatttgagagtattgcatttttaaagtctctcttctgtaactggatgttttggcaactttgtggggagagactgctggatttcttaaagcaacgtattcctgacactggccacagaatgcctttggaaatcggatgtactgttctcttgttcacgtttagtggtgttttgctgttttgttttttaaacaaatgatgctgagaataaggagagaaatgaatgtagagagaggtagagagagaaatatgaactctaacaaaggactgaggagtgcagtctgctggttcaggctcttcaaaagatgtagaaaaagagatagaaggaaccacctatgcttaaaatactgtaaatatgcagtgaggtttggcaaaatctattccatgtgtgatttgcttgtagaaacaattttgaaagccccttgaggaaaataaaaatcaagaagaacacttttctcccttttccatacaaattaaaacttaacagcatcaaattattgggaccagaaaccaagtaatgtataatgtggcttttgttgagttaaataagatgctatataatggagaagaatttgaaaatgcacaaaaaaatcaatctacattatcagaacctgcagtgaaattaaacttatgttaaataaaaccagtttgcaggtgcacaaactatgagggtcttgtatccacgtaacacaggtagttacaaaaacatgttattgtactgtgtaaagatgcatagtcatctcatttggttggctttgtaccttgtaccttttttagccttggcttttgttgaactagaaccctcagcacatactgtgttgtacttttgtaaatgattttttaaatggaattttgcacataatacattgtaatactgtatgataatcatgtgtgaaaataatttttgaaatatcc

SEQ ID NO: 174092 - DNA, 1837 bp, Homo sapiens
  Payload ID: 14175
  Gene Symbol: RIN2
  Gene Name: Ras and Rab interactor 2
  ENST ID: ENST00000440354
  CDS Start-End: 37-1425
gagtccccggcgtgcagtggagcctcgctgggggaaatgacagcttggaccatgggcgcccgcggtctggacaagcgaggaagtttctttaagctcattgacacaattgcctcggagatcggagaactgaaacaggagatggtgcggacagatgtcaacctggaaaatggcctggaacccgctgaaacccacagcatggtaagacacaaggatggtggctattccgaggaagaggacgtgaagacctgtgcccgggactcaggctatgacagcctctccaacaggctcagcatcttggaccggctcctccacacccaccccatatggctgcagctgagtctgagtgaggaggaggcagcagaggtcctgcaggcccagcctccggggatcttcctggttcataaatctaccaagatgcagaagaaagtcctctccctccgcctgccctgtgaatttggggccccactcaaggaatttgccataaaggaaagcacatacaatgtggtgctggaaaaagccatgcacaagtgcatcttgaagcccctcaaggggcacgtggaggccatgctgaaggactttcacatggccgatggctcatggaagcaactcaaggagaacctgcagcttgtgcggcagaggaatccgcaggagctgggggtcttcgccccgacccctgattttgtggatgtggagaaaatcaaagtcaagttcatgaccatgcagaagatgtattcgccggaaaagaaggtcatgctgctgctgcgggtctgcaagctcatttacacggtcatggagaacaactcagggaggatgtatggcgctgatgacttcttgccagtcctgacctatgtcatagcccagtgtgacatgcttgaattggacactgaaatcgagtacatgatggagctcctagacccatcgctgttacatggagaaggaggctattacttgacaagcgcatatggagcactttctctgataaagaatttccaagaagaacaagcagcgcgactgctcagctcagaaaccagagacaccctgaggcagtggcacaaacggagaaccaccaaccggaccatcccctctgtggacgacttccagaattacctccgagttgcatttcaggaggtcaacagtggttgcacaggaaagaccctccttgtgagaccttacatcaccactgaggatgtgtgtcagatctgcgctgagaagttcaaggtgggggaccctgaggagtacagcctctttctcttcgttgacgagacatggcagcagctggcagaggacacttaccctcaaaaaatcaaggcggagctgcacagccgaccacagccccacatcttccactttgtctacaaacgcatcaagaacgatccttatggcatcattttccagaacggggaagaagacctcaccacctcctagaagacaggcgggacttcccagtggtgcatccaaaggggagctggaagccttgccttcccgcttctacatgcttgagcttgaaaagcagtcacctcctcggggacccctcagtgtagtgactaagccatccacaggccaactcggccaagggcaactttagccacgcaaggtagctgaggtttgtgaaacagtaggattctcttttggcaatggagaattgcatctgatggttcaagtgtcctgagattgtttgctacctacccccagtcaggttctaggttggcttacaggtatgtatatgtgcagaagaaacacttaagatacaagttcttttgaattcaacagcagatgcttgcgatgcagtgcgtcaggtgattctcactcctgtggatggcttcatccctgccttcct

SEQ ID NO: 174093 - DNA, 3859 bp, Homo sapiens
  Payload ID: 14176
  Gene Symbol: RIN3
  Gene Name: Ras and Rab interactor 3
  Uniprot ID: Q8TB24
  ENST ID: ENST00000216487
  CDS Start-End: 160-3117
aggaagtagaagggagcgagagccccagagcgcggcggcagcggcggcctggcccttccagagggccagagccagggacatgcgggcgcccgggactccgcgttccgcgcggcccggcgcctgagcgcctccgttccccgtcccggagctgccggcggcatgatccgacacgccggggcgcccgcgcgcggggaccccacgggtccggttccagttgttggcaaaggagaggaagaggaagaggaagatggcatgcggctttgtctgccagccaacccgaaaaactgccttcctcaccgccggggcatcagcatcctggagaagctcatcaaaacatgcccggtgtggctgcagctgagtctgggccaggcagaggtggccaggatcctgcaccgggtggtggctgggatgttcctggttcgccgggacagcagctcgaagcagctggtgctctgtgtccactttccttctctgaacgaaagctcggccgaggtgctcgaatacaccattaaggaagaaaagtcgatattgtacctggaaggctcggctcttgtgtttgaggacatcttcagattgattgcgttctactgtgtcagtagagacttactgcccttcacactgcggctaccccaggccatccttgaggccagcagcttcacggaccttgagaccatcgccaacctgggtctgggtttctgggactcctcgctgaatcctccacaagaaagagggaagccagcagagcccccaagagaccgggcccccggattccccctagtctccagcctcaggcccacagcccatgacgcaaactgtgcctgtgaaatcgagctgtcggtaggaaatgaccgcctgtggtttgtgaatcctattttcatcgaggactgcagcagcgccctgcccaccgaccagccacctcttggaaattgccctgcacgccctttgccgcccacctctgatgccacctcacccacctccaggtgggccccacgccgcccaccaccccctcccccagtgctgcccctgcagccctgcagcccagcccagccccctgtgctccctgctcttgcccccgcccctgcctgtcctttgcccacctctcccccagtgcctgccccccacgtcacaccccatgccccaggtcccccagaccatccgaaccagccgcccatgatgacctgcgagagactcccatgccccactgcaggcctgggccccctcagggaggaagcgatgaagccaggggcagcctccagtcccttgcagcaggtccccgccccgccactgcctgcgaagaagaaccttcccactgcccctcccagacgccgcgtttccgagagggtgtccttagaagaccaaagtccggggatggcggcagagggggaccagctcagcctgcctccccaagggacctcagacggccctgaggacacgccccgggagagcacggagcaaggccaggacacagaggtgaaagccagcgatcctcacagcatgccagagctgcccaggacagccaaacaacccccagtcccgccccccaggaaaaaacggatctctcgacaactggcctcgaccctcccagctcccttagagaacgctgagctctgcacacaggcgatggccttggagacacccacgccgggtccacccagagagggccaaagccctgcttctcaggctgggactcagcaccctcctgcccaggccactgcccattcccagagctctccagagttcaagggctccctggcctccctctcagacagcttgggggtgtctgtcatggccaccgaccaggactcctactccaccagcagcacggaggaggagctggagcagttcagcagccccagcgtgaagaagaagccctccatgatcctgggcaaggctcggcaccggctgagctttgccagtttcagcagcatgttccacgctttcctctccaacaaccgcaagctgtacaagaaggtggtggagctggcgcaggacaagggctcgtactttggcagcctggtgcaggactacaaggtgtacagcctggagatgatggcgcgccagacctccagcacggagatgctgcaggagattcgcaccatgatgacccagctcaagagctacctgctgcagagcaccgagctcaaggccctggtggaccccgccctgcactccgaggaggagctcgaagcaattgtagagtctgccttgtacaaatgtgtcctgaagcccctgaaggaagccatcaactcatgcctgcatcagatccacagcaaggatggttcgctgcagcagctcaaggagaaccagttagtgatcctggccaccaccaccactgacctaggtgtgaccaccagcgtgccggaggtgcccatgatggagaagatcctgcagaagttcaccagcatgcacaaggcctactcacctgagaagaagatctccatcctgctcaagacctgcaaactcatctacgactccatggccctcggcaacccagggaagccctatggggcggatgacttcctgcctgtgctcatgtatgtgctggcccgcagcaacctcacggagatgcttctcaatgtggagtacatgatggagctcatggaccccgccctgcagctgggggagggttcctactatctgaccaccacctacggggccctggagcacatcaagagctacgacaagatcacggtgacccggcagctgagtgtggaggtgcaggactccatccaccgctgggagcgccggcgtactctcaacaaggcccgggcctcccgctcctccgtacaggacttcatctgcgtgtcgtacctggagcccgagcagcaggcgcggacgctggcgtcgcgggcggacacccaggcccaggcgctgtgcgcgcagtgcgcggagaagttcgcggtggagcggccgcaggcgcaccggctgttcgtgctggtggacgggcgctgcttccagctggcggacgacgcgctgccgcactgcatcaagggctacctgctgcgcagcgagcccaagcgcgacttccactttgtctaccggcccctggacggtggtggcggcggcggcggcgggagcccgccctgcctggtggtgcgggagcccaacttcctgtgaggccctcccggggcgcctcccctcacccccaggcgcacgtctggccccgcctctggctgcgcactcccgaccgcgacgtccacgcagcagagggacatgggccattccatgacgtgcccaggccaacgtcgcaggacagttgtgaaaataacatgacgctcgtccaaggccacttcctgagggcaagtcctaatagccctgagacaccgagacggcatgttcttcattagacggaaagggaaactgaggctcaggagagaggcgctccaggccgctgcagccaacaaaccggcgccctcttcacacgtagctcctcaggccattccccatgagtcccccacacccaccccatcctcggtctttgcaaagaagggcccgagcttagtttccccaggactggcctaggaaggagcaccggccacagctgctccccgtgccactcagggtggacccagcatctcaggagcacctcagggtgtcggttaagagacaggcctccacccctgcaccagagcctgctcttagctcccggtgcccccagaccccgcagctctgtgcccggcaagaagcagctagacacacgccagggcgccaagcacggccagctccgcggacccatggacaagcccagccccgcctcagggaaaacagggcctttccctacaggacacgccccagagctgtggcagattgcaggagccatcgtgtggggagaatttaataaaagcccttttgaaaatga

SEQ ID NO: 174094 - DNA, 2814 bp, Homo sapiens
  Payload ID: 14176
  Gene Symbol: RIN3
  Gene Name: Ras and Rab interactor 3
  ENST ID: ENST00000555589
  CDS Start-End: 141-620
gagccccagagcgcggcggcagcggcggcctggcccttccagagggccagagccagggacatgcgggcgcccgggactccgcgttccgcgcggcccggcgcctgagcgcctccgttccccgtcccggagctgccggcggcatgatccgacacgccggggcgcccgcgcgcggggaccccacgggtccggttccagttgttggcaaaggagaggaagaggaagaggaagatggcatgcggctttgtctgccagccaacccgaaaaactgccttcctcaccgccggggcatcagcatcctggagaagctcatcaaaacatgcccggtgtggctgcagctgagtctgggccaggcagaggtggccaggatcctgcaccgggtggtggctgggatgttcctggttcgccgggacagcagctcgaagcagctggtgctctgtgtccactttccttctctgaacgaaagctcggccgaggtgctcgaatacaccattaaggaagaaaagtcgaagacttactgcccttcacactgcggctaccccaggccatccttgaggccagcagcttcacggaccttgagaccatcgccaacctgggtctgggtttctgggactcctcgctgaatcctccacaagaaagagggaagccagcagagcccccaagagaccgggcccccggattccccctagtctccagcctcaggcccacagcccatgacgcaaactgtgcctgtgaaatcgagctgtcggtaggaaatgaccgcctgtggtttgtgaatcctattttcatcgaggactgcagcagcgccctgcccaccgaccagccacctcttggaaattgccctgcacgccctttgccgcccacctctgatgccacctcacccacctccaggtgggccccacgccgcccaccaccccctcccccagtgctgcccctgcagccctgcagcccagcccagccccctgtgctccctgctcttgcccccgcccctgcctgtcctttgcccacctctcccccagtgcctgccccccacgtcacaccccatgccccaggtcccccagaccatccgaaccagccgcccatgatgacctgcgagagactcccatgccccactgcaggcctgggccccctcagggaggaagcgatgaagccaggggcagcctccagtcccttgcagcaggtccccgccccgccactgcctgcgaagaagaaccttcccactgcccctcccagacgccgcgtttccgagagggtgtccttagaagaccaaagtccggggatggcggcagagggggaccagctcagcctgcctccccaagggacctcagacggccctgaggacacgccccgggagagcacggagcaaggccaggacacagaggtgaaagccagcgatcctcacagcatgccagagctgcccaggacagccaaacaacccccagtcccgccccccaggaaaaaacggatctctcgacaactggcctcgaccctcccagctcccttagagaacgctgagctctgcacacaggcgatggccttggagacacccacgccgggtccacccagagagggccaaagccctgcttctcaggctgggactcagcaccctcctgcccaggccactgcccattcccagagctctccagagttcaagggctccctggcctccctctcagacagcttgggggtgtctgtcatggccaccgaccaggactcctactccaccagcagcacggaggaggagctggagcagttcagcagccccagcgtgaagaagaagccctccatgatcctgggcaaggctcggcaccggctgagctttgccagtttcagcagcatgttccacgctttcctctccaacaaccgcaagctgtacaagaaggtggtggagctggcgcaggacaagggctcgtactttggcagcctggtgcaggactacaaggtgtacagcctggagatgatggcgcgccagacctccagcacggagatgctgcaggagattcgcaccatgatgacccagctcaagagctacctgctgcagagcaccgagctcaaggccctggtggaccccgccctgcactccgaggaggagctcgaagcaattgtagagtctgccttgtacaaatgtgtcctgaagcccctgaaggaagccatcaactcatgcctgcatcagatccacagcaaggatggttcgctgcagcagctcaaggagaaccagttagtgatcctggccaccaccaccactgacctaggtgtgaccaccagcgtgccggaggtgcccatgatggagaagatcctgcagaagttcaccagcatgcacaaggcctactcacctgagaagaagatctccatcctgctcaagacctgcaaactcatctacgactccatggccctcggcaacccagggaagccctatggggcggatgacttcctgcctgtgctcatgtatgtgctggcccgcagcaacctcacggagatgcttctcaatgtggagtacatgatggagctcatggaccccgccctgcagctgggggagggttcctactatctgaccaccacctacggggccctggagcacatcaagagctacgacaagatcacggtgacccggcagctgagtgtggaggtgcaggactccatccaccgctgggagcgccggcgtactctcaacaaggcccgggcctcccgctcctccgtacaggacttcatctgcgtgtcgtacctggagcccgagcagcaggcgcggacgctggcgtcgcgggcggacacccaggcccaggcgctgtgcgcgcagtgcgcggagaagttcgcggtgga

SEQ ID NO: 174095 - DNA, 4079 bp, Homo sapiens
  Payload ID: 14176
  Gene Symbol: RIN3
  Gene Name: Ras and Rab interactor 3
  ENST ID: ENST00000556418
  CDS Start-End: 1-1261
cacacaggcgatggccttggagacacccacgccgggtccacccagagagggccaaagccctgcttctcaggctgggactcagcaccctcctgcccaggccactgcccattcccagagctctccagagttcaagggctccctggcctccctctcagacagcttgggggtgtctgtcatggccaccgaccaggactcctactccaccagcagcacggaggaggagctggagcagttcagcagccccagcgtgaagaagaagccctccatgatcctgggcaaggctcggcaccggctgagctttgccagtttcagcagcatgttccacgctttcctctccaacaaccgcaagctgtacaagaaggtggtggagctggcgcaggacaagggctcgtactttggcagcctggtgcaggactacaaggtgtacagcctggagatgatggcgcgccagacctccagcacggagatgctgcaggagattcgcaccatgatgacccagctcaagagctacctgctgcagagcaccgagctcaaggccctggtggaccccgccctgcactccgaggaggagctcgaagcaattgtagagtctgccttgtacaaatgtgtcctgaagcccctgaaggaagccatcaactcatgcctgcatcagatccacagcaaggatggttcgctgcagcagctcaaggagaaccagttagtgatcctggccaccaccaccactgacctaggtgtgaccaccagcgtgccggaggtgcccatgatggagaagatcctgcagaagttcaccagcatgcacaaggcctactcacctgagaagaagatctccatcctgctcaagacctgcaaactcatctacgactccatggccctcggcaacccagggaagccctatggggcggatgacttcctgcctgtgctcatgtatgtgctggcccgcagcaacctcacggagatgcttctcaatgtggagtacatgatggagctcatggaccccgccctgcagctgggggagggttcctactatctgaccaccacctacggggccctggagcacatcaagagctacgacaagatcacggtgacccggcagctgagtgtggaggtgcaggactccatccaccgctgggagcgccggcgtactctcaacaaggcccgggcctcccgctcctccgtacaggtgaggcctgagagcgggaggggcccggtggggccatgtcccagacaccatccctgctgcctgctggctaaggagccgtgacatcacctggctgctccagccgcccagccctgccttaggggagcagtgagactccccacaccagaggaagggcccccagcccctgctgccagtgtgtgtccaggacttgggtgcgtctagaaacatatcagcaggcattggtgttctccctgggcaagcaggaagggtgcaggaggaatgagacacacccatcattccttagcccctcctaggacccagcaccctgcaggggctggagatggggacttgtcatcccagtccctgctttaaggagcccacaggctcatctacagccttgctccttagtccctggacaaatgcagcagctgccaagggtctgcgtaacccccaccaacccagtggcccacccctccccatacctctctctatacagactcagtattcaaaccagtcccgcccctccccaactccatcaccccacccacccccaggctgcatcaaatccagctgcccccagttccccaaacatgcccagcccagttcactggctgctcaaccgctgccctcactggtcaatctccccttcttcactggctgtcactgcccatcctttaagacgactcagtttctccaacagcccctcctctgagaagccttccctgatacacacacacaccgtttcacacaggctgggtggggtgccctcctctgggcttcctgcggcctccccttttacagtgcatatcacatcctatcatcctctgcatatgaagctgtcacctctgggagggcacagcccatggttcacatgcctcaggggcgccaagcccagggcctgggacagagcaggactgggtgtgtaaaaaagggtgagagttggactagtgagccaggcacatccagagctgtgagcagctatgcagactcactcctctgacacccagagcagaccagtcctgagccacactcctggctttcaagatggtgcatctataataagcagagcccaggcctgggagacaggaggcttgagttctggccccagccctgtactagcttgctgtgtgaccctcagcaatccctgccccactctgggactcagttttcctgcccacacaggctgactatggctaatcaatttaataactgactctctggggagaaaacaaaagctctgattttagcttctgtccatttccatggtgtgagtcctccatggccaacttcaacttggcatcactgaatgtggagttggaaagaagtgtatgcagtcggctctccctggcgggtgtgagccagctccagcacacctctgttcccatcccctcccaacaccccggactcccacagactgtagggacatggacactcttggtccaagcctggcccaggcatcccgtacttcctgcttctaccttaggggttcctgatgctgagccaggcagagtatggatgaaacggaccacccactgtttgggagacggaagcttcggaggggggtcccctcagcaccacatctgggatctggggagggcaccaccctctgccccctcccagtgcctcctccgcacaccatgccttggggggtgggcacccttccctggggaggggaagcccagagctggacagtcactagcaggtggatagtgccctgggaggcctaatggaggacaaggagccctgaggcagccactaagacggagggagtgggccgggcttttcccctcctggaagaaatgggcggtccccgtgaagctcttgacaggagcccggcctcgcctaagccctagccaccagttgccatcacggtctccgccgagccgggatcctcagccgcttcccgcgcaggcctgctgttcccaatccggccacaagggggcagccccgcgcgcagcctctctgcctgcagccctgagccccggggaaggcgaggccgctccgggccggagcttccagcgcctgctcgcccatttatgggaggcgggcgctatccccactttacagccggggctcgacgaatcaaggccacacaggcagtgggagcaaaggcaaagcccggcaggtgtggggctgggtccctaggggtggaggacggcgggcgggcgccctgctcgtgctgcgagtgcccagccccagcccgcaggcgtcgcctcgccttgcccgccctgctcatgccgggccttccccacccgactgcgcccagcctccttcacccggtcccctcccgctttaccaatccctgccccacgcagctcctcagagccccagggctcttgcagccctaaggggctggactgtgttgcccgcccgcactatgggatgcccgggcgggctcgcacctcccttcttatctgtgctgccctccgtgcccagcattgcgcctggggtgcagggaactcacctggagggagggagggagggaatgaatgaatgaatgaatgatggggagcctgtggaccagcagccaggggacgcgccggctcctctttgcagggactccgagacgcgccttaattcatctcccagaactgtcggcccagctgggaagccaggcagggagggggacgggccccccgcaggctcgcggcagagacgggaaaggcgcaggtgccggactcgcagacagcttggcgcccgccacccgctatccatccagggaggggcctgggccgggagagggcgcctgaggagacagggccccgccgtgaccacaggcccctcgcgtctccgcaggacttcatctgcgtgtcgtacctggagcccgagcagcaggcgcggacgctggcgtcgcgggcggacacccaggcccaggcgctgtgcgcgcagtgcgcggagaagttcgcggtggagcggccgc

SEQ ID NO: 174096 - DNA, 517 bp, Homo sapiens
  Payload ID: 14176
  Gene Symbol: RIN3
  Gene Name: Ras and Rab interactor 3
  ENST ID: ENST00000557762
  CDS Start-End: 130-366
cgcggcggcagcggcggcctggcccttccagagggccagagccagggacatgcgggcgcccgggactccgcgttccgcgcggcccggcgcctgagcgcctccgttccccgtcccggagctgccggcggcatgatccgacacgccggggcgcccgcgcgcggggaccccacgggcccggaaattctggatgctggtttctttctctcgaaagcgacctctgcaaagacaaataccatccggtgggaagaactgggaatccgttggggaagagccccccaaccctcacacccacttgcaagtatctgccacacccaagatggcagggtgaagccggagaggagtttctcagggaggaaggggaggtgaggggccagggcgctggcctcaccggcttctcattttccccagagatgacctagtgtgatccacttcctcttgtctttttttgttcattactgggtcggttatttaaactctctgtatctcagttcacttatcaataaaatgataaataata

SEQ ID NO: 174097 - DNA, 3617 bp, Homo sapiens
  Payload ID: 14176
  Gene Symbol: RIN3
  Gene Name: Ras and Rab interactor 3
  ENST ID: ENST00000620541
  CDS Start-End: 141-2882
gagccccagagcgcggcggcagcggcggcctggcccttccagagggccagagccagggacatgcgggcgcccgggactccgcgttccgcgcggcccggcgcctgagcgcctccgttccccgtcccggagctgccggcggcatgatccgacacgccggggcgcccgcgcgcggggaccccacgggtccggttccagttgttggcaaaggagaggaagaggaagaggaagatggcatgcggctttgtctgccagccaacccgaaaaactgccttcctcaccgccggggcatcagcatcctggagaagctcatcaaaacatgcccggtgtggctgcagctgagtctgggccaggcagaggtggccaggatcctgcaccgggtggtggctgggatgttcctggttcgccgggacagcagctcgaagcagctggtgctctgtgtccactttccttctctgaacgaaagctcggccgaggtgctcgaatacaccattaaggaagaaaagtcgatattgtacctggaaggctcggctcttgtgtttgaggacatcttcagattgattgcgttctactgtgtcagtagagacttactgcccttcacactgcggctaccccaggccatccttgaggccagcagcttcacggaccttgagaccatcgccaacctgggtctgggtttctgggactcctcgctgaatcctccacaagaaagagggaagccagcagagcccccaagagaccgggcccccggattccccctagtctccagcctcaggcccacagcccatgacgcaaactgtgcctgtgaaatcgagctgtcggtaggaaatgaccgcctgtggtttgtgaatcctattttcatcgaggactgcagcagcgccctgcccaccgaccagccacctcttggaaattgccctgcacgccctttgccgcccacctctgatgccacctcacccacctccaggtgggccccacgccgcccaccaccccctcccccagtgctgcccctgcagccctgcagcccagcccagccccctgtccccgccccgccactgcctgcgaagaagaaccttcccactgcccctcccagacgccgcgtttccgagagggtgtccttagaagaccaaagtccggggatggcggcagagggggaccagctcagcctgcctccccaagggacctcagacggccctgaggacacgccccgggagagcacggagcaaggccaggacacagaggtgaaagccagcgatcctcacagcatgccagagctgcccaggacagccaaacaacccccagtcccgccccccaggaaaaaacggatctctcgacaactggcctcgaccctcccagctcccttagagaacgctgagctctgcacacaggcgatggccttggagacacccacgccgggtccacccagagagggccaaagccctgcttctcaggctgggactcagcaccctcctgcccaggccactgcccattcccagagctctccagagttcaagggctccctggcctccctctcagacagcttgggggtgtctgtcatggccaccgaccaggactcctactccaccagcagcacggaggaggagctggagcagttcagcagccccagcgtgaagaagaagccctccatgatcctgggcaaggctcggcaccggctgagctttgccagtttcagcagcatgttccacgctttcctctccaacaaccgcaagctgtacaagaaggtggtggagctggcgcaggacaagggctcgtactttggcagcctggtgcaggactacaaggtgtacagcctggagatgatggcgcgccagacctccagcacggagatgctgcaggagattcgcaccatgatgacccagctcaagagctacctgctgcagagcaccgagctcaaggccctggtggaccccgccctgcactccgaggaggagctcgaagcaattgtagagtctgccttgtacaaatgtgtcctgaagcccctgaaggaagccatcaactcatgcctgcatcagatccacagcaaggatggttcgctgcagcagctcaaggagaaccagttagtgatcctggccaccaccaccactgacctaggtgtgaccaccagcgtgccggaggtgcccatgatggagaagatcctgcagaagttcaccagcatgcacaaggcctactcacctgagaagaagatctccatcctgctcaagacctgcaaactcatctacgactccatggccctcggcaacccagggaagccctatggggcggatgacttcctgcctgtgctcatgtatgtgctggcccgcagcaacctcacggagatgcttctcaatgtggagtacatgatggagctcatggaccccgccctgcagctgggggagggttcctactatctgaccaccacctacggggccctggagcacatcaagagctacgacaagatcacggtgacccggcagctgagtgtggaggtgcaggactccatccaccgctgggagcgccggcgtactctcaacaaggcccgggcctcccgctcctccgtacaggacttcatctgcgtgtcgtacctggagcccgagcagcaggcgcggacgctggcgtcgcgggcggacacccaggcccaggcgctgtgcgcgcagtgcgcggagaagttcgcggtggagcggccgcaggcgcaccggctgttcgtgctggtggacgggcgctgcttccagctggcggacgacgcgctgccgcactgcatcaagggctacctgctgcgcagcgagcccaagcgcgacttccactttgtctaccggcccctggacggtggtggcggcggcggcggcgggagcccgccctgcctggtggtgcgggagcccaacttcctgtgaggccctcccggggcgcctcccctcacccccaggcgcacgtctggccccgcctctggctgcgcactcccgaccgcgacgtccacgcagcagagggacatgggccattccatgacgtgcccaggccaacgtcgcaggacagttgtgaaaataacatgacgctcgtccaaggccacttcctgagggcaagtcctaatagccctgagacaccgagacggcatgttcttcattagacggaaagggaaactgaggctcaggagagaggcgctccaggccgctgcagccaacaaaccggcgccctcttcacacgtagctcctcaggccattccccatgagtcccccacacccaccccatcctcggtctttgcaaagaagggcccgagcttagtttccccaggactggcctaggaaggagcaccggccacagctgctccccgtgccactcagggtggacccagcatctcaggagcacctcagggtgtcggttaagagacaggcctccacccctgcaccagagcctgctcttagctcccggtgcccccagaccccgcagctctgtgcccggcaagaagcagctagacacacgccagggcgccaagcacggccagctccgcggacccatggacaagcccagccccgcctcagggaaaacagggcctttccctacaggacacgccccagagctgtggcagattgcaggagccatcgtgtggggagaatttaataaaagcccttttg

SEQ ID NO: 174098 - DNA, 1846 bp, Homo sapiens
  Payload ID: 14177
  Gene Symbol: RINL
  Gene Name: Ras and Rab interactor like
  ENST ID: ENST00000635328
  CDS Start-End: 366-1724
aggccaggtcatgactcactggcttcctgcaacctgacgatggcccagccagaagacaaggcacctgaagtccccacagagggggtgaggtgaacaaagcagacaggacccctctaggggtcctcagcaccctagagccacttactcgcctgcagaggacatggggggtgtggcatgtgccagagctggatacccaggatgcggaggcccttgtggggctgtggccactagggagtttcttggtcacaggacgtgaccccagccaggccctggtgttgaggtcaggacctttaccaggagaagtcaatacctaccagatccagaagattcccagaggtgtgtccctggaatcctccaacctctgcatgccagacctgccccatctcctggcctttctatcagccagcagggatgttctgcccagaaccctgctcttgccccctcccactctagggcccagagatgaacacacagatcctgtgcagatcggcagggtccaacaggacaccccagggaaggtgctttccattgtgaaccagctctacctggagacccacagaggctgggggagggagcagacccctcaagaaacagagccagaggctgctcagagacatgatccagcccccaggaaccctgcgcctcacggggtctcctgggtgaaaggcccgctcagcccggaagtggaccatcctgggccggctctcgccagcctactggaagaggaggaggaagaccttgaaggaaaggaggaaggaagggaggacgaccctgaagaggaaggccctgaggacgtgctcaccattcacgtccagtctctggtcagggcccggagcagctacgtggccaggcagtaccgaagccttcgggtgcgcatcgcctcagattctgggggtccccacgggtctggggacccggccacggagctgcttcaggatgtgcggcacctccttactgacctccaggatcacctggcaaaggactcctacatcagggctgtctttggaagcaggggtcctgggctccccaagaaggacgaggatccaggccccgcgctggagacggcggtgtgccaggcggtgctggcgcccctgaagccggccctgtggacacgactccgcacactccgagcaccggagctgcggcggctgcggcggcgacagacagccctgcgggcgggggcggggcctccgggggcacaggggccgggaccggaagggcagagccccgcccccgccttgcggagccgcatccacgagcgccttgcgcacctccacgctgcctgcgccccgcgccgcaaggtggcgctcctcttggaggtgtgcagagatgtctatgcgggcctggctcgaggcgagaaccaagatcccctgggggccgacgccttcctgccggcgctgaccgaggaactcatctggagcccggacattggggacacgcagctggacgtagagtttcttatggagctcttagatccagatgagctgcggggagaggctgggtactacctgaccacgtggtttggggcgctgcaccacattgcccactaccagcccgaaacagaccgcgctccccgggggctcagctccgaggcccgcgcctccctgcaccagtggcaccgcaggcggacgctgcacagaaaggatcatcccagagcccaggccaacctgccctttaaggagccatgggcagaagagactgtgacagggaccagtgacaactaggggtttcacacccctccgttcatgcctgtaatcccaacattttgggaggccaaggtgggaggattgcttgagcccaggagtttgagaccagcctgggcaaaacagtgggacccccatctacc

SEQ ID NO: 174099 - DNA, 1910 bp, Homo sapiens
  Payload ID: 14177
  Gene Symbol: RINL
  Gene Name: Ras and Rab interactor like
  ENST ID: ENST00000635542
  CDS Start-End: 88-1788
cttcctctctccacttcctgctactgcaggcctctcctccgagaacagaggccaggtcatgactcactggcttcctgcaacctgacgatggcccagccagaagacaaggcacctgaagtccccacagagggggtgaggctggtcccaccacaggtgaacaaagcagacaggacccctctaggggtcctcagcaccctagagccacttactcgcctgcagaggacatggggggtgtggcatgtgccagagctggatacccaggatgcggaggcccttgtggggctgtggccactagggagtttcttggtcacaggacgtgaccccagccaggccctggtgttgaggtcaggacctttaccaggagaagtcaatacctaccagatccagaagattcccagaggtgtgtccctggaatcctccaacctctgcatgccagacctgccccatctcctggcctttctatcagccagcagggatgttctgcccagaaccctgctcttgccccctcccactctagggcccagagatgaacacacagatcctgtgcagatcggcagggtccaacaggacaccccagggaaggtgctttccattgtgaaccagctctacctggagacccacagaggctgggggagggagcagacccctcaagaaacagagccagaggctgctcagagacatgatccagcccccaggaaccctgcgcctcacggggtctcctgggtgaaaggcccgctcagcccggaagtggaccatcctgggccggctctcgccagcctactggaagaggaggaggaagaccttgaaggaaaggaggaaggaagggaggacgaccctgaagaggaaggccctgaggacgtgctcaccattcacgtccagtctctggtcagggcccggagcagctacgtggccaggcagtaccgaagccttcgggtgcgcatcgcctcagattctgggggtccccacgggtctggggacccggccacggagctgcttcaggatgtgcggcacctccttactgacctccaggatcacctggcaaaggactcctacatcagggctgtctttggaagcaggggtcctgggctccccaagaaggacgaggatccaggccccgcgctggagacggcggtgtgccaggcggtgctggcgcccctgaagccggccctgtggacacgactccgcacactccgagcaccggagctgcggcggctgcggcggcgacagacagccctgcgggcgggggcggggcctccgggggcacaggggccgggaccggaagggcagagccccgcccccgccttgcggagccgcatccacgagcgccttgcgcacctccacgctgcctgcgccccgcgccgcaaggtggcgctcctcttggaggtgtgcagagatgtctatgcgggcctggctcgaggcgagaaccaagatcccctgggggccgacgccttcctgccggcgctgaccgaggaactcatctggagcccggacattggggacacgcagctggacgtagagtttcttatggagctcttagatccagatgagctgcggggagaggctgggtactacctgaccacgtggtttggggcgctgcaccacattgcccactaccagcccgaaacagaccgcgctccccgggggctcagctccgaggcccgcgcctccctgcaccagtggcaccgcaggcggacgctgcacagaaaggatcatcccagagcccaggccaacctgccctttaaggagccatgggcagaagagactgtgacagggaccagtgacaactaggggtttcacacccctccgttcatgcctgtaatcccaacattttgggaggccaaggtgggaggattgcttgagcccaggagtttgagaccagcctgggcaaaacagtgggacccccatctacc

SEQ ID NO: 174100 - DNA, 346 bp, Homo sapiens
  Payload ID: 14177
  Gene Symbol: RINL
  Gene Name: Ras and Rab interactor like
  ENST ID: ENST00000634563
  CDS Start-End: 183-346
agcgtggtggggagagccttgagagttggagccaggcgggagagggtagcactggtgggaggaatctatgcggtcctgaagattctgatcccctgggggccgacgccttcctgccggcgctgaccgaggaactcatctggagcccggacattggggacacgcagctggacgtagagtttcttatggagctcttagatccagatgagctgcggggagaggctgggtactacctgaccacgtggtttggggcgctgcaccacattgcccactaccagcccgaaacagaccgcgctccccgggggctcagctccgaggcccgcgcctccctgcaccagtggcaccgcag

SEQ ID NO: 174101 - DNA, 1810 bp, Homo sapiens
  Payload ID: 14177
  Gene Symbol: RINL
  Gene Name: Ras and Rab interactor like
  ENST ID: ENST00000634655
  CDS Start-End: 1-520
tgcgcacctccacgctgcctgcgccccgcgccgcaaggtggcgctcctcttggaggtgtgcagagatgtctatgcgggcctggctcgaggcgagaaccaagatcccctgggggccgacgccttcctgccggcgctgaccgaggaactcatctggagcccggacattggggacacgcagctggacgtagagtttcttatggagctcttagatccagatgagctgcggggagaggctgggtactacctgaccacgtggtttggggcgctgcaccacattgcccactaccagcccgaaacagaccgcgctccccgggggctcagctccgaggcccgcgcctccctgcaccagtggcaccgcaggcggacgctgcacagaaaggatcatcccagagcccaggtgactgcccatctggctgcaagtagaagggagggtgagacctggtgcccttctgacccagctcccacctctccccacaggccaacctgccctttaaggagccatgggcagaagagactgtgacagggaccagtgacaactaggggtttcacacccctccgttcatgcctgtaatcccaacattttgggaggccaaggtgggaggattgcttgagcccaggagtttgagaccagcctgggcaaaacagtgggacccccatctaccaaaaaaaaaaaaaaacaaaaattagccgggcgtggtggcgtactcctgtggtaccagctactcaggaggctttgcagttttagacaggcgtatcagagaaagcctcactgaggtgacatctgcagaaaggcctgaaggaggggaggggaagggaggagcagagtgggtattaggaagagcattccgagaagcaggatgagccagtgcaaaggcccagaggtaggctgttcccttttcctgggacccctccctcctccttgctgctcctaaaccacataggtcaggagtctggactgacccaggtacgtctggcatcttgcttgaggaacagggggttttgttttgttttgaaagaacgtctctgtctgttgcccaggctggagtgtagtggcatgatctcggctcactgcagccttaacctcctggctcaaacaagccccctgcctctgcctaccaagtagctgagactacaggcacctaccaccgtgcctgtctaatttttaaaattttttataaagatgaggtctctctttgttgcccaggctggtctcaaactcctaacctcaagcaatctgcccacgtcggcctcccaaagtgctgagattataggcgtgagccaccgtgcccaattgtgatcgtttttcccaaagaatgtatcacatgctaacaaaccatatatttatgtatttcattgttcatagtaactacaatttaaaaaactaaaaagaaacaagtgaggccgggtgcggttgctcatgcctgtaatcccagcactttgggaggccaaggtgggcagatcacctgaggtcgggagttcaagaccagcctgacaaacatggagaaacccgtctctactaaaaatacaaacttagccgggcatggtggcgcatgcctgtaatcccagctactccggaggctaaggcaggagaatggcttgaacccgggaggcgaagattgcggtgagcggagattgcgccattgcactccagcctgggcaacaagagtgaaacaccatctcaaaaataaataaataaataaaaagaaacaagtgaagttaacgttaataataatatatttgatttaacacaatgtatcccaaatattatcacttcaacatgtatccatattaaaaagttactgacatattt

SEQ ID NO: 174102 - DNA, 1910 bp, Homo sapiens; identical to SEQ ID NO: 174099
  Payload ID: 14178
  Gene Symbol: RINL
  Gene Name: Ras and Rab interactor-like
  Uniprot ID: Q6ZS11
  ENST ID: ENST00000591812
  CDS Start-End: 88-1788

SEQ ID NO: 174103 - DNA, 1810 bp, Homo sapiens; identical to SEQ ID NO: 174101
  Payload ID: 14178
  Gene Symbol: RINL
  Gene Name: Ras and Rab interactor-like
  ENST ID: ENST00000593424
  CDS Start-End: 1-520

SEQ ID NO: 174104 - DNA, 1846 bp, Homo sapiens; identical to SEQ ID NO: 174098
  Payload ID: 14178
  Gene Symbol: RINL
  Gene Name: Ras and Rab interactor-like
  Uniprot ID: Q6ZS11
  ENST ID: ENST00000598904
  CDS Start-End: 366-1724

SEQ ID NO: 174105 - DNA, 346 bp, Homo sapiens; identical to SEQ ID NO: 174100
  Payload ID: 14178
  Gene Symbol: RINL
  Gene Name: Ras and Rab interactor-like
  ENST ID: ENST00000593809
  CDS Start-End: 183-346

SEQ ID NO: 174106 - DNA, 2768 bp, Homo sapiens
  Payload ID: 14179
  Gene Symbol: RAPH1
  Gene Name: Ras association (RalGDS/AF-6) and pleckstrin homology domains 1
  Uniprot ID: Q70E73
  ENST ID: ENST00000308091
  CDS Start-End: 226-2160
gcggccgccccgcccccgctcccgccgccgcccgccagtcagtcagtcagtcagtcagtcagtcagtcagtcagtcactgagcgcgcggcgcgggagctgctggcagtcgctgcgtctctggcgagggagcgccgcgcctggggaggaggcggaggcagcggctggaggagcgcgagcggcggtttccttgcccggggccgcgggaaggccgaccgactgccgcgatggagcagctatcagatgaagaaattgatcatggtgctgaagaagacagtgacaaggaagatcaggacctggacaaaatgtttggagcctggcttggagaactagacaaactcactcagagtttggattctgacaagcccatggaaccagtaaaaagatctcctcttcgccaggaaacaaacatggccaacttttcttaccgcttctccatatacaacttgaatgaagctctgaatcagggagagactgtggatctggatgccttgatggctgatctttgctctatagagcaggagctcagcagcattggttcaggaaacagtaagcgtcaaatcacagaaacgaaagctactcagaaattgcctgttagccgacatacattgaaacatggcaccttgaaaggattatcttcttcatctaataggatagctaaaccttcccatgccagctactccttggacgacgtcactgcacagttagaacaggcctctttgagtatggatgaggctgctcagcaatctgtactagaagatactaaacccttagtaactaatcagcacagaagaaccgcgtcagcaggcacagtgagtgatgctgaagtacactctattagtaattcctcccattccagcatcacttccgcagcctccagcatggactctttggatattgataaagtaacacgccctcaagagctggatttgacacatcaagggcagccaattactgagcatgctatttctctgagatgttccagcaagcaggccaagcgtcatattgacttcacagaagaacaggctgagctgacacctcactcctatctggacagggaaacctcccttcttctgagaaacattgcaggaaaaccttctcatttgctgaccaaggaagaacaggcagcaaaattgaaagctgagaagatcagagttgccctagagaaaattaaagaggcacaagtgaaaaagctggtgatcagagtccacatgtctgatgacagttctaaaacaatgatggtggatgagaggcagacagtaagacaagtactggataacctgatggacaaatcccactgcggttatagtttagactggtcactggtagaaaccgtttctgaattacaaatggagagaatctttgaagaccatgaaaacttggttgaaaatcttcttaattggacaagagatagccaaaacaagcttatatttatggagcgtatagaaaaatatgcacttttcaaaaacccacagaattatcttttggggaaaaaagaaacagctgagatggcagatagaaacaaagaagtcctcttggaggaatgtttttgtggaagttctgtaactgtaccagaaattgaaggagtcctttggttgaaggatgatggcaagaagtcctggaaaaagcgttattttctcttgcgagcatctggtatctactatgttcccaaaggaaaagcaaaggtctctcgggatctggtgtgctttctccagctggatcatgtcaacgtttattatggccaggactatcggaacaaatacaaagcacctacagactattgtctggtgctgaagcatccacaaatccagaagaaatctcaatatatcaaatacctttgttgtgatgatgtgaggacactgcatcagtgggtcaatgggatccgcattgcaaagtatgggaagcagctctatatgaactaccaagaagccttgaagaggacagagtcagcctatgattggacttccttatccagctccagcattaaatcgggatccagttcttccagcatcccagagtctcagtcaaaccactccaatcagtctgatagcggagtttctgacacccagccagcaggacacgtccgttcccagagcattgtgagctccgtattctctgaagcctggaaacgaggcactcagttggaagagtccagcaagtaaaacaaatgtaaagaatgtcccccctttacctgcattgctggacttctgtgcatgttggatgcaattgtctcacaccaacacgagtgtgtgtgtcaagcttattcattcctgtgtgactgtgcacgcctgctcaacattctcatactctcctgtgtcagcttactagcatcaaaaagccatcctcattccaccaggaagccctcctaaacccagttatagcatctgcttgatgtggatgcagtcatggactgaaaggtaaactggagccatcacatctccccttggaagtccagtgctcagaggaccgccacagagggttccatgtagggcaggctgtgtcaaagtcatacagccaaggtcagaagtcatgcatcctgtcaccattcaaacagcttttgcagccggacatttttcctagattgttagatggtctagctattttactgtggggtaaaacaagttttctgtttccttcttgcccgcacaatcagattttagccttcctgacattgtccatctttatgatcaccaccaacttctgcatccttttcatgcatgtcccagactccctgctttttagttttacacaatcaaagcttacctctgta

SEQ ID NO: 174107 - DNA, 9808 bp, Homo sapiens
  Payload ID: 14179
  Gene Symbol: RAPH1
  Gene Name: Ras association (RalGDS/AF-6) and pleckstrin homology domains 1
  Uniprot ID: Q70E73
  ENST ID: ENST00000319170
  CDS Start-End: 301-4053
caaccccgccttctgcgtctcggctggacgcgagcacactcggctccgccgccgccgccgccgccgcggggcgctgcggccgccccgcccccgctcccgccgccgcccgccagtcagtcagtcagtcagtcagtcagtcagtcagtcagtcactgagcgcgcggcgcgggagctgctggcagtcgctgcgtctctggcgagggagcgccgcgcctggggaggaggcggaggcagcggctggaggagcgcgagcggcggtttccttgcccggggccgcgggaaggccgaccgactgccgcgatggagcagctatcagatgaagaaattgatcatggtgctgaagaagacagtgacaaggaagatcaggacctggacaaaatgtttggagcctggcttggagaactagacaaactcactcagagtttggattctgacaagcccatggaaccagtaaaaagatctcctcttcgccaggaaacaaacatggccaacttttcttaccgcttctccatatacaacttgaatgaagctctgaatcagggagagactgtggatctggatgccttgatggctgatctttgctctatagagcaggagctcagcagcattggttcaggaaacagtaagcgtcaaatcacagaaacgaaagctactcagaaattgcctgttagccgacatacattgaaacatggcaccttgaaaggattatcttcttcatctaataggatagctaaaccttcccatgccagctactccttggacgacgtcactgcacagttagaacaggcctctttgagtatggatgaggctgctcagcaatctgtactagaagatactaaacccttagtaactaatcagcacagaagaaccgcgtcagcaggcacagtgagtgatgctgaagtacactctattagtaattcctcccattccagcatcacttccgcagcctccagcatggactctttggatattgataaagtaacacgccctcaagagctggatttgacacatcaagggcagccaattactgaggaagaacaggcagcaaaattgaaagctgagaagatcagagttgccctagagaaaattaaagaggcacaagtgaaaaagctggtgatcagagtccacatgtctgatgacagttctaaaacaatgatggtggatgagaggcagacagtaagacaagtactggataacctgatggacaaatcccactgcggttatagtttagactggtcactggtagaaaccgtttctgaattacaaatggagagaatctttgaagaccatgaaaacttggttgaaaatcttcttaattggacaagagatagccaaaacaagcttatatttatggagcgtatagaaaaatatgcacttttcaaaaacccacagaattatcttttggggaaaaaagaaacagctgagatggcagatagaaacaaagaagtcctcttggaggaatgtttttgtggaagttctgtaactgtaccagaaattgaaggagtcctttggttgaaggatgatggcaagaagtcctggaaaaagcgttattttctcttgcgagcatctggtatctactatgttcccaaaggaaaagcaaaggtctctcgggatctggtgtgctttctccagctggatcatgtcaacgtttattatggccaggactatcggaacaaatacaaagcacctacagactattgtctggtgctgaagcatccacaaatccagaagaaatctcaatatatcaaatacctttgttgtgatgatgtgaggacactgcatcagtgggtcaatgggatccgcattgcaaagtatgggaagcagctctatatgaactaccaagaagccttgaagaggacagagtcagcctatgattggacttccttatccagctccagcattaaatcgggatccagttcttccagcatcccagagtctcagtcaaaccactccaatcagtctgatagcggagtttctgacacccagccagcaggacacgtccgttcccagagcattgtgagctccgtattctctgaagcctggaaacgaggcactcagttggaagagtccagcaaggccagaatggagtctatgaatcggccctacacttcacttgtgccccctttatccccgcaacctaagatagtcaccccctacactgcttcacagccttcaccacctctacctcctccgccacccccacctcctcctccaccaccccctccaccaccccctcctcccccactccccagccagtctgcaccttctgcaggctcagcagccccaatgttcgtcaagtacagcacaataacacggctacagaatgcgtctcagcattcaggggccctgtttaagccgccaacacccccagtgatgcagtcacagtcagtgaagcctcagatcctggtaccccccaatggagttgttccaccaccccctccccctcctccacccccaaccccaggctctgccatggcccagctaaagcctgcaccgtgtgccccatcccttccacagttcagtgccccgcctcctccactgaagatccatcaagttcagcatattactcaggtggctcccccaacaccccccccacctcctcctatccctgcacccctccctccccaagctcccccaaaaccccttgtgaccatccccgcaccaaccagcaccaagactgtggcacctgttgtgactcaagctgcaccacccacacctactcctccagtgcccccagcaaaaaagcagccagctttccctgcttcttacattccaccctctccccctacccctcctgttccagtacccccgccaacattacccaagcaacagagcttctgtgcaaaaccccctccctctccactgtcaccggtgccctcggtcgtgaagcagatagccagccagtttccaccccctccaactccccctgccatggaatctcagcccttaaagcctgtcccagcaaatgtagctccacagtcccctcctgcagtaaaagcaaagcccaagtggcagcccagctccatcccagtcccttctccggacttccctcctccccctcctgaaagcagcctggtgtttcctcctccacccccatcacctgtcccagccccaccaccaccacctccacccacagcttctcctacccctgacaaaagtggatctccaggcaaaaagaccagtaagacgtccagccctgggggaaagaaaccacccccaaccccacagcgcaactccagcattaaatccagcagtggtgcagagcaccccgagcccaagagaccctcggtggacagtctagtcagcaagtttacaccgccagcagaatcagggtctcccagcaaggagaccctaccacctcctgcagcaccccccaagcctggaaaactcaatctttctggagtcaaccttcctggagttctccaacaagggtgtgtgtcagcaaaagcccctgttctgagtgggcgtggaaaggactccgtggtggaatttccttctcctccatccgattctgattttccaccccctccacctgaaacagagcttcctctgccccccattgagattccagcagttttctcgggaaacacctctccaaaagtggcagtcgttaatcctcaaccacaacaatggtctaaaatgtcagtgaagaaggcccctccacccacacgacccaaacggaatgatagcacccgcctcactcaagctgagatttctgagcagccaacaatggccacagttgtgccacaagtgcccacctctcccaaatccagccttagtgtccagcctggattcctggctgacctcaacaggacactgcaacgaaagtccatcactcggcacggctcactctcctcccgcatgtccagagcagaaccaacagccaccatggatgatatggcattgcctccaccaccccctgaactgctgtctgatcaacagaaggctggttacggaggcagtcatatatcaggctatgcaacgttgcggagaggaccccctcctgctccccccaaaagagaccagaacaccaagctctccagagactggtagccaccataggactttattttcatgatatctgtaatcactgctacaatcagctcacctgatcatctgtgaattcaggtgttcagagcctcctggtatgatgttattcaggtagtgtccagctatatgtgtatgtgtgtgtgtacacgtgcatgtacacacagctgtacagtgtgtgtatatatgtatacatatatgtatgtgtatgtgtatatagagagagagctgagagttattctatttattccttttctctcctaatctgaaaatgggtgttctgtattttgggtggaagaggcatagaaggggatgtgtgttgtctcttaagatttctatatcatgtggattggaccaaaaacttctaatcacttatttagaaggtatttataagtgtctgtccatgtgtagcctattcgtgcatgttgtgtattatataactaaggaatagatgtagaatgtgctatttctggttgagaaaaatcaccagaatgtttggtgtatctataaggcttttgtgtttgtttttccccagttggctgaagttagaattgcttgactgacacttcattgctatacatgaaggggcactttaaatcaggaaaatctctcagcttcatagaacgggtaactagtgcaggatggggaaatgttcacagacatcatctgtatgtggttgtgcatagaaagtaaatacatggcgtaattaactcagctgttctagctgcagtactgctgcagtgatccacccacatttaggatgtgctgacagataagctctttgcctacaatacatggataattagtgctataattctggatagttcctttttagtactgttttatgaagctttatcaacttggcttcatgatcctcactttgattgattttaagaggatggataacacagttatctctgtaatgttctgtcccagtatgtctttgggtcaccagttaccttcttaaaatatgtgctttaggtaggtgttattacatatctgtagacaattggtatatgaaatatacacatcctgtgccccaatatggtgcattatgaaaaacaaaatcattttctaaaatgcattttttgagcattgctctatagaagggaagggtgatgagagaacagaactggcccctgtacaggtgtcattaatctggttgtatatgggttataatatgtaatacaaaaagctcattaagtatgggactacatggagagggaagacagtttcatttatagctactggggctaccaggacccttgctgactgcagcctggttgtgattagttcaggttactaggtgttctgatggagtgggacagtccaagtccagtaactgacattacgttttatgcgtgtgcagtttggtataacgtggagtcagtgctctaacgacacactatacttctatatgcttttttctgtgaattttccttggtacatgagagaaataagtactctcatcaacttatgataaattggactattaggaataaaacaatctcagagcagctcctaaacaagagaataaaaatgggccatcccagcacttataaggggagcacatcttgtaatgaaagtctgtgcctattgttaatgattaccaatgcaaactgcagaaatcagttgacattgtcccacaaggaaaaagtgatgccagtaaagtgggggaagagatggtaaataattctagaatgagcaaaagtgcttaattagtacagtatactcaaggtcttgcataacccacactccacgaaaaccgcatcgtaaacagagagtgaacagcacctctccattgctacatctccagaatattgttcggttatgttcatgtggttatggagcaataagaatatataccattaatttttaggtctttcaaattgttcaccaagttttgtgtttgatatttatgaagtgatctttaacacatctgcattgttaatttaagcatgcacagaaatttgggtaatgtttgagtagattgccaagcgctactgtgattcatgaatgaatttctcatagtcttctgcctgcagttttatagtttgaggggcacccatatttgtgggttagagttagtaagaatatgaatccagttatcaaagtattcatccctgaggttttgagttttattgtggtggtgattttctcatgagaaggtagacaacacttcagtttttcttgagggggaaaaaatgtacccgctaaccttttttcacccatgatttgagccctaaaacaacagcctttatgttttcagtgcaggatttcttggaatttcttgcttgtatcaatcctgatgatagccatcctgaacagatgcttctggtctgttttcctggaatagcagacatccttttgaacactaatgatgccaggaagagagtaaggctagaggaggagactcattttaaccccagtccagtggcttgtccgacaacaggccatttccctttacattcctccacagacagaaatggctattaaaaatgttttaacctcatgtatgaactgaatttaaaaaaccactaaagtgatactttatacttctgttttactccctagtgggttttctttaatttggatttttgttgggatgtagcttttcctagactgtatttctgtagctctttttctctggtgtattcatggaaagcatctactgccgcacgacactagtactgtgccttctttcactgccctctgctctgcagctctcacccagcttggctgcttcaagtctgtgcagttgacttggctgtactgaaaagtgaacagcatggattaactcatcctgctgctgagggcagtgcaaacaggtgcttattagaggtagtgacttgcttaattagtgacactcctaatttctactatggataatttcaaagtagaatcactctatgcttagagttttggcaccaatgctgtagggcagcagaatctattctcagtaaaataacttatggtttattagatattctgtattggattttaccagcttgacttttactgctcagatgctttctttcccccccttagacgctgtaattctcttgggaagagtaactattcttaaggtttttacagatacccaccttagttgtaaattggatagtttatatttctgggactttttaaatgaaaatgtggaatgttaagttacaaaagacttttcatcagaaaatttcaaacaaagtaaacatggcgttttatagtcctctaaaatctaggtgctcccacccaccaaaggcatatcctgcaaagggctgtgaactatcttggtgaactgtcttgggtcccctttccatgtatgttttcttgtcactgaaaacaaacaacgctgagtttatcaagaaaatttaaattgggggatcataataattccaaccaagtgacaactctgacatcaaggttattaggagctgtacatccaattcaagttttatttgctgctattctgggagaataaacttgtatatggagaataaactaataaacttgtatcgaggaaatccataaagttataaattagcctgaaaaatatttcaggtaatggtgtggattggcctgctttgactctcagccaccaacagaaatctttgtcacctttgttcctcagctaaaagtaattttgttataaacacaaagtgactttaaacaggtaaaaaacccattcctatttttgtacattaccaaaagtttttcatatacctacagagctaactaattacaactgatttaatccactcaagtttagaccagttaaacccataggatcctgtatggttatcaatgtgatgccttgcttttcataaaataggtataattgggtcatacacttgacgagagggtgactgtttctaggggaagaaaaccctttagattgcaggtaactttcacttttttttttttaatatacactttacatttgtataaattatgcagggtactcctaaccctgtagaaatgtatgacctctcacaaagttgagatttgatccaaagagaaatgcaagtataaaagaattagatacttattatcttttaaggtttttttttttttttggtagagatgggggtctcactgtgttgcccaggctggtctcaaactcctggccacaagtgatcttcctgcctcagcctcccaaaatgctgagattacaggcatgagccactgtacccagcctttccttataaaattcaaagagaaaatttctacacctttatccctcaaataaaacaagtgctcagttcttaccgtgcccttgcaaggtctatatgtaaaagaaatctgaaatttagctgtagaataaaacttgataaataaaaagaaaaaacatacatttctccagttggtttgctctttgcttgttgaagtaataaaccgttttaaagagaaaatacttgctgtaaacccccagtgccttcaactcttttggcagaatatttttaaagaaatccagcaagcaaactttgaggtgctaatgaaagtaaaggaaggtggtatttctagttttggcagaaatgaaaagtgtctcacaagagacatcactacccacgtggggtctggctgctttctaccaaagacatttagagaagtgaattgagtcagggtgatggtgaacactacatattttatagatggttaagttgagaattaattatgtttatcatggatggctactaataccaagctcatgattgttgcagcctcaacgtcttaggcagtaaaacttgtctgcagcactaaagggggagaaacccttatattttgcaaactgtccattcgttaaatttattgtaacctaataccaaaaactgccgtttttcatattatttccccacctcctacttttttttttttttttgctacttgtaaaataaccccttctagaaaataagcattaactggaatgtttcaaacaattttgcttcattttactatcagccactagtgaactcttacagagatgtacatttaagataaaattagcttgtgctaagtgttttaaaaacattgtttactgttaaaggggaattgcacattatatttaactgggattgctccctccctcagttctttaaaaaacaagagtcaaggctcacaccaacttgtaggctgtgggagctttgccataggtagatacaatgtagaagtatacttttttaaagcatgaagaagacaaggaacttcattataatgtaccaggtagaggacattattattcaaaggattatgcacagctcagtgaagatgaagttacaatttttctcgcagctttgttgctattattttcttctgcataaatgtatgctcatttcattatgtgccttgctccctgattgtgcaaagctatatatatatatatatatatatagatagatagatagatatatgagagagatatattcagtactactgaggatgtttttctgaggatgtttttgttctgctggattaagttattttccaagttactcttgccagttatgtcagtaaactattgtaatggcttagcacactagtcgtacagtcagtgtaaatgtttttcatttacatgttttcattatatcagcttatcaaatccttaataaaaaaaattcatagatttcatttaaacatggggactttgagtgtttgtggatcggcaccattaagaatctggttttgcatttcatgtcagggtacccaaaacataggccatacacagaagaaattaagtgtggtaaataaactagtttgatatgttcaa

SEQ ID NO: 174108 - DNA, 3909 bp, Homo sapiens
  Payload ID: 14179
  Gene Symbol: RAPH1
  Gene Name: Ras association (RalGDS/AF-6) and pleckstrin homology domains 1
  ENST ID: ENST00000374493
  CDS Start-End: 1-3909
atggagcagctatcagatgaagaaattgatcatggtgctgaagaagacagtgacaaggaagatcaggacctggacaaaatgtttggagcctggcttggagaactagacaaactcactcagagtttggattctgacaagcccatggaaccagtaaaaagatctcctcttcgccaggaaacaaacatggccaacttttcttaccgcttctccatatacaacttgaatgaagctctgaatcagggagagactgtggatctggatgccttgatggctgatctttgctctatagagcaggagctcagcagcattggttcaggaaacagtaagcgtcaaatcacagaaacgaaagctactcagaaattgcctgttagccgacatacattgaaacatggcaccttgaaaggattatcttcttcatctaataggatagctaaaccttcccatgccagctactccttggacgacgtcactgcacagttagaacaggcctctttgagtatggatgaggctgctcagcaatctgtactagaagatactaaacccttagtaactaatcagcacagaagaaccgcgtcagcaggcacagtgagtgatgctgaagtacactctattagtaattcctcccattccagcatcacttccgcagcctccagcatggactctttggatattgataaagtaacacgccctcaagagctggatttgacacatcaagggcagccaattactgagcatgctatttctctgagatgttccagcaagcaggccaagcgtcatattgacttcacagaagaacaggctgagctgacacctcactcctatctggacagggaaacctcccttcttctgagaaacattgcaggaaaaccttctcatttgctgaccaaggaagaacaggcagcaaaattgaaagctgagaagatcagagttgccctagagaaaattaaagaggcacaagtgaaaaagctggtgatcagagtccacatgtctgatgacagttctaaaacaatgatggtggatgagaggcagacagtaagacaagtactggataacctgatggacaaatcccactgcggttatagtttagactggtcactggtagaaaccgtttctgaattacaaatggagagaatctttgaagaccatgaaaacttggttgaaaatcttcttaattggacaagagatagccaaaacaagcttatatttatggagcgtatagaaaaatatgcacttttcaaaaacccacagaattatcttttggggaaaaaagaaacagctgagatggcagatagaaacaaagaagtcctcttggaggaatgtttttgtggaagttctgtaactgtaccagaaattgaaggagtcctttggttgaaggatgatggcaagaagtcctggaaaaagcgttattttctcttgcgagcatctggtatctactatgttcccaaaggaaaagcaaaggtctctcgggatctggtgtgctttctccagctggatcatgtcaacgtttattatggccaggactatcggaacaaatacaaagcacctacagactattgtctggtgctgaagcatccacaaatccagaagaaatctcaatatatcaaatacctttgttgtgatgatgtgaggacactgcatcagtgggtcaatgggatccgcattgcaaagtatgggaagcagctctatatgaactaccaagaagccttgaagaggacagagtcagcctatgattggacttccttatccagctccagcattaaatcgggatccagttcttccagcatcccagagtctcagtcaaaccactccaatcagtctgatagcggagtttctgacacccagccagcaggacacgtccgttcccagagcattgtgagctccgtattctctgaagcctggaaacgaggcactcagttggaagagtccagcaaggccagaatggagtctatgaatcggccctacacttcacttgtgccccctttatccccgcaacctaagatagtcaccccctacactgcttcacagccttcaccacctctacctcctccgccacccccacctcctcctccaccaccccctccaccaccccctcctcccccactccccagccagtctgcaccttctgcaggctcagcagccccaatgttcgtcaagtacagcacaataacacggctacagaatgcgtctcagcattcaggggccctgtttaagccgccaacacccccagtgatgcagtcacagtcagtgaagcctcagatcctggtaccccccaatggagttgttccaccaccccctccccctcctccacccccaaccccaggctctgccatggcccagctaaagcctgcaccgtgtgccccatcccttccacagttcagtgccccgcctcctccactgaagatccatcaagttcagcatattactcaggtggctcccccaacaccccccccacctcctcctatccctgcacccctccctccccaagctcccccaaaaccccttgtgaccatccccgcaccaaccagcaccaagactgtggcacctgttgtgactcaagctgcaccacccacacctactcctccagtgcccccagcaaaaaagcagccagctttccctgcttcttacattccaccctctccccctacccctcctgttccagtacccccgccaacattacccaagcaacagagcttctgtgcaaaaccccctccctctccactgtcaccggtgccctcggtcgtgaagcagatagccagccagtttccaccccctccaactccccctgccatggaatctcagcccttaaagcctgtcccagcaaatgtagctccacagtcccctcctgcagtaaaagcaaagcccaagtggcagcccagctccatcccagtcccttctccggacttccctcctccccctcctgaaagcagcctggtgtttcctcctccacccccatcacctgtcccagccccaccaccaccacctccacccacagcttctcctacccctgacaaaagtggatctccaggcaaaaagaccagtaagacgtccagccctgggggaaagaaaccacccccaaccccacagcgcaactccagcattaaatccagcagtggtgcagagcaccccgagcccaagagaccctcggtggacagtctagtcagcaagtttacaccgccagcagaatcagggtctcccagcaaggagaccctaccacctcctgcagcaccccccaagcctggaaaactcaatctttctggagtcaaccttcctggagttctccaacaagggtgtgtgtcagcaaaagcccctgttctgagtgggcgtggaaaggactccgtggtggaatttccttctcctccatccgattctgattttccaccccctccacctgaaacagagcttcctctgccccccattgagattccagcagttttctcgggaaacacctctccaaaagtggcagtcgttaatcctcaaccacaacaatggtctaaaatgtcagtgaagaaggcccctccacccacacgacccaaacggaatgatagcacccgcctcactcaagctgagatttctgagcagccaacaatggccacagttgtgccacaagtgcccacctctcccaaatccagccttagtgtccagcctggattcctggctgacctcaacaggacactgcaacgaaagtccatcactcggcacggctcactctcctcccgcatgtccagagcagaaccaacagccaccatggatgatatggcattgcctccaccaccccctgaactgctgtctgatcaacagaaggctggttacggaggcagtcatatatcaggctatgcaacgttgcggagaggaccccctcctgctccccccaaaagagaccagaacaccaagctctccagagactggtag

SEQ ID NO: 174109 - DNA, 1779 bp, Homo sapiens
  Payload ID: 14179
  Gene Symbol: RAPH1
  Gene Name: Ras association (RalGDS/AF-6) and pleckstrin homology domains 1
  Uniprot ID: Q70E73
  ENST ID: ENST00000419464
  CDS Start-End: 1-1779
atggagcagctatcagatgaagaaattgatcatggtgctgaagaagacagtgacaaggaagatcaggacctggacaaaatgtttggagcctggcttggagaactagacaaactcactcagagtttggattctgacaagcccatggaaccagtaaaaagatctcctcttcgccaggaaacaaacatggccaacttttcttaccgcttctccatatacaacttgaatgaagctctgaatcagggagagactgtggatctggatgccttgatggctgatctttgctctatagagcaggagctcagcagcattggttcaggaaacagtaagcgtcaaatcacagaaacgaaagctactcagaaattgcctgttagccgacatacattgaaacatggcaccttgaaaggattatcttcttcatctaataggatagctaaaccttcccatgccagctactccttggacgacgtcactgcacagttagaacaggcctctttgagtatggatgaggctgctcagcaatctgtactagaagatactaaacccttagtaactaatcagcacagaagaaccgcgtcagcaggcacagtgagtgatgctgaagtacactctattagtaattcctcccattccagcatcacttccgcagcctccagcatggactctttggatattgataaagtaacacgccctcaagagctggatttgacacatcaagggcagccaattactgaggaagaacaggcagcaaaattgaaagctgagaagatcagagttgccctagagaaaattaaagaggcacaagtgaaaaagctggtgatcagagtccacatgtctgatgacagttctaaaacaatgatggtggatgagaggcagacagtaagacaagtactggataacctgatggacaaatcccactgcggttatagtttagactggtcactggtagaaaccgtttctgaattacaaatggagagaatctttgaagaccatgaaaacttggttgaaaatcttcttaattggacaagagatagccaaaacaagcttatatttatggagcgtatagaaaaatatgcacttttcaaaaacccacagaattatcttttggggaaaaaagaaacagctgagatggcagatagaaacaaagaagtcctcttggaggaatgtttttgtggaagttctgtaactgtaccagaaattgaaggagtcctttggttgaaggatgatggcaagaagtcctggaaaaagcgttattttctcttgcgagcatctggtatctactatgttcccaaaggaaaagcaaaggtctctcgggatctggtgtgctttctccagctggatcatgtcaacgtttattatggccaggactatcggaacaaatacaaagcacctacagactattgtctggtgctgaagcatccacaaatccagaagaaatctcaatatatcaaatacctttgttgtgatgatgtgaggacactgcatcagtgggtcaatgggatccgcattgcaaagtatgggaagcagctctatatgaactaccaagaagccttgaagaggacagagtcagcctatgattggacttccttatccagctccagcattaaatcgggatccagttcttccagcatcccagagtctcagtcaaaccactccaatcagtctgatagcggagtttctgacacccagccagcaggacacgtccgttcccagagcattgtgagctccgtattctctgaagcctggaaacgaggcactcagttggaagagtccagcaagtaa

SEQ ID NO: 174110 - DNA, 2673 bp, Homo sapiens
  Payload ID: 14179
  Gene Symbol: RAPH1
  Gene Name: Ras association (RalGDS/AF-6) and pleckstrin homology domains 1
  ENST ID: ENST00000457812
  CDS Start-End: 153-1937
gtcactgagcgcgcggcgcgggagctgctggcagtcgctgcgtctctggcgagggagcgccgcgcctggggaggaggcggaggcagcggctggaggagcgcgagcggcggtttccttgcccggggccgcgggaaggccgaccgactgccgcgatggagcagctatcagatgaagaaattgatcatggtgctgaagaagacagtgacaaggaagatcaggacctggacaaaatgtttggagcctggcttggagaactagacaaactcactcagagtttggattctgacaagcccatggaaccagtaaaaagatctcctcttcgccaggaaacaaacatggccaacttttcttaccgcttctccatatacaacttgaatgaagctctgaatcagggagagactgtggatctggatgccttgatggctgatctttgctctatagagcaggagctcagcagcattggttcaggaaacagtaagcgtcaaatcacagaaacgaaagctactcagaaattgcctgttagccgacatacattgaaacatggcaccttgaaaggattatcttcttcatctaataggatagctaaaccttcccatgccagctactccttggacgacgtcactgcacagttagaacaggcctctttgagtatggatgaggctgctcagcaatctgtactagaagatactaaacccttagtaactaatcagcacagaagaaccgcgtcagcaggcacagtgagtgatgctgaagtacactctattagtaattcctcccattccagcatcacttccgcagcctccagcatggactctttggatattgataaagtaacacgccctcaagagctggatttgacacatcaagggcagccaattactgaggaagaacaggcagcaaaattgaaagctgagaagatcagagttgccctagagaaaattaaagaggcacaagtgaaaaagctggtgatcagagtccacatgtctgatgacagttctaaaacaatgatggtggatgagaggcagacagtaagacaagtactggataacctgatggacaaatcccactgcggttatagtttagactggtcactggtagaaaccgtttctgaattacaaatggagagaatctttgaagaccatgaaaacttggttgaaaatcttcttaattggacaagagatagccaaaacaagcttatatttatggagcgtatagaaaaatatgcacttttcaaaaacccacagaattatcttttggggaaaaaagaaacagctgagatggcagatagaaacaaagaagtcctcttggaggaatgtttttgtggaagttctgtaactgtaccagaaattgaaggagtcctttggttgaaggatgatggcaagaagtcctggaaaaagcgttattttctcttgcgagcatctggtatctactatgttcccaaaggaaaagcaaaggtctctcgggatctggtgtgctttctccagctggatcatgtcaacgtttattatggccaggactatcggaacaaatacaaagcacctacagactattgtctggtgctgaagcatccacaaatccagaagaaatctcaatatatcaaatacctttgttgtgatgatgtgaggacactgcatcagtgggtcaatgggatccgcattgcaaagtatgggaagcagctctatatgaactaccaagaagccttgaagaggacagagtcagcctatgattggacttccttatccagctccagcattaaatcgggatccagttcttccagcatcccagagtctcagtcaaaccactccaatcagtctgatagcggagtttctgacacccagccagcaggacacgtccgttcccagagcattgtgagctccgtattctctgaagcctggaaacgaggcactcagttggaagagtccagcaagatcaactgaactcttaaaacttggagagaagtctgcactttgagatgtctgttctttatcaacttcctgactgctcaaagttgaatcagaacatgaggagagagaggtgaaatcagatgaggtttgggagaatagagtgaggaaaagaacttagtgcttggaaaatgagagatttacctgaagtaatctgaacagattatggtactatgaccatcacattttgcactgaggtagagaaaatacctgtaagttcgatttctttgattcacagaagctgtcctcacagggctctgctgcgagggagccatattacgggttgggctaggtacgtaatcatttggtaccactggaggacgcactggctccagtgtgcgatagggggagtgccgcctacaaaaagaagagcgtatgtattgtatgattaagcaagtttcggcacaataaattcaaagagttgccagcagttgagatacaatttgtaatcagagataggaaatgtgttttaacataacccagctaccaatttcagtctttactaatgtatcacttctccaccattagggttttggtgaatattgttatttttcagtctccaacctcatttccctgtgctaatgcaattttgttcatttattctcaaagagcacaaaggttctctaccatttaagccaatgtttcccagaccctacctcttcttagaagagttggaattcttttagtatcatattaaagtctcccaactgta

SEQ ID NO: 174111 - DNA, 1794 bp, Homo sapiens
  Payload ID: 14179
  Gene Symbol: RAPH1
  Gene Name: Ras association (RalGDS/AF-6) and pleckstrin homology domains 1
  Uniprot ID: Q70E73
  ENST ID: ENST00000418114
  CDS Start-End: 1-1794
atggagcagctatcagatgaagaaattgatcatggtgctgaagaagacagtgacaaggaagatcaggacctggacaaaatgtttggagcctggcttggagaactagacaaactcactcagagtttggattctgacaagcccatggaaccagtaaaaagatctcctcttcgccaggaaacaaacatggccaacttttcttaccgcttctccatatacaacttgaatgaagctctgaatcagggagagactgtggatctggatgccttgatggctgatctttgctctatagagcaggagctcagcagcattggttcaggaaacagtaagcgtcaaatcacagaaacgaaagctactcagaaattgcctgttagccgacatacattgaaacatggcaccttgaaaggattatcttcttcatctaataggatagctaaaccttcccatgccagctactccttggacgacgtcactgcacagttagaacaggcctctttgagtatggatgaggctgctcagcaatctgtactagaagatactaaacccttagtaactaatcagcacagaagaaccgcgtcagcaggcacagtgagtgatgctgaagtacactctattagtaattcctcccattccagcatcacttccgcagcctccagcatggactctttggatattgataaagtaacacgccctcaagagctggatttgacacatcaagggcagccaattactgaggaagaacaggcagcaaaattgaaagctgagaagatcagagttgccctagagaaaattaaagaggcacaagtgaaaaagctggtgatcagagtccacatgtctgatgacagttctaaaacaatgatggtggatgagaggcagacagtaagacaagtactggataacctgatggacaaatcccactgcggttatagtttagactggtcactggtagaaaccgtttctgaattacaaatggagagaatctttgaagaccatgaaaacttggttgaaaatcttcttaattggacaagagatagccaaaacaagcttatatttatggagcgtatagaaaaatatgcacttttcaaaaacccacagaattatcttttggggaaaaaagaaacagctgagatggcagatagaaacaaagaagtcctcttggaggaatgtttttgtggaagttctgtaactgtaccagaaattgaaggagtcctttggttgaaggatgatggcaagaagtcctggaaaaagcgttattttctcttgcgagcatctggtatctactatgttcccaaaggaaaagcaaaggtctctcgggatctggtgtgctttctccagctggatcatgtcaacgtttattatggccaggactatcggaacaaatacaaagcacctacagactattgtctggtgctgaagcatccacaaatccagaagaaatctcaatatatcaaatacctttgttgtgatgatgtgaggacactgcatcagtgggtcaatgggatccgcattgcaaagtatgggaagcagctctatatgaactaccaagaagccttgaagaggacagagtcagcctatgattggacttccttatccagctccagcattaaatcgggatccagttcttccagcatcccagagtctcagtcaaaccactccaatcagtctgatagcggagtttctgacacccagccagcaggacacgtccgttcccagagcattgtgagctccgtattctctgaagcctggaaacgaggcactcagttggaagagtccagcaaggtaacagcttcgttttaa

SEQ ID NO: 174112 - DNA, 1860 bp, Homo sapiens
  Payload ID: 14179
  Gene Symbol: RAPH1
  Gene Name: Ras association (RalGDS/AF-6) and pleckstrin homology domains 1
  Uniprot ID: Q70E73
  ENST ID: ENST00000423104
  CDS Start-End: 1-1860
atggagcagctatcagatgaagaaattgatcatggtgctgaagaagacagtgacaaggaagatcaggacctggacaaaatgtttggagcctggcttggagaactagacaaactcactcagagtttggattctgacaagcccatggaaccagtaaaaagatctcctcttcgccaggaaacaaacatggccaacttttcttaccgcttctccatatacaacttgaatgaagctctgaatcagggagagactgtggatctggatgccttgatggctgatctttgctctatagagcaggagctcagcagcattggttcaggaaacagtaagcgtcaaatcacagaaacgaaagctactcagaaattgcctgttagccgacatacattgaaacatggcaccttgaaaggattatcttcttcatctaataggatagctaaaccttcccatgccagctactccttggacgacgtcactgcacagttagaacaggcctctttgagtatggatgaggctgctcagcaatctgtactagaagatactaaacccttagtaactaatcagcacagaagaaccgcgtcagcaggcacagtgagtgatgctgaagtacactctattagtaattcctcccattccagcatcacttccgcagcctccagcatggactctttggatattgataaagtaacacgccctcaagagctggatttgacacatcaagggcagccaattactgagcatgctatttctctgagatgttccagcaagcaggccaagcgtcatattgacttcacagaagaacaggctgagctgacacctgaagaacaggcagcaaaattgaaagctgagaagatcagagttgccctagagaaaattaaagaggcacaagtgaaaaagctggtgatcagagtccacatgtctgatgacagttctaaaacaatgatggtggatgagaggcagacagtaagacaagtactggataacctgatggacaaatcccactgcggttatagtttagactggtcactggtagaaaccgtttctgaattacaaatggagagaatctttgaagaccatgaaaacttggttgaaaatcttcttaattggacaagagatagccaaaacaagcttatatttatggagcgtatagaaaaatatgcacttttcaaaaacccacagaattatcttttggggaaaaaagaaacagctgagatggcagatagaaacaaagaagtcctcttggaggaatgtttttgtggaagttctgtaactgtaccagaaattgaaggagtcctttggttgaaggatgatggcaagaagtcctggaaaaagcgttattttctcttgcgagcatctggtatctactatgttcccaaaggaaaagcaaaggtctctcgggatctggtgtgctttctccagctggatcatgtcaacgtttattatggccaggactatcggaacaaatacaaagcacctacagactattgtctggtgctgaagcatccacaaatccagaagaaatctcaatatatcaaatacctttgttgtgatgatgtgaggacactgcatcagtgggtcaatgggatccgcattgcaaagtatgggaagcagctctatatgaactaccaagaagccttgaagaggacagagtcagcctatgattggacttccttatccagctccagcattaaatcgggatccagttcttccagcatcccagagtctcagtcaaaccactccaatcagtctgatagcggagtttctgacacccagccagcaggacacgtccgttcccagagcattgtgagctccgtattctctgaagcctggaaacgaggcactcagttggaagagtccagcaagtaa

SEQ ID NO: 174113 - DNA, 2394 bp, Homo sapiens
  Payload ID: 14179
  Gene Symbol: RAPH1
  Gene Name: Ras association (RalGDS/AF-6) and pleckstrin homology domains 1
  Uniprot ID: Q70E73
  ENST ID: ENST00000453034
  CDS Start-End: 226-2175
gcggccgccccgcccccgctcccgccgccgcccgccagtcagtcagtcagtcagtcagtcagtcagtcagtcagtcactgagcgcgcggcgcgggagctgctggcagtcgctgcgtctctggcgagggagcgccgcgcctggggaggaggcggaggcagcggctggaggagcgcgagcggcggtttccttgcccggggccgcgggaaggccgaccgactgccgcgatggagcagctatcagatgaagaaattgatcatggtgctgaagaagacagtgacaaggaagatcaggacctggacaaaatgtttggagcctggcttggagaactagacaaactcactcagagtttggattctgacaagcccatggaaccagtaaaaagatctcctcttcgccaggaaacaaacatggccaacttttcttaccgcttctccatatacaacttgaatgaagctctgaatcagggagagactgtggatctggatgccttgatggctgatctttgctctatagagcaggagctcagcagcattggttcaggaaacagtaagcgtcaaatcacagaaacgaaagctactcagaaattgcctgttagccgacatacattgaaacatggcaccttgaaaggattatcttcttcatctaataggatagctaaaccttcccatgccagctactccttggacgacgtcactgcacagttagaacaggcctctttgagtatggatgaggctgctcagcaatctgtactagaagatactaaacccttagtaactaatcagcacagaagaaccgcgtcagcaggcacagtgagtgatgctgaagtacactctattagtaattcctcccattccagcatcacttccgcagcctccagcatggactctttggatattgataaagtaacacgccctcaagagctggatttgacacatcaagggcagccaattactgagcatgctatttctctgagatgttccagcaagcaggccaagcgtcatattgacttcacagaagaacaggctgagctgacacctcactcctatctggacagggaaacctcccttcttctgagaaacattgcaggaaaaccttctcatttgctgaccaaggaagaacaggcagcaaaattgaaagctgagaagatcagagttgccctagagaaaattaaagaggcacaagtgaaaaagctggtgatcagagtccacatgtctgatgacagttctaaaacaatgatggtggatgagaggcagacagtaagacaagtactggataacctgatggacaaatcccactgcggttatagtttagactggtcactggtagaaaccgtttctgaattacaaatggagagaatctttgaagaccatgaaaacttggttgaaaatcttcttaattggacaagagatagccaaaacaagcttatatttatggagcgtatagaaaaatatgcacttttcaaaaacccacagaattatcttttggggaaaaaagaaacagctgagatggcagatagaaacaaagaagtcctcttggaggaatgtttttgtggaagttctgtaactgtaccagaaattgaaggagtcctttggttgaaggatgatggcaagaagtcctggaaaaagcgttattttctcttgcgagcatctggtatctactatgttcccaaaggaaaagcaaaggtctctcgggatctggtgtgctttctccagctggatcatgtcaacgtttattatggccaggactatcggaacaaatacaaagcacctacagactattgtctggtgctgaagcatccacaaatccagaagaaatctcaatatatcaaatacctttgttgtgatgatgtgaggacactgcatcagtgggtcaatgggatccgcattgcaaagtatgggaagcagctctatatgaactaccaagaagccttgaagaggacagagtcagcctatgattggacttccttatccagctccagcattaaatcgggatccagttcttccagcatcccagagtctcagtcaaaccactccaatcagtctgatagcggagtttctgacacccagccagcaggacacgtccgttcccagagcattgtgagctccgtattctctgaagcctggaaacgaggcactcagttggaagagtccagcaaggtaacagcttcgttttaatttacattgaaaattctgtggtattcttttgggtttaaattgttgctctcttatgtctttatcggggatcttatttggccttatttcagtctcctttattaattttcaatcttcctaattgtagtgggtaaagacagttcagagagacctgttgatttgacttccccttggaaatgagtattttacaaattggctctaatgacttaaaatctcaaaaaa

SEQ ID NO: 174114 - DNA, 1854 bp, Homo sapiens
  Payload ID: 14179
  Gene Symbol: RAPH1
  Gene Name: Ras association (RalGDS/AF-6) and pleckstrin homology domains 1
  Uniprot ID: Q70E73
  ENST ID: ENST00000439222
  CDS Start-End: 1-1854
atggagcagctatcagatgaagaaattgatcatggtgctgaagaagacagtgacaaggaagatcaggacctggacaaaatgtttggagcctggcttggagaactagacaaactcactcagagtttggattctgacaagcccatggaaccagtaaaaagatctcctcttcgccaggaaacaaacatggccaacttttcttaccgcttctccatatacaacttgaatgaagctctgaatcagggagagactgtggatctggatgccttgatggctgatctttgctctatagagcaggagctcagcagcattggttcaggaaacagtaagcgtcaaatcacagaaacgaaagctactcagaaattgcctgttagccgacatacattgaaacatggcaccttgaaaggattatcttcttcatctaataggatagctaaaccttcccatgccagctactccttggacgacgtcactgcacagttagaacaggcctctttgagtatggatgaggctgctcagcaatctgtactagaagatactaaacccttagtaactaatcagcacagaagaaccgcgtcagcaggcacagtgagtgatgctgaagtacactctattagtaattcctcccattccagcatcacttccgcagcctccagcatggactctttggatattgataaagtaacacgccctcaagagctggatttgacacatcaagggcagccaattactgagcactcctatctggacagggaaacctcccttcttctgagaaacattgcaggaaaaccttctcatttgctgaccaaggaagaacaggcagcaaaattgaaagctgagaagatcagagttgccctagagaaaattaaagaggcacaagtgaaaaagctggtgatcagagtccacatgtctgatgacagttctaaaacaatgatggtggatgagaggcagacagtaagacaagtactggataacctgatggacaaatcccactgcggttatagtttagactggtcactggtagaaaccgtttctgaattacaaatggagagaatctttgaagaccatgaaaacttggttgaaaatcttcttaattggacaagagatagccaaaacaagcttatatttatggagcgtatagaaaaatatgcacttttcaaaaacccacagaattatcttttggggaaaaaagaaacagctgagatggcagatagaaacaaagaagtcctcttggaggaatgtttttgtggaagttctgtaactgtaccagaaattgaaggagtcctttggttgaaggatgatggcaagaagtcctggaaaaagcgttattttctcttgcgagcatctggtatctactatgttcccaaaggaaaagcaaaggtctctcgggatctggtgtgctttctccagctggatcatgtcaacgtttattatggccaggactatcggaacaaatacaaagcacctacagactattgtctggtgctgaagcatccacaaatccagaagaaatctcaatatatcaaatacctttgttgtgatgatgtgaggacactgcatcagtgggtcaatgggatccgcattgcaaagtatgggaagcagctctatatgaactaccaagaagccttgaagaggacagagtcagcctatgattggacttccttatccagctccagcattaaatcgggatccagttcttccagcatcccagagtctcagtcaaaccactccaatcagtctgatagcggagtttctgacacccagccagcaggacacgtccgttcccagagcattgtgagctccgtattctctgaagcctggaaacgaggcactcagttggaagagtccagcaagtaa

SEQ ID NO: 174115 - DNA, 492 bp, Homo sapiens
  Payload ID: 14179
  Gene Symbol: RAPH1
  Gene Name: Ras association (RalGDS/AF-6) and pleckstrin homology domains 1
  ENST ID: ENST00000420371
  CDS Start-End: 226-492
gcggccgccccgcccccgctcccgccgccgcccgccagtcagtcagtcagtcagtcagtcagtcagtcagtcagtcactgagcgcgcggcgcgggagctgctggcagtcgctgcgtctctggcgagggagcgccgcgcctggggaggaggcggaggcagcggctggaggagcgcgagcggcggtttccttgcccggggccgcgggaaggccgaccgactgccgcgatggagcagctatcagatgaagaaattgatcatggtgctgaagaagacagtgacaaggaagatcaggacctggacaaaatgtttggagcctggcttggagaactagacaaactcactcagagtttggattctgacaagcccatggaaccagtaaaaagatctcctcttcgccaggaaacaaacatggccaacttttcttaccgcttctccatatacaacttgaatgctctgaatcagggagagactgtggatctggatgccttgatg

SEQ ID NO: 174116 - DNA, 585 bp, Homo sapiens
  Payload ID: 14179
  Gene Symbol: RAPH1
  Gene Name: Ras association (RalGDS/AF-6) and pleckstrin homology domains 1
  ENST ID: ENST00000428637
  CDS Start-End: 70-585
aaagattgtctccgttattttgctttttgtgtggtgaatttcccagaaaccagatgcagccctactcaaatggagcagctatcagatgaagaaattgatcatggtgctgaagaagacagtgacaaggaagatcaggacctggacaaaatgtttggagcctggcttggagaactagacaaactcactcagagtttggattctgacaagcccatggaaccagtaaaaagatctcctcttcgccaggaaacaaacatggccaacttttcttaccgcttctccatatacaacttgaatgaagctctgaatcagggagagactgtggatctggatgccttgatggctgatctttgctctatagagcaggagctcagcagcattggttcaggaaacagtaagcgtcaaatcacagaaacgaaagctactcagaaattgcctgttagccgacatacattgaaacatggcaccttgaaaggattatcttcttcatctaataggatagctaaaccttcccatgccagctactccttggacgacgtcactgcacagttagaacaggcctctttgagtatggatgaggctgctcag

SEQ ID NO: 174117 - DNA, 4134 bp, Homo sapiens
  Payload ID: 14179
  Gene Symbol: RAPH1
  Gene Name: Ras association (RalGDS/AF-6) and pleckstrin homology domains 1
  ENST ID: ENST00000630330
  CDS Start-End: 226-4134
gcggccgccccgcccccgctcccgccgccgcccgccagtcagtcagtcagtcagtcagtcagtcagtcagtcagtcactgagcgcgcggcgcgggagctgctggcagtcgctgcgtctctggcgagggagcgccgcgcctggggaggaggcggaggcagcggctggaggagcgcgagcggcggtttccttgcccggggccgcgggaaggccgaccgactgccgcgatggagcagctatcagatgaagaaattgatcatggtgctgaagaagacagtgacaaggaagatcaggacctggacaaaatgtttggagcctggcttggagaactagacaaactcactcagagtttggattctgacaagcccatggaaccagtaaaaagatctcctcttcgccaggaaacaaacatggccaacttttcttaccgcttctccatatacaacttgaatgaagctctgaatcagggagagactgtggatctggatgccttgatggctgatctttgctctatagagcaggagctcagcagcattggttcaggaaacagtaagcgtcaaatcacagaaacgaaagctactcagaaattgcctgttagccgacatacattgaaacatggcaccttgaaaggattatcttcttcatctaataggatagctaaaccttcccatgccagctactccttggacgacgtcactgcacagttagaacaggcctctttgagtatggatgaggctgctcagcaatctgtactagaagatactaaacccttagtaactaatcagcacagaagaaccgcgtcagcaggcacagtgagtgatgctgaagtacactctattagtaattcctcccattccagcatcacttccgcagcctccagcatggactctttggatattgataaagtaacacgccctcaagagctggatttgacacatcaagggcagccaattactgagcatgctatttctctgagatgttccagcaagcaggccaagcgtcatattgacttcacagaagaacaggctgagctgacacctcactcctatctggacagggaaacctcccttcttctgagaaacattgcaggaaaaccttctcatttgctgaccaaggaagaacaggcagcaaaattgaaagctgagaagatcagagttgccctagagaaaattaaagaggcacaagtgaaaaagctggtgatcagagtccacatgtctgatgacagttctaaaacaatgatggtggatgagaggcagacagtaagacaagtactggataacctgatggacaaatcccactgcggttatagtttagactggtcactggtagaaaccgtttctgaattacaaatggagagaatctttgaagaccatgaaaacttggttgaaaatcttcttaattggacaagagatagccaaaacaagcttatatttatggagcgtatagaaaaatatgcacttttcaaaaacccacagaattatcttttggggaaaaaagaaacagctgagatggcagatagaaacaaagaagtcctcttggaggaatgtttttgtggaagttctgtaactgtaccagaaattgaaggagtcctttggttgaaggatgatggcaagaagtcctggaaaaagcgttattttctcttgcgagcatctggtatctactatgttcccaaaggaaaagcaaaggtctctcgggatctggtgtgctttctccagctggatcatgtcaacgtttattatggccaggactatcggaacaaatacaaagcacctacagactattgtctggtgctgaagcatccacaaatccagaagaaatctcaatatatcaaatacctttgttgtgatgatgtgaggacactgcatcagtgggtcaatgggatccgcattgcaaagtatgggaagcagctctatatgaactaccaagaagccttgaagaggacagagtcagcctatgattggacttccttatccagctccagcattaaatcgggatccagttcttccagcatcccagagtctcagtcaaaccactccaatcagtctgatagcggagtttctgacacccagccagcaggacacgtccgttcccagagcattgtgagctccgtattctctgaagcctggaaacgaggcactcagttggaagagtccagcaaggccagaatggagtctatgaatcggccctacacttcacttgtgccccctttatccccgcaacctaagatagtcaccccctacactgcttcacagccttcaccacctctacctcctccgccacccccacctcctcctccaccaccccctccaccaccccctcctcccccactccccagccagtctgcaccttctgcaggctcagcagccccaatgttcgtcaagtacagcacaataacacggctacagaatgcgtctcagcattcaggggccctgtttaagccgccaacacccccagtgatgcagtcacagtcagtgaagcctcagatcctggtaccccccaatggagttgttccaccaccccctccccctcctccacccccaaccccaggctctgccatggcccagctaaagcctgcaccgtgtgccccatcccttccacagttcagtgccccgcctcctccactgaagatccatcaagttcagcatattactcaggtggctcccccaacaccccccccacctcctcctatccctgcacccctccctccccaagctcccccaaaaccccttgtgaccatccccgcaccaaccagcaccaagactgtggcacctgttgtgactcaagctgcaccacccacacctactcctccagtgcccccagcaaaaaagcagccagctttccctgcttcttacattccaccctctccccctacccctcctgttccagtacccccgccaacattacccaagcaacagagcttctgtgcaaaaccccctccctctccactgtcaccggtgccctcggtcgtgaagcagatagccagccagtttccaccccctccaactccccctgccatggaatctcagcccttaaagcctgtcccagcaaatgtagctccacagtcccctcctgcagtaaaagcaaagcccaagtggcagcccagctccatcccagtcccttctccggacttccctcctccccctcctgaaagcagcctggtgtttcctcctccacccccatcacctgtcccagccccaccaccaccacctccacccacagcttctcctacccctgacaaaagtggatctccaggcaaaaagaccagtaagacgtccagccctgggggaaagaaaccacccccaaccccacagcgcaactccagcattaaatccagcagtggtgcagagcaccccgagcccaagagaccctcggtggacagtctagtcagcaagtttacaccgccagcagaatcagggtctcccagcaaggagaccctaccacctcctgcagcaccccccaagcctggaaaactcaatctttctggagtcaaccttcctggagttctccaacaagggtgtgtgtcagcaaaagcccctgttctgagtgggcgtggaaaggactccgtggtggaatttccttctcctccatccgattctgattttccaccccctccacctgaaacagagcttcctctgccccccattgagattccagcagttttctcgggaaacacctctccaaaagtggcagtcgttaatcctcaaccacaacaatggtctaaaatgtcagtgaagaaggcccctccacccacacgacccaaacggaatgatagcacccgcctcactcaagctgagatttctgagcagccaacaatggccacagttgtgccacaagtgcccacctctcccaaatccagccttagtgtccagcctggattcctggctgacctcaacaggacactgcaacgaaagtccatcactcggcacggctcactctcctcccgcatgtccagagcagaaccaacagccaccatggatgatatggcattgcctccaccaccccctgaactgctgtctgatcaacagaaggctggttacggaggcagtcatatatcaggctatgcaacgttgcggagaggaccccctcctgctccccccaaaagagaccagaacaccaagctctccagagactggtag

SEQ ID NO: 174118 - DNA, 2530 bp, Homo sapiens
  Payload ID: 14180
  Gene Symbol: RASSF10
  Gene Name: Ras association (RalGDS/AF-6) domain family (N-terminal) member 10
  Uniprot ID: A6NK89
  ENST ID: ENST00000529419
  CDS Start-End: 1-1524
atggatccttcggaaaagaagatatcggtgtggatctgccaggaagagaagctggtgtccggcctctcccgccgcaccacttgctccgacgttgtgcgagtgcttttggaggacggctgccggcggcgacggagacagcggcggagccggcggctggggtcggccggcgacccgcatggcccgggagagctgcccgaacccccgaacgaggacgacgaggacgacgacgaggcgctgccgcagggcatgctgtgcgggcccccgcagtgctattgcatcgtggagaagtggcgcggctttgagcgcatcctccccaacaagacgcgcatcttgcgcctctgggctgcctggggcgaagagcaagagaatgtgcgcttcgtgctagtgcgcagcgaggcatcgctgcctaacgccggcccccgcagcgccgaggcgcgcgtagtgctgagccgagagcgcccctgtccggcccgcggggccccggcgcggcccagcctggccatgacccaggagaaacagcggcgagtggtgcgcaaggcctttcgcaaactggccaagctcaaccggcggcgccagcagcagacaccgtcgtcctgttcgtccacttcgtcgtccactgcctcgtcctgctcttcgtcgccgcggacccacgagagcgcgtcggtggagcgcatggagacgctggtgcatctggtgctttcccaggaccacacaattcgccagcaggtgcagcggctccacgagctggaccgcgagatcgatcactacgaggccaaggtgcacctggaccgcatgcggcgtcacggggtcaactacgtgcaggacacttacttggttggggcaggcatcgagctcgacgggtccagaccgggagaggagccagaagaggtggcggcggaggcggaggaggcggcggcggcgccccctctagccggcgaggcgcaggcggcggcgctggaggagctggcccggcgctgcgacgacttgctgcggcttcaggagcaacgggttcagcaggaggagttgctggagcgcctttcagccgagattcaggaggaactcaaccagaggtggatgcgacggcgccaggaggagctggcggcgcgggaggagcccctggagcccgacggtggccccgacggcgagctgctgctggagcaggaacgggtcaggacgcagctcagtaccagcctttacattgggctgcggctcaacacggacctagaggccgtcaagtcggacttggattacagccagcagcaatgggacagcaagaagcgcgagctacagggccttctgcaaactttgcacactttggagctgacggtggcaccggatggggctcctggctctggcagtccctcgcgggaacctgggcctcaagcctgcgccgacatgtgggtggaccaggcccgtggactggccaagagcggtcctggcaacgacgaagactcggatacgggactgagctctatgcatagccaagactcggactccttgcccatgtgcgaatcccttgtgtaggggtggggggcggggggcggggggcgggaacagggggattcttttttcttgcagaatgcagtgggccagccggctcgcggacttgaaaccaggctgttgcgagcccagagctccggctgggcagcagcgctctgcgcagcctcgcgctcatctggctccggggtgagtgcagagcagggtgagggtagaagaagtaggatcctcaatacaagctcattaaagagagggaaggagggaggaggcaagaaccccctatactggaaaacaaacaacccaaggaaattgacgtggtccgagcccattttcaaagtaaggaagtataatggagatttcgctactcttctgtatgggaaggactgatggcagctagaactttagtttgtggtatgaagtgctttaaaagaaacacttggatgaaaaggaaattccttgaatgttaattgtgactgtaaacgtgttaaaactagccaaagaggacgcactggtgtcggtctctgcctttcttacctctttgataaaacccataggcaccaaaatcctggctgtttacatttctgcagatttgggaattacccatctgctaaatcatttgtcttttattttctttcaaaggctaaactgtatcgaagtctaaccctgtatttcctcctagtaaacacaatagatgttaaaagggaattcttttcccaaaataaccttttattattacaaaagccaaacataatcatttgagatataaaatcctggcaaacataatcgtggttaaaatttaatctgggccctttgggatctgtcccttcaaaggcaggtgagttgccctttaattcgtattgccacttcattgactcaatcactgttatttcagaaaaaaataaaaggaagtagcagaattcaagttacgcaaaacaaaacttgctgtctaacaagcactctttgaaagcaaagatgttttagtgttcagcttttaaattgagctatgtgattaaaaccaaccatgaccttaacg

SEQ ID NO: 174119 - DNA, 1731 bp, Homo sapiens
  Payload ID: 14181
  Gene Symbol: RASSF7
  Gene Name: Ras association (RalGDS/AF-6) domain family (N-terminal) member 7
  Uniprot ID: Q02833
  ENST ID: ENST00000397582
  CDS Start-End: 86-1099
ggcccgggtgcgccgcggcgctgggggcggcaggttgcggcggcgccggagcgggtctccaggctggcgagcgcccaggacaggcatgttgttgggactggcggccatggagctgaaggtgtgggtggatggcatccagcgtgtggtctgtggggtctcagagcagaccacctgccaggaagtggtcatcgcactagcccaagcaataggccagactggccgctttgtgcttgtgcagcggcttcgggagaaggagcggcagttgctgccacaagagtgtccagtgggcgcccaggccacctgcggacagtttgccagcgatgtccagtttgtcctgaggcgcacagggcccagcctagctgggaggccctcctcagacagctgtccacccccggaacgctgcctaattcgtgccagcctccctgtaaagccacgggctgcgctgggctgtgagccccgcaaaacactgacccccgagccagcccccagcctctcacgccctgggcctgcggcccctgtgacacccacaccaggctgctgcacagacctgcggggcctggagctcagggtgcagaggaatgctgaggagctgggccatgaggccttctgggagcaagagctgcgccgggagcaggcccgggagcgagagggacaggcacgcctgcaggcactaagtgcggccactgctgagcatgccgcccggctgcaggccctggacgctcaggcccgtgccctggaggctgagctgcagctggcagcggaggcccctgggcccccctcacctatggcatctgccactgagcgcctgcaccaggacctggctgttcaggagcggcagagtgcggaggtgcagggcagcctggctctggtgagccgggccctggaggcagcagagcgagccttgcaggctcaggctcaggagctggaggagctgaaccgagagctccgtcagtgcaacctgcagcagttcatccagcagaccggggctgcgctgccaccgcccccacggcctgacaggggccctcctggcactcaggtcggagtggttctggggggaggctgggaggtgaggacctggcccagccccactccaagctgacttcccaacccacagggccctctgcctccagccagagaggagtccctcctgggcgctccctctgagtcccatgctggtgcccagcctaggccccgagggtatgtctgtgccccacctccccctggggcaccgggccctcctgtggctgcagccacctcagcctgtgtcctcccgcagtggcccccatgacgcagaactcctggaggtagcagcagctcctgccccagagtggtgtcctctggcagcccagccccaggctctgtgacagcctagtgagggctgcaagaccatcctgcccggaccacagaaggagagttggcggtcacagagggctcctctgccaggcagtgggaagccctgggtttggcctcaggagctgggggtgcagtgggggactgccctagtccttgccaggtcgccagcaccctggagaagcatggggcgtagccagctcggaacttgccaggccccaaaggccacgactgcctgttggggacaggagatgcatggacagtgtgctcaagctgtgggcatgtgcttgcctgcgggagaggtccttcactgtgtgtacacagcaagagcatgtgtgtgccacttcccctaccccaacgtgaaaacctcaataaactgcc

SEQ ID NO: 174120 - DNA, 1928 bp, Homo sapiens
  Payload ID: 14181
  Gene Symbol: RASSF7
  Gene Name: Ras association (RalGDS/AF-6) domain family (N-terminal) member 7
  Uniprot ID: Q02833
  ENST ID: ENST00000397583
  CDS Start-End: 434-1555
ccggtacttgggagcgcggggcgcgcctcgagccggccggacgccgactccaactggggagagttttccgcgatgcccggacggagagcgggggcggcgccgcacctgcgcccgccctgcggaacggggacgccctggctcccgccaggctggggtcgcggcgcgggcttcggtgcccgcggcggggaccgggactttcggggcgagcgcagcgattaggcggcagcggcggggctccccgggctggcgggggctgctcagacccggagtctgctccatctgcagggtcgaggtctgggttgcgaccccgagcgcctctgcggcctgagcaggtcggggtggggcgttcccatgccggcggccgcggggcctggcgtgcgggcgcctccgcgccgcccggggagggggcagtgtcctccgagccaggacaggcatgttgttgggactggcggccatggagctgaaggtgtgggtggatggcatccagcgtgtggtctgtggggtctcagagcagaccacctgccaggaagtggtcatcgcactagcccaagcaataggccagactggccgctttgtgcttgtgcagcggcttcgggagaaggagcggcagttgctgccacaagagtgtccagtgggcgcccaggccacctgcggacagtttgccagcgatgtccagtttgtcctgaggcgcacagggcccagcctagctgggaggccctcctcagacagctgtccacccccggaacgctgcctaattcgtgccagcctccctgtaaagccacgggctgcgctgggctgtgagccccgcaaaacactgacccccgagccagcccccagcctctcacgccctgggcctgcggcccctgtgacacccacaccaggctgctgcacagacctgcggggcctggagctcagggtgcagaggaatgctgaggagctgggccatgaggccttctgggagcaagagctgcgccgggagcaggcccgggagcgagagggacaggcacgcctgcaggcactaagtgcggccactgctgagcatgccgcccggctgcaggccctggacgctcaggcccgtgccctggaggctgagctgcagctggcagcggaggcccctgggcccccctcacctatggcatctgccactgagcgcctgcaccaggacctggctgttcaggagcggcagagtgcggaggtgcagggcagcctggctctggtgagccgggccctggaggcagcagagcgagccttgcaggctcaggctcaggagctggaggagctgaaccgagagctccgtcagtgcaacctgcagcagttcatccagcagaccggggctgcgctgccaccgcccccacggcctgacaggggccctcctggcactcagggccctctgcctccagccagagaggagtccctcctgggcgctccctctgagtcccatgctggtgcccagcctaggccccgaggtggcccccatgacgcagaactcctggaggtagcagcagctcctgccccagagtggtgtcctctggcagcccagccccaggctctgtgacagcctagtgagggctgcaagaccatcctgcccggaccacagaaggagagttggcggtcacagagggctcctctgccaggcagtgggaagccctgggtttggcctcaggagctgggggtgcagtgggggactgccctagtccttgccaggtcgccagcaccctggagaagcatggggcgtagccagctcggaacttgccaggccccaaaggccacgactgcctgttggggacaggagatgcatggacagtgtgctcaagctgtgggcatgtgcttgcctgcgggagaggtccttcactgtgtgtacacagcaagagcatgtgtgtgccacttcccctaccccaacgtgaaaacctcaataaactgcccgaagc

SEQ ID NO: 174121 - DNA, 1745 bp, Homo sapiens
  Payload ID: 14181
  Gene Symbol: RASSF7
  Gene Name: Ras association (RalGDS/AF-6) domain family (N-terminal) member 7
  Uniprot ID: Q02833
  ENST ID: ENST00000431809
  CDS Start-End: 119-1132
tcccgcaccaggactctgcgcccgccagctccgcagggctccacctccctcgccgggactggtgaccctgcgaccccgcgacccctgcgcgtccagactactgcagctgcggacaggcatgttgttgggactggcggccatggagctgaaggtgtgggtggatggcatccagcgtgtggtctgtggggtctcagagcagaccacctgccaggaagtggtcatcgcactagcccaagcaataggccagactggccgctttgtgcttgtgcagcggcttcgggagaaggagcggcagttgctgccacaagagtgtccagtgggcgcccaggccacctgcggacagtttgccagcgatgtccagtttgtcctgaggcgcacagggcccagcctagctgggaggccctcctcagacagctgtccacccccggaacgctgcctaattcgtgccagcctccctgtaaagccacgggctgcgctgggctgtgagccccgcaaaacactgacccccgagccagcccccagcctctcacgccctgggcctgcggcccctgtgacacccacaccaggctgctgcacagacctgcggggcctggagctcagggtgcagaggaatgctgaggagctgggccatgaggccttctgggagcaagagctgcgccgggagcaggcccgggagcgagagggacaggcacgcctgcaggcactaagtgcggccactgctgagcatgccgcccggctgcaggccctggacgctcaggcccgtgccctggaggctgagctgcagctggcagcggaggcccctgggcccccctcacctatggcatctgccactgagcgcctgcaccaggacctggctgttcaggagcggcagagtgcggaggtgcagggcagcctggctctggtgagccgggccctggaggcagcagagcgagccttgcaggctcaggctcaggagctggaggagctgaaccgagagctccgtcagtgcaacctgcagcagttcatccagcagaccggggctgcgctgccaccgcccccacggcctgacaggggccctcctggcactcaggtcggagtggttctggggggaggctgggaggtgaggacctggcccagccccactccaagctgacttcccaacccacagggccctctgcctccagccagagaggagtccctcctgggcgctccctctgagtcccatgctggtgcccagcctaggccccgagggtatgtctgtgccccacctccccctggggcaccgggccctcctgtggctgcagccacctcagcctgtgtcctcccgcagtggcccccatgacgcagaactcctggaggtagcagcagctcctgccccagagtggtgtcctctggcagcccagccccaggctctgtgacagcctagtgagggctgcaagaccatcctgcccggaccacagaaggagagttggcggtcacagagggctcctctgccaggcagtgggaagccctgggtttggcctcaggagctgggggtgcagtgggggactgccctagtccttgccaggtcgccagcaccctggagaagcatggggcgtagccagctcggaacttgccaggccccaaaggccacgactgcctgttggggacaggagatgcatggacagtgtgctcaagctgtgggcatgtgcttgcctgcgggagaggtccttcactgtgtgtacacagcaagagcatgtgtgtgccacttcccctaccccaacgtg

SEQ ID NO: 174122 - DNA, 1450 bp, Homo sapiens
  Payload ID: 14181
  Gene Symbol: RASSF7
  Gene Name: Ras association (RalGDS/AF-6) domain family (N-terminal) member 7
  Uniprot ID: Q02833
  ENST ID: ENST00000454668
  CDS Start-End: 36-998
ggggagggggcagtgtcctccgagccaggacaggcatgttgttgggactggcggccatggagctgaaggtgtgggtggatggcatccagcgtgtggtctgtggggtctcagagcagaccacctgccaggaagtggtcatcgcactagcccaagcaataggccagactggccgctttgtgcttgtgcagcggcttcgggagaaggagcggcagttgctgccacaagagtgtccagtgggcgcccaggccacctgcggacagtttgccagcgatgtccagtttgtcctgaggcgcacagggcccagcctagctgggaggccctcctcagacagctgtccacccccggaacgctgcctaattcgtgccagcctccctgtaaagccacgggctgcgctgggctgtgagccccgcaaaacactgacccccgagccagcccccagcctctcacgccctgggcctgcggcccctgtgacacccacaccaggctgctgcacagacctgcggggcctggagctcagggtgcagaggaatgctgaggagctgggccatgaggccttctgggagcaagagctgcgccgggagcaggcccgggagcgagagggacaggcacgcctgcaggcactaagtgcggccactgctgagcatgccgcccggctgcaggccctggacgctcaggcccgtgccctggaggctgagctgcagctggcagcggaggcccctgggcccccctcacctatggcatctgccactgagcgcctgcaccaggacctggctgttcaggagcggcagagtgcggaggtgcagggcagcctggctctggtgagccgggccctggaggcagcagagcgagccttgcaggctcaggctcaggagctggaggagctgaaccgagagctccgtcagtgcaacctgcagcagttcatccagcagaccggggctgcgctgccaccgcccccacggcctgacaggggccctcctggcactcagtggcccccatgacgcagaactcctggaggtagcagcagctcctgccccagagtggtgtcctctggcagcccagccccaggctctgtgacagcctagtgagggctgcaagaccatcctgcccggaccacagaaggagagttggcggtcacagagggctcctctgccaggcagtgggaagccctgggtttggcctcaggagctgggggtgcagtgggggactgccctagtccttgccaggtcgccagcaccctggagaagcatggggcgtagccagctcggaacttgccaggccccaaaggccacgactgcctgttggggacaggagatgcatggacagtgtgctcaagctgtgggcatgtgcttgcctgcgggagaggtccttcactgtgtgtacacagcaagagcatgtgtgtgccacttcccctaccccaacgtgaaaacctcaataaactgcccgaagcagc

SEQ ID NO: 174123 - DNA, 1679 bp, Homo sapiens
  Payload ID: 14181
  Gene Symbol: RASSF7
  Gene Name: Ras association (RalGDS/AF-6) domain family (N-terminal) member 7
  ENST ID: ENST00000414138
  CDS Start-End: 71-433
cggcgctgggggcggcaggttgcggcggcgccggagcgggtctccaggctggcgagcgcccaggacaggcatgttgttgggactggcggccatggagctgaaggtgtgggtggatggcatccagcgtgtggtctgtggggtctcagagcagaccacctgccaggaagtggtcatcgcactagcccaagcaatagactggccgctttgtgcttgtgcagcggcttcgggagaaggagcggcagttgctgccacaagagtgtccagtgggcgcccaggccacctgcggacagtttgccagcgatgtccagtttgtcctgaggcgcacagggcccagcctagctgggaggccctcctcagacagctgtccacccccggaacgctgcctaattcgtgccagcctccctgtaaagccacgggctgcgctgggctgtgagccccgcaaaacactgacccccgagccagcccccagcctctcacgccctgggcctgcggcccctgtgacacccacaccaggctgctgcacagacctgcggggcctggagctcagggtgcagaggaatgctgaggagctgggccatgaggccttctgggagcaagagctgcgccgggagcaggcccgggagcgagagggacaggcacgcctgcaggcactaagtgcggccactgctgagcatgccgcccggctgcaggccctggacgctcaggcccgtgccctggaggctgagctgcagctggcagcggaggcccctgggcccccctcacctatggcatctgccactgagcgcctgcaccaggacctggctgttcaggagcggcagagtgcggaggtgcagggcagcctggctctggtgagccgggccctggaggcagcagagcgagccttgcaggctcaggctcaggagctggaggagctgaaccgagagctccgtcagtgcaacctgcagcagttcatccagcagaccggggctgcgctgccaccgcccccacggcctgacaggggccctcctggcactcaggtcggagtggttctggggggaggctgggaggtgaggacctggcccagccccactccaagctgacttcccaacccacagggccctctgcctccagccagagaggagtccctcctgggcgctccctctgagtcccatgctggtgcccagcctaggccccgagggtatgtctgtgccccacctccccctggggcaccgggccctcctgtggctgcagccacctcagcctgtgtcctcccgcagtggcccccatgacgcagaactcctggaggtagcagcagctcctgccccagagtggtgtcctctggcagcccagccccaggctctgtgacagcctagtgagggctgcaagaccatcctgcccggaccacagaaggagagttggcggtcacagagggctcctctgccaggcagtgggaagccctgggtttggcctcaggagctgggggtgcagtgggggactgccctagtccttgccaggtcgccagcaccctggagaagcatggggcgtagccagctcggaacttgccaggccccaaaggccacgactgcctgttggggacaggagatgcatggacagtgtgctcaagctgtgggcatgtgcttgcctgcgggagaggtccttcactgtgtgtacacagcaagagcatgtgtgtgccacttccc

SEQ ID NO: 174124 - DNA, 473 bp, Homo sapiens
  Payload ID: 14181
  Gene Symbol: RASSF7
  Gene Name: Ras association (RalGDS/AF-6) domain family (N-terminal) member 7
  ENST ID: ENST00000528736
  CDS Start-End: 223-473
aggaagctggtgaagtgggggaggatgcgtgctccggagggccgccaccccaggaatgtgtggctggcgggtggggctggcacaggagggtggggcccgtgcggaggggcggcagcccagccgtttctagggcaggccaagaggatgaggagaggaggaccagcctgcgataggagtaggcaggtcctgacccggtgcctgcgccctccccacaggacaggcatgttgttgggactggcggccatggagctgaaggtgtgggtggatggcatccagcgtgtggtctgtggggtctcagagcagaccacctgccaggaagtggtcatcgcactagcccaagcaataggccagactggccgctttgtgcttgtgcagcggcttcgggagaaggagcggcagttgctgccacaagagtgtccagtgggcgcccaggccacctgcggacagtttgccagcgatgtccagtttgtcct

SEQ ID NO: 174125 - DNA, 810 bp, Homo sapiens
  Payload ID: 14181
  Gene Symbol: RASSF7
  Gene Name: Ras association (RalGDS/AF-6) domain family (N-terminal) member 7
  ENST ID: ENST00000531112
  CDS Start-End: 1-584
ctgtgacacccacaccaggctgctgcacagacctgcggggcctggagctcagggtgcagaggaatgctgaggagctgggccatgaggccttctgggagcaagagctgcgccgggagcaggcccgggagcgagagggacaggcacgcctgcaggcactaagtgcggccactgctgagcatgccgcccggctgcaggccctggacgctcaggcccgtgccctggaggctgagctgcagctggcagcggaggcccctgggcccccctcacctatggcatctgccactgagcgcctgcaccaggacctggctgttcaggagcggcagagtgcggaggtgcagggcagcctggctctggtgagccgggccctggaggcagcagagcgagccttgcaggctcaggctcaggagctggaggagctgaaccgagagctccgtcagtgcaacctgcagcagttcatccagcagaccggggctgcgctgccaccgcccccacggcctgacaggggccctcctggcactcaggtcggagtggttctggggggaggctgggaggtgaggacctggcccagccccactccaagctgacttcccaacccacagggccctctgcctccagccagagaggagtccctcctgggcgctccctctgagtcccatgctggtgcccagcctaggccccgaggtggcccccatgacgcagaactcctggaggtagcagcagctcctgccccagagtggtgtcctctggcagcccagccccaggctctgtgacagcctagtgagggctgcaagaccatcctgcccggaccac

SEQ ID NO: 174126 - DNA, 1731 bp, Homo sapiens
  Payload ID: 14181
  Gene Symbol: RASSF7
  Gene Name: Ras association (RalGDS/AF-6) domain family (N-terminal) member 7
  ENST ID: ENST00000620201
  CDS Start-End: 86-1099
ggcccgggtgcgccgcggcgctgggggcggcaggttgcggcggcgccggagcgggtctccaggctggcgagcgcccaggacaggcatgttgttgggactggcggccatggagctgaaggtgtgggtggatggcatccagcgtgtggtctgtggggtctcagagcagaccacctgccaggaagtggtcatcgcactagcccaagcaataggccagactggccgctttgtgcttgtgcagcggcttcgggagaaggagcggcagttgctgccacaagagtgtccagtgggcgcccaggccacctgcggacagtttgccagcgatgtccagtttgtcctgaggcgcacaggggccagcctagctgggaggccctcctcagacagctgtccacccccggaacgctgcctaattcgtgccagcctccctgtaaagccacgggctgcgctgggctgtgagccccgcaaaacactgacccccgagccagcccccagcctctcacgccctgggcctgcggcccctgtgacacccacaccaggctgctgcacagacctgcggggcctggagctcagggtgcagaggaatgctgaggagctgggccatgaggccttctgggagcaagagctgcgccgggagcaggcccgggagcgagagggacaggcacgcctgcaggcactaagtgcggccactgctgagcatgccgcccggctgcaggccctggacgctcaggcccgtgccctggaggctgagctgcagctggcagcggaggcccctgggcccccctcacctatggcatctgccactgagcgcctgcaccaggacctggctgttcaggagcggcagagtgcggaggtgcagggcagcctggctctggtgagccgggccctggaggcagcagagcgagccttgcaggctcaggctcaggagctggaggagctgaaccgagagctccgtcagtgcaacctgcagcagttcatccagcagaccggggctgcgctgccaccgcccccacggcctgacaggggccctcctggcactcaggtcggagtggttctggggggaggctgggaggtgaggacctggcccagccccactccaagctgacttcccaacccacagggccctctgcctccagccagagaggagtccctcctgggcgctccctctgagtcccatgctggtgcccagcctaggccccgagggtatgtctgtgccccacctccccctggggcaccgggccctcctgtggctgcagccacctcagcctgtgtcctcccgcagtggcccccatgacgcagaactcctggaggtagcagcagctcctgccccagagtggtgtcctctggcagcccagccccaggctctgtgacagcctagtgagggctgcaagaccatcctgcccggaccacagaaggagagttggcggtcacagagggctcctctgccaggcagtgggaagccctgggtttggcctcaggagctgggggtgcagtgggggactgccctagtccttgccaggtcgccagcaccctggagaagcatggggcgtagccagctcggaacttgccaggccccaaaggccacgactgcctgttggggacaggagatgcatggacagtgtgctcaagctgtgggcatgtgcttgcctgcgggagaggtccttcactgtgtgtacacagcaagagcatgtgtgtgccacttcccctaccccaacgtgaaaacctcaataaactgcc

SEQ ID NO: 174127 - DNA, 1450 bp, Homo sapiens
  Payload ID: 14181
  Gene Symbol: RASSF7
  Gene Name: Ras association (RalGDS/AF-6) domain family (N-terminal) member 7
  Uniprot ID: Q02833
  ENST ID: ENST00000622905
  CDS Start-End: 36-998
ggggagggggcagtgtcctccgagccaggacaggcatgttgttgggactggcggccatggagctgaaggtgtgggtggatggcatccagcgtgtggtctgtggggtctcagagcagaccacctgccaggaagtggtcatcgcactagcccaagcaataggccagactggccgctttgtgcttgtgcagcggcttcgggagaaggagcggcagttgctgccacaagagtgtccagtgggcgcccaggccacctgcggacagtttgccagcgatgtccagtttgtcctgaggcgcacaggggccagcctagctgggaggccctcctcagacagctgtccacccccggaacgctgcctaattcgtgccagcctccctgtaaagccacgggctgcgctgggctgtgagccccgcaaaacactgacccccgagccagcccccagcctctcacgccctgggcctgcggcccctgtgacacccacaccaggctgctgcacagacctgcggggcctggagctcagggtgcagaggaatgctgaggagctgggccatgaggccttctgggagcaagagctgcgccgggagcaggcccgggagcgagagggacaggcacgcctgcaggcactaagtgcggccactgctgagcatgccgcccggctgcaggccctggacgctcaggcccgtgccctggaggctgagctgcagctggcagcggaggcccctgggcccccctcacctatggcatctgccactgagcgcctgcaccaggacctggctgttcaggagcggcagagtgcggaggtgcagggcagcctggctctggtgagccgggccctggaggcagcagagcgagccttgcaggctcaggctcaggagctggaggagctgaaccgagagctccgtcagtgcaacctgcagcagttcatccagcagaccggggctgcgctgccaccgcccccacggcctgacaggggccctcctggcactcagtggcccccatgacgcagaactcctggaggtagcagcagctcctgccccagagtggtgtcctctggcagcccagccccaggctctgtgacagcctagtgagggctgcaagaccatcctgcccggaccacagaaggagagttggcggtcacagagggctcctctgccaggcagtgggaagccctgggtttggcctcaggagctgggggtgcagtgggggactgccctagtccttgccaggtcgccagcaccctggagaagcatggggcgtagccagctcggaacttgccaggccccaaaggccacgactgcctgttggggacaggagatgcatggacagtgtgctcaagctgtgggcatgtgcttgcctgcgggagaggtccttcactgtgtgtacacagcaagagcatgtgtgtgccacttcccctaccccaacgtgaaaacctcaataaactgcccgaagcagc

SEQ ID NO: 174128 - DNA, 1928 bp, Homo sapiens
  Payload ID: 14181
  Gene Symbol: RASSF7
  Gene Name: Ras association (RalGDS/AF-6) domain family (N-terminal) member 7
  ENST ID: ENST00000622100
  CDS Start-End: 434-1555
ccggtacttgggagcgcggggcgcgcctcgagccggccggacgccgactccaactggggagagttttccgcgatgcccggacggagagcgggggcggcgccgcacctgcgcccgccctgcggaacggggacgccctggctcccgccaggctggggtcgcggcgcgggcttcggtgcccgcggcggggaccgggactttcggggcgagcgcagcgattaggcggcagcggcggggctccccgggctggcgggggctgctcagacccggagtctgctccatctgcagggtcgaggtctgggttgcgaccccgagcgcctctgcggcctgagcaggtcggggtggggcgttcccatgccggcggccgcggggcctggcgtgcgggcgcctccgcgccgcccggggagggggcagtgtcctccgagccaggacaggcatgttgttgggactggcggccatggagctgaaggtgtgggtggatggcatccagcgtgtggtctgtggggtctcagagcagaccacctgccaggaagtggtcatcgcactagcccaagcaataggccagactggccgctttgtgcttgtgcagcggcttcgggagaaggagcggcagttgctgccacaagagtgtccagtgggcgcccaggccacctgcggacagtttgccagcgatgtccagtttgtcctgaggcgcacaggggccagcctagctgggaggccctcctcagacagctgtccacccccggaacgctgcctaattcgtgccagcctccctgtaaagccacgggctgcgctgggctgtgagccccgcaaaacactgacccccgagccagcccccagcctctcacgccctgggcctgcggcccctgtgacacccacaccaggctgctgcacagacctgcggggcctggagctcagggtgcagaggaatgctgaggagctgggccatgaggccttctgggagcaagagctgcgccgggagcaggcccgggagcgagagggacaggcacgcctgcaggcactaagtgcggccactgctgagcatgccgcccggctgcaggccctggacgctcaggcccgtgccctggaggctgagctgcagctggcagcggaggcccctgggcccccctcacctatggcatctgccactgagcgcctgcaccaggacctggctgttcaggagcggcagagtgcggaggtgcagggcagcctggctctggtgagccgggccctggaggcagcagagcgagccttgcaggctcaggctcaggagctggaggagctgaaccgagagctccgtcagtgcaacctgcagcagttcatccagcagaccggggctgcgctgccaccgcccccacggcctgacaggggccctcctggcactcagggccctctgcctccagccagagaggagtccctcctgggcgctccctctgagtcccatgctggtgcccagcctaggccccgaggtggcccccatgacgcagaactcctggaggtagcagcagctcctgccccagagtggtgtcctctggcagcccagccccaggctctgtgacagcctagtgagggctgcaagaccatcctgcccggaccacagaaggagagttggcggtcacagagggctcctctgccaggcagtgggaagccctgggtttggcctcaggagctgggggtgcagtgggggactgccctagtccttgccaggtcgccagcaccctggagaagcatggggcgtagccagctcggaacttgccaggccccaaaggccacgactgcctgttggggacaggagatgcatggacagtgtgctcaagctgtgggcatgtgcttgcctgcgggagaggtccttcactgtgtgtacacagcaagagcatgtgtgtgccacttcccctaccccaacgtgaaaacctcaataaactgcccgaagc

SEQ ID NO: 174129 - DNA, 1745 bp, Homo sapiens
  Payload ID: 14181
  Gene Symbol: RASSF7
  Gene Name: Ras association (RalGDS/AF-6) domain family (N-terminal) member 7
  ENST ID: ENST00000631421
  CDS Start-End: 119-1132
tcccgcaccaggactctgcgcccgccagctccgcagggctccacctccctcgccgggactggtgaccctgcgaccccgcgacccctgcgcgtccagactactgcagctgcggacaggcatgttgttgggactggcggccatggagctgaaggtgtgggtggatggcatccagcgtgtggtctgtggggtctcagagcagaccacctgccaggaagtggtcatcgcactagcccaagcaataggccagactggccgctttgtgcttgtgcagcggcttcgggagaaggagcggcagttgctgccacaagagtgtccagtgggcgcccaggccacctgcggacagtttgccagcgatgtccagtttgtcctgaggcgcacaggggccagcctagctgggaggccctcctcagacagctgtccacccccggaacgctgcctaattcgtgccagcctccctgtaaagccacgggctgcgctgggctgtgagccccgcaaaacactgacccccgagccagcccccagcctctcacgccctgggcctgcggcccctgtgacacccacaccaggctgctgcacagacctgcggggcctggagctcagggtgcagaggaatgctgaggagctgggccatgaggccttctgggagcaagagctgcgccgggagcaggcccgggagcgagagggacaggcacgcctgcaggcactaagtgcggccactgctgagcatgccgcccggctgcaggccctggacgctcaggcccgtgccctggaggctgagctgcagctggcagcggaggcccctgggcccccctcacctatggcatctgccactgagcgcctgcaccaggacctggctgttcaggagcggcagagtgcggaggtgcagggcagcctggctctggtgagccgggccctggaggcagcagagcgagccttgcaggctcaggctcaggagctggaggagctgaaccgagagctccgtcagtgcaacctgcagcagttcatccagcagaccggggctgcgctgccaccgcccccacggcctgacaggggccctcctggcactcaggtcggagtggttctggggggaggctgggaggtgaggacctggcccagccccactccaagctgacttcccaacccacagggccctctgcctccagccagagaggagtccctcctgggcgctccctctgagtcccatgctggtgcccagcctaggccccgagggtatgtctgtgccccacctccccctggggcaccgggccctcctgtggctgcagccacctcagcctgtgtcctcccgcagtggcccccatgacgcagaactcctggaggtagcagcagctcctgccccagagtggtgtcctctggcagcccagccccaggctctgtgacagcctagtgagggctgcaagaccatcctgcccggaccacagaaggagagttggcggtcacagagggctcctctgccaggcagtgggaagccctgggtttggcctcaggagctgggggtgcagtgggggactgccctagtccttgccaggtcgccagcaccctggagaagcatggggcgtagccagctcggaacttgccaggccccaaaggccacgactgcctgttggggacaggagatgcatggacagtgtgctcaagctgtgggcatgtgcttgcctgcgggagaggtccttcactgtgtgtacacagcaagagcatgtgtgtgccacttcccctaccccaacgtg

SEQ ID NO: 174130 - DNA, 473 bp, Homo sapiens; identical to SEQ ID NO: 174124
  Payload ID: 14181
  Gene Symbol: RASSF7
  Gene Name: Ras association (RalGDS/AF-6) domain family (N-terminal) member 7
  ENST ID: ENST00000633903
  CDS Start-End: 223-473

SEQ ID NO: 174131 - DNA, 810 bp, Homo sapiens; identical to SEQ ID NO: 174125
  Payload ID: 14181
  Gene Symbol: RASSF7
  Gene Name: Ras association (RalGDS/AF-6) domain family (N-terminal) member 7
  ENST ID: ENST00000632833
  CDS Start-End: 1-584

SEQ ID NO: 174132 - DNA, 1679 bp, Homo sapiens
  Payload ID: 14181
  Gene Symbol: RASSF7
  Gene Name: Ras association (RalGDS/AF-6) domain family (N-terminal) member 7
  ENST ID: ENST00000632673
  CDS Start-End: 71-433
cggcgctgggggcggcaggttgcggcggcgccggagcgggtctccaggctggcgagcgcccaggacaggcatgttgttgggactggcggccatggagctgaaggtgtgggtggatggcatccagcgtgtggtctgtggggtctcagagcagaccacctgccaggaagtggtcatcgcactagcccaagcaatagactggccgctttgtgcttgtgcagcggcttcgggagaaggagcggcagttgctgccacaagagtgtccagtgggcgcccaggccacctgcggacagtttgccagcgatgtccagtttgtcctgaggcgcacaggggccagcctagctgggaggccctcctcagacagctgtccacccccggaacgctgcctaattcgtgccagcctccctgtaaagccacgggctgcgctgggctgtgagccccgcaaaacactgacccccgagccagcccccagcctctcacgccctgggcctgcggcccctgtgacacccacaccaggctgctgcacagacctgcggggcctggagctcagggtgcagaggaatgctgaggagctgggccatgaggccttctgggagcaagagctgcgccgggagcaggcccgggagcgagagggacaggcacgcctgcaggcactaagtgcggccactgctgagcatgccgcccggctgcaggccctggacgctcaggcccgtgccctggaggctgagctgcagctggcagcggaggcccctgggcccccctcacctatggcatctgccactgagcgcctgcaccaggacctggctgttcaggagcggcagagtgcggaggtgcagggcagcctggctctggtgagccgggccctggaggcagcagagcgagccttgcaggctcaggctcaggagctggaggagctgaaccgagagctccgtcagtgcaacctgcagcagttcatccagcagaccggggctgcgctgccaccgcccccacggcctgacaggggccctcctggcactcaggtcggagtggttctggggggaggctgggaggtgaggacctggcccagccccactccaagctgacttcccaacccacagggccctctgcctccagccagagaggagtccctcctgggcgctccctctgagtcccatgctggtgcccagcctaggccccgagggtatgtctgtgccccacctccccctggggcaccgggccctcctgtggctgcagccacctcagcctgtgtcctcccgcagtggcccccatgacgcagaactcctggaggtagcagcagctcctgccccagagtggtgtcctctggcagcccagccccaggctctgtgacagcctagtgagggctgcaagaccatcctgcccggaccacagaaggagagttggcggtcacagagggctcctctgccaggcagtgggaagccctgggtttggcctcaggagctgggggtgcagtgggggactgccctagtccttgccaggtcgccagcaccctggagaagcatggggcgtagccagctcggaacttgccaggccccaaaggccacgactgcctgttggggacaggagatgcatggacagtgtgctcaagctgtgggcatgtgcttgcctgcgggagaggtccttcactgtgtgtacacagcaagagcatgtgtgtgccacttccc

SEQ ID NO: 174133 - DNA, 1994 bp, Homo sapiens
  Payload ID: 14182
  Gene Symbol: RASSF8
  Gene Name: Ras association (RalGDS/AF-6) domain family (N-terminal) member 8
  Uniprot ID: Q8NHQ8
  ENST ID: ENST00000282884
  CDS Start-End: 542-1801
agtctgaacgatgaccaatccaccacacgcacctacagtgtaggtcttccattttactctctagtctggttctggggctgggcatagaactgttggagttgatataaagatcagggttacagctcctagagtggagtattttgggctgagacgatggggttttccagatattggatcatgtcatctgcaaagaaagacaacttgacttcctctcctcccatttgactacactttatttctttctcttgcctgattgccctggcctgaatttccaatactatgttgaattaatgactcaatatatgactaaaagttcaaagtgaaacaatgataattcagataggaaaatatgtggcagtatgctaaagtctaaaaaggaatataaaacgtctgtgagatacctaacatcagatttatagaaacagaatagaatctgactacacagacttagtcttctccactccgtgttcctgcagctagagacatgacctaacaccctgatgaccactctcagggaccttgagtgactggccggtgcaccatggaacttaaagtatgggtggatggagttcagaggattgtttgtggagtcactgaagtcacaacttgccaggaggttgtcatagccttagctcaagcaataggtcgaactggaaggtacacccttatagagaaatggagagatactgaaagacacttagcacctcatgaaaatcctatcatatccttaaacaaatgggggcagtatgctagtgatgtgcagctcattctacgacgaactgggccgtctctcagtgagcgacccacttcagacagtgtggctcgaattcctgaaagaactttatacaggcagagtctgccccccttagctaaactgaggcctcagattgacaaatcaatcaaaaggagggaaccgaaaaggaaatcactgacatttacaggaggtgccaaaggattaatggacatttttggaaaaggtaaagaaactgagtttaagcaaaaggtgctgaataactgcaaaacaacagcagatgagttgaagaagctaatccgtctgcagacagagaagcttcaatccattgagaaacagctggaatctaatgaaatagaaataagattttgggagcaaaagtataattccaaccttgaagaggaaattgtccgtctagagcaaaagatcaaaagaaacgatgtagaaattgaggaggaagaattctgggaaaatgaattacagattgaacaggaaaatgaaaaacagctgaaggatcaacttcaagaaataagacagaaaataacagaatgtgaaaacaaattaaaggactatttggcacagatccggactatggaaagtggtcttgaagcagaaaaattgcaacgggaagttcaagaggcacaggtcaatgaggaagaggttaaaggaaagatcggtaaggtcaaaggggagattgacattcaaggccagcagagtctgaggttggaaaatggcatcaaagctgtggaaagatctcttggacaagccaccaaacgcttacaggacaaagaacaggaactggagcagttgactaaggagttgcggcaagtcaatctccagcagttcatccagcagacagggacaaaagttaccgttttgccagcggagcccattgaaatagaggcctcacatgcagacattgaaagggaggcaccattccagtctgggtccctgaagcgacctggttcatctcggcagctccccagtaatctccgcattctgcagaatcctatctcatctggttttaatcctgaaggcatatatgtatgacattatctgtctttagggaggagacccaacagaggtaccaaggacagtaaacttcctttttgatttgtgccaatgatgaacagaggatctattccacaagacgctgtatgttttttctctcctaaattgcataccacttggagccataccctgtgcactgatgctaaagaacaaagaaactgtgttttcacac

SEQ ID NO: 174134 - DNA, 2320 bp, Homo sapiens
  Payload ID: 14182
  Gene Symbol: RASSF8
  Gene Name: Ras association (RalGDS/AF-6) domain family (N-terminal) member 8
  Uniprot ID: Q8NHQ8
  ENST ID: ENST00000381352
  CDS Start-End: 323-1501
ggggagtgcggcgcggggacgggcgctgggcggccgcggagctccgggtgccgccgcgtccccagcgccccggccggcccctctgggcggcctgcgggggcggcgcagttgcgaaactgagtgcctgtgtagatcatcctagaatacctgtgtggtgctgtccttcctcaagactacctcattctcactggctcggagactcctgcctgctgagctgactacacagacttagtcttctccactccgtgttcctgcagctagagacatgacctaacaccctgatgaccactctcagggaccttgagtgactggccggtgcaccatggaacttaaagtatgggtggatggagttcagaggattgtttgtggagtcactgaagtcacaacttgccaggaggttgtcatagccttagctcaagcaataggtcgaactggaaggtacacccttatagagaaatggagagatactgaaagacacttagcacctcatgaaaatcctatcatatccttaaacaaatgggggcagtatgctagtgatgtgcagctcattctacgacgaactgggccgtctctcagtgagcgacccacttcagacagtgtggctcgaattcctgaaagaactttatacaggcagagtctgccccccttagctaaactgaggcctcagattgacaaatcaatcaaaaggagggaaccgaaaaggaaatcactgacatttacaggaggtgccaaaggattaatggacatttttggaaaaggtaaagaaactgagtttaagcaaaaggtgctgaataactgcaaaacaacagcagatgagttgaagaagctaatccgtctgcagacagagaagcttcaatccattgagaaacagctggaatctaatgaaatagaaataagattttgggagcaaaagtataattccaaccttgaagaggaaattgtccgtctagagcaaaagatcaaaagaaacgatgtagaaattgaggaggaagaattctgggaaaatgaattacagattgaacaggaaaatgaaaaacagctgaaggatcaacttcaagaaataagacagaaaataacagaatgtgaaaacaaattaaaggactatttggcacagatccggactatggaaagtggtcttgaagcagaaaaattgcaacgggaagttcaagaggcacaggtcaatgaggaagaggttaaaggaaagatcggtaaggtcaaaggggagattgacattcaaggccagcagagtctgaggttggaaaatggcatcaaagctgtggaaagatctcttggacaagccaccaaacgcttacaggacaaagaacaggaactggagcagttgactaaggagttgcggcaagtcaatctccagcagttcatccagcagacagggacaaaagttaccgttttgccagcggagcccattgaaatagaggcctcacatgcagacattgaaagggggatcatcattctttctgataagcaggagtgtaaagattagatatcacaccaaaagctcaggcaagaaaagcaaaaatgaacaagtgggactacattaaacccaaaactcctgcacaacaaaggaaacgatcaccaaaatgaaaaggtggactgtagattgggagaaaatatttgcaaaccgttatctggtaagggtttaatatccaaactatataaggaactcacagaacttaaagaaaacaaataatccaattaaaaatggtcaaaggggctgggcatggtggctcacgcctgtaatctcagcactttgggaggccgaggtgggagaatcacaaggtcaggagactgagaccatcctggctaacaccatgatgggctaacacccatctctactaaaaatatgaaacattagccaggtgtggtggcacgcgcctgtaatcccagctactcgggaggctgaggcagaaggattgtttgaacccgggaggtggaggttgcagtgagccgagatcgcattactgcactccagcctgggtaacagagtgagactccatctcaaaaaaaaaaaaaatagatatttttccaaagaagacataaaaacagccaacaggtatatgaaaaagtgctcaacatcactgatcagcagggaaatgcaaatcaaagccacaatgagataccacctcacacctgttaggttacatctgctattgtcaaaaagataagagatagcaagtgtcagcaagggtctggagaaaagggaatttttgtatactgttggtgggaatgtaaatcagtacagctattgtggaaaacagtgtagaggtttctcaaaaaattaaaactatcatacaacccagca

SEQ ID NO: 174135 - DNA, 5510 bp, Homo sapiens
  Payload ID: 14182
  Gene Symbol: RASSF8
  Gene Name: Ras association (RalGDS/AF-6) domain family (N-terminal) member 8
  Uniprot ID: Q8NHQ8
  ENST ID: ENST00000405154
  CDS Start-End: 200-1459
gcggccgcggagctccgggtgccgccgcgtccccagcgccccggccggcccctctgggcggcctgcgggggcggcgcagttgcgaaactgactgactacacagacttagtcttctccactccgtgttcctgcagctagagacatgacctaacaccctgatgaccactctcagggaccttgagtgactggccggtgcaccatggaacttaaagtatgggtggatggagttcagaggattgtttgtggagtcactgaagtcacaacttgccaggaggttgtcatagccttagctcaagcaataggtcgaactggaaggtacacccttatagagaaatggagagatactgaaagacacttagcacctcatgaaaatcctatcatatccttaaacaaatgggggcagtatgctagtgatgtgcagctcattctacgacgaactgggccgtctctcagtgagcgacccacttcagacagtgtggctcgaattcctgaaagaactttatacaggcagagtctgccccccttagctaaactgaggcctcagattgacaaatcaatcaaaaggagggaaccgaaaaggaaatcactgacatttacaggaggtgccaaaggattaatggacatttttggaaaaggtaaagaaactgagtttaagcaaaaggtgctgaataactgcaaaacaacagcagatgagttgaagaagctaatccgtctgcagacagagaagcttcaatccattgagaaacagctggaatctaatgaaatagaaataagattttgggagcaaaagtataattccaaccttgaagaggaaattgtccgtctagagcaaaagatcaaaagaaacgatgtagaaattgaggaggaagaattctgggaaaatgaattacagattgaacaggaaaatgaaaaacagctgaaggatcaacttcaagaaataagacagaaaataacagaatgtgaaaacaaattaaaggactatttggcacagatccggactatggaaagtggtcttgaagcagaaaaattgcaacgggaagttcaagaggcacaggtcaatgaggaagaggttaaaggaaagatcggtaaggtcaaaggggagattgacattcaaggccagcagagtctgaggttggaaaatggcatcaaagctgtggaaagatctcttggacaagccaccaaacgcttacaggacaaagaacaggaactggagcagttgactaaggagttgcggcaagtcaatctccagcagttcatccagcagacagggacaaaagttaccgttttgccagcggagcccattgaaatagaggcctcacatgcagacattgaaagggaggcaccattccagtctgggtccctgaagcgacctggttcatctcggcagctccccagtaatctccgcattctgcagaatcctatctcatctggttttaatcctgaaggcatatatgtatgacattatctgtctttagggaggagacccaacagaggtaccaaggacagtaaacttcctttttgatttgtgccaatgatgaacagaggatctattccacaagacgctgtatgttttttctctcctaaattgcataccacttggagccataccctgtgcactgatgctaaagaacaaagaaactgtgttttcacacatcaacagtgttgatatttttgtccagcagctataatgcaaagccttcgtttttatttgtagcattttgagagctttaggaaagtattatatagtgtgtatacataaataagccgtgacttaagtaagagtgaagagaaatttgtgactggcttagtttaatttatttcatgtaatcaatgtgtgaatgttgatgttttaatatttttattgacttatcctgtgactgacttacgttacatattgtgtgattatgaccgtgtgcatgttgccagactccatccatgcattgctgatttacactacacaagtgtcctagggtgctccaccatcgaagctaactccacaggaagccacttgcatttgttttgtgaaactgtcctagccattgcttaattaggtgaaataattcagggttttttaaatctggaatttagtcgttcctttacaatatttccaaatatacgtgtggccacagagcataacagatatttttcataagctaaattgtatgtataaaacatttgcagtgtttcagacactgttgaacaaaaatgtaattggtaagtatgtatccaaacaggcatggggtttcctgatacattatgtgttttgtttctgccctgtcttatcatttacactcatggatcttcagaattaatctaacatggaagttatagatacctgaaagctgggttggtctacttcaggaacattgctttaagtgatgtattttaaaataacccgcttcatatgtatgatctgttggtgtacacaccatgggtaaggtattgcttgcacataatttgctctgcatattatggaccattgtggtttcttccagtcacttagatggaaaggaggttaaacctaggtactttttagcaaggatataaagtcaaattcagcatatgtttttatttttaggcttgacttttacaagacattaatctccatttgtacatatgttattttatttgtaaaaccaaatatgactcaacacctttttgatgagtagtgacttaactaagatttacaagtaatatttagacagattcagtcagacaccacttagccatttttacattccctctggttagatttggtacagtataattaagactttaatctgaaatttaaagtagttttaattctgaagaagttacatcctctgtattatttacatgcaacaaaataaaagtggattaatatagtaatgccatggtaacaatagagctatgtcttatgcatgaaggcaactttggatgttttaacacatttgactgactttggtttagtgaatgctgacaatgctgctctacttaggtttcctatgaaatttttaagaatggctatgagactgtatagaagcttctagagaactgaaagtcataatgcagagttgccttttctagtgcagctaagtggcggacctcaactgaagatatgagtttctttgggttcttggagttatcaaattgatcttgccattatgttactttgcaaataactgaagtaaatgattcttacctaaataaccacaacctgtacacatttgctcacaatttatagtagttattttctatctacctatatttaaaattaggatgattaaaaaataatttatagattttgtgacagtaatgatttacatatgcccaatatatgccttatttttaaataagtcattctgtataaagtcattttgttgttgttcagagaaatcaagatcttattcacaaagaaaaacattttataaattgatcgcattttctttaagtcaaaatgttaaactggaggcagtattaaactttgcaattaggagtttcagagatgccttggcataccacgaaaaacactgtcaatatccaactcattataaattgttatcagaattaacctaataactttaagtaaggacaagcagcatcctagcaacttgtagtagtcttgggttcccagcagagtatcacagttaacctctctgacaacttcatcagaatttccaagctgccaaataatcttcatagacctaattacagatttaaaaaaatttcctaggcgacgaaagtatagaaatgtgaatatgttgaatacattgagaagctgtactttttaattagttatattacttctggaagcacatatctaaggaatattttctaagactcagagggaaaaaaactcgttttcataggatcatctgaagatactttagtatatttgtgatcatttttatctattgcaaatacaaatgaattagataagtgccacatcctggatacatttcggaggggtagtgggcaatggtatacaaaaataccaaatataaaattttcatctgggggaatgttcaggttctaaatactaaattagatttcaatgttttgtgttttttttaaaaaaatcatattgcaacttgttttattgtgattttctacaagtattaaatacatttaaagatctttttatcttaccaagaaataatttggaatagcattggtatatttgaccttttgagtgtctgtcatcctcagagaatggcccatagtgtgttgcctgtggacatagtgtccatagtccctttcttgtccttctgagatattttggtttgataacattttgttttttgtcttgatgcacagggacttttttataatatgagacttcagttggtattaataggagttacctatttaattctcccagtcatcaatgaggtaatcatcaattcctatagttcaaattagtcataaacaagagctacagcaagactgatagagtaaaaactatataaatacagtaaaaaaaaaatagaatttatggtgtgaaatatgaagtatagcaatatataacaagaacatgtaagcacttgcttccacagcataaatgtaatttacatctgcattaaaggataattttctctgtgaataagagcaaaatggtcttcagagaaacagactgttcatttgaagccatttctgtaaacatcttccaagatagaactgtaatggattgaggaaataacacagaaaagacaaaaacttttgatttcaggcatgcaaagtgcttgggcagatggacagttcccattgtgcattgcctttgataaatttggccttaatttatataacgatgctgtgttcacatccctctcctacctaaagttgtctttattggtttatattgtgttaaaattagcttataattattacttttgtattgtgttcagttttttaagttgcatgtttatactatttgctacagtatttttaagtttggggtgaaggccatcagctgtatcaaaaagacaaaacaatcactatttattcagtattgctgctttacatctccagaataagctttcgatgccaggacagtgactgcctgaaagctgcaggagctcttttcaatgcattttatatatttttagaaaccaaataaatgcagaaaactatttcgtatactaattatattaaaccagcagaaatataaaggcaataaagtatatacatatatatggggggaggggaaagattaaaaaatagatttacagccagacatggtgatagccctaaatgtatttctcaatatgtttttctttattgaccctaggaggatttgagttgctgcagctttaaacagaaaattgccatgttcactaattgtgagcacataaatatgcttttagtactgctttgcttatgtacaaataaatctgtaatatgtattatatgtaattatccttttctttgactttcattttaaatgtatattttctgatcattatgagctgtaaaacaaagaatcaatattggatattctcccaaataataaattttcaggattcattggggca

SEQ ID NO: 174136 - DNA, 2219 bp, Homo sapiens
  Payload ID: 14182
  Gene Symbol: RASSF8
  Gene Name: Ras association (RalGDS/AF-6) domain family (N-terminal) member 8
  Uniprot ID: Q8NHQ8
  ENST ID: ENST00000542865
  CDS Start-End: 293-1552
atgtgaggacacagcaagaaggtgccatccgtgaaccaaaaagtgagcccttgccagacacctgatccgctggtgccataatcatgaacttcccagtctccagaactgtgagaaatacaagtttctgttattggtgcctgtgtagatcatcctagaatacctgtgtggtgctgtccttcctcaagactacctcattctcactggctcggagactcctgcctgctgagctagagacatgacctaacaccctgatgaccactctcagggaccttgagtgactggccggtgcaccatggaacttaaagtatgggtggatggagttcagaggattgtttgtggagtcactgaagtcacaacttgccaggaggttgtcatagccttagctcaagcaataggtcgaactggaaggtacacccttatagagaaatggagagatactgaaagacacttagcacctcatgaaaatcctatcatatccttaaacaaatgggggcagtatgctagtgatgtgcagctcattctacgacgaactgggccgtctctcagtgagcgacccacttcagacagtgtggctcgaattcctgaaagaactttatacaggcagagtctgccccccttagctaaactgaggcctcagattgacaaatcaatcaaaaggagggaaccgaaaaggaaatcactgacatttacaggaggtgccaaaggattaatggacatttttggaaaaggtaaagaaactgagtttaagcaaaaggtgctgaataactgcaaaacaacagcagatgagttgaagaagctaatccgtctgcagacagagaagcttcaatccattgagaaacagctggaatctaatgaaatagaaataagattttgggagcaaaagtataattccaaccttgaagaggaaattgtccgtctagagcaaaagatcaaaagaaacgatgtagaaattgaggaggaagaattctgggaaaatgaattacagattgaacaggaaaatgaaaaacagctgaaggatcaacttcaagaaataagacagaaaataacagaatgtgaaaacaaattaaaggactatttggcacagatccggactatggaaagtggtcttgaagcagaaaaattgcaacgggaagttcaagaggcacaggtcaatgaggaagaggttaaaggaaagatcggtaaggtcaaaggggagattgacattcaaggccagcagagtctgaggttggaaaatggcatcaaagctgtggaaagatctcttggacaagccaccaaacgcttacaggacaaagaacaggaactggagcagttgactaaggagttgcggcaagtcaatctccagcagttcatccagcagacagggacaaaagttaccgttttgccagcggagcccattgaaatagaggcctcacatgcagacattgaaagggaggcaccattccagtctgggtccctgaagcgacctggttcatctcggcagctccccagtaatctccgcattctgcagaatcctatctcatctggttttaatcctgaaggcatatatgtatgacattatctgtctttagggaggagacccaacagaggtaccaaggacagtaaacttcctttttgatttgtgccaatgatgaacagaggatctattccacaagacgctgtatgttttttctctcctaaattgcataccacttggagccataccctgtgcactgatgctaaagaacaaagaaactgtgttttcacacatcaacagtgttgatatttttgtccagcagctataatgcaaagccttcgtttttatttgtagcattttgagagctttaggaaagtattatatagtgtgtatacataaataagccgtgacttaagtaagagtgaagagaaatttgtgactggcttagtttaatttatttcatgtaatcaatgtgtgaatgttgatgttttaatatttttattgacttatcctgtgactgacttacgttacatattgtgtgattatgaccgtgtgcatgttgccagactccatccatgcattgctgatttacactacacaagtgtcctagggtgctccaccatcgaagctaactccacaggaagccacttgcatttgttttgtgaaactgtcctagccattgcttaattaggtgaaataattcagggttttttaaatctggaatttagtcgttcctttacaatatttccaaatatacgtgtggcca

SEQ ID NO: 174137 - DNA, 555 bp, Homo sapiens
  Payload ID: 14182
  Gene Symbol: RASSF8
  Gene Name: Ras association (RalGDS/AF-6) domain family (N-terminal) member 8
  ENST ID: ENST00000542315
  CDS Start-End: 188-555
aaaccatatttcactgggagagcaaactgctagcatttatcatcccctccagctttaagttacagaggctaaactcctgctgactacacagacttagtcttctccactccgtgttcctgcagctagagacatgacctaacaccctgatgaccactctcagggaccttgagtgactggccggtgcaccatggaacttaaagtatgggtggatggagttcagaggattgtttgtggagtcactgaagtcacaacttgccaggaggttgtcatagccttagctcaagcaataggtcgaactggaaggtacacccttatagagaaatggagagatactgaaagacacttagcacctcatgaaaatcctatcatatccttaaacaaatgggggcagtatgctagtgatgtgcagctcattctacgacgaactgggccgtctctcagtgagcgacccacttcagacagtgtggctcgaattcctgaaagaactttatacaggcagagtctgccccccttagctaaactgaggcctcagattgacaaatcaatcaaaaggag

SEQ ID NO: 174138 - DNA, 523 bp, Homo sapiens
  Payload ID: 14182
  Gene Symbol: RASSF8
  Gene Name: Ras association (RalGDS/AF-6) domain family (N-terminal) member 8
  ENST ID: ENST00000535907
  CDS Start-End: 251-523
gcggccgcggagctccgggtgccgccgcgtccccagcgccccggccggcccctctgggcggcctgcgggggcggcgcagttgcgaaactgagtgcctgtgtagatcatcctagaatacctgtgtggtgctgtccttcctcaagactacctcattctcactggctcggagactcctgcctgctgagctagagacatgacctaacaccctgatgaccactctcagggaccttgagtgactggccggtgcaccatggaacttaaagtatgggtggatggagttcagaggattgtttgtggagtcactgaagtcacaacttgccaggaggttgtcatagccttagctcaagcaataggtcgaactggaaggtacacccttatagagaaatggagagatactgaaagacacttagcacctcatgaaaatcctatcatatccttaaacaaatgggggcagtatgctagtgatgtgcagctcattctacgacgaactgggccgtctctcagtgagcgacccacttcagac

SEQ ID NO: 174139 - DNA, 789 bp, Homo sapiens
  Payload ID: 14182
  Gene Symbol: RASSF8
  Gene Name: Ras association (RalGDS/AF-6) domain family (N-terminal) member 8
  ENST ID: ENST00000539545
  CDS Start-End: 1-627
aagatcaaaagaaacgatgtagaaattgaggaggaagaattctgggaaaatgaattacagattgaacaggaaaatgaaaaacagctgaaggatcaacttcaagaaataagacagaaaataacagaatgtgaaaacaaattaaaggactatttggcacagatccggactatggaaagtggtcttgaagcagaaaaattgcaacgggaagttcaagaggcacaggtcaatgaggaagaggttaaaggaaagatcggtaaggtcaaaggggagattgacattcaaggccagcagagtctgaggttggaaaatggcatcaaagctgtggaaagatctcttggacaagccaccaaacgcttacaggacaaagaacaggaactggagcagttgactaaggagttgcggcaagtcaatctccagcagttcatccagcagacagggacaaaagttaccgttttgccagcggagcccattgaaatagaggcctcacatgcagacattgaaagggaggcaccattccagtctgggtccctgaagcgacctggttcatctcggcagctccccagtaatctccgcattctgcagaatcctatctcatctggttttaatcctgaaggcatatatgtatgacattatctgtctttagggaggagacccaacagaggtaccaaggacagtaaacttcctttttgatttgtgccaatgatgaacagaggatctattccacaagacgctggacttttttataatatgagacttcagttggtattaataggagttacctatttaatt

SEQ ID NO: 174140 - DNA, 853 bp, Homo sapiens
  Payload ID: 14182
  Gene Symbol: RASSF8
  Gene Name: Ras association (RalGDS/AF-6) domain family (N-terminal) member 8
  ENST ID: ENST00000542004
  CDS Start-End: 195-853
tcactatcagcgaaccagaaagcaggctctcacccgacgctgagtctgacggtgacttgaccttggactttccagcttccagaaaactgactacacagacttagtcttctccactccgtgttcctgcagctagagacatgacctaacaccctgatgaccactctcagggaccttgagtgactggccggtgcaccatggaacttaaagtatgggtggatggagttcagaggattgtttgtggagtcactgaagtcacaacttgccaggaggttgtcatagccttagctcaagcaataggtcgaactggaaggtacacccttatagagaaatggagagatactgaaagacacttagcacctcatgaaaatcctatcatatccttaaacaaatgggggcagtatgctagtgatgtgcagctcattctacgacgaactgggccgtctctcagtgagcgacccacttcagacagtgtggctcgaattcctgaaagaactttatacaggcagagtctgccccccttagctaaactgaggcctcagattgacaaatcaatcaaaaggagggaaccgaaaaggaaatcactgacatttacaggaggtgccaaaggattaatggacatttttggaaaaggtaaagaaactgagtttaagcaaaaggtgctgaataactgcaaaacaacagcagatgagttgaagaagctaatccgtctgcagacagagaagcttcaatccattgagaaacagctggaatctaatgaaatagaaataagattttgggagcaaaagtataattccaaccttgaagaggaaattgtccgtctagagcaaaagatcaaaagaaacgatgtagaaat

SEQ ID NO: 174141 - DNA, 5505 bp, Homo sapiens
  Payload ID: 14182
  Gene Symbol: RASSF8
  Gene Name: Ras association (RalGDS/AF-6) domain family (N-terminal) member 8
  Uniprot ID: Q8NHQ8
  ENST ID: ENST00000541490
  CDS Start-End: 193-1452
ccaggactgtaagaaccctatgtacctttgcaggtgcctgtgtagatcatcctagaatacctgtgtggtgctgtccttcctcaagactacctcattctcactggctcggagactcctgcctgctgagctagagacatgacctaacaccctgatgaccactctcagggaccttgagtgactggccggtgcaccatggaacttaaagtatgggtggatggagttcagaggattgtttgtggagtcactgaagtcacaacttgccaggaggttgtcatagccttagctcaagcaataggtcgaactggaaggtacacccttatagagaaatggagagatactgaaagacacttagcacctcatgaaaatcctatcatatccttaaacaaatgggggcagtatgctagtgatgtgcagctcattctacgacgaactgggccgtctctcagtgagcgacccacttcagacagtgtggctcgaattcctgaaagaactttatacaggcagagtctgccccccttagctaaactgaggcctcagattgacaaatcaatcaaaaggagggaaccgaaaaggaaatcactgacatttacaggaggtgccaaaggattaatggacatttttggaaaaggtaaagaaactgagtttaagcaaaaggtgctgaataactgcaaaacaacagcagatgagttgaagaagctaatccgtctgcagacagagaagcttcaatccattgagaaacagctggaatctaatgaaatagaaataagattttgggagcaaaagtataattccaaccttgaagaggaaattgtccgtctagagcaaaagatcaaaagaaacgatgtagaaattgaggaggaagaattctgggaaaatgaattacagattgaacaggaaaatgaaaaacagctgaaggatcaacttcaagaaataagacagaaaataacagaatgtgaaaacaaattaaaggactatttggcacagatccggactatggaaagtggtcttgaagcagaaaaattgcaacgggaagttcaagaggcacaggtcaatgaggaagaggttaaaggaaagatcggtaaggtcaaaggggagattgacattcaaggccagcagagtctgaggttggaaaatggcatcaaagctgtggaaagatctcttggacaagccaccaaacgcttacaggacaaagaacaggaactggagcagttgactaaggagttgcggcaagtcaatctccagcagttcatccagcagacagggacaaaagttaccgttttgccagcggagcccattgaaatagaggcctcacatgcagacattgaaagggaggcaccattccagtctgggtccctgaagcgacctggttcatctcggcagctccccagtaatctccgcattctgcagaatcctatctcatctggttttaatcctgaaggcatatatgtatgacattatctgtctttagggaggagacccaacagaggtaccaaggacagtaaacttcctttttgatttgtgccaatgatgaacagaggatctattccacaagacgctgtatgttttttctctcctaaattgcataccacttggagccataccctgtgcactgatgctaaagaacaaagaaactgtgttttcacacatcaacagtgttgatatttttgtccagcagctataatgcaaagccttcgtttttatttgtagcattttgagagctttaggaaagtattatatagtgtgtatacataaataagccgtgacttaagtaagagtgaagagaaatttgtgactggcttagtttaatttatttcatgtaatcaatgtgtgaatgttgatgttttaatatttttattgacttatcctgtgactgacttacgttacatattgtgtgattatgaccgtgtgcatgttgccagactccatccatgcattgctgatttacactacacaagtgtcctagggtgctccaccatcgaagctaactccacaggaagccacttgcatttgttttgtgaaactgtcctagccattgcttaattaggtgaaataattcagggttttttaaatctggaatttagtcgttcctttacaatatttccaaatatacgtgtggccacagagcataacagatatttttcataagctaaattgtatgtataaaacatttgcagtgtttcagacactgttgaacaaaaatgtaattggtaagtatgtatccaaacaggcatggggtttcctgatacattatgtgttttgtttctgccctgtcttatcatttacactcatggatcttcagaattaatctaacatggaagttatagatacctgaaagctgggttggtctacttcaggaacattgctttaagtgatgtattttaaaataacccgcttcatatgtatgatctgttggtgtacacaccatgggtaaggtattgcttgcacataatttgctctgcatattatggaccattgtggtttcttccagtcacttagatggaaaggaggttaaacctaggtactttttagcaaggatataaagtcaaattcagcatatgtttttatttttaggcttgacttttacaagacattaatctccatttgtacatatgttattttatttgtaaaaccaaatatgactcaacacctttttgatgagtagtgacttaactaagatttacaagtaatatttagacagattcagtcagacaccacttagccatttttacattccctctggttagatttggtacagtataattaagactttaatctgaaatttaaagtagttttaattctgaagaagttacatcctctgtattatttacatgcaacaaaataaaagtggattaatatagtaatgccatggtaacaatagagctatgtcttatgcatgaaggcaactttggatgttttaacacatttgactgactttggtttagtgaatgctgacaatgctgctctacttaggtttcctatgaaatttttaagaatggctatgagactgtatagaagcttctagagaactgaaagtcataatgcagagttgccttttctagtgcagctaagtggcggacctcaactgaagatatgagtttctttgggttcttggagttatcaaattgatcttgccattatgttactttgcaaataactgaagtaaatgattcttacctaaataaccacaacctgtacacatttgctcacaatttatagtagttattttctatctacctatatttaaaattaggatgattaaaaaataatttatagattttgtgacagtaatgatttacatatgcccaatatatgccttatttttaaataagtcattctgtataaagtcattttgttgttgttcagagaaatcaagatcttattcacaaagaaaaacattttataaattgatcgcattttctttaagtcaaaatgttaaactggaggcagtattaaactttgcaattaggagtttcagagatgccttggcataccacgaaaaacactgtcaatatccaactcattataaattgttatcagaattaacctaataactttaagtaaggacaagcagcatcctagcaacttgtagtagtcttgggttcccagcagagtatcacagttaacctctctgacaacttcatcagaatttccaagctgccaaataatcttcatagacctaattacagatttaaaaaaatttcctaggcgacgaaagtatagaaatgtgaatatgttgaatacattgagaagctgtactttttaattagttatattacttctggaagcacatatctaaggaatattttctaagactcagagggaaaaaaactcgttttcataggatcatctgaagatactttagtatatttgtgatcatttttatctattgcaaatacaaatgaattagataagtgccacatcctggatacatttcggaggggtagtgggcaatggtatacaaaaataccaaatataaaattttcatctgggggaatgttcaggttctaaatactaaattagatttcaatgttttgtgttttttttaaaaaaatcatattgcaacttgttttattgtgattttctacaagtattaaatacatttaaagatctttttatcttaccaagaaataatttggaatagcattggtatatttgaccttttgagtgtctgtcatcctcagagaatggcccatagtgtgttgcctgtggacatagtgtccatagtccctttcttgtccttctgagatattttggtttgataacattttgttttttgtcttgatgcacagggacttttttataatatgagacttcagttggtattaataggagttacctatttaattctcccagtcatcaatgaggtaatcatcaattcctatagttcaaattagtcataaacaagagctacagcaagactgatagagtaaaaactatataaatacagtaaaaaaaaaatagaatttatggtgtgaaatatgaagtatagcaatatataacaagaacatgtaagcacttgcttccacagcataaatgtaatttacatctgcattaaaggataattttctctgtgaataagagcaaaatggtcttcagagaaacagactgttcatttgaagccatttctgtaaacatcttccaagatagaactgtaatggattgaggaaataacacagaaaagacaaaaacttttgatttcaggcatgcaaagtgcttgggcagatggacagttcccattgtgcattgcctttgataaatttggccttaatttatataacgatgctgtgttcacatccctctcctacctaaagttgtctttattggtttatattgtgttaaaattagcttataattattacttttgtattgtgttcagttttttaagttgcatgtttatactatttgctacagtatttttaagtttggggtgaaggccatcagctgtatcaaaaagacaaaacaatcactatttattcagtattgctgctttacatctccagaataagctttcgatgccaggacagtgactgcctgaaagctgcaggagctcttttcaatgcattttatatatttttagaaaccaaataaatgcagaaaactatttcgtatactaattatattaaaccagcagaaatataaaggcaataaagtatatacatatatatggggggaggggaaagattaaaaaatagatttacagccagacatggtgatagccctaaatgtatttctcaatatgtttttctttattgaccctaggaggatttgagttgctgcagctttaaacagaaaattgccatgttcactaattgtgagcacataaatatgcttttagtactgctttgcttatgtacaaataaatctgtaatatgtattatatgtaattatccttttctttgactttcattttaaatgtatattttctgatcattatgagctgtaaaacaaagaatcaatattggatattctcccaaataataaattttcaggattcattggggcatt

SEQ ID NO: 174142 - DNA, 577 bp, Homo sapiens
  Payload ID: 14182
  Gene Symbol: RASSF8
  Gene Name: Ras association (RalGDS/AF-6) domain family (N-terminal) member 8
  ENST ID: ENST00000545413
  CDS Start-End: 100-577
gaacgatgaccaatccaccacacgcacctacagtctagagacatgacctaacaccctgatgaccactctcagggaccttgagtgactggccggtgcaccatggaacttaaagtatgggtggatggagttcagaggattgtttgtggagtcactgaagtcacaacttgccaggaggttgtcatagccttagctcaagcaataggtcgaactggaaggtacacccttatagagaaatggagagatactgaaagacacttagcacctcatgaaaatcctatcatatccttaaacaaatgggggcagtatgctagtgatgtgcagctcattctacgacgaactgggccgtctctcagtgagcgacccacttcagacagtgtggctcgaattcctgaaagaactttatacaggcagagtctgccccccttagctaaactgaggcctcagattgacaaatcaatcaaaaggagggaaccgaaaaggaaatcactgacatttacaggaggtgccaaaggattaatggacatttttggaaaaggtaaagaaactgagtttaagcaaaaggtgctgaataactgca

SEQ ID NO: 174143 - DNA, 587 bp, Homo sapiens
  Payload ID: 14182
  Gene Symbol: RASSF8
  Gene Name: Ras association (RalGDS/AF-6) domain family (N-terminal) member 8
  ENST ID: ENST00000537946
  CDS Start-End: 499-587
agtctgaacgatgaccaatccaccacacgcacctacagtgtaggtcttccattttactctctagtctggttctggggctgggcatagaactgttggagttgatataaagatcagggttacagctcctagagtggagtattttgggctgagacgatggggttttccagatattggatcatgtcatctgcaaagaaagacaacttgacttcctctcctcccatttgactacactttatttctttctcttgcctgattgccctggcctgaatttccaatactatgttgaattaatgactcaatatatgactaaaagttcaaagtgaaacaatgataattcagataggaaaatatgtggcagtatgctaaagtctaaaaaggaatataaaacgtctgtgagatacctaacatcagatttatagaaacagaatagaatctagagacatgacctaacaccctgatgaccactctcagggaccttgagtgactggccggtgcaccatggaacttaaagtatgggtggatggagttcagaggattgtttgtggagtcactgaagtcacaacttgccaggaggttgtcatagcctt

SEQ ID NO: 174144 - DNA, 772 bp, Homo sapiens
  Payload ID: 14182
  Gene Symbol: RASSF8
  Gene Name: Ras association (RalGDS/AF-6) domain family (N-terminal) member 8
  ENST ID: ENST00000541218
  CDS Start-End: 148-772
agtctgaacgatgaccaatccaccacacgcacctacagtctgactacacagacttagtcttctccactccgtgttcctgcagctagagacatgacctaacaccctgatgaccactctcagggaccttgagtgactggccggtgcaccatggaacttaaagtatgggtggatggagttcagaggattgtttgtggagtcactgaagtcacaacttgccaggaggttgtcatagccttagctcaagcaataggtcgaactggaaggtacacccttatagagaaatggagagatactgaaagacacttagcacctcatgaaaatcctatcatatccttaaacaaatgggggcagtatgctagtgatgtgcagctcattctacgacgaactgggccgtctctcagtgagcgacccacttcagacagtgtggctcgaattcctgaaagaactttatacaggcagagtctgccccccttagctaaactgaggcctcagattgacaaatcaatcaaaaggagggaaccgaaaaggaaatcactgacatttacaggaggtgccaaaggattaatggacatttttggaaaaggtaaagaaactgagtttaagcaaaaggtgctgaataactgcaaaacaacagcagatgagttgaagaagctaatccgtctgcagacagagaagcttcaatccattgagaaacagctggaatctaatgaaatagaaataagattttgggagcaaaagtataattccaaccttgaagaggaaattgtccgtc

SEQ ID NO: 174145 - DNA, 852 bp, Homo sapiens
  Payload ID: 14182
  Gene Symbol: RASSF8
  Gene Name: Ras association (RalGDS/AF-6) domain family (N-terminal) member 8
  ENST ID: ENST00000611440
  CDS Start-End: 109-438
ctgactacacagacttagtcttctccactccgtgttcctgcagctagagacatgacctaacaccctgatgaccactctcagggaccttgagtgactggccggtgcaccatggaacttaaagtatgggtggatggagttcagaggattgtttgtggagtcactgaagtcacaacttgccaggaggttgtcatagccttagctcaagcaataggtcgaactggaaggtacacccttatagagaaatggagagatactgaaagacacttagcacctcatgaaaatcctatcatatccttaaacaaatgggggcagtatgctagtgatgtgcagctcattctacgacgaactgggccgtctctcagtgagcgacccacttcagacagtgtggctcgaattcctgaaagaactttatacaggcagagtctgccccttagctaaactgaggcctcagattgacaaatcaatcaaaaggagggaaccgaaaaggaaatcactgacatttacaggaggtgccaaaggattaatggacatttttggaaaaggtaaagaaactgagtttaagcaaaaggtgctgaataactgcaaaacaacagcagatgagttgaagaagctaatccgtctgcagacagagaagcttcaatccattgagaaacagctggaatctaatgaaatagaaataagattttgggagcaaaagtataattccaaccttgaagaggaaattgtccgtctagagcaaaagatcaaaagaaacgatgtagaaattgaggaggaagaattctgggaaaatgaattacagattgaacaggaaaatgaaaaacagctgaaggatcaacttcaagaaataagaca

SEQ ID NO: 174146 - DNA, 1328 bp, Homo sapiens
  Payload ID: 14182
  Gene Symbol: RASSF8
  Gene Name: Ras association (RalGDS/AF-6) domain family (N-terminal) member 8
  Uniprot ID: Q8NHQ8
  ENST ID: ENST00000615708
  CDS Start-End: 150-1328
cggagctccgggtgccgccgcgtccccagcgccccggccggcccctctgggcggcctgcgggggcggcgcagttgcgaaactgactagagacatgacctaacaccctgatgaccactctcagggaccttgagtgactggccggtgcaccatggaacttaaagtatgggtggatggagttcagaggattgtttgtggagtcactgaagtcacaacttgccaggaggttgtcatagccttagctcaagcaataggtcgaactggaaggtacacccttatagagaaatggagagatactgaaagacacttagcacctcatgaaaatcctatcatatccttaaacaaatgggggcagtatgctagtgatgtgcagctcattctacgacgaactgggccgtctctcagtgagcgacccacttcagacagtgtggctcgaattcctgaaagaactttatacaggcagagtctgccccccttagctaaactgaggcctcagattgacaaatcaatcaaaaggagggaaccgaaaaggaaatcactgacatttacaggaggtgccaaaggattaatggacatttttggaaaaggtaaagaaactgagtttaagcaaaaggtgctgaataactgcaaaacaacagcagatgagttgaagaagctaatccgtctgcagacagagaagcttcaatccattgagaaacagctggaatctaatgaaatagaaataagattttgggagcaaaagtataattccaaccttgaagaggaaattgtccgtctagagcaaaagatcaaaagaaacgatgtagaaattgaggaggaagaattctgggaaaatgaattacagattgaacaggaaaatgaaaaacagctgaaggatcaacttcaagaaataagacagaaaataacagaatgtgaaaacaaattaaaggactatttggcacagatccggactatggaaagtggtcttgaagcagaaaaattgcaacgggaagttcaagaggcacaggtcaatgaggaagaggttaaaggaaagatcggtaaggtcaaaggggagattgacattcaaggccagcagagtctgaggttggaaaatggcatcaaagctgtggaaagatctcttggacaagccaccaaacgcttacaggacaaagaacaggaactggagcagttgactaaggagttgcggcaagtcaatctccagcagttcatccagcagacagggacaaaagttaccgttttgccagcggagcccattgaaatagaggcctcacatgcagacattgaaagggggatcatcattctttctgataagcaggagtgtaaagattag

SEQ ID NO: 174147 - DNA, 5682 bp, Homo sapiens
  Payload ID: 14183
  Gene Symbol: RASSF9
  Gene Name: Ras association (RalGDS/AF-6) domain family (N-terminal) member 9
  Uniprot ID: O75901
  ENST ID: ENST00000361228
  CDS Start-End: 370-1677
gcttgtggggttggcagttctttaagtctgcaaataactacagaacacaatagagtcctcctcccttcctctctctctctttcttttttttttttcttttcctgcttccaaacgccttcttcgaggctgaagctgggcaggtctccagaggtgcagcagccacaacaatcccgcagttcaaagttaagcagcagttgcacaacttccagcaactttctcagccggctactaatgagctgaaagccaggaacatccgaggagaagagaaagcttccagccctcctcccttcaccctggaaatccagacacccccacccccaccctcagatcactttaagataatttctttattcgtttgcccgacagaccatggctccctttggaagaaacttgctaaagactcggcataaaaacagatctccaactaaagacatggattcagaagagaaggaaattgtggtttgggtttgccaagaagagaagcttgtctgtgggctgactaaacgcaccacctctgctgatgtcatccaggctttgcttgaggaacatgaggctacgtttggagagaaacgatttcttctggggaagcccagtgattactgcatcatagagaagtggagaggctccgaaagggttcttcctccactaactagaatcctgaagctttggaaagcgtggggagatgagcagcccaatatgcaatttgttttggttaaagcagatgcttttcttccagttcctttgtggcggacagctgaagccaaattagtgcaaaacacagaaaaattgtgggagctcagcccagcaaactacatgaagactttaccaccagataaacaaaaaagaatagtcaggaaaactttccggaaactggctaaaattaagcaggacacagtttctcatgatcgagataatatggagacattagttcatctgatcatttcccaggaccatactattcatcagcaagtcaagagaatgaaagagctggatctggaaattgaaaagtgtgaagctaagttccatcttgatcgagtagaaaatgatggagaaaactatgttcaggatgcatatttaatgcccagtttcagtgaagttgagcaaaatctagacttgcagtatgaggaaaaccagactctggaggacctgagcgaaagtgatggaattgaacagctggaagaacgactgaaatattaccgaatactcattgataagctctctgctgaaatagaaaaagaggtaaaaagtgtttgcattgatataaatgaagatgcggaaggggaagctgcaagtgaactggaaagctctaatttagagagtgttaagtgtgatttggagaaaagcatgaaagctggtttgaaaattcactctcatttgagtggcatccagaaagagattaaatacagtgactcattgcttcagatgaaagcaaaagaatatgaactcctggccaaggaattcaattcacttcacattagcaacaaagatgggtgccagttaaaggaaaacagagcgaaggaatctgaggttcccagtagcaatggggagattcctccctttactcaaagagtatttagcaattacacaaatgacacagactcggacactggtatcagttctaaccacagtcaggactccgaaacaacagtaggagatgtggtgctgttgtcaacatagttccaatggctcctttctgacctgctttcatgttttaatgtttgtttaatttaataggaaacctcattttaaatataacactcaaaaaaatgtaaatcatattgtagtattcaatagttaataaaaactcgagaaatgtgttgtttctgatgtgaaatttccaaaggaactttaattattgcaagttcaagcaatgaactatttatcacgaatgcagcacaaatagcttgtcgttgtagaacacagaaataatttgatgggaatcatatgataatcttccttagcgtctgtggaaaacgatttacataaactttaaaagcaatcctcaatattagacagtccaaatattcaaacatgaagaagtagaattaaaatgtgctgtaatatatatttttccaacactgtataattggaatttttaaatctgtaaagtatatgggagctactgtgttgtaactgcattaattcaaagtttggttcttttaattgatccttgataatacaacgtatcatgtatatcacttcctgaacccttctacctgttgaggcctatgaaacaggctgctgttgggacatgtataaatactggcagggaatcagacacgtatagggtacagatgaggcagggccaagtgctgcatacaaacagcaatttttataaagaagcctcaatttattaagagctatgtgtggatgtttgctatctggcaattcagatctcctgaccaaacccatgttcattcactgagtgaggtatagtgtgggttacagagaaaatcagtcatagtgttatttgtttatgtcctatctacaaaagttgcaatgatggaatttggaacccttctgtggataaaatagaatctgctataattattagcattttgtctctgaacctacagagaggagaccacatggacaaaagacttattctgctatgctataactcagattgtcttatttcttcatctaaagtgcttaaaagagacttagttcctaaaaaagtaccagcaaaatccccaacacactagtaagaattcaagaaattgaagggattatttaggtcttatcttgactgacaatcattattatggcctactatgcttgtgttttaattagaaatgtgctttcttctctctcccttctttgcttactttcttcttatttgccttcctgtctgccttacttcctctcttttcctgccttcatctctccttctcccgtcttctttttttcctttgcttccttcctgccaatgaacacatgatgcaatcataatgaaataattattttttattgtactgttaactgagtactgctgcagtttatttttatttagctgatatctttcctgtgtgtcactgcacatgtaagtagaaatattattttacttagttttaatatgtggacattggttaagggtcccaatccttctcatttcttctcttttattcttttgcatacttttagtgcaggttttaactcagttttcttattgttttactttcaaaatttgaaaagtatttaattttttaaagcaactttattgttaactcatttaaaaaaatatattgctccttaaatcttcttaacatatttgttcctgccttctcctgtcttttaactcatctttgggaagacatttagaattttctgattgtttcagtttcgtgagcatttatactatcatttcttgtaccaaaatagatattttcaggtcttatttcaagttggctggtaagaaaaatagaaatttccattctatggaaaaatacagtgataaagagtaataattctggcatcggttacatttttttaaaaaagataaaattgaatagtcatctgtgaaaggaaagttcacctgactaagagtccataaaattattcaacaatataagccactgacatattcattgttcactaatggggatcaaattcagaagatcatcgtaaatgataaacccattgtatcattttcctacagtggaagtcatctctttgaattattcttatctttagtgagaaaatactgaaagaacatgcttatctatttgactaattatctgaattcaagaggttctgataagaagtaggcctggagagataatttcatcttagaaactttgaattaacttctgcttttatacagttaagcacagtaatgcatttaaggctcaattcttctacattttacagtaaataatgtttgtaagtctcagaaagcagtaccattgctttttaaattcatttcagaatttccatttgctcattagttatacaaatgtatttgtgcgtttgatcactacaatcattaagttttaatccttcatcagctaccatggtgaacctcttaatttacagttacatgttaatatattaacacaaatagaagtactgaaatacaatgccctcatgtctggatactgaactatttgttattaaattaagtgagaattggaattataagtatagaacttgatagaaagtgtaatgttattatctatagaaatgttaaagtataaattcttgagtaatctgacaggttaactatgaaattgctatatgcagctagaagaaacaaaccaaagctgactattcttaatttctgtaacaggacctagattcatccttggtcatccttccacttggaattctcctttttatccttctgcaatgctctgaaatcttaccctttccacagtctttttaatgtgctagctcttctatgatatacgtttgttccattcaattagttggaatctcatctctgaacccagaaatattttagaggtacttctcataagaagcatttttattctggcttacgctatatatatttatgcacttacctaattcccctccttcaatgaattctattttttttttccttgagacggagtctcactctgtcgcccaggctggagtgcagtggcgcgatcttggctcactgcaagctccgcctcccggcttcacgccattttcctgcctcagcctcctgagtagctgggactacaggcgcccgccaccacgccaggctaatttttttgtatttttttagtagagacggggtttcaccgtgttagccaggatggtctcgatgtcctgaccttgtgatccacccgtcttggcctcccaaagtgctgggattacaggcgtgagccaccgtgcccgaccaatgaattcttattaaattactttatcatctgtcttgttagccttactctttcctattaacttctttgccccctgctccctttttgaattgagtggctaaattttagaggtttgtagcttttgtgtgtgtgtgtgtgtgttttatagatggtaaatgatgcttgtacattttgtacatgaatgaatacgtattttagcagacttaaaacattaacagtaattgaccttatacattttgggaaagaaaaattaaatcttcatgctactacgatttttttaaatgtggcatcaatgtttatttttaataatagtattactgacttaataaaccccaaatgtctctttaagctgatttaatggttatattatagaattttttatttcattgtgtgcttatgagaaaaaacatattttagagttgggttttaaatggtagacacagaaagtaactttaaaatatcctaaacaaaatatctatttcatttttcttcttaagtaaaataacaacacctcattagtgtgtagaagctattctaatccattaaaattttatttttatatttatttaaatatctactgtacatgacaaaatatatttctgtggctgccttttataattattttccaagtagacataatctatttaaaacatatttttctagtgacaaagaaatacattttatcctgatatatagtttttaaatactaggctatttcttttcatactgcctgattggtttaataaacatgatgtgacaaatattaagtatatatcattttatcatgttgtaactgatccaaaataataaaagaaataattatacctttcttgtg

SEQ ID NO: 174148 - DNA, 1757 bp, Homo sapiens
  Payload ID: 14184
  Gene Symbol: RASSF1
  Gene Name: Ras association (RalGDS/AF-6) domain family member 1
  Uniprot ID: Q9NS23
  ENST ID: ENST00000327761
  CDS Start-End: 146-958
gcgatctacgtttcagtcttaacggttgcggcgcggctctggcccgggcgcacgcgcacactgacacgcgtacacgcacgcacgcgaccggggcggtggttggcggctacggacgcgcaggactgggggacgggcgggtacggctatgggcgaggcggaggcgccttctttcgaaatgacctggagcagcacgacgagcagtggctactgcagccaagaggactcggactcggagctcgagcagtacttcaccgcgcgaacctcgctagctcgcaggccgcgccgggaccaggacgagcctgtggagtgggagacacctgacctttctcaagctgagattgagcagaagatcaaggagtacaatgcccagatcaacagcaacctcttcatgagcttgaacaaggacggttcttacacaggcttcatcaaggttcagctgaagctggtgcgccctgtctctgtgccctccagcaagaagccaccctccttgcaggatgcccggcggggcccaggacggggcacaagtgtcaggcgccgcacttccttttacctgcccaaggatgctgtcaagcacctgcatgtgctgtcacgcacaagggcacgtgaagtcattgaggccctgctgcgaaagttcttggtggtggatgacccccgcaagtttgcactctttgagcgcgctgagcgtcacggccaagtgtacttgcggaagctgttggatgatgagcagcccctgcggctgcggctcctggcagggcccagtgacaaggccctgagctttgtcctgaaggaaaatgactctggggaggtgaactgggacgccttcagcatgcctgaactacataacttcctacgtatcctgcagcgggaggaggaggagcacctccgccagatcctgcagaagtactcctattgccgccagaagatccaagaggccctgcacgcctgcccccttgggtgacctcttgtacccccaggtggaaggcagacagcaggcagcgccaagtgcgtgccgtgtgagtgtgacagggccagtggggcctgtggaatgagtgtgcatggaggccctcctgtgctgggggaatgagcccagagaacagcgaagtagcttgctccctgtgtccacctgtgggtgtagccaggtatggctctgcacccctctgccctcattactgggccttagtgggccagggctgccctgagaagctgctccaggcctgcagcaggagtggtgcagacagaagtctcctcaatttttgtctcagaagtgaaaatcttggagaccctgcaaacagaacagggtcatgtttgcaggggtgacggccctcatctatgaggaaaggttttggatcttgaatgtggtctcaggatatccttatcagagctaagggtgggtgctcagaataaggcaggcattgaggaagagtcttggtttctctctacagtgccaactcctcacacaccctgaggtcagggagtgctggctcacagtacagcatgtgccttaatgcttcatatgaggaggatgtccctgggccagggtctgtgtgaatgtgggcactggcccaggttcataccttatttgctaatcaaagccagggtctctccctcaggtgttttttatgaagtgcgtgaatgtatgtaatgtgtggtggcctcagctgaatgcctcctgtggggaaaggggttggggtgacagtcatcatcagggcctggggcctgagagaattggctcaataaagatttcaagatcctcctgc

SEQ ID NO: 174149 - DNA, 1864 bp, Homo sapiens
  Payload ID: 14184
  Gene Symbol: RASSF1
  Gene Name: Ras association (RalGDS/AF-6) domain family member 1
  Uniprot ID: Q9NS23
  ENST ID: ENST00000357043
  CDS Start-End: 37-1071
cgcccaaagccagcgaagcacgggcccaaccgggccatgtcgggggagcctgagctcattgagctgcgggagctggcacccgctgggcgcgctgggaagggccgcacccggctggagcgtgccaacgcgctgcgcatcgcgcggggcaccgcgtgcaaccccacacggcagctggtccctggccgtggccaccgcttccagcccgcggggcccgccacgcacacgtggtgcgacctctgtggcgacttcatctggggcgtcgtgcgcaaaggcctgcagtgcgcgcgcctctctgcagattgcaagttcacctgccactaccgctgccgcgcgctcgtctgcctggactgttgcgggccccgggacctgggctgggaacccgcggtggagcgggacacgaacgtggacgagcctgtggagtgggagacacctgacctttctcaagctgagattgagcagaagatcaaggagtacaatgcccagatcaacagcaacctcttcatgagcttgaacaaggacggttcttacacaggcttcatcaaggttcagctgaagctggtgcgccctgtctctgtgccctccagcaagaagccaccctccttgcaggatgcccggcggggcccaggacggggcacaagtgtcaggcgccgcacttccttttacctgcccaaggatgctgtcaagcacctgcatgtgctgtcacgcacaagggcacgtgaagtcattgaggccctgctgcgaaagttcttggtggtggatgacccccgcaagtttgcactctttgagcgcgctgagcgtcacggccaagtgtacttgcggaagctgttggatgatgagcagcccctgcggctgcggctcctggcagggcccagtgacaaggccctgagctttgtcctgaaggaaaatgactctggggaggtgaactgggacgccttcagcatgcctgaactacataacttcctacgtatcctgcagcgggaggaggaggagcacctccgccagatcctgcagaagtactcctattgccgccagaagatccaagaggccctgcacgcctgcccccttgggtgacctcttgtacccccaggtggaaggcagacagcaggcagcgccaagtgcgtgccgtgtgagtgtgacagggccagtggggcctgtggaatgagtgtgcatggaggccctcctgtgctgggggaatgagcccagagaacagcgaagtagcttgctccctgtgtccacctgtgggtgtagccaggtatggctctgcacccctctgccctcattactgggccttagtgggccagggctgccctgagaagctgctccaggcctgcagcaggagtggtgcagacagaagtctcctcaatttttgtctcagaagtgaaaatcttggagaccctgcaaacagaacagggtcatgtttgcaggggtgacggccctcatctatgaggaaaggttttggatcttgaatgtggtctcaggatatccttatcagagctaagggtgggtgctcagaataaggcaggcattgaggaagagtcttggtttctctctacagtgccaactcctcacacaccctgaggtcagggagtgctggctcacagtacagcatgtgccttaatgcttcatatgaggaggatgtccctgggccagggtctgtgtgaatgtgggcactggcccaggttcataccttatttgctaatcaaagccagggtctctccctcaggtgttttttatgaagtgcgtgaatgtatgtaatgtgtggtggcctcagctgaatgcctcctgtggggaaaggggttggggtgacagtcatcatcagggcctggggcctgagagaattggctcaataaagatttcaagatcc

SEQ ID NO: 174150 - DNA, 1923 bp, Homo sapiens
  Payload ID: 14184
  Gene Symbol: RASSF1
  Gene Name: Ras association (RalGDS/AF-6) domain family member 1
  Uniprot ID: Q9NS23
  ENST ID: ENST00000359365
  CDS Start-End: 108-1130
cagtctggatcctgggggaggcgctgaagtcggggcccgccctgtggccccgcccggcccgcgcttgctagcgcccaaagccagcgaagcacgggcccaaccgggccatgtcgggggagcctgagctcattgagctgcgggagctggcacccgctgggcgcgctgggaagggccgcacccggctggagcgtgccaacgcgctgcgcatcgcgcggggcaccgcgtgcaaccccacacggcagctggtccctggccgtggccaccgcttccagcccgcggggcccgccacgcacacgtggtgcgacctctgtggcgacttcatctggggcgtcgtgcgcaaaggcctgcagtgcgcgcattgcaagttcacctgccactaccgctgccgcgcgctcgtctgcctggactgttgcgggccccgggacctgggctgggaacccgcggtggagcgggacacgaacgtggacgagcctgtggagtgggagacacctgacctttctcaagctgagattgagcagaagatcaaggagtacaatgcccagatcaacagcaacctcttcatgagcttgaacaaggacggttcttacacaggcttcatcaaggttcagctgaagctggtgcgccctgtctctgtgccctccagcaagaagccaccctccttgcaggatgcccggcggggcccaggacggggcacaagtgtcaggcgccgcacttccttttacctgcccaaggatgctgtcaagcacctgcatgtgctgtcacgcacaagggcacgtgaagtcattgaggccctgctgcgaaagttcttggtggtggatgacccccgcaagtttgcactctttgagcgcgctgagcgtcacggccaagtgtacttgcggaagctgttggatgatgagcagcccctgcggctgcggctcctggcagggcccagtgacaaggccctgagctttgtcctgaaggaaaatgactctggggaggtgaactgggacgccttcagcatgcctgaactacataacttcctacgtatcctgcagcgggaggaggaggagcacctccgccagatcctgcagaagtactcctattgccgccagaagatccaagaggccctgcacgcctgcccccttgggtgacctcttgtacccccaggtggaaggcagacagcaggcagcgccaagtgcgtgccgtgtgagtgtgacagggccagtggggcctgtggaatgagtgtgcatggaggccctcctgtgctgggggaatgagcccagagaacagcgaagtagcttgctccctgtgtccacctgtgggtgtagccaggtatggctctgcacccctctgccctcattactgggccttagtgggccagggctgccctgagaagctgctccaggcctgcagcaggagtggtgcagacagaagtctcctcaatttttgtctcagaagtgaaaatcttggagaccctgcaaacagaacagggtcatgtttgcaggggtgacggccctcatctatgaggaaaggttttggatcttgaatgtggtctcaggatatccttatcagagctaagggtgggtgctcagaataaggcaggcattgaggaagagtcttggtttctctctacagtgccaactcctcacacaccctgaggtcagggagtgctggctcacagtacagcatgtgccttaatgcttcatatgaggaggatgtccctgggccagggtctgtgtgaatgtgggcactggcccaggttcataccttatttgctaatcaaagccagggtctctccctcaggtgttttttatgaagtgcgtgaatgtatgtaatgtgtggtggcctcagctgaatgcctcctgtggggaaaggggttggggtgacagtcatcatcagggcctggggcctgagagaattggctcaataaagatttcaagatcc

SEQ ID NO: 174151 - DNA, 1745 bp, Homo sapiens
  Payload ID: 14184
  Gene Symbol: RASSF1
  Gene Name: Ras association (RalGDS/AF-6) domain family member 1
  Uniprot ID: Q9NS23
  ENST ID: ENST00000395117
  CDS Start-End: 37-315
cgcccaaagccagcgaagcacgggcccaaccgggccatgtcgggggagcctgagctcattgagctgcgggagctggcacccgctgggcgcgctgggaagggccgcacccggctggagcgtgccaacgcgctgcgcatcgcgcggggcaccgcgtgcaaccccacacggcagctggtccctggccgtggccaccgcttccagcccgcggggcccgccacgcacacgtggtgcgacctctgtggcgacttcatctggggcgtcgtgcgcaaaggcctgcagtgcgcgcgacgagcctgtggagtgggagacacctgacctttctcaagctgagattgagcagaagatcaaggagtacaatgcccagatcaacagcaacctcttcatgagcttgaacaaggacggttcttacacaggcttcatcaaggttcagctgaagctggtgcgccctgtctctgtgccctccagcaagaagccaccctccttgcaggatgcccggcggggcccaggacggggcacaagtgtcaggcgccgcacttccttttacctgcccaaggatgctgtcaagcacctgcatgtgctgtcacgcacaagggcacgtgaagtcattgaggccctgctgcgaaagttcttggtggtggatgacccccgcaagtttgcactctttgagcgcgctgagcgtcacggccaagtgtacttgcggaagctgttggatgatgagcagcccctgcggctgcggctcctggcagggcccagtgacaaggccctgagctttgtcctgaaggaaaatgactctggggaggtgaactgggacgccttcagcatgcctgaactacataacttcctacgtatcctgcagcgggaggaggaggagcacctccgccagatcctgcagaagtactcctattgccgccagaagatccaagaggccctgcacgcctgcccccttgggtgacctcttgtacccccaggtggaaggcagacagcaggcagcgccaagtgcgtgccgtgtgagtgtgacagggccagtggggcctgtggaatgagtgtgcatggaggccctcctgtgctgggggaatgagcccagagaacagcgaagtagcttgctccctgtgtccacctgtgggtgtagccaggtatggctctgcacccctctgccctcattactgggccttagtgggccagggctgccctgagaagctgctccaggcctgcagcaggagtggtgcagacagaagtctcctcaatttttgtctcagaagtgaaaatcttggagaccctgcaaacagaacagggtcatgtttgcaggggtgacggccctcatctatgaggaaaggttttggatcttgaatgtggtctcaggatatccttatcagagctaagggtgggtgctcagaataaggcaggcattgaggaagagtcttggtttctctctacagtgccaactcctcacacaccctgaggtcagggagtgctggctcacagtacagcatgtgccttaatgcttcatatgaggaggatgtccctgggccagggtctgtgtgaatgtgggcactggcccaggttcataccttatttgctaatcaaagccagggtctctccctcaggtgttttttatgaagtgcgtgaatgtatgtaatgtgtggtggcctcagctgaatgcctcctgtggggaaaggggttggggtgacagtcatcatcagggcctggggcctgagagaattggctcaataaagatttcaagatcc

SEQ ID NO: 174152 - DNA, 1657 bp, Homo sapiens
  Payload ID: 14184
  Gene Symbol: RASSF1
  Gene Name: Ras association (RalGDS/AF-6) domain family member 1
  Uniprot ID: Q9NS23
  ENST ID: ENST00000395126
  CDS Start-End: 295-864
caactgttgagcaggcctctctgcctgtggccttccggccggtttccagacgcccaggtggccaacattagagtccgcgtagcagtgtgagattgcaagttcacctgccactaccgctgccgcgcgctcgtctgcctggactgttgcgggccccgggacctgggctgggaacccgcggtggagcgggacacgaacgtggacgagcctgtggagtgggagacacctgacctttctcaagctgagattgagcagaagatcaaggagtacaatgcccagatcaacagcaacctcttcatgagcttgaacaaggacggttcttacacaggcttcatcaaggttcagctgaagctggtgcgccctgtctctgtgccctccagcaagaagccaccctccttgcaggatgcccggcggggcccaggacggggcacaagtgtcaggcgccgcacttccttttacctgcccaaggatgctgtcaagcacctgcatgtgctgtcacgcacaagggcacgtgaagtcattgaggccctgctgcgaaagttcttggtggtggatgacccccgcaagtttgcactctttgagcgcgctgagcgtcacggccaagtgtacttgcggaagctgttggatgatgagcagcccctgcggctgcggctcctggcagggcccagtgacaaggccctgagctttgtcctgaaggaaaatgactctggggaggtgaactgggacgccttcagcatgcctgaactacataacttcctacgtatcctgcagcgggaggaggaggagcacctccgccagatcctgcagaagtactcctattgccgccagaagatccaagaggccctgcacgcctgcccccttgggtgacctcttgtacccccaggtggaaggcagacagcaggcagcgccaagtgcgtgccgtgtgagtgtgacagggccagtggggcctgtggaatgagtgtgcatggaggccctcctgtgctgggggaatgagcccagagaacagcgaagtagcttgctccctgtgtccacctgtgggtgtagccaggtatggctctgcacccctctgccctcattactgggccttagtgggccagggctgccctgagaagctgctccaggcctgcagcaggagtggtgcagacagaagtctcctcaatttttgtctcagaagtgaaaatcttggagaccctgcaaacagaacagggtcatgtttgcaggggtgacggccctcatctatgaggaaaggttttggatcttgaatgtggtctcaggatatccttatcagagctaagggtgggtgctcagaataaggcaggcattgaggaagagtcttggtttctctctacagtgccaactcctcacacaccctgaggtcagggagtgctggctcacagtacagcatgtgccttaatgcttcatatgaggaggatgtccctgggccagggtctgtgtgaatgtgggcactggcccaggttcataccttatttgctaatcaaagccagggtctctccctcaggtgttttttatgaagtgcgtgaatgtatgtaatgtgtggtggcctcagctgaatgcctcctgtggggaaaggggttggggtgacagtcatcatcagggcctggggcctgagagaattggctcaataaagatttcaagatcc

SEQ ID NO: 174153 - DNA, 1711 bp, Homo sapiens
  Payload ID: 14184
  Gene Symbol: RASSF1
  Gene Name: Ras association (RalGDS/AF-6) domain family member 1
  Uniprot ID: Q9NS23
  ENST ID: ENST00000482447
  CDS Start-End: 108-566
cagtctggatcctgggggaggcgctgaagtcggggcccgccctgtggccccgcccggcccgcgcttgctagcgcccaaagccagcgaagcacgggcccaaccgggccatgtcgggggagcctgagctcattgagctgcgggagctggcacccgctgggcgcgctgggaagggccgcacccggctggagcgtgccaacgcgctgcgcatcgcgcggggcaccgcgtgcaaccccacacggcagctggtccctggccgtggccaccgcttccagcccgcggggcccgccacgcacacgtggtgcgacctctgtggcgacttcatctggggcgtcgtgcgcaaaggcctgcagtgcgcgcaacaaggacggttcttacacaggcttcatcaaggttcagctgaagctggtgcgccctgtctctgtgccctccagcaagaagccaccctccttgcaggatgcccggcggggcccaggacggggcacaagtgtcaggcgccgcacttccttttacctgcccaaggatgctgtcaagcacctgcatgtgctgtcacgcacaagggcacgtgaagtcattgaggccctgctgcgaaagttcttggtggtggatgacccccgcaagtttgcactctttgagcgcgctgagcgtcacggccaagtgtacttgcggaagctgttggatgatgagcagcccctgcggctgcggctcctggcagggcccagtgacaaggccctgagctttgtcctgaaggaaaatgactctggggaggtgaactgggacgccttcagcatgcctgaactacataacttcctacgtatcctgcagcgggaggaggaggagcacctccgccagatcctgcagaagtactcctattgccgccagaagatccaagaggccctgcacgcctgcccccttgggtgacctcttgtacccccaggtggaaggcagacagcaggcagcgccaagtgcgtgccgtgtgagtgtgacagggccagtggggcctgtggaatgagtgtgcatggaggccctcctgtgctgggggaatgagcccagagaacagcgaagtagcttgctccctgtgtccacctgtgggtgtagccaggtatggctctgcacccctctgccctcattactgggccttagtgggccagggctgccctgagaagctgctccaggcctgcagcaggagtggtgcagacagaagtctcctcaatttttgtctcagaagtgaaaatcttggagaccctgcaaacagaacagggtcatgtttgcaggggtgacggccctcatctatgaggaaaggttttggatcttgaatgtggtctcaggatatccttatcagagctaagggtgggtgctcagaataaggcaggcattgaggaagagtcttggtttctctctacagtgccaactcctcacacaccctgaggtcagggagtgctggctcacagtacagcatgtgccttaatgcttcatatgaggaggatgtccctgggccagggtctgtgtgaatgtgggcactggcccaggttcataccttatttgctaatcaaagccagggtctctccctcaggtgttttttatgaagtgcgtgaatgtatgtaatgtgtggtggcctcagctgaatgcctcctgtggggaaaggggttggggtgacagtcatcatcagggcctggggcctgagagaattggctcaataaagatttcaagatcc

SEQ ID NO: 174154 - DNA, 1842 bp, Homo sapiens
  Payload ID: 14184
  Gene Symbol: RASSF1
  Gene Name: Ras association (RalGDS/AF-6) domain family member 1
  Uniprot ID: Q9NS23
  ENST ID: ENST00000616212
  CDS Start-End: 478-1047
tctcctcagctccttcccgccgcccagtctggatcctgggggaggcgctgaagtcggggcccgccctgtggccccgcccggcccgcgcttgctagcgcccaaagccagcgaagcacgggcccaaccgggccatgtcgggggagcctgagctcattgagctgcgggagctggcacccgctgggcgcgctgggaagggccgcacccggctggagcgtgccaacgcgctgcgcatcgcgcggggcaccgcgtgcaaccccacacggcagctggtccctggccgtggccaccgcttccagcccgcggggcccgccacgcacacgtggtgcgacctctgtggcgacttcatctggggcgtcgtgcgcaaaggcctgcagtgcgcgcgacgagcctgtggagtgggagacacctgacctttctcaagctgagattgagcagaagatcaaggagtacaatgcccagatcaacagcaacctcttcatgagcttgaacaaggacggttcttacacaggcttcatcaaggttcagctgaagctggtgcgccctgtctctgtgccctccagcaagaagccaccctccttgcaggatgcccggcggggcccaggacggggcacaagtgtcaggcgccgcacttccttttacctgcccaaggatgctgtcaagcacctgcatgtgctgtcacgcacaagggcacgtgaagtcattgaggccctgctgcgaaagttcttggtggtggatgacccccgcaagtttgcactctttgagcgcgctgagcgtcacggccaagtgtacttgcggaagctgttggatgatgagcagcccctgcggctgcggctcctggcagggcccagtgacaaggccctgagctttgtcctgaaggaaaatgactctggggaggtgaactgggacgccttcagcatgcctgaactacataacttcctacgtatcctgcagcgggaggaggaggagcacctccgccagatcctgcagaagtactcctattgccgccagaagatccaagaggccctgcacgcctgcccccttgggtgacctcttgtacccccaggtggaaggcagacagcaggcagcgccaagtgcgtgccgtgtgagtgtgacagggccagtggggcctgtggaatgagtgtgcatggaggccctcctgtgctgggggaatgagcccagagaacagcgaagtagcttgctccctgtgtccacctgtgggtgtagccaggtatggctctgcacccctctgccctcattactgggccttagtgggccagggctgccctgagaagctgctccaggcctgcagcaggagtggtgcagacagaagtctcctcaatttttgtctcagaagtgaaaatcttggagaccctgcaaacagaacagggtcatgtttgcaggggtgacggccctcatctatgaggaaaggttttggatcttgaatgtggtctcaggatatccttatcagagctaagggtgggtgctcagaataaggcaggcattgaggaagagtcttggtttctctctacagtgccaactcctcacacaccctgaggtcagggagtgctggctcacagtacagcatgtgccttaatgcttcatatgaggaggatgtccctgggccagggtctgtgtgaatgtgggcactggcccaggttcataccttatttgctaatcaaagccagggtctctccctcaggtgttttttatgaagtgcgtgaatgtatgtaatgtgtggtggcctcagctgaatgcctcctgtggggaaaggggttggggtgacagtcatcatcagggcctggggcctgagagaattggctcaataaagatttcaagatcctc

SEQ ID NO: 174155 - DNA, 5282 bp, Homo sapiens
  Payload ID: 14185
  Gene Symbol: RASSF2
  Gene Name: Ras association (RalGDS/AF-6) domain family member 2
  Uniprot ID: P50749
  ENST ID: ENST00000379376
  CDS Start-End: 55-1035
aatgctgtgagttccttgttaggcctctccttccgatgaaaagagaaaggaagaatggactacagccaccaaacgtccctagtcccatgtggacaagataaatacatttccaaaaatgaacttctcttgcatctgaagacctacaacttgtactatgaaggccagaatttacagctccggcaccgggaggaagaagacgagttcattgtggaggggctcctgaacatctcctggggcctgcgccggcccattcgcctgcagatgcaggatgacaacgaacgcattcgaccccctccatcctcctcctcctggcactctggctgtaacctgggggctcagggaaccactctgaagcccctgactgtgcccaaagttcagatctcagaggtggatgccccgccggagggtgaccagatgccaagctccacagactccaggggcctgaagcccctgcaggaggacaccccacagctgatgcgcacacgcagtgatgttggggtgcgtcgccgtggcaatgtgaggacgcctagtgaccagcggcgaatcagacgccaccgcttctccatcaacggccatttctacaaccataagacatccgtgttcacaccagcctatggctctgtcaccaacgtccgcatcaacagcaccatgaccaccccacaggtcctgaagctgctgctcaacaaatttaagattgagaattcagcagaggagtttgccttgtacgtggtccatacgagtggtgagaaacagaagctgaaggccaccgattacccgctgattgcccgaatcctccagggcccatgtgagcagatctccaaagtgttcctaatggagaaggaccaggtggaggaagtcacctacgacgtggcccagtatataaagttcgagatgccggtacttaaaagcttcattcagaagctccaggaggaagaagatcgggaagtaaagaagctgatgcgcaagtacaccgtgctccggctaatgattcgacagaggctggaggagatagccgagaccccagcaacaatctgagccatgagaacgaggggatctgggcaccccaggaaccgccattgcccataagacccccaggaagctaggcactttctttccatggaaacatttagacacaaacctccccagctccggccaagccatcatttgctacctggagctggatgtagaagtcagcagacagctccctatccctggacccctgccctccttttttctgctcacaaggacttttgattttagttataaggaggacccaaaatgtgtgtgtgtacatgtgtgtgcacacatggtacgtgtccatgtgcctacctgatactttcacatgtaattaaattccaggcaaccagcacaagagccgtgagcttggcacatgtgctgctcgtgagcaggaaaatcagaggagccactgatctgagtggtatttaggttgaaggaaagatttctcctctcaagtgccagggagcagccacacgtctgtctgtgtttagagagggaagagggttctccaggttcaccatttgggttgtttatatgttggtagaaattctccctgtatgcctagaaggatcagtgaatgtaagagccttggaaattaacaaaataacagccacataaccttgcggcaagtctgatggaaagaaaaagataaaccatccgtggggtagatgcaataagcccacgtatttttacactggaaacgttgattgttttaaatgacaaagacatatgtgatgttctatgtggaaacctgtgaagagtggattctgcctccatctctgcctccatggctacctttaggagacagagaagatcctgtgtgtttctctgtacccagctgacagcctgtctctatggcgcttccttgagtggaaggaaatgtctcaagaaacaaagatctcgctggtgcgtacacagtgctgaccagctagtgtggccagggcctggtggcctggtggccaggaagtttcaggttgaagggaaatgtcgaggctacctgcagatatgacaggtgccttgaacgcagcccatcttcatgtcatcaaaggtcttcctgcacttgaagctggggcgatgtttgcagtcaagaccattctttccaacctctgggttcttgcaagttgccctcaccttgtgtgtggagatgcattccaagaatgaagcctcatcttgctactgagtgtggggttcagggaagctctttaggccacctggtgaaggtgcatggggaggatggagcttctcctcagctcctctgagcagccacctatgtgatctttaaatccaaccccaatgggagaaaagggcaagaacagtctgtgccctgggactcctatcaggaagcttgacaggcagctgggcatcagtgcagctgatatcgtttgaggagggagacagatgcttggacctgggtgcctggctatggagattgaccaagcaagatcaggagctcctgatagcaggcgtctttgagcctagctggggtagaggcactgcccatctcttctccaccttctctccacagaatgtttgcagagctgggcagttgaggaaaggacagcccctggttggtgcctccaaaggaaggtggacttttttggtggagacgtttctgccctgggcaccctcctgcccccgattcatacctatggcttcttgagaaggctcacagctgtggtcttaacgtagactgcagaaagatggcatgcggcccctggcatttcgccaagggttttatagcaagtctccttcctccatagggacagcagcaccagccctgtggggcatggagtggaagcccagaagggcttctgcaagctgcacagaactggggtaagaagacaaagagtagccaccgggagaggcttcctttgttacagctgggaaagaacagttctgtgaatgcaaacacctcctgagttttgcaattgagaaaatgatttggagaacttctcttctggtaatttttattttgaatgttcagggccttagttggccccagtaattctccttggaggacttgggagaagaatttccacaaagcaaactactaaccactagctcttactggacagcgatttctggcttataagagttctctttgatttgcactagcactacgatagtgttagatggggaaatactgcaacatgtccagttggccagatcactttccaagggagcgatactaaggcagactcagctttttaaagatgggaggtcaggaggtggaagtgagaggagatcccatctcacacaacacacttccacgtaatgcagaccacacttttccattttgtcctgccctcttgagaggtcatttctcacgtcctaagaacctgatcagaaattttggaagggttctttgaaatagcagcagttgaaacagagacactttgccacagtgtggagcagattttctcactggtatcacatggtcttgcagttttgaactcttcgaccgatttgtgggagtttatgtaattgcgtgcaatgaacctgaaattgtgtaaaggacaaaagaccagtttatagggttgggttttttttccaacttgtgaaaagcagtttagctgcatctgtctccccaccacccccaccccgggaggggcttatgttacaaggtgatcaagtgaaggaaaaacctgagcctatctggctgggatggtggaattaagcacaaggtcacattctctgtgatcacatgagagggaaggtgatgacttaaatggcagggggtggggattatcttggggagaggctgaaaagcacaaaagatagtcttccctgtacgtattggtgaagaacgtgcacaaggctggatggacttcaacttggagttgagttgaggcaagaggatttctggatattagtcacccatctgcaagaaaaatgctgaggcctcgggtcaagattttgatctgagacatgctgatgcttcaaggagaaatattttcacaatcctctcttccctcaccagaagagaacagtactctctcctagaaacctctaggtaaacacattttatcctaatatcggtagcatataatgccccccccaaaatatctgttttccatgcaaaaaagtctcaacaagaagtctgtggagttgagtggttacttcaaagtgtcaggagagtgaagaaattggccacagaagagcaagaagctctcttaagaaaagggaattctctttaaagaaaccaccaccaacaacaaaacaaccaaaaaccatgttttatgtcaaagctctgtagcacagagaatgtggtgtcacagatacatcgccgagagaggtttctttctttcttttttttttttttgagacagagtctggttctgtttcccaggctggagtgcagtggtgggatctcagctcactgcaacatccgcctctggggttcaagtgattctcctgtctcagcctcccaagtagctggaattacagggacccgccaccacgcccggctaatttttttgtgtggttttagtagaggtggggtttcaccatcttggccaggctggtcttgaactcctgacctcgtgatccacccgcctaggcctcccaaagtgttgggattacaggcgtgagccactgtgcccagccaaaagagaaatttctacatgaacaaggcaatttcagtgtcttacagcggccaaaccatgacgtgaagaatgagataggagacaggagatcaccataagcgtccctgatatagcagcacacattttcacgtttccacttaaatcgttttgcacaaagtcttgcttcgctcagatgagatgagatatgatttcctagagatgtaaaaataagaatgaatgtggcgcccccttcttccagatgtaatagaaagctctgccctatcacaaggggggtgttgaagcgccccttgtgttttaactgtatttaactgagcacaagatgcacaagctgtggtgggaaaccctcagtttacctttggagtcttccctgcagatcgcagacctgtttccaggctgatgtttctggtgtgtaattgctagcgtttctgaagggttttcccaattgttttagccttgtgaagtattcttaattataacttgcctttcagcgatggtacatgacttgattcaacgtttggttctgaacttacacactgatgcgtttactcatctaacataatctgacagggcctcagcaagggagccatacatttttgtaacattttgatatgttttaatgcatctgacttagatcttactgaaataaagcacttttcaaag

SEQ ID NO: 174156 - DNA, 5427 bp, Homo sapiens
  Payload ID: 14185
  Gene Symbol: RASSF2
  Gene Name: Ras association (RalGDS/AF-6) domain family member 2
  Uniprot ID: P50749
  ENST ID: ENST00000379400
  CDS Start-End: 197-1177
ggggaggaagaaaggcgaaggcaaggcgaaggggtggagagtgatatgaagagcgagagaaaagagaggacagcggacgagcagatccggtatctggaatcccggcgcctagaacgtgtttttcgggagagcaaaggctgtgtctacggcagcctggggatatagcctctccttccgatgaaaagagaaaggaagaatggactacagccaccaaacgtccctagtcccatgtggacaagataaatacatttccaaaaatgaacttctcttgcatctgaagacctacaacttgtactatgaaggccagaatttacagctccggcaccgggaggaagaagacgagttcattgtggaggggctcctgaacatctcctggggcctgcgccggcccattcgcctgcagatgcaggatgacaacgaacgcattcgaccccctccatcctcctcctcctggcactctggctgtaacctgggggctcagggaaccactctgaagcccctgactgtgcccaaagttcagatctcagaggtggatgccccgccggagggtgaccagatgccaagctccacagactccaggggcctgaagcccctgcaggaggacaccccacagctgatgcgcacacgcagtgatgttggggtgcgtcgccgtggcaatgtgaggacgcctagtgaccagcggcgaatcagacgccaccgcttctccatcaacggccatttctacaaccataagacatccgtgttcacaccagcctatggctctgtcaccaacgtccgcatcaacagcaccatgaccaccccacaggtcctgaagctgctgctcaacaaatttaagattgagaattcagcagaggagtttgccttgtacgtggtccatacgagtggtgagaaacagaagctgaaggccaccgattacccgctgattgcccgaatcctccagggcccatgtgagcagatctccaaagtgttcctaatggagaaggaccaggtggaggaagtcacctacgacgtggcccagtatataaagttcgagatgccggtacttaaaagcttcattcagaagctccaggaggaagaagatcgggaagtaaagaagctgatgcgcaagtacaccgtgctccggctaatgattcgacagaggctggaggagatagccgagaccccagcaacaatctgagccatgagaacgaggggatctgggcaccccaggaaccgccattgcccataagacccccaggaagctaggcactttctttccatggaaacatttagacacaaacctccccagctccggccaagccatcatttgctacctggagctggatgtagaagtcagcagacagctccctatccctggacccctgccctccttttttctgctcacaaggacttttgattttagttataaggaggacccaaaatgtgtgtgtgtacatgtgtgtgcacacatggtacgtgtccatgtgcctacctgatactttcacatgtaattaaattccaggcaaccagcacaagagccgtgagcttggcacatgtgctgctcgtgagcaggaaaatcagaggagccactgatctgagtggtatttaggttgaaggaaagatttctcctctcaagtgccagggagcagccacacgtctgtctgtgtttagagagggaagagggttctccaggttcaccatttgggttgtttatatgttggtagaaattctccctgtatgcctagaaggatcagtgaatgtaagagccttggaaattaacaaaataacagccacataaccttgcggcaagtctgatggaaagaaaaagataaaccatccgtggggtagatgcaataagcccacgtatttttacactggaaacgttgattgttttaaatgacaaagacatatgtgatgttctatgtggaaacctgtgaagagtggattctgcctccatctctgcctccatggctacctttaggagacagagaagatcctgtgtgtttctctgtacccagctgacagcctgtctctatggcgcttccttgagtggaaggaaatgtctcaagaaacaaagatctcgctggtgcgtacacagtgctgaccagctagtgtggccagggcctggtggcctggtggccaggaagtttcaggttgaagggaaatgtcgaggctacctgcagatatgacaggtgccttgaacgcagcccatcttcatgtcatcaaaggtcttcctgcacttgaagctggggcgatgtttgcagtcaagaccattctttccaacctctgggttcttgcaagttgccctcaccttgtgtgtggagatgcattccaagaatgaagcctcatcttgctactgagtgtggggttcagggaagctctttaggccacctggtgaaggtgcatggggaggatggagcttctcctcagctcctctgagcagccacctatgtgatctttaaatccaaccccaatgggagaaaagggcaagaacagtctgtgccctgggactcctatcaggaagcttgacaggcagctgggcatcagtgcagctgatatcgtttgaggagggagacagatgcttggacctgggtgcctggctatggagattgaccaagcaagatcaggagctcctgatagcaggcgtctttgagcctagctggggtagaggcactgcccatctcttctccaccttctctccacagaatgtttgcagagctgggcagttgaggaaaggacagcccctggttggtgcctccaaaggaaggtggacttttttggtggagacgtttctgccctgggcaccctcctgcccccgattcatacctatggcttcttgagaaggctcacagctgtggtcttaacgtagactgcagaaagatggcatgcggcccctggcatttcgccaagggttttatagcaagtctccttcctccatagggacagcagcaccagccctgtggggcatggagtggaagcccagaagggcttctgcaagctgcacagaactggggtaagaagacaaagagtagccaccgggagaggcttcctttgttacagctgggaaagaacagttctgtgaatgcaaacacctcctgagttttgcaattgagaaaatgatttggagaacttctcttctggtaatttttattttgaatgttcagggccttagttggccccagtaattctccttggaggacttgggagaagaatttccacaaagcaaactactaaccactagctcttactggacagcgatttctggcttataagagttctctttgatttgcactagcactacgatagtgttagatggggaaatactgcaacatgtccagttggccagatcactttccaagggagcgatactaaggcagactcagctttttaaagatgggaggtcaggaggtggaagtgagaggagatcccatctcacacaacacacttccacgtaatgcagaccacacttttccattttgtcctgccctcttgagaggtcatttctcacgtcctaagaacctgatcagaaattttggaagggttctttgaaatagcagcagttgaaacagagacactttgccacagtgtggagcagattttctcactggtatcacatggtcttgcagttttgaactcttcgaccgatttgtgggagtttatgtaattgcgtgcaatgaacctgaaattgtgtaaaggacaaaagaccagtttatagggttgggttttttttccaacttgtgaaaagcagtttagctgcatctgtctccccaccacccccaccccgggaggggcttatgttacaaggtgatcaagtgaaggaaaaacctgagcctatctggctgggatggtggaattaagcacaaggtcacattctctgtgatcacatgagagggaaggtgatgacttaaatggcagggggtggggattatcttggggagaggctgaaaagcacaaaagatagtcttccctgtacgtattggtgaagaacgtgcacaaggctggatggacttcaacttggagttgagttgaggcaagaggatttctggatattagtcacccatctgcaagaaaaatgctgaggcctcgggtcaagattttgatctgagacatgctgatgcttcaaggagaaatattttcacaatcctctcttccctcaccagaagagaacagtactctctcctagaaacctctaggtaaacacattttatcctaatatcggtagcatataatgccccccccaaaatatctgttttccatgcaaaaaagtctcaacaagaagtctgtggagttgagtggttacttcaaagtgtcaggagagtgaagaaattggccacagaagagcaagaagctctcttaagaaaagggaattctctttaaagaaaccaccaccaacaacaaaacaaccaaaaaccatgttttatgtcaaagctctgtagcacagagaatgtggtgtcacagatacatcgccgagagaggtttctttctttcttttttttttttttgagacagagtctggttctgtttcccaggctggagtgcagtggtgggatctcagctcactgcaacatccgcctctggggttcaagtgattctcctgtctcagcctcccaagtagctggaattacagggacccgccaccacgcccggctaatttttttgtgtggttttagtagaggtggggtttcaccatcttggccaggctggtcttgaactcctgacctcgtgatccacccgcctaggcctcccaaagtgttgggattacaggcgtgagccactgtgcccagccaaaagagaaatttctacatgaacaaggcaatttcagtgtcttacagcggccaaaccatgacgtgaagaatgagataggagacaggagatcaccataagcgtccctgatatagcagcacacattttcacgtttccacttaaatcgttttgcacaaagtcttgcttcgctcagatgagatgagatatgatttcctagagatgtaaaaataagaatgaatgtggcgcccccttcttccagatgtaatagaaagctctgccctatcacaaggggggtgttgaagcgccccttgtgttttaactgtatttaactgagcacaagatgcacaagctgtggtgggaaaccctcagtttacctttggagtcttccctgcagatcgcagacctgtttccaggctgatgtttctggtgtgtaattgctagcgtttctgaagggttttcccaattgttttagccttgtgaagtattcttaattataacttgcctttcagcgatggtacatgacttgattcaacgtttggttctgaacttacacactgatgcgtttactcatctaacataatctgacagggcctcagcaagggagccatacatttttgtaacattttgatatgttttaatgcatctgacttagatcttactgaaataaagcacttttcaaagaga

SEQ ID NO: 174157 - DNA, 1099 bp, Homo sapiens
  Payload ID: 14186
  Gene Symbol: RASSF3
  Gene Name: Ras association (RalGDS/AF-6) domain family member 3
  Uniprot ID: Q86WH2
  ENST ID: ENST00000283172
  CDS Start-End: 121-393
gctgcataaggactgcccggggctgcgcgccgggaacctcgcggggctggcgggcgccgcaccccctccctggccgcctgcgccccggggaggccgcccgcgcgcgacgggaccggcagcatgagcagcggctacagcagcctggaggaggacgccgaggacttcttcttcaccgccaggacctccttcttcaggagagcgccccagggcaagccccgctccggccaacaagatgttgagaaagagaaggaaacccacagttacctcagcaaagaggagatcaaagagaaagttcataaatacaacttagcagtcacagacaagttgaagatgaccttgtctacgcctgcaagctctcagaccgggaacatccactctacctgcgtttggtagcagggcccagaacagacacacttagttttgttcttcgtgaacatgaaattggagagtgggaagccttcagccttccagaactacagaatttcttgcgcatcttggacaaggaagaagatgaacagctgcagaacctgaagaggcgctacacagcctacaggcagaagctggaagaagccctccgtgaggtgtggaagcctgattaaagcggggctccctgcccgtgaggcccggtgcaggaccgatgtacaaaacagcagcaagtgcctctcttctcagagggctgctgtcttgccccactatgctagggtcttcgcctttctatctgtagattttgttccccaaacctggtcacacagcatcctgcaccttagcgtcccatgtaagggactctgcaagcttgttgttcagcaccgcagtgttacctcttggcaagctgtgaacctgtcgcctcatcaggagcattcgagggtgcttggaagcatgaactctgggggtgtttttttttttggttattttaattatgtgatgatgctgttaagcttacagatatgcagttgattttttaaaaagcttaactaggaatctttctgaatacttgtcctattttgaaactacctgtctggttttttgtttggttttgttttctttttttaatgtcagaggaatctatccatgtgaatcgaaaggcacaggaatctaggaa

SEQ ID NO: 174158 - DNA, 1030 bp, Homo sapiens
  Payload ID: 14186
  Gene Symbol: RASSF3
  Gene Name: Ras association (RalGDS/AF-6) domain family member 3
  Uniprot ID: Q86WH2
  ENST ID: ENST00000336061
  CDS Start-End: 44-760
gctgcataaggactgcccggggctgcgcgacgggaccggcagcatgagcagcggctacagcagcctggaggaggacgccgaggacttcttcttcaccgccaggacctccttcttcaggagagcgccccagggcaagccccgctccggccaacaagatgttgagaaagagaaggaaacccacagttacctcagcaaagaggagatcaaagagaaagttcataaatacaacttagcagtcacagacaagttgaagatgaccttgaattcaaatgggatttacactggcttcattaaagtacagatggaactctgcaaacctccacagacttctccaaattctggaaaactctctcccagtagcaatggctgtatgaatacacttcatatcagcagcacaaacactgtcggggaagtgatcgaggccctgctcaaaaagtttctcgtgactgagagccctgccaagtttgcactttataagcgttgtcacagggaagaccaagtctacgcctgcaagctctcagaccgggaacatccactctacctgcgtttggtagcagggcccagaacagacacacttagttttgttcttcgtgaacatgaaattggagagtgggaagccttcagccttccagaactacagaatttcttgcgcatcttggacaaggaagaagatgaacagctgcagaacctgaagaggcgctacacagcctacaggcagaagctggaagaagccctccgtgaggtgtggaagcctgattaaagcggggctccctgcccgtgaggcccggtgcaggaccgatgtacaaaacagcagcaagtgcctctcttctcagagggctgctgtcttgccccactatgctagggtcttcgcctttctatctgtagattttgttccccaaacctggtcacacagcatcctgcaccttagcgtcccatgtaagggactctgcaagcttgttgttcagcaccgcagtgttacctcttggcaagctgtgaacctgtcgcctcatcaggagcattcgagggtgct

SEQ ID NO: 174159 - DNA, 3492 bp, Homo sapiens
  Payload ID: 14186
  Gene Symbol: RASSF3
  Gene Name: Ras association (RalGDS/AF-6) domain family member 3
  Uniprot ID: Q86WH2
  ENST ID: ENST00000542104
  CDS Start-End: 121-837
gctgcataaggactgcccggggctgcgcgccgggaacctcgcggggctggcgggcgccgcaccccctccctggccgcctgcgccccggggaggccgcccgcgcgcgacgggaccggcagcatgagcagcggctacagcagcctggaggaggacgccgaggacttcttcttcaccgccaggacctccttcttcaggagagcgccccagggcaagccccgctccggccaacaagatgttgagaaagagaaggaaacccacagttacctcagcaaagaggagatcaaagagaaagttcataaatacaacttagcagtcacagacaagttgaagatgaccttgaattcaaatgggatttacactggcttcattaaagtacagatggaactctgcaaacctccacagacttctccaaattctggaaaactctctcccagtagcaatggctgtatgaatacacttcatatcagcagcacaaacactgtcggggaagtgatcgaggccctgctcaaaaagtttctcgtgactgagagccctgccaagtttgcactttataagcgttgtcacagggaagaccaagtctacgcctgcaagctctcagaccgggaacatccactctacctgcgtttggtagcagggcccagaacagacacacttagttttgttcttcgtgaacatgaaattggagagtgggaagccttcagccttccagaactacagaatttcttgcgcatcttggacaaggaagaagatgaacagctgcagaacctgaagaggcgctacacagcctacaggcagaagctggaagaagccctccgtgaggtgtggaagcctgattaaagcggggctccctgcccgtgaggcccggtgcaggaccgatgtacaaaacagcagcaagtgcctctcttctcagagggctgctgtcttgccccactatgctagggtcttcgcctttctatctgtagattttgttccccaaacctggtcacacagcatcctgcaccttagcgtcccatgtaagggactctgcaagcttgttgttcagcaccgcagtgttacctcttggcaagctgtgaacctgtcgcctcatcaggagcattcgagggtgcttggaagcatgaactctgggggtgtttttttttttggttattttaattatgtgatgatgctgttaagcttacagatatgcagttgattttttaaaaagcttaactaggaatctttctgaatacttgtcctattttgaaactacctgtctggttttttgtttggttttgttttctttttttaatgtcagaggaatctatccatgtgaatcgaaaggcacaggaatctaggaactctgaggaatttattgtgaaggattttgttagggggttgacagagaaagcaaagtgtaagtttggaagaaggcatgtgcggtggtggcgagtgctgcgggctatggaaggtgacttggcttttcagttaggggtagtggagaaaggggtagttgcttgtaaacgagttaaaagcattcagtgtggaggtgttaaacccattttaggatcgcttggtttcctggtgggtagaatatgggaacagagccagaggcaggagctaaaccaaaaggagggacccatgaactctgcagctgaccaatcagagaatcaggcaggtgtagcctactgacctgggcagaggtgggcctcacgcagctggatccgaccctttaattctgcccttttggagtggaaggtctgattggtgtagctgctctgcataggcaggacagtgacagttcactaactcttgttaagttacatagtgtatagctttccccccacaggtggttttcaaagttgagacggaatttgggtaggggcagctgtttttcccttgattgttagctaggatatttgtcaagtaaactttggtgacaatcactctcttcccttttattcctcctttccttttcctttcttcccttttttctttccttccctgctgtctcccaccctaccttgttcttttcctccctccctccctccctccctccctccctccctccttccctccctctctctccctctccctttcttttctacattgaaatctgttcttacataatagagaacagggctattgaataaagacccaatcctaccagatctttagttctaaagggcaacttgactgtgagtaggagggcccccaagaaagggaggaaagtccacacccagctaaccacacaacagggcttcattatggaaatattttaacaaaagtacatgttattaccaaccaaagagatgcatgtgcaatagaagccttccttaaaaacaggctaaataacctcattttatgcagcagtttaatctgagaacagagggaaaggtgtgcagtggttccagaggggccttatattctatttttagtctagatattttttgtttataaattcccaaggaattgttaacactttggtgacacctaatggattctttttgaaattccaaggtgcttcagttctttgcccaagtgaactgtgccttttattgcatttctgttcgtctcttggtggctcttctgactttttggagaatacccatcttgttggaggcagacttaagttgttatgctgtgccacacaatttactgagacaatcatatcttcctaagcatttaaggaaagttgaaaaaaatagaattagctataaaatatgtatggcacatcttgtttaattttgcatgtaacttctcttttgtacattgatgaggttttagtgacattgtcatccaacactttacctttattgttcagggaatgccttcgtgattttttgtactggttttattattcagactatggcctggatttgagtatattgttattaccacctggttttttaattattcatcccagtaaacttatattttgtgaagcatttgtttctcagattaagacactgttagaacctaaagtagtagctgatgggtatctgtgaattttttttttttttttttttttacttgaagtagattgtctgaataggcatcctcatctatatttacccaaaacctcgcttactgtcatgtgcactacaaattgcaatttggaaacctactgtattgaaattctgtcagtttatggttcttgaagactgatgtcctttcccaaacactggttactgcagcagcatttttaatgtgtaagtgaagaaaaaaggccactaaggccaaagattttttaagaatcattgtacaaatcattatgttaaactatctaagctttgctgtaatactgttttctcttcaatatgtgatggtacaggaaggatgttaaatgaaggggtggtattgcaggagagcattttaaatggcagaagtaaaaagttataatatttataattttgatgggtttaagtttatttttgtagggaagatttttctcccctaaaatagtttctagaatggcaaaattgtttccattattaaaaattgaagttattagtt

SEQ ID NO: 174160 - DNA, 3641 bp, Homo sapiens
  Payload ID: 14187
  Gene Symbol: RASSF4
  Gene Name: Ras association (RalGDS/AF-6) domain family member 4
  Uniprot ID: Q9H2L5
  ENST ID: ENST00000340258
  CDS Start-End: 114-1079
cgctgcgggcgcagctccggtgcaagcgaggacacgacacatgcagtggcttctggactgcgcgatgactggacgcaagtaacttctaggtctgcagacaagaggaagagaagatgaaggaagactgtctgccgagttctcacgtgcccatcagtgacagcaagtccattcagaagtcggagctcttaggcctgctgaaaacctacaactgctaccatgagggcaagagcttccagctgagacaccgtgaggaagaagggactctgatcatcgaggggctcctcaacattgcctgggggctgaggcggcccatccggctgcagatgcaggatgaccgggagcaggtgcacctcccctccacctcatggatgcccagacggcctagctgccctctaaaggagccatcgccccagaacgggaacatcacagcccaggggccaagcattcagccagtgcacaaggctgagagttccacagacagctcggggcccctggaggaggcagaggaggccccccagctgatgcggaccaagagcgacgccagttgcatgagccagaggaggcccaagtgccgcgcccccggtgaggcccagcgcatccggcgacaccggttctctatcaacggccacttctacaatcataagacctccgtgtttactccagcctatggatccgtgaccaatgtgagggtcaacagcaccatgacaaccctgcaggtgctcaccctgctgctgaacaaatttagggtggaagatggccccagtgagttcgcactctacatcgttcacgagtctggggagcggacaaaattaaaagactgcgagtacccgctgatttccagaatcctgcatgggccatgtgagaagatcgccaggatcttcctgatggaagctgacttgggcgtggaagtcccccatgaagtcgctcagtacattaagtttgaaatgccggtgctggacagttttgttgaaaaattaaaagaagaggaagaaagagaaataatcaaactgaccatgaagttccaagccctgcgtctgacgatgctgcagcgcctggagcagctggtggaggccaagtaactggccaacacctgcctcttccaaagtccccagcagtggcaggtgtacactgagccctggttgctggccccggccggtcacattgactgatggccaccgcctgacgaatcgagtgcctgtgtgtctacctctctgaagcctgagcaccatgattcccacagccagctcttggctccaagatgagcacccacaggaagccgacccaggcctgaggggccaggaacttgctgggtcagatctgtgtggccagccctgtccacaccatgcctctcctgcactggagagcagtgctggcccagcccctgcggcttaggcttcatctgcttgcacattgcctgtcccagagcccctgtgggtccacaagcccctgtcctcttccttcatatgagattcttgtctgccctcatatcacgctgccccacaggaatgctgctgggaaaagcagggcctgccagcaggtatgagatctagcctgctttcagccatcaccttgccacagtgtccccggcttctaagcctccaatatcaccctgtgagcctcgcacagctcagccccaacacagaggtgagaccaggaataaggccacaagtatctcactttctctgcagaaatcaatctttacttcatcagagagacctaaagcgattcttacaaggagcttgctgcaagaaacacggtcattcaatcacattgaggagggtccacatggcattgagagggtgctgcccgctcaatgcccagcagcagctctggaaggcagtgctcagccccatcaccactgtcccgtggatgcctgtgtacctcttgccttttctgggcttgcgtttctctcctctagtgggtggggatgactttcaatgactttcaatacttcccctgaaggaagaatgataaggagaaatgtctgttttgaggaaagggctttgaattccccagatactgaacaatttgtgtttgtgactgatggagaatttcaggaatgaatgagaaagcctttgcgaaactatgcaacagtttacatcagtcatgtgaagtatttgtctaaaacagagcaaactgaagaccaaattattctcctgttgaggtccgtggatggcagatttaaagggaagaaccacaaaggcttgcaaagataggagaggctccatctctaatgcatgtagaagctccttacgggtgcccatcaagagcatagcttggaagccaccatgctgtgcggaactgcgtcagggcaaatgtcacagcaggatttccccaacccagctccatcatcacagacacagagagctgcaggggaggcctgcccactgttttgtcgactctgccctcctctggcagcatagatccttaggtgctcaataaaggtgtgctgtattgaactgaagaagtgagaaccaagcttttttttttttttttgctttctgtgcatccaccctgacccccggctctaacttctgaaactcttatcctaaaggatgtgtggccatgtttggcagaagagccacaactcgctgctctaggagccgacatgactccttcatttctgtgcatgccctggggactagggtggagcctgaggagaggctgccatggaacacgcaggcgtcactggtgggagcctagaggtgacctggatgatgagcaatagagtcaccccgagtcacagaatcttagcatcaggagggccccaagaatcttccaggccaggggctcaggtgggatggaagcagggcctaggagagggtacaaaacaaatcaaacaggagctcccaggtaattgtactcccaagctattatttacaatctcaggtggaggacagctcctgtcccattgttcagctgtaactgagtgactgccttgtgccaggcctgtgctcagccctggaggcacaaagatggagccagtctgtcctgtgtctaggggtcttctcatcaggagaagaaggccagacactggaagggtcaagagatcagctgagcaacgaaccggcaaagctcctgggagtgaggtggaggccaaggcagagttggctaagaagtgcatgtggcgtcacaggccaagatgcacctgccagctaggagcaggccaggtcctggcacacaggaagccagtggagcaggagaccctccctaagtaccagcctgtttggttggttggtttgcttttgaaagttattacaatattatttaaggccttttcggataagttcacttttaaagtaggtgttatcaatctaatttctgaacgttatgggtcagaaaaatcactagcaagtggctcagaaaaagggaaaaggtacacttctgcaatcagctgaggagttcacacctttttttctaaatcaacatcatatttgctgttcagaggcaatctgaaaagctgcaaattcagctcacctcaaccccataatttcaaacgttagaggctggtctctgtggtttcctactggttcctgtggggagctcccgctttctttctacatagagcttagggtatttctcatatgccccattggctacctagtgtctcaggtaataaacgtatccgaagataaagcaaa

SEQ ID NO: 174161 - DNA, 528 bp, Homo sapiens
  Payload ID: 14187
  Gene Symbol: RASSF4
  Gene Name: Ras association (RalGDS/AF-6) domain family member 4
  ENST ID: ENST00000427758
  CDS Start-End: 75-528
catgcagtggcttctggactgcgcgatgactggacgcaagtaacttctaggtctgcagacaagaggaagagaagatgaaggaagactgtctgccgagttctcacgtgcccatcagtgacagcaagtccattcagaagtcggagctcttaggcctgctgaaaacctacaactgctaccatgagggcaagagcttccagctgagacaccgtgaggaagaagggactctgatcatcgaggggctcctcaacattgcctgggggctgaggcggcccatccggctgcagatgcaggatgaccgggagcaggtgcacctcccctccacctcatggatgcccagacggcctagctgccctctgggctgctggtctcttctccttggcctgagctccctttctctgccggcagccatctcagccctgcagttgtctgttttcagaaaggagccatcgccccagaacgggaacatcacagcccaggggccaagcattcagccagtgcacaaggctgagagttccacagacagctcgg

SEQ ID NO: 174162 - DNA, 435 bp, Homo sapiens
  Payload ID: 14187
  Gene Symbol: RASSF4
  Gene Name: Ras association (RalGDS/AF-6) domain family member 4
  ENST ID: ENST00000428466
  CDS Start-End: 1-372
agttctcacgtgcccatcagtgacagcaagtccattcagaagtcggagctcttaggcctgctgaaaacctacaactgctaccatgagggcaagagcttccagctgagacaccgtgaggaagaagggactctgatcatcgaggggctcctcaacattgcctgggggctgaggcggcccatccggctgcagatgcaggatgaccgggagcaggtgcacctcccctccacctcatggatgcccagacggcctagctgccctctccaccttgctggcaagaagggacgactacagccaggggggctcccaacacctatgcaagccgaacatgtctcgccatctcttgttctatctttaaaattcacacgaatttagcctcttactactctgttttcattttaatgtcaaaattttaaaaataaatttatcagaatttca

SEQ ID NO: 174163 - DNA, 734 bp, Homo sapiens
  Payload ID: 14187
  Gene Symbol: RASSF4
  Gene Name: Ras association (RalGDS/AF-6) domain family member 4
  ENST ID: ENST00000483709
  CDS Start-End: 67-216
ggcttctggactgcgcgatgactggacgcaagtaacttctaggtctgcagacaagaggaagagaagatgaaggaagactgtctgccgagttctcacgtgcccatcagtgacagcaagtccattcagaagtcggagctcttaggcctgctgaaaacctacaactgctaccatgagggcaagagcttccagctgagacaccgtgaggaagctcagtgacacatctgtgcttgtagagcaccagaagaagggactctgatcatcgaggggctcctcaacattgcctgggggctgaggcggcccatccggctgcagatgcaggatgaccgggagcaggtgcacctcccctccacctcatggatgcccagacggcctagctgccctctaaaggagccatcgccccagaacgggaacatcacagcccaggggccaagcattcagccagtgcacaaggctgagagttccacagacagctcggggcccctggaggaggcagaggaggccccccagctgatgcggaccaagagcgacgccagttgcatgagccagaggaggcccaagtgccgcgcccccggtgaggcccagcgcatccggcgacaccggttctctatcaacggccacttctacaatcataagacctccgtgtttactccagcctatggatccgtgaccaatgtgagggtcaacagcaccatgacaaccctgcaggtgctcaccctgctgctgaacaaatttag

SEQ ID NO: 174164 - DNA, 491 bp, Homo sapiens
  Payload ID: 14187
  Gene Symbol: RASSF4
  Gene Name: Ras association (RalGDS/AF-6) domain family member 4
  ENST ID: ENST00000484477
  CDS Start-End: 1-253
gacaaccctgcaggtgctcaccctgctgctgaacaaatttagggtggaagatggccccagtgagttcgcactctacatcgttcacgagtctggggagcggacaaaattaaaagactgcgagtacccgctgatttccagaatcctgcatgggccatgtgagaagatcgccaggatcttcctgatggaagctgacttgggcgtggaagtcccccatgaagtgagtgggggccaaggctggggaggcctgctctagggtgaggggttcttgggtgacggggcctcccaaggactcctggccagagccctgtcagttgatgtctccaggagctccacactctcccaaagggctcccagcctagcacagggaggcgccagccctccctctcccatcagtgaccgccagcaccagcagcttaggggaaagaagaatttgggtcctataaaaccatggcctgtccttttcctctagggaagtaaagtcttttccttca

SEQ ID NO: 174165 - DNA, 2064 bp, Homo sapiens
  Payload ID: 14188
  Gene Symbol: RASSF5
  Gene Name: Ras association (RalGDS/AF-6) domain family member 5
  Uniprot ID: Q8WWW0
  ENST ID: ENST00000579436
  CDS Start-End: 74-1330
tctctcggggctggctcgggagtagcgcagtcgccaaagccgccgctgccaaagctgccgccactagccgggcatggccatggcgtccccggccatcgggcagcgcccgtacccgctactattggaccccgagccgccgcgctatctacagagcctgagcggccccgagctaccgccgccgccccccgaccggtcctcgcgcctctgtgtcccggcgcccctctccactgcgcccggggcgcgcgaggggcgcagcgcccggagggctgcccgggggaacctggagcccccgccccgggcctcccgacccgctcgcccgctccggcctggtctgcagcagagactgcggcggcggcctggagcgccccgaccccgcgacgtgcggagcatcttcgagcagccgcaggatcccagagtcccggcggagcgaggcgaggggcactgcttcgccgagttggtgctgccgggcggccccggctggtgtgacctgtgcggacgagaggtgctgcggcaggcgctgcgctgcactaactgtaaattcacctgtcacccagaatgccgcagcctgatccagttggactgcagtcagcaggagggtttatcccgggacagaccctctccagaaagcaccctcaccgtgaccttcagccagaatgtctgtaaacctgtggaggagacacagcgcccgcccacactgcaggagatcaagcagaagatcgacagctacaacacgcgagagaagaactgcctgggcatgaaactgagtgaagacggcacctacacgggtttcatcaaagtgcatctgaaactccggcggcctgtgacggtgcctgctgggatccggccccagtccatctatgatgccatcaaggaggtgaacctggcggctaccacggacaagcggacatccttctacctgcccctagatgccatcaagcagctgcacatcagcagcaccaccaccgtcagtgaggtcatccaggggctgctcaagaagttcatggttgtggacaatccccagaagtttgcactttttaagcggatacacaaggacggacaagtgctcttccagaaactctccattgctgaccgccccctctacctgcgcctgcttgctgggcctgacacggaggtcctcagctttgtgctaaaggagaatgaaactggagaggtagagtgggatgccttctccatccctgaacttcagaacttcctaacaatcctggaaaaagaggagcaggacaaaatccaacaagtgcaaaagaagtatgacaagtttaggcagaaactggaggaggccttaagagaatcccagggcaaacctgggtaaccggtcctgcttcctctcctcctggtgcattcagatttatttgtattattaattattattttgcaacagacactttttctcaggacatctctggcaggtgcatttgtgcctgcccagcagttccagctgtggcaaaagtctcttccatggacaagtgtttgcacgagggttcagctgtgcccgcccccaggctgtgccccaccacagattctgccaaggatcagaactcatgtgaaacaaacagctgacgtcctctctcgatctgcaagcctttcaccaaccaaatagttgcctctctcgtcaccaaactggaacctcacaccagccggcaaaggaaggaagaaaggttttagagctgtgtgttctttctctggcattgattcctctttgagttctcttacttgccacgtacaggaccattatttatgagtgaaaagttgtagcacattccttttgcaggtctgagctaagcccctgaaagcagggtaatgctcataaaaggactgttcccgcggccccaaggtgcctgttgttcacacttaagggaagtttataaagctactggccccagatgctcagggtaaggagcaccaaagctgaggctggctcagagatctccagagaagctgcagcctgccctggccctggctctggccctggcccacattgcacatggaaacccaaaggcatatatctgcgtatgtgtggtacttagtcacatctttgtcaacaaa

SEQ ID NO: 174166 - DNA, 1932 bp, Homo sapiens
  Payload ID: 14188
  Gene Symbol: RASSF5
  Gene Name: Ras association (RalGDS/AF-6) domain family member 5
  Uniprot ID: Q8WWW0
  ENST ID: ENST00000580449
  CDS Start-End: 58-1068
cgggagtagcgcagtcgccaaagccgccgctgccaaagctgccgccactagccgggcatggccatggcgtccccggccatcgggcagcgcccgtacccgctactattggaccccgagccgccgcgctatctacagagcctgagcggccccgagctaccgccgccgccccccgaccggtcctcgcgcctctgtgtcccggcgcccctctccactgcgcccggggcgcgcgaggggcgcagcgcccggagggctgcccgggggaacctggagcccccgccccgggcctcccgacccgctcgcccgctccggcctggtctgcagcagagactgcggcggcggcctggagcgccccgaccccgcgacgtgcggagcatcttcgagcagccgcaggatcccagagtcccggcggagcgaggcgaggggcactgcttcgccgagttggtgctgccgggcggccccggctggtgtgacctgtgcggacgagaggtgctgcggcaggcgctgcgctgcactaactgtaaattcacctgtcacccagaatgccgcagcctgatccagttggactgcagtcagcaggagggtttatcccgggacagaccctctccagaaagcaccctcaccgtgaccttcagccagaatgtctgtaaacctgtggaggagacacagcgcccgcccacactgcaggagatcaagcagaagatcgacagctacaacacgcgagagaagaactgcctgggcatgaaactgagtgaagacggcacctacacgggtttcatcaaagtgcatctgaaactccggcggcctgtgacggtgcctgctgggatccggccccagtccatctatgatgccatcaaggaggtgaacctggcggctaccacggacaagcggacatccttctacctgcccctagatgccatcaagcagctgcacatcagcagcaccaccaccgtcagtgaggtcatccaggggctgctcaagaagttcatggttgtggacaatccccagaagtttgcactttttaagcggatacacaaggacggacaagtgggatgccttctccatccctgaacttcagaacttcctaacaatcctggaaaaagaggagcaggacaaaatccaacaagtgcaaaagaagtatgacaagtttaggcagaaactggaggaggccttaagagaatcccagggcaaacctgggtaaccggtcctgcttcctctcctcctggtgcattcagatttatttgtattattaattattattttgcaacagacactttttctcaggacatctctggcaggtgcatttgtgcctgcccagcagttccagctgtggcaaaagtctcttccatggacaagtgtttgcacgagggttcagctgtgcccgcccccaggctgtgccccaccacagattctgccaaggatcagaactcatgtgaaacaaacagctgacgtcctctctcgatctgcaagcctttcaccaaccaaatagttgcctctctcgtcaccaaactggaacctcacaccagccggcaaaggaaggaagaaaggttttagagctgtgtgttctttctctggcattgattcctctttgagttctcttacttgccacgtacaggaccattatttatgagtgaaaagttgtagcacattccttttgcaggtctgagctaagcccctgaaagcagggtaatgctcataaaaggactgttcccgcggccccaaggtgcctgttgttcacacttaagggaagtttataaagctactggccccagatgctcagggtaaggagcaccaaagctgaggctggctcagagatctccagagaagctgcagcctgccctggccctggctctggccctggcccacattgcacatggaaacccaaaggcatatatctgcgtatgtgtggtacttagtcacatctttgtcaacaaa

SEQ ID NO: 174167 - DNA, 3496 bp, Homo sapiens
  Payload ID: 14188
  Gene Symbol: RASSF5
  Gene Name: Ras association (RalGDS/AF-6) domain family member 5
  Uniprot ID: Q8WWW0
  ENST ID: ENST00000577571
  CDS Start-End: 410-1207
gaactgctttacgcgaggggcaggaaaggcgcgggaggcgggggaggtgcggagatggcgctctgcacggcggcggagggagggcgctggcgccggggacacgaaaccgcagagcccggacgagtcagggagtgaggcgcgagccgggcgcccggggctctgcaggcgcaggcggcgcggggacaggagcaggttaccgggccgcccgagcgctcgcaccccgctgaaagaaacgcaggcggcccgccggctctgcctggtccgctacccgaccagctcccggctcggggctcagagctaggggcttacgccaagcggagcccggggaggggtgcccacctccctccgccgcatcccaagcccggcccccttgatgcgctggcggcctcggccgggaactccggggtagatgaccgtggacagcagcatgagcagtgggtactgcagcctggacgaggaactggaagactgcttcttcactgctaagactacctttttcagaaatgcgcagagcaaacatctttcaaagaatgtctgtaaacctgtggaggagacacagcgcccgcccacactgcaggagatcaagcagaagatcgacagctacaacacgcgagagaagaactgcctgggcatgaaactgagtgaagacggcacctacacgggtttcatcaaagtgcatctgaaactccggcggcctgtgacggtgcctgctgggatccggccccagtccatctatgatgccatcaaggaggtgaacctggcggctaccacggacaagcggacatccttctacctgcccctagatgccatcaagcagctgcacatcagcagcaccaccaccgtcagtgaggtcatccaggggctgctcaagaagttcatggttgtggacaatccccagaagtttgcactttttaagcggatacacaaggacggacaagtgctcttccagaaactctccattgctgaccgccccctctacctgcgcctgcttgctgggcctgacacggaggtcctcagctttgtgctaaaggagaatgaaactggagaggtagagtgggatgccttctccatccctgaacttcagaacttcctaacaatcctggaaaaagaggagcaggacaaaatccaacaagtgcaaaagaagtatgacaagtttaggcagaaactggaggaggccttaagagaatcccagggcaaacctgggtaaccggtcctgcttcctctcctcctggtgcattcagatttatttgtattattaattattattttgcaacagacactttttctcaggacatctctggcaggtgcatttgtgcctgcccagcagttccagctgtggcaaaagtctcttccatggacaagtgtttgcacgagggttcagctgtgcccgcccccaggctgtgccccaccacagattctgccaaggatcagaactcatgtgaaacaaacagctgacgtcctctctcgatctgcaagcctttcaccaaccaaatagttgcctctctcgtcaccaaactggaacctcacaccagccggcaaaggaaggaagaaaggttttagagctgtgtgttctttctctggcattgattcctctttgagttctcttacttgccacgtacaggaccattatttatgagtgaaaagttgtagcacattccttttgcaggtctgagctaagcccctgaaagcagggtaatgctcataaaaggactgttcccgcggccccaaggtgcctgttgttcacacttaagggaagtttataaagctactggccccagatgctcagggtaaggagcaccaaagctgaggctggctcagagatctccagagaagctgcagcctgccctggccctggctctggccctggcccacattgcacatggaaacccaaaggcatatatctgcgtatgtgtggtacttagtcacatctttgtcaacaaactgttcgtttttaagttacaaatttgaatttaatgttgtcatcatcgtcatgtgtttccccaaagggaagccagtcattgaccatttaaaaagtctcctgctaagtatggaaatcagacagtaagagaaagccaaaaagcaatgcagagaaaggtgtccaagctgtcttcagccttccccagctaaagagcagaggagggcctgggctacttgggttccccatcggcctccagcactgcctccctcctcccactgcgactctgggatctccaggtgctgcccaaggagttgccttgattacagagaggggagcctccaattcggccaacttggagtcctttctgttttgaagcatgggccagacccggcactgcgctcggagagccggtgggcctggcctccccgtcgacctcagtgcctttttgttttcagagagaaataggagtagggcgagtttgcctgaagctctgctgctggcttctcctgccaggaagtgaacaatggcggcggtgtgggagacaaggccaggagagcccgcgttcagtatgggttgagggtcacagacctccctcccatctgggtgcctgagttttgactccaatcagtgataccagaccacattgacagggaggatcaaattcctgacttacatttgcactggcttcttgtttaggctgaatcctaaaataaattagtcaaaaaattccaacaagtagccaggactgcagagacactccagtgcagagggagaaggacttgtaattttcaaagcagggctggttttccaacccagcctctgagaaaccatttctttgctatcctctgccttcccaagtccctcttgggtcggttcaagcccaagcttgttcgtgtagcttcagaagttccctctctgacccaggctgagtccatactgcccctgatcccagaaggaatgctgacccctcgtcgtatgaactgtgcatagtctccagagcttcaaaggcaacacaagctcgcaactctaagatttttttaaaccacaaaaaccctggttagccatctcatgctcagccttatcacttccctccctttagaaactctctccctgctgtatattaaagggagcaggtggagagtcattttccttcgtcctgcatgtctctaacattaatagaaggcatggctcctgctgcaaccgctgtgaatgctgctgagaacctccctctatggggatggctattttatttttgagaaggaaaaaaaaagtcatgtatatatacacataaaggcatatagctatatataaagagataagggtgtttatgaaatgagaaaattattggacaattcagactttactaaagcacagttagacccaaggcctatgctgaggtctaaacctctgaaaaaagtatagtatcgagtacccgttccctcccagaggtgggagtaactgctggtagtgccttctttggttgtgttgctcagtgtgtaagtgtttgtttccaggatattttctttttaaatgtctttcttatatgggttttaaaaaaaagtaataaaagcctgttgc

SEQ ID NO: 174168 - DNA, 5586 bp, Homo sapiens
  Payload ID: 14188
  Gene Symbol: RASSF5
  Gene Name: Ras association (RalGDS/AF-6) domain family member 5
  ENST ID: ENST00000581503
  CDS Start-End: 9-1061
agccgggcatggccatggcgtccccggccatcgggcagcgcccgtacccgctactattggaccccgagccgccgcgctatctacagagcctgagcggccccgagctaccgccgccgccccccgaccggtcctcgcgcctctgtgtcccggcgcccctctccactgcgcccggggcgcgcgaggggcgcagcgcccggagggctgcccgggggaacctggagcccccgccccgggcctcccgacccgctcgcccgctccggcctggtctgcagcagagactgcggcggcggcctggagcgccccgaccccgcgacgtgcggagcatcttcgagcagccgcaggatcccagagtcccggcggagcgaggcgaggggcactgcttcgccgagttggtgctgccgggcggccccggctggtgtgacctgtgcggacgagaggtgctgcggcaggcgctgcgctgcactaactgtaaattcacctgtcacccagaatgccgcagcctgatccagttggactgcagtcagcaggagggtttatcccgggacagaccctctccagaaagcaccctcaccgtgaccttcagccagaatgtctgtaaacctgtggaggagacacagcgcccgcccacactgcaggagatcaagcagaagatcgacagctacaacacgcgagagaagaactgcctgggcatgaaactgagtgaagacggcacctacacgggtttcatcaaagtgcatctgaaactccggcggcctgtgacggtgcctgctgggatccggccccagtccatctatgatgccatcaaggaggtgaacctggcggctaccacggacaagcggacatccttctacctgcccctagatgccatcaagcagctgcacatcagcagcaccaccaccgtcagtgaggtcatccaggggctgctcaagaagttcatggttgtggacaatccccagaagtttgcactttttaagcggatacacaaggacggacaaggtaggagaaagagtgaacccaaccagaccgttcccttcctacctgtgtccaagcccacccactaaaactcctgccggccttgggtgggagctgtgggcttctcctgagcaccaggggtccagctgcccatgtggtgttcagatctgtggaatccgggcagggaggcaagagcagagtccctgactctgcatgtgacttcaggaaaaccacaccctaggctcccatttcctgatctgtgcaatgggaggaatctgccccaccattcctaatctttcaggagatgatgtgaatggaatcatgctttaaactctgagcagacacccaagataaaaggttattgccctgttcattactgtcatgttcatttcattaaaaggcccgtgtctacttccagttgtacgtaccccacctctgcatttccaatcctttcccgcaagcctgggccccgcccttcttttctgggaagagctcccagcaccctctcttggtttgcagtgctcttccagaaactctccattgctgaccgccccctctacctgcgcctgcttgctgggcctgacacggaggtcctcagctttgtgctaaaggagaatgaaactggagaggtagaggtaggtctggacccattgtgcaaacccaggccttagggcaccctgggtgggtgcaggtgggtgttgtcctaactacctcacataggtgggagccacgcagcacgggcaggaaggtgactgttgagagagtgagcaggggtgggtgatgggcctgggggtcagtgtttcagccaggactctgaacaccctggggtagcacattagggcctgtgtgtggcaaggcctgtggaaagaaaggatttcatgtgctttatttctgaaaactcagggaggagggggaccaagaaactccctgtgctcaggcacaggctgtttttgcttcaaaatggcccgagggctaccaagctccatctctgggctccactgggtatagacgtttttgagccatttgtcctcccttttcttgacctccatcccccaaggggagctaaccagtgtgtagtcttgtggcataaactggagtaaaaccaggccggtgccacccatggcctgagaatgaccaacaggggaaggtctcagtgtttgtcacactgtgttcagtggaggcctagagttttaaggagttttgggagtcactgcggagatttagggatcaaggcagctgggactctgtcccttctccccatttcagcaagggccgctctgctcccatctgctttctttattggcatctgtgcagaatatgtttggaaaaagtactccatggacagtagctgaatgctgctggccctgtggaaagctcaggcactttgaagtgtggagacctgggctctagttccagttctgctgcaatgagctctgtgattgtgattacgccaccttccctgtgtggacttgaggtttctcacttatccatagcgaggaccaaaccagataaaccttagtactctattgtgctcaaagagcttaggagtctcaattgttggccgcacagggcttgtgctcttgggtcagcctgatggaagtccaaattgccttctgccatcagaggccaagtcctttaggggtaggcctgggccagtcaggctctcattatctgctctgccagtcatgggaggtagataccccaatttcccagcagataacaggctgagaagggtggaaagctgtgctcgaggtcacactgctgggagaggtggagtcaggcccaaccccggtctcctgagtccacgttccactcctccacctgctttctgagggtctgcatgttgggaggctgggtggttccagcatcactgtcaagatctcggctgctacacagaaacttaagattattgagtttcaaaataaaaacatggttcatagactggcaactcttggtcatgagatgccagcatttggaattttgttgctgctatgacaggcatgcaaagcccaggcttcgctgattcagtctgttcagtagcaaactgtgtgtgaatcacggatgtgaactgggaaggggaaggcagcagggtctctcaggtcgtgtcaacttctaacctgtctcctattctgtttcttcccacaaatctccctctcgcctcacagtgggatgccttctccatccctgaacttcagaacttcctaacaatcctggaaaaagaggagcaggacaaaatccaacaagtgcaaaagaagtatgacaagtttaggcagaaactggaggaggccttaagagaatcccagggcaaacctgggtaaccggtcctgcttcctctcctcctggtgcattcagatttatttgtattattaattattattttgcaacagacactttttctcaggacatctctggcaggtgcatttgtgcctgcccagcagttccagctgtggcaaaagtctcttccatggacaagtgtttgcacgagggttcagctgtgcccgcccccaggctgtgccccaccacagattctgccaaggatcagaactcatgtgaaacaaacagctgacgtcctctctcgatctgcaagcctttcaccaaccaaatagttgcctctctcgtcaccaaactggaacctcacaccagccggcaaaggaaggaagaaaggttttagagctgtgtgttctttctctggcattgattcctctttgagttctcttacttgccacgtacaggaccattatttatgagtgaaaagttgtagcacattccttttgcaggtctgagctaagcccctgaaagcagggtaatgctcataaaaggactgttcccgcggccccaaggtgcctgttgttcacacttaagggaagtttataaagctactggccccagatgctcagggtaaggagcaccaaagctgaggctggctcagagatctccagagaagctgcagcctgccctggccctggctctggccctggcccacattgcacatggaaacccaaaggcatatatctgcgtatgtgtggtacttagtcacatctttgtcaacaaactgttcgtttttaagttacaaatttgaatttaatgttgtcatcatcgtcatgtgtttccccaaagggaagccagtcattgaccatttaaaaagtctcctgctaagtatggaaatcagacagtaagagaaagccaaaaagcaatgcagagaaaggtgtccaagctgtcttcagccttccccagctaaagagcagaggagggcctgggctacttgggttccccatcggcctccagcactgcctccctcctcccactgcgactctgggatctccaggtgctgcccaaggagttgccttgattacagagaggggagcctccaattcggccaacttggagtcctttctgttttgaagcatgggccagacccggcactgcgctcggagagccggtgggcctggcctccccgtcgacctcagtgcctttttgttttcagagagaaataggagtagggcgagtttgcctgaagctctgctgctggcttctcctgccaggaagtgaacaatggcggcggtgtgggagacaaggccaggagagcccgcgttcagtatgggttgagggtcacagacctccctcccatctgggtgcctgagttttgactccaatcagtgataccagaccacattgacagggaggatcaaattcctgacttacatttgcactggcttcttgtttaggctgaatcctaaaataaattagtcaaaaaattccaacaagtagccaggactgcagagacactccagtgcagagggagaaggacttgtaattttcaaagcagggctggttttccaacccagcctctgagaaaccatttctttgctatcctctgccttcccaagtccctcttgggtcggttcaagcccaagcttgttcgtgtagcttcagaagttccctctctgacccaggctgagtccatactgcccctgatcccagaaggaatgctgacccctcgtcgtatgaactgtgcatagtctccagagcttcaaaggcaacacaagctcgcaactctaagatttttttaaaccacaaaaaccctggttagccatctcatgctcagccttatcacttccctccctttagaaactctctccctgctgtatattaaagggagcaggtggagagtcattttccttcgtcctgcatgtctctaacattaatagaaggcatggctcctgctgcaaccgctgtgaatgctgctgagaacctccctctatggggatggctattttatttttgagaaggaaaaaaaaagtcatgtatatatacacataaaggcatatagctatatataaagagataagggtgtttatgaaatgagaaaattattggacaattcagactttactaaagcacagttagacccaaggcctatgctgaggtctaaacctctgaaaaaagtatagtatcgagtacccgttccctcccagaggtgggagtaactgctggtagtgccttctttggttgtgttgctcagtgtgtaagtgtttgtttccaggatattttctttttaaatgtctttcttatatgggttttaaaaaaaagtaataaaagcctgttgcaaaaatg

SEQ ID NO: 174169 - DNA, 4499 bp, Homo sapiens
  Payload ID: 14188
  Gene Symbol: RASSF5
  Gene Name: Ras association (RalGDS/AF-6) domain family member 5
  ENST ID: ENST00000581888
  CDS Start-End: 1-558
gtctgtaaacctgtggaggagacacagcgcccgcccacactgcaggagatcaagcagaagatcgacagctacaacacgcgagagaagaactgcctgggcatgaaactgagtgaagacggcacctacacgggtttcatcaaagtgcatctgaaactccggcggcctgtgacggtgcctgctgggatccggccccagtccatctatgatgccatcaaggaggtgaacctggcggctaccacggacaagcggacatccttctacctgcccctagatgccatcaagcagctgcacatcagcagcaccaccaccgtcagtgaggtcatccaggggctgctcaagaagttcatggttgtggacaatccccagaagtttgcactttttaagcggatacacaaggacggacaagtgctcttccagaaactctccattgctgaccgccccctctacctgcgcctgcttgctgggcctgacacggaggtcctcagctttgtgctaaaggagaatgaaactggagaggtagaggtaggtctggacccattgtgcaaacccaggccttagggcaccctgggtgggtgcaggtgggtgttgtcctaactacctcacataggtgggagccacgcagcacgggcaggaaggtgactgttgagagagtgagcaggggtgggtgatgggcctgggggtcagtgtttcagccaggactctgaacaccctggggtagcacattagggcctgtgtgtggcaaggcctgtggaaagaaaggatttcatgtgctttatttctgaaaactcagggaggagggggaccaagaaactccctgtgctcaggcacaggctgtttttgcttcaaaatggcccgagggctaccaagctccatctctgggctccactgggtatagacgtttttgagccatttgtcctcccttttcttgacctccatcccccaaggggagctaaccagtgtgtagtcttgtggcataaactggagtaaaaccaggccggtgccacccatggcctgagaatgaccaacaggggaaggtctcagtgtttgtcacactgtgttcagtggaggcctagagttttaaggagttttgggagtcactgcggagatttagggatcaaggcagctgggactctgtcccttctccccatttcagcaagggccgctctgctcccatctgctttctttattggcatctgtgcagaatatgtttggaaaaagtactccatggacagtagctgaatgctgctggccctgtggaaagctcaggcactttgaagtgtggagacctgggctctagttccagttctgctgcaatgagctctgtgattgtgattacgccaccttccctgtgtggacttgaggtttctcacttatccatagcgaggaccaaaccagataaaccttagtactctattgtgctcaaagagcttaggagtctcaattgttggccgcacagggcttgtgctcttgggtcagcctgatggaagtccaaattgccttctgccatcagaggccaagtcctttaggggtaggcctgggccagtcaggctctcattatctgctctgccagtcatgggaggtagataccccaatttcccagcagataacaggctgagaagggtggaaagctgtgctcgaggtcacactgctgggagaggtggagtcaggcccaaccccggtctcctgagtccacgttccactcctccacctgctttctgagggtctgcatgttgggaggctgggtggttccagcatcactgtcaagatctcggctgctacacagaaacttaagattattgagtttcaaaataaaaacatggttcatagactggcaactcttggtcatgagatgccagcatttggaattttgttgctgctatgacaggcatgcaaagcccaggcttcgctgattcagtctgttcagtagcaaactgtgtgtgaatcacggatgtgaactgggaaggggaaggcagcagggtctctcaggtcgtgtcaacttctaacctgtctcctattctgtttcttcccacaaatctccctctcgcctcacagtgggatgccttctccatccctgaacttcagaacttcctaacaatcctggaaaaagaggagcaggacaaaatccaacaagtgcaaaagaagtatgacaagtttaggcagaaactggaggaggccttaagagaatcccagggcaaacctgggtaaccggtcctgcttcctctcctcctggtgcattcagatttatttgtattattaattattattttgcaacagacactttttctcaggacatctctggcaggtgcatttgtgcctgcccagcagttccagctgtggcaaaagtctcttccatggacaagtgtttgcacgagggttcagctgtgcccgcccccaggctgtgccccaccacagattctgccaaggatcagaactcatgtgaaacaaacagctgacgtcctctctcgatctgcaagcctttcaccaaccaaatagttgcctctctcgtcaccaaactggaacctcacaccagccggcaaaggaaggaagaaaggttttagagctgtgtgttctttctctggcattgattcctctttgagttctcttacttgccacgtacaggaccattatttatgagtgaaaagttgtagcacattccttttgcaggtctgagctaagcccctgaaagcagggtaatgctcataaaaggactgttcccgcggccccaaggtgcctgttgttcacacttaagggaagtttataaagctactggccccagatgctcagggtaaggagcaccaaagctgaggctggctcagagatctccagagaagctgcagcctgccctggccctggctctggccctggcccacattgcacatggaaacccaaaggcatatatctgcgtatgtgtggtacttagtcacatctttgtcaacaaactgttcgtttttaagttacaaatttgaatttaatgttgtcatcatcgtcatgtgtttccccaaagggaagccagtcattgaccatttaaaaagtctcctgctaagtatggaaatcagacagtaagagaaagccaaaaagcaatgcagagaaaggtgtccaagctgtcttcagccttccccagctaaagagcagaggagggcctgggctacttgggttccccatcggcctccagcactgcctccctcctcccactgcgactctgggatctccaggtgctgcccaaggagttgccttgattacagagaggggagcctccaattcggccaacttggagtcctttctgttttgaagcatgggccagacccggcactgcgctcggagagccggtgggcctggcctccccgtcgacctcagtgcctttttgttttcagagagaaataggagtagggcgagtttgcctgaagctctgctgctggcttctcctgccaggaagtgaacaatggcggcggtgtgggagacaaggccaggagagcccgcgttcagtatgggttgagggtcacagacctccctcccatctgggtgcctgagttttgactccaatcagtgataccagaccacattgacagggaggatcaaattcctgacttacatttgcactggcttcttgtttaggctgaatcctaaaataaattagtcaaaaaattccaacaagtagccaggactgcagagacactccagtgcagagggagaaggacttgtaattttcaaagcagggctggttttccaacccagcctctgagaaaccatttctttgctatcctctgccttcccaagtccctcttgggtcggttcaagcccaagcttgttcgtgtagcttcagaagttccctctctgacccaggctgagtccatactgcccctgatcccagaaggaatgctgacccctcgtcgtatgaactgtgcatagtctccagagcttcaaaggcaacacaagctcgcaactctaagatttttttaaaccacaaaaaccctggttagccatctcatgctcagccttatcacttccctccctttagaaactctctccctgctgtatattaaagggagcaggtggagagtcattttccttcgtcctgcatgtctctaacattaatagaaggcatggctcctgctgcaaccgctgtgaatgctgctgagaacctccctctatggggatggctattttatttttgagaaggaaaaaaaaagtcatgtatatatacacataaaggcatatagctatatataaagagataagggtgtttatgaaatgagaaaattattggacaattcagactttactaaagcacagttagacccaaggcctatgctgaggtctaaacctctgaaaaaagtatagtatcgagtacccgttccctcccagaggtgggagtaactgctggtagtgccttctttggttgtgttgctcagtgtgtaagtgtttgtttccaggatattttctttttaaatgtctttcttatatgggttttaaaaaaaagtaataaaagcctgttgcaaaaa

SEQ ID NO: 174170 - DNA, 5994 bp, Homo sapiens
  Payload ID: 14189
  Gene Symbol: RASSF6
  Gene Name: Ras association (RalGDS/AF-6) domain family member 6
  Uniprot ID: Q6ZTQ3
  ENST ID: ENST00000307439
  CDS Start-End: 296-1309
ccaggatcgctgatcgcgtcgggggcactgcaagcgcccagctgagccatgctctgggaggagacaggcgccgcccctgcgcccgcgcgggcctcggacctcccctacaggtgagtgactcgcggagtcccagcccggcagagacagggcactggtttccctctaccagagttcctgacccagccgagaacaaaccgcgaagcaagttcagccgaacaacgatggtgaaaagggtcctcctgctcacagtgtgaataacaggatatcctcagaccatctcaaaaaggaggaaaagatgactatgatggctcaccagtacccctcttggatcttcattaatgagaagacattcataaccagggaacaacttaattctttattgaagacctataacattttttatgagaaccagaaaaatctgcatattttatatggagagactgaagatggcaaactaattgttgaaggaatgctggacattttctggggagtaaaacgacctatacagctaaaaatacaagatgagaagccattctcttcttttactagtatgaagtcatcagacgtcttctccagcaaaggaatgacacgctggggggaatttgacgatctctatcgtattagtgagctggacaggacccagattcctatgtctgaaaaaaggaattcccaggaagactatttatcttatcacagcaacaccctgaagccacatgcaaaggatgaaccagactccccagtgctctatagaaccatgagtgaagcagctctggtgagaaaaaggatgaagcctctgatgatggacagaaaagaaagacagaaaaatagagcctctattaatggacacttctataaccatgaaacatcaattttcattccagcctttgaatcagaaactaaggtcagagtaaacagtaacatgagaactgaagaagtaataaagcaacttctccaaaaatttaagattgaaaatagtccccaggattttgctcttcacattatttttgcaacaggagaacaaagacgactaaagaagacagacattccgctactgcagaggctcctacagggaccttctgaaaagaatgctcgcattttcctcatggataaagatgcagaagaaattagcagtgatgtggctcagtacattaactttcacttttctctcttggaatccattcttcaaagattaaatgaagaagagaaaagagagattcaaagaatagtaacaaaattcaataaagaaaaggcgattatactgaaatgtcttcaaaataaactagtaataaaaacagagacaacagtttagcagtacaagcttctattgctaaaacatttcaaaaaactcagagatattactctttgatgaatgcataagttctgtacttgcatttatacgaacatatatgagacttgaatcgtagaaaattgaatgtcaaaaaaagctcatttctttttgaagtgatgaggttaattagggttcacagttggacaaaatgagtttgagtttagtttcagtaactgaaataagcttgaatactgcatatgccaaatagcttttatagtaaaccatgtaatgaactcaaatttaaatggtgtcttcagataagcagtttaaacttcatttagcttggactctcaagagaactgaaacataatcaatggattcagaaatgactcagaaaaaagaagctgccagttcttggaatgaaaaagaaatacagtcttacaccatcaaggaatctacctgatagtgacagtagcttcttgaaaactctggcattttcataaaatctaggactatcttaaatggcctgttgacttctgactatctgtaacatcagagctgtctggcctttggaaaggaaaaattatggactctgttaagaaatcctaattgaaattttctgaacctccccccagcccttttattctctctcttctgctgatgaaagacctttcatcagttcaaagcttttcttaagctcttttttaagttaattgaactttttctttatttatttttcaaaaaaatgtttatatcacatagacatattacatcggctaaagtaagacttggcccacaaatacctatttgttgctgaatgaatacaatggataaagcaaggctgttgtagctgaagttacatagggaatcccaaactctgccctcttagcatcttattctacatgacaactctcaaggtactcacagatctgtttaacccacttgaaaaaaaaacactaaaaatgaagaaatgctataagtataaactatgattttatttataaattctgtattaaaatggaattatatgcaacattctttcattctgtaaactaattccatttgcattcctcataagcattgtagtaaattgatcatattacatgtactaaggaatgagattatatgcagtaaacccaactggaagattaacaatattaaaatatgaaacatttttaagacaaaggcattacttctcagtattaccaaacctaaactggttgaaggtgaaagtgtgctatggccttttcaagcctaagaagtctctcttactgagtaaaccagaggcttgcatcgctattctttcacctgtcaatattaataagaaaatagtctcatctcacttaaatgaggcaaatgtaatagttaaaattcaacatacttataaaaaactagtgtcatgtacctgccatgaacatgacaaaaggttagtcttcaatagactgaaatgtataagagaagaaccaagtcttacatagaaaaaaaaggtagatatgaaaagaaaaatcacagaagagagaatgcaaatggccactaagtatatgaaaaaagtcgtatcttaacagtgaacaactgtgttagtctgtatcaatcagaagacagaaacaaggtagtaatttaaacagggaaagtttaatataaataataattaagctatgataggagaataataataaagatgaaaagagaaggtaccctaaggctgagggaaagaatcctaacaaggaaaggcaggaatgagggtttcagaattcactggagaaggtgtggttgcagcccactggagagaagtttgctggcttgcccaggccagagcaggaccacagatactggacaagctggtacagccaaccccctaggtgtggaccagctgaggcaggtgggcagatatgcagagggacttggggctttgccaaagggtaagcacaaagaaggagtcacgggttctgttcgaggcactgttgggattaggagccggagggacctactttgcaggaacctagcataactttgtgtgacgagactgcacaagacaaagctcaggcaagtggctcagtagttggccagcccagcagggtcctctgtatgagtgtgcacccagctgaagagaagaaatggagagcagcaattggagcttcaggaccggcttgcactgtggctccaggttataccaccactgcccaaagcaaaagctagagaagcaagtggagaaatgctggagaaagctgcaccctacaggcaaccagcactgcagaaaccactccaggcaaagtagtgaaggaaaaaagcctgctctccagtagcctggcctgtcagcctggaggaatcaggaaagaccccttcctcttgcagtgtgtctccagcgccctctactgacaaagtatgccatcatgcaagctgcaaaggaaacatttcaagagtctatatctattttcacggagcgggcaaccaacagtgaatgtggagctgagagacagtaaaataataactgacatgccaccgaagtacaaagtaaaataaataaataaatacacattttggcctattagcaaagattaagaaatgataacattaaatactcaataaatcaccatgagatggggactcaaacttctggtaaaaatacaaatagatataatttttcttgaaggcaatttagtagtctgtttatcctataattctacttgtaagatcctatcatatgaaaataaccagagatacaaagacattctgcaaagatatgttttatattgttatttattgtgacaaaaggaaataaaaagcctaaatgttcagaaaattattttaaaagatgaaagagggaaataggccatggacggtggctcacgcctgtaatcccagcactttaggaggccaaggtaggtggatcacttgaggttgggatttcgagaccagcctggccaacatggtgaaaccctgcctctactaaaaatacaaaaaatgagccgggtgcaatggcaggcacctataatgccagctactcgggaggctgaggcaggagaatcgcttgaacccgggaggcggaggttgcatgagccgagatggcgccactgctctccagcctggacgacagagcaagactccgtctctaaaaaaaaaaaaagagggaaataaacatttatttgtatattgttatgtagccattaaaattctgtttccaagtaattttaattacaggggtaaattcttatatatctaaataagaatatacacatacacatgttccaaaatatttattatgtacttaaggcatatatattatatatgtatgtgtgtgtatatatatatgtatttgtgtgtgtgaacactaatatttgcatatatatacacacaagaaataaaaacatgttaaaaatggctatatctgcattgtagaattatgagtgattcatgtttttctaacttccctatctgtattaagtgttctatagtttatatttgttactttttacatcaggaaatagtaaagttattatttaaaacttatgaacaaaaaagtaacaagcacatgcaagcacagagttctaccaaatgcaaaaaatttcaaatcaattattcaaatgagacattaacatcacttctgtggtagttttatatccataaagtctgattcttctcctttgaagagatgaagcttaatcttcctcatcctgaaaatgggctggacttagtgacttacgtctttttattttatttttaattgacaaataataattgtatgtatttatggggtacaatattatattattatatatgtatacattatggaattattaaatcaagctaattaacatatccataacctcttataatttctttgtggtgagaacatttaaaaatgtactcttttagcaattagggacttacttttaatacaggaaaatggaagagactgtgagactttgaagtaggtcataaaagtcactgtggcttcctccttgctctctcttggaccacttgctctgggggaagtcaactgccatgtcctgagcagccctggaaagacctacatgatgaagaactgagaccttctatcaaatgccagcagggaattgaggcctcctgtcaacagccattttagaagtagatcttccagcctcagtcaagccttcagatgactgcagccctgtctaatagcttgaccgtaatttcatgagagaccttcagccagaaaacccaaggaaaccattctggattcctcatcctcagaaactgtatgagataagaagtgtttgttgtagtacgccgctaaatttggggcaatttgttacatagcaatgtatagctcatacaatttctgggaaaaaaatagtttattttcgaatcatttttgcataatgcaagaatataaacttgtcacagaataatttatccttgttttaggtggtccaaatatttcattgtcagttatatattagctcaaattaaattttagataatatatattattattaatggtaaagaatgtgtcacatttatctttatagcttttctgtacctaatattgtgtcttgtgcgtaggatgtgctcaataaaaattgattgaataaataagtgaatgaaagaataaatgaatgagtgaaggaattatctgaaatatttttataaaattccccatatgtatgtattacttattacaagtctggtcccatagctgaaaaaatattaaacattatatatatata

SEQ ID NO: 174171 - DNA, 1360 bp, Homo sapiens
  Payload ID: 14189
  Gene Symbol: RASSF6
  Gene Name: Ras association (RalGDS/AF-6) domain family member 6
  Uniprot ID: Q6ZTQ3
  ENST ID: ENST00000335049
  CDS Start-End: 1-978
atgctctgggaggagacaggcgccgcccctgcgcccgcgcgggcctcggacctcccctacagaattcacttcctgtcctctggcctcattctggtcacaaggcaactgactgaagatggcaaactaattgttgaaggaatgctggacattttctggggagtaaaacgacctatacagctaaaaatacaagatgagaagccattctcttcttttactagtatgaagtcatcagacgtcttctccagcaaaggaatgacacgctggggggaatttgacgatctctatcgtattagtgagctggacaggacccagattcctatgtctgaaaaaaggaattcccaggaagactatttatcttatcacagcaacaccctgaagccacatgcaaaggatgaaccagactccccagtgctctatagaaccatgagtgaagcagctctggtgagaaaaaggatgaagcctctgatgatggacagaaaagaaagacagaaaaatagagcctctattaatggacacttctataaccatgaaacatcaattttcattccagcctttgaatcagaaactaaggtcagagtaaacagtaacatgagaactgaagaagtaataaagcaacttctccaaaaatttaagattgaaaatagtccccaggattttgctcttcacattatttttgcaacaggagaacaaagacgactaaagaagacagacattccgctactgcagaggctcctacagggaccttctgaaaagaatgctcgcattttcctcatggataaagatgcagaagaaattagcagtgatgtggctcagtacattaactttcacttttctctcttggaatccattcttcaaagattaaatgaagaagagaaaagagagattcaaagaatagtaacaaaattcaataaagaaaaggcgattatactgaaatgtcttcaaaataaactagtaataaaaacagagacaacagtttagcagtacaagcttctattgctaaaacatttcaaaaaactcagagatattactctttgatgaatgcataagttctgtacttgcatttatacgaacatatatgagacttgaatcgtagaaaattgaatgtcaaaaaaagctcatttctttttgaagtgatgaggttaattagggttcacagttggacaaaatgagtttgagtttagtttcagtaactgaaataagcttgaatactgcatatgccaaatagcttttatagtaaaccatgtaatgaactcaaatttaaatggtgtcttcagataagcagtttaaacttcatttagcttggactctcaagagaactgaaacataatcaatggattcagaaatgactcagaaaaaagaa

SEQ ID NO: 174172 - DNA, 4331 bp, Homo sapiens
  Payload ID: 14189
  Gene Symbol: RASSF6
  Gene Name: Ras association (RalGDS/AF-6) domain family member 6
  Uniprot ID: Q6ZTQ3
  ENST ID: ENST00000342081
  CDS Start-End: 132-1241
actgaggcacagggagtggctcaggtttcttgacacttccctgctgtggcgaaaaggagaaataattaacagctcctggggctccaggatcgctgatcgcgtcgggggcactgcaagcgcccagctgagccatgctctgggaggagacaggcgccgcccctgcgcccgcgcgggcctcggacctcccctacaggatatcctcagaccatctcaaaaaggaggaaaagatgactatgatggctcaccagtacccctcttggatcttcattaatgagaagacattcataaccagggaacaacttaattctttattgaagacctataacattttttatgagaaccagaaaaatctgcatattttatatggagagactgaagatggcaaactaattgttgaaggaatgctggacattttctggggagtaaaacgacctatacagctaaaaatacaagatgagaagccattctcttcttttactagtatgaagtcatcagacgtcttctccagcaaaggaatgacacgctggggggaatttgacgatctctatcgtattagtgagctggacaggacccagattcctatgtctgaaaaaaggaattcccaggaagactatttatcttatcacagcaacaccctgaagccacatgcaaaggatgaaccagactccccagtgctctatagaaccatgagtgaagcagctctggtgagaaaaaggatgaagcctctgatgatggacagaaaagaaagacagaaaaatagagcctctattaatggacacttctataaccatgaaacatcaattttcattccagcctttgaatcagaaactaaggtcagagtaaacagtaacatgagaactgaagaagtaataaagcaacttctccaaaaatttaagattgaaaatagtccccaggattttgctcttcacattatttttgcaacaggagaacaaagacgactaaagaagacagacattccgctactgcagaggctcctacagggaccttctgaaaagaatgctcgcattttcctcatggataaagatgcagaagaaattagcagtgatgtggctcagtacattaactttcacttttctctcttggaatccattcttcaaagattaaatgaagaagagaaaagagagattcaaagaatagtaacaaaattcaataaagaaaaggcgattatactgaaatgtcttcaaaataaactagtaataaaaacagagacaacagtttagcagtacaagcttctattgctaaaacatttcaaaaaactcagagatattactctttgatgaatgcataagttctgtacttgcatttatacgaacatatatgagacttgaatcgtagaaaattgaatgtcaaaaaaagctcatttctttttgaagtgatgaggttaattagggttcacagttggacaaaatgagtttgagtttagtttcagtaactgaaataagcttgaatactgcatatgccaaatagcttttatagtaaaccatgtaatgaactcaaatttaaatggtgtcttcagataagcagtttaaacttcatttagcttggactctcaagagaactgaaacataatcaatggattcagaaatgactcagaaaaaagaagctgccagttcttggaatgaaaaagaaatacagtcttacaccatcaaggaatctacctgatagtgacagtagcttcttgaaaactctggcattttcataaaatctaggactatcttaaatggcctgttgacttctgactatctgtaacatcagagctgtctggcctttggaaaggaaaaattatggactctgttaagaaatcctaattgaaattttctgaacctccccccagcccttttattctctctcttctgctgatgaaagacctttcatcagttcaaagcttttcttaagctcttttttaagttaattgaactttttctttatttatttttcaaaaaaatgtttatatcacatagacatattacatcggctaaagtaagacttggcccacaaatacctatttgttgctgaatgaatacaatggataaagcaaggctgttgtagctgaagttacatagggaatcccaaactctgccctcttagcatcttattctacatgacaactctcaaggtactcacagatctgtttaacccacttgaaaaaaaaacactaaaaatgaagaaatgctataagtataaactatgattttatttataaattctgtattaaaatggaattatatgcaacattctttcattctgtaaactaattccatttgcattcctcataagcattgtagtaaattgatcatattacatgtactaaggaatgagattatatgcagtaaacccaactggaagattaacaatattaaaatatgaaacatttttaagacaaaggcattacttctcagtattaccaaacctaaactggttgaaggtgaaagtgtgctatggccttttcaagcctaagaagtctctcttactgagtaaaccagaggcttgcatcgctattctttcacctgtcaatattaataagaaaatagtctcatctcacttaaatgaggcaaatgtaatagttaaaattcaacatacttataaaaaactagtgtcatgtacctgccatgaacatgacaaaaggttagtcttcaatagactgaaatgtataagagaagaaccaagtcttacatagaaaaaaaaggtagatatgaaaagaaaaatcacagaagagagaatgcaaatggccactaagtatatgaaaaaagtcgtatcttaacagtgaacaactgtgttagtctgtatcaatcagaagacagaaacaaggtagtaatttaaacagggaaagtttaatataaataataattaagctatgataggagaataataataaagatgaaaagagaaggtaccctaaggctgagggaaagaatcctaacaaggaaaggcaggaatgagggtttcagaattcactggagaaggtgtggttgcagcccactggagagaagtttgctggcttgcccaggccagagcaggaccacagatactggacaagctggtacagccaaccccctaggtgtggaccagctgaggcaggtgggcagatatgcagagggacttggggctttgccaaagggtaagcacaaagaaggagtcacgggttctgttcgaggcactgttgggattaggagccggagggacctactttgcaggaacctagcataactttgtgtgacgagactgcacaagacaaagctcaggcaagtggctcagtagttggccagcccagcagggtcctctgtatgagtgtgcacccagctgaagagaagaaatggagagcagcaattggagcttcaggaccggcttgcactgtggctccaggttataccaccactgcccaaagcaaaagctagagaagcaagtggagaaatgctggagaaagctgcaccctacaggcaaccagcactgcagaaaccactccaggcaaagtagtgaaggaaaaaagcctgctctccagtagcctggcctgtcagcctggaggaatcaggaaagaccccttcctcttgcagtgtgtctccagcgccctctactgacaaagtatgccatcatgcaagctgcaaaggaaacatttcaagagtctatatctattttcacggagcgggcaaccaacagtgaatgtggagctgagagacagtaaaataataactgacatgccaccgaagtacaaagtaaaataaataaataaatacacattttggcctattagcaaagattaagaaatgataacattaaatactcaataaatcaccatgagatggggactcaaacttctggtaaaaatacaaatagatataatttttcttgaaggcaatttagtagtctgtttatcctataattctacttgtaagatcctatcatatgaaaataaccagagatacaaagacattctgcaaagatatgttttatattgttatttattgtgacaaaaggaaataaaaagcctaaatgttcagaaaattattttaaaagatgaaagagggaaataggccatggacggtggctcacgcctgtaatcccagcactttaggaggccaaggtaggtggatcacttgaggttgggatttcgagaccagcctggccaacatggtgaaaccctgcctctactaaaaatacaaaaaatgagccgggtgcaatggcaggcacctataatgccagctactcgggaggctgaggcaggagaatcgcttgaacccgggaggcggaggttgcatgagccgagatggcgccactgctctccagcctggacgacagagcaagactccgtctct

SEQ ID NO: 174173 - DNA, 2735 bp, Homo sapiens
  Payload ID: 14189
  Gene Symbol: RASSF6
  Gene Name: Ras association (RalGDS/AF-6) domain family member 6
  Uniprot ID: Q6ZTQ3
  ENST ID: ENST00000395777
  CDS Start-End: 160-1071
ggcagagacagggcactggtttccctctaccagagttcctgacccagccgagaacaaaccgcgaagcaagttcagccgaacaacgatggtgaaaagggtcctcctgctcacagtgtgaataacaggatatcctcagaccatctcaaaaaggaggaaaagatgactatgatggctcaccagtacccctcttggatcttcattaatgagaagacattcataaccagggaacaacttaattctttattgaagacctataacattttttatgagaaccagaaaaatctgcatattttatatggagagactgaagatggcaaactaattgttgaaggaatgctggacattttctggggagtaaaacgacctatacagctaaaaatacaagatgagaagccattctcttcttttactagtatgaagtcatcagacgtcttctccagcaaaggaatgacacgctggggggaatttgacgatctctatcgtattagtgagctggacaggacccagattcctatgtctgaaaaaaggaattcccaggaagactatttatcttatcacagcaacaccctgaagccacatgcaaaggatgaaccagactccccagtgctctatagaaccatgagtgaagcagctctggtgagaaaaaggatgaagcctctgatgatggacagaaaagaaagacagaaaaatagagcctctattaatggacacttctataaccatgaaattgaaaatagtccccaggattttgctcttcacattatttttgcaacaggagaacaaagacgactaaagaagacagacattccgctactgcagaggctcctacagggaccttctgaaaagaatgctcgcattttcctcatggataaagatgcagaagaaattagcagtgatgtggctcagtacattaactttcacttttctctcttggaatccattcttcaaagattaaatgaagaagagaaaagagagattcaaagaatagtaacaaaattcaataaagaaaaggcgattatactgaaatgtcttcaaaataaactagtaataaaaacagagacaacagtttagcagtacaagcttctattgctaaaacatttcaaaaaactcagagatattactctttgatgaatgcataagttctgtacttgcatttatacgaacatatatgagacttgaatcgtagaaaattgaatgtcaaaaaaagctcatttctttttgaagtgatgaggttaattagggttcacagttggacaaaatgagtttgagtttagtttcagtaactgaaataagcttgaatactgcatatgccaaatagcttttatagtaaaccatgtaatgaactcaaatttaaatggtgtcttcagataagcagtttaaacttcatttagcttggactctcaagagaactgaaacataatcaatggattcagaaatgactcagaaaaaagaagctgccagttcttggaatgaaaaagaaatacagtcttacaccatcaaggaatctacctgatagtgacagtagcttcttgaaaactctggcattttcataaaatctaggactatcttaaatggcctgttgacttctgactatctgtaacatcagagctgtctggcctttggaaaggaaaaattatggactctgttaagaaatcctaattgaaattttctgaacctccccccagcccttttattctctctcttctgctgatgaaagacctttcatcagttcaaagcttttcttaagctcttttttaagttaattgaactttttctttatttatttttcaaaaaaatgtttatatcacatagacatattacatcggctaaagtaagacttggcccacaaatacctatttgttgctgaatgaatacaatggataaagcaaggctgttgtagctgaagttacatagggaatcccaaactctgccctcttagcatcttattctacatgacaactctcaaggtactcacagatctgtttaacccacttgaaaaaaaaacactaaaaatgaagaaatgctataagtataaactatgattttatttataaattctgtattaaaatggaattatatgcaacattctttcattctgtaaactaattccatttgcattcctcataagcattgtagtaaattgatcatattacatgtactaaggaatgagattatatgcagtaaacccaactggaagattaacaatattaaaatatgaaacatttttaagacaaaggcattacttctcagtattaccaaacctaaactggttgaaggtgaaagtgtgctatggccttttcaagcctaagaagtctctcttactgagtaaaccagaggcttgcatcgctattctttcacctgtcaatattaataagaaaatagtctcatctcacttaaatgaggcaaatgtaatagttaaaattcaacatacttataaaaaactagtgtcatgtacctgccatgaacatgacaaaaggttagtcttcaatagactgaaatgtataagagaagaaccaagtcttacatagaaaaaaaaggtagatatgaaaagaaaaatcacagaagagagaatgcaaatggccactaagtatatgaaaaaagtcgtatcttaacagtgaacaactgtgttagtctgtatcaatcagaagacagaaacaaggtagtaatttaaacagggaaagtttaatataaataataattaagctatgataggagaataataataaagatgaaaa

SEQ ID NO: 174174 - DNA, 3689 bp, Homo sapiens
  Payload ID: 14190
  Gene Symbol: RADIL
  Gene Name: Ras association and DIL domains
  Uniprot ID: Q96JH8
  ENST ID: ENST00000399583
  CDS Start-End: 189-3416
cccgccccgcccgttgcgccgccggcaggaggcgccgcggcacgcgcgggtctgggcgccggccccagccaacggcgggtgggagcagcgcgggaacgtggcggcgcggcgggttgtgccggaggtcacggcctccccacatcctttggctgaagcccacagtcctcatccatgaagcctcacccaccatgttttatgggacgcacttcatcatgtccccgcccaccaagagcaaactgaagcggcagagccagctgttgtccagcatgctgtcccggacgctgagctacaagtaccgggacctggactccaccttctccagcctgggcgccagcgatgaccccgccgagctctccacccagctgtcggcccctggtgtcctgaaggtgtttggggacagtgtctgcacaggaacccactacaagagcgtcctggccaccggcacctccagcgcccgtgagctggtgaaggaggcgctggagcggtacgccctggaccccaggcaggccggccagtacgtgctgtgtgacgtggtgggccaagccggcgatgctgggcagcggtggcaggcccggtgctttcgggtgtttggggacagtgagaagcccctcttgatccaggaattatggaaaccccgagaaggtttatcccggaggtttgagctgaggaagaggtcggacgtggaggagctggcagccaaggaggtggacaccatcacggcagggataaacgcccaggcccggaggctgcagcggagtcgcgcgaagggaaccccgaccccggccctgggggatgcccggagctctcctccaccccggttgcgccgcacagtcagtgagaccagcctgagcccagtgaacgccctgcccgctgccgcccagggccccgaggagcccggccccgacgccatgcggtactcgctgtaccagtccccgcatctgctccttctgcagggctacagccagcagcacgacagcctggtgtatgtgctcaaccgggaccggcacacggtgggccagcggaccccctccagcaagcccagcatcagcctctcagcccccgacatcctgcctctacactgcaccatccgccggcaaccgctcccggacagcggccaggccgcggggaggctggtcctggagcccatccccggggcgcacatctccgtcaacttctccgaggtggggcacaggaccgtggtgctgcaccacggggacctgctctccctggggctctactacctgctgctattcaaggaccccgcgcaggcccagcccctgcccgcccgggccttggcgcgcctccgggctgtgccgcagagctgccggctgtgcggggccgcgctcggggcccggggagccgcctcccctactcaggccgccctgccccggcgccagcagctgctcctggagtttgagccccacctggaggacacgctgctgcagaggatcatgacgttgatcgagccggggggcgacgaccacaagctgacccccgccttcctcctgtgcctctgcatccagcactcggccacccacttccagccgggcacattcgggcagctcctgctcaagatagccaggctgatccgcgagactgtctgggagaaaaccaaagaactagcagagaagcaggcgcaactccaggagcccatctcgctggccagctgcgccatggctgatctggttccagacttgcagcccattcttttctggatgtctaactccatcgagctcctgtactttatccagcagaaatgcccactctacatgcagagcatggaggagcagctggacatcacaggctcgaaggaatcgctgttctcctgcacgctgacggccagcgaggaggccatggcggtgctggaggaggtggtgctgtacgccttccagcagtgcgtctactatgtctccaagtccctgtacatctgcctcccggcactcctggagtgcccgccattccagacggagcgccgtgagagctggtcctcggcccccgaactgcccgaggagctgcgccgcgtggtgtctgtgtaccaggcagccctggacctcctgcggcagctgcaggtgcaccccgaggtggcctcgcagatgctcgcctacctcttcttcttctccgggacactgcttctcaaccagctcctcgacaggggcccctccctgagctgcttccactggcccagaggtgtccaggcctgcgcccgcctgcagcagctcctggagtggatgcggagcgccggcttcggggcggctggagagcacttcttccagaagctctcctgcaccctcaacctgctggccacacccagggcccagctcatccagatgagctggacagccctgcgggctgcgttccccgcactgagcccagcacagctgcaccggctgctgactcactaccagctggcctcggccatgggccccatgagcacctgggagccaggggcccaggacagccccgaggccttcaggtcagaggatgttctggagtcctacgaaaaccccccacccatcgtcctgcccagcgacggcttccaggtggacttggaagccaactgcctggacgacagcatctaccagcacctgctctacgtccgccactttctgtggggtctgcggagcagagccagccccggcagccctggcaggcctggcagtggggcctcccagccagtgtgccccgagggtatgcaccacgtggtccttgacgggcacctggaggccccgagctgccccctggctcccagggaccctggcccagcagcccgggaagtggccccggagcgtactcttcccttgaggggggctccctgggcacaggccccccctggaaggcaacccagccgtgggggctcccaggctggccccccgcacacggactcgtcctgcttgctcacgcctcccagcactccacttggccctgagcctggggaccccgactggccagagtccggcggcccctgtggaaaagcgctcccagagaggcagaggaacggactcagcggcctccggggtgcagctccggaaggagactctgcagcccttgcggaggagtcccctccagccccgtccagccgcagctccagcaccgaggacttctgctacgtcttcacggtggagctggaacgaggcccctccgggctggggatgggcctgatcgacgggatgcacacgcacctgggcgcccccgggctctacatccagaccctgctcccgggcagccccgcagcggccgacgggcgcctgtcgctgggggaccgtatcctggaggtgaatggcagcagcctcctgggccttggctacctgagagctgtggacctgatccgtcatggcgggaagaagatgcggttcctggtcgcgaagtccgacgtggaaacagccaagaagatccatttccgcacgccccctctctaggggggctgcgaggacacccccacaggcccggcacccggtcccacctggtgacactgggcttcctcccgccttcgtccctgttttgtaactgaccaagttgggtcccgggtggggagcctcaccctggggacatgcctgttgataacatgcatctcagtgtaggttctatttatatggcagatgacgtgaaattgtgatgtttgttacagagcttttatgtttaaagacttcaatggagaagtacggttcaataaactatttttcccgttctta

SEQ ID NO: 174175 - DNA, 567 bp, Homo sapiens
  Payload ID: 14190
  Gene Symbol: RADIL
  Gene Name: Ras association and DIL domains
  ENST ID: ENST00000457174
  CDS Start-End: 166-567
ggaagcgggcagcgtgtgaacaagtgggcaccctctggtctggccaagggaggatgaccaaacggagagaaatgctttctgaaaatcccaaaacagataaggtcacggcctccccacatcctttggctgaagcccacagtcctcatccatgaagcctcacccaccatgttttatgggacgcacttcatcatgtccccgcccaccaagagcaaactgaagcggcagagccagctgttgtccagcatgctgtcccggacgctgagctacaagtaccgggacctggactccaccttctccagcctgggcgccagcgatgaccccgccgagctctccacccagctgtcggcccctggtgtcctgaaggtgtttggggacagtgtctgcacaggaacccactacaagagcgtcctggccaccggcacctccagcgcccgtgagctggtgaaggaggcgctggagcggtacgccctggaccccaggcaggccggccagtacgtgctgtgtgacgtggtgggccaagccggcgatgctgggcagcggtggcaggcccggtgctttcgggtgttt

SEQ ID NO: 174176 - DNA, 5669 bp, Homo sapiens
  Payload ID: 14190
  Gene Symbol: RADIL
  Gene Name: Ras association and DIL domains
  ENST ID: ENST00000445392
  CDS Start-End: 124-1347
cagccaacggcgggtgggagcagcgcgggaacgtggcggcgcggcgggttgtgccggaggtcacggcctccccacatcctttggctgaagcccacagtcctcatccatgaagcctcacccaccatgttttatgggacgcacttcatcatgtccccgcccaccaagagcaaactgaagcggcagagccagctgttgtccagcatgctgtcccggacgctgagctacaagtaccgggacctggactccaccttctccagcctgggcgccagcgatgaccccgccgagctctccacccagctgtcggcccctggtgtcctgaaggtgtttggggacagtgtctgcacaggaacccactacaagagcgtcctggccaccggcacctccagcgcccgtgagctggtgaaggaggcgctggagcggtacgccctggaccccaggcaggccggccagtacgtgctgtgtgacgtggtgggccaagccggcgatgctgggcagcggtggcaggcccggtgctttcgggtgtttggggacagtgagaagcccctcttgatccaggaattatggaaaccccgagaaggtttatcccggaggtttgagctgaggaagaggtcggacgtggaggagctggcagccaaggaggtggacaccatcacggcagggataaacgcccaggcccggaggctgcagcggagtcgcgcgaagggaaccccgaccccggccctgggggatgcccggagctctcctccaccccggttgcgccgcacagtcagtgagaccagcctgagcccagtgaacgccctgcccgctgccgcccagggccccgaggagcccggccccgacgccatgcggtactcgctgtaccagtccccgcatctgctccttctgcagggctacagccagcagcaccctggtgtatgtgctcaaccgggaccggcacacggtgggccagcggaccccctccagcaagcccagcatcagcctctcagcccccgacatcctgcctctacactgcaccatccgccggcaaccgctcccggacagcggccaggccgcggggaggctggtcctggagcccatccccggggcgcacatctccgtcaacttctccgaggtggggcacaggaccgtggtgctgcaccacggggacctgctctccctggggctctactacctgctgctattcaaggaccccgcgcaggcccagcccctgcccgcccgggccttggcgcgcctccgggctgtgccgcagagctgccggctgtgcggggccgcgctcggggcccggggagccgcctcccctactcaggccgccctgccccggcgccagcagctgctcctggagtttgagccccacctggaggacacgctgctgcagaggatcatgacgttgatcgagccggggggcgacgaccacaagctgacccccgccttcctcctgtgcctctgcatccagcactcggccacccacttccagccgggcacattcgggcagctcctgctcaagatagccaggctgatccgcgagactgtctgggagaaaaccaaagaactagcagagaagcaggcgcaactccaggagcccatctcgctggccagctgcgccatggctgatctggttccagacttgcagcccattcttttctggatgtctaactccatcgagctcctgtactttatccagcagaaatgcccactctacatgcagagcatggaggagcagctggacatcacaggctcgaaggaatcgctgttctcctgcacgctgacggccagcgaggaggccatggcggtgctggaggaggtggtgctgtacgccttccagcagtgcgtctactatgtctccaagtccctgtacatctgcctcccggcactcctggagtgcccgccattccagacggagcgccgtgagagctggtcctcggcccccgaactgcccgaggagctgcgccgcgtggtgtctgtgtaccaggcagccctggacctcctgcggcagctgcaggtgcaccccgaggtggcctcgcagatgctcgcctacctcttcttcttctccgggacactgcttctcaaccagctcctcgacaggggcccctccctgagctgcttccactggcccagaggtgtccaggcctgcgcccgcctgcagcagctcctggagtggatgcggagcgccggcttcggggcggctggagagcacttcttccagaagctctcctgcaccctcaacctgctggccacacccagggcccagctcatccagatgagctggacagccctgcgggctgcgttccccgcactgagcccagcacagctgcaccggctgctgactcactaccagctggcctcggccatgggccccatgagcacctgggagccaggggcccaggacagccccgaggccttcaggtcagaggatgttctggagtcctacgaaaaccccccacccatcgtcctgcccagcgacggcttccaggtggacttggaagccaactgcctggacgacagcatctaccagcacctgctctacgtccgccactttctgtggggtctgcggagcagagccagccccggcagccctggcaggcctggcagtggggcctcccagccagtgtgccccgagggtatgcaccacgtggtccttgacgggcacctggaggccccgagctgccccctggctcccagggaccctggcccagcagcccgggaagtggccccggagcgtactcttcccttgaggggggctccctgggcacaggccccccctggaaggcaacccagccgtgggggctcccaggctggccccccgcacacggactcgtcctgcttgctcacgcctcccagcactccacttggccctgagcctggggaccccgactggccagagtccggcggcccctgtggaaaagcgctcccagagaggcagaggaacggactcagcggcctccggggtgcagctccggaaggagactctgcagcccttgcggaggagtcccctccagccccgtccagccgcagctccagcaccgaggacttctgctacgtcttcacggtggagctggaacgaggcccctccgggctggggatgggcctgatcgacgggatgcacacgcacctgggcgcccccgggctctacatccagaccctgctcccgggcagccccgcagcggccgacgggcgcctgtcgctgggggaccgtatcctggaggtgaatggcagcagcctcctgggccttggctacctgagagctgtggacctgatccgtcatggcgggaagaagatgcggttcctggtcgcgaagtccgacgtggaaacagccaagaagatccatttccgcacgccccctctctaggggggctgcgaggacacccccacaggcccggcacccggtcccacctggtgacactgggcttcctcccgccttcgtccctgttttgtaactgaccaagttgggtcccgggtggggagcctcaccctggggacatgcctgttgataacatgcatctcagtgtaggttctatttatatggcagatgacgtgaaattgtgatgtttgttacagagcttttatgtttaaagacttcaatggagaagtacggttcaataaactatttttcccgttcttagagggtgccctgctggggtctcaactcgggcagcaggcgtgggctgctcggaggggccgcaggggctccccatggcctctgcctgccaccggcacgggagaatgcagtgacagctgtcatcaggggatcatctgaactgactctccctgcccccgtcccacccagacacagggcactgcaggaagcagctccaacagcccctcccagctgaagcagggccagacctggcagaggatgctggacttctgatcccgctgctcagcacaggccccagagaaaggtctagacacccaggcgttggaaagtggaccggcctgatggtctctgaggcgccgagcccaccctgggccctgcttcctctcccaggactcctgctccctcctgagttcctctcccctactaaagccaccagcgtggccctgataccaggctggcggccccaggcccttaatcctcaccagcgtccccctggccaccggccctaacccgggcaggaggccagcgtccctctccaccagctggctgaccatgcgcaggaccagggcagggcacttgctgcctcggggtgacagcgtgggtcgctgggcatcctcagcagctccaccaactgggtgtgggtggcttccgcgccctcctggctgtggtggaactggtggcccagggtcatctttgatagcaacagagaaaccctggggaagagggtcccggcatcagttgcagatgcacctctcactgggacagaggtctgtgcggggtccccagatcggtgtcctgggtctgtcccaggccctgggcctcgtgcagctccacgctgccccctggtgtgcgctacggcgaggtgcagcgcgtccgccccgcgccctctgccgacccgcagttctgtgtgcggctccgcattgcgcctggctcgaaacggcgaccactgccaggttcccaaaatactggataaaatatatatatatatatagtgtttgtatatatatttaagatatgtaaaatatatgaatatatataaatatataattatatatgaatatattacatattcatgtatacgtaatatattcgtatattttataaacattttttatattttattatataaaatataaatatttaatttttttttatgagacggagtctcgctctgtgacccaggctggagtgcagtggtgcaatctcagctcactgcaacctccacctcccaggttcaagcaattctcctcagtctcctgagtagctgggattacaggcgcctgccaccacgcttggctaatttagtacttttagtagagacagggtttcaccacgttggccaggctgatttcaaactgacatcaagtgatctgcccgccttgccctcccaaagtgctgggattacaggcgtgggattaccatgcctggccttgttctgtttcttttcctaggagtcccacaacgtgtgtgttagcactgccgagaatgtctcacagctctggacggtctgcatttctggacctggtgcagatcccaggatcctggactctgatttgatgccttaacggtggaagggggttgagtatattttttatgtgggaggggtgtggactgtggccagaggaaagacagtggcaaggcatttccaaaggtggccaccaacagttcctcccacaaagagaagggggcttatctcttcttccctgcaatattctccggccttctgacttgctccgaacaacaggatgcagcataagtgatattctgggaccttccaagccagactgaagggcctttggtttctattttcatgctcctggaactcagcatccatggaaagaagctcttggcatcaccccaaggaagggaggccccgtggagtcggggaggcccagctagcctctggccgctgaagcacctagctgaggtgcgggactggtgagggctgccactggctgttctggtcttgctgagcttccaggcgaatgcagtcccaccagtgatcccggggacaccacgtggagcagaacgacttcccagccaggccccagacaatctacaacactgtgaaagg

SEQ ID NO: 174177 - DNA, 1485 bp, Homo sapiens
  Payload ID: 14191
  Gene Symbol: RCE1
  Gene Name: Ras converting CAAX endopeptidase 1
  Uniprot ID: Q9Y256
  ENST ID: ENST00000309657
  CDS Start-End: 45-1034
tccctgggactgcgtcactggtgcgcgccgcgggtcagggcgcaatggcggcgctgggcggggatgggctgcgactgctgtcggtgtcgcggccggagcggccgcccgagtcggcggcgctgggcggcctgggccccgggctgtgctgctgggtgtcagtgttctcctgcctcagcctcgcctgctcctacgtgggcagcctctacgtctggaagagcgaactgcccagggaccatcccgcggtcatcaagcgacgcttcaccagcgtcctggtggtgtccagtctctcacccctgtgcgtgctgctctggagggaactcacaggcatccagccaggcacatccctgctcaccctgatgggcttcaggctggagggcattttcccagcggcgctgctgcccctgttgctgaccatgattcttttcctgggcccactgatgcagctctctatggattgcccttgtgacctggcagatgggctgaaggttgtcctggccccccgctcctgggcccgctgcctcacagacatgcgttggctgcggaaccaagtgatcgccccgctgacagaggagctggtgttccgggcctgtatgctgcccatgttagcaccgtgcatgggcctgggccctgctgtgttcacctgcccgctcttttttggagttgcccattttcaccatattattgagcagctgcgtttccgccagagcagcgtggggaacatcttcttgtctgctgcgttccagttctcctacacagctgtcttcggtgcctacactgctttcctcttcatccgcacaggacacctgattgggccggttctctgccattccttctgcaattacatgggtttcccagctgtttgcgcggccttggagcacccacagaggcggcccctgctggcaggctatgccctgggtgtgggactcttcctgcttctgctccagcccctcacggaccccaagctctacggcagccttcccctttgtgtgcttttggagcgggcaggggactcagaggctcccctgtgctcctgacctatgctcctggatacgctatgaactctcaccggctccccagccctccccaccaaggggtactgcaggggaagggctggctggggtccccgagatctcaggaatttttgtaggggattgaagccagagctagttgcgtcccagggaccaagagaaagaagcagatatccaaagggtgcagccccttttgaaaggggtgtttacgagcagctgtgagtgaggggacaaggggcaggtcccaggagccacacactcccttcctcactttggactgctgcttctcttagctcctctgcctctgaaaagctgctcggggttttttatttataaaacctctccccaccccccaccccccaacttcctgggttttctcattgtctttttgcatcagtactttgtattgggatattaaagagatttaacttgggtaacatggccttgggcctttggg

SEQ ID NO: 174178 - DNA, 1270 bp, Homo sapiens
  Payload ID: 14191
  Gene Symbol: RCE1
  Gene Name: Ras converting CAAX endopeptidase 1
  ENST ID: ENST00000525356
  CDS Start-End: 217-837
gccgcgggccccctgaacttactgtcccctccgtagggaccatcccgcggtcatcaagcgacgcttcaccagcgtcctggtggtgtccagtctctcacccctgtgcgtgctgctctggagggaactcacaggcatccaggcacatccctgctcaccctgatgggcttcaggctggagggcattttcccagcggcgctgctgcccctgttgctgaccatgattcttttcctgggcccactgatgcagctctctatggattgcccttgtgacctggcagatgggctgaaggttgtcctggccccccgctcctgggcccgctgcctcacagacatgcgttggctgcggaaccaagtgatcgccccgctgacagaggagctggtgttccgggcctgtatgctgcccatgttagcaccgtgcatgggcctgggccctgctgtgttcacctgcccgctcttttttggagttgcccattttcaccatattattgagcagctgcgtttccgccagagcagcgtggggaacatcttcttgtctgctgcgttccagttctcctacacagctgtcttcggtgcctacactgctttcctcttcatccgcacaggacacctgattgggccggttctctgccattccttctgcaattacatgggtttcccagctgtttgcgcggccttggagcacccacagaggcggcccctgctggcaggctatgccctgggtgtgggactcttcctgcttctgctccagcccctcacggaccccaagctctacggcagccttcccctttgtgtgcttttggagcgggcaggggactcagaggctcccctgtgctcctgacctatgctcctggatacgctatgaactctcaccggctccccagccctccccaccaaggggtactgcaggggaagggctggctggggtccccgagatctcaggaatttttgtaggggattgaagccagagctagttgcgtcccagggaccaagagaaagaagcagatatccaaagggtgcagccccttttgaaaggggtgtttacgagcagctgtgagtgaggggacaaggggcaggtcccaggagccacacactcccttcctcactttggactgctgcttctcttagctcctctgcctctgaaaagctgctcggggttttttatttataaaacctctccccaccccccaccccccaacttcctgggttttctcattgtctttttgcatcagtactttgtattgggatattaaagagatttaacttgggtaaca

SEQ ID NO: 174179 - DNA, 1428 bp, Homo sapiens
  Payload ID: 14191
  Gene Symbol: RCE1
  Gene Name: Ras converting CAAX endopeptidase 1
  ENST ID: ENST00000524849
  CDS Start-End: 6-314
gcgcaatggcggcgctgggcggggatgggctgcgactgctgtcggtgtcgcggccggagcggccgcccgagtcggcggcgctgggcggcctgggccccgggctgtgctgctgggtgtcagtgttctcctgcctcagcctcgcctgctcctacgtgggcagcctctacgtctggaagagcgaactgcccagggaccatcccgcggtcatcaagcgacgcttcaccagcgtcctggtggtgtccagtctctcacccctgtgcgtgctgctctggagggaactcacaggcatccaggcacatccctgctcaccctgatgggcttcaggctggagggcattttcccagcggcgctgctgcccctgttgctgaccatgattcttttcctgggcccactgatgcagctctctatggattgcccttgtgacctggcagatgggctgaaggttgtcctggccccccgctcctgggcccgctgcctcacagacatgcgttggctgcggaaccaagtgatcgccccgctgacagaggagctggtgttccgggcctgtatgctgcccatgttagcaccgtgcatgggcctgggccctgctgtgttcacctgcccgctcttttttggagttgcccattttcaccatattattgagcagctgcgtttccgccagagcagcgtggggaacatcttcttgtctgctgcgttccagttctcctacacagctgtcttcggtgcctacactgctttcctcttcatccgcacaggacacctgattgggccggttctctgccattccttctgcaattacatgggtttcccagctgtttgcgcggccttggagcacccacagaggcggcccctgctggcaggctatgccctgggtgtgggactcttcctgcttctgctccagcccctcacggaccccaagctctacggcagccttcccctttgtgtgcttttggagcgggcaggggactcagaggctcccctgtgctcctgacctatgctcctggatacgctatgaactctcaccggctccccagccctccccaccaaggggtactgcaggggaagggctggctggggtccccgagatctcaggaatttttgtaggggattgaagccagagctagttgcgtcccagggaccaagagaaagaagcagatatccaaagggtgcagccccttttgaaaggggtgtttacgagcagctgtgagtgaggggacaaggggcaggtcccaggagccacacactcccttcctcactttggactgctgcttctcttagctcctctgcctctgaaaagctgctcggggttttttatttataaaacctctccccaccccccaccccccaacttcctgggttttctcattgtctttttgcatcagtactttgtattgggatattaaagagatttaacttgggtaacatggc

SEQ ID NO: 174180 - DNA, 1379 bp, Homo sapiens
  Payload ID: 14191
  Gene Symbol: RCE1
  Gene Name: Ras converting CAAX endopeptidase 1
  ENST ID: ENST00000524506
  CDS Start-End: 20-946
cgccgcgggtcagggcgcaatggcggcgctgggcggggatgggctgcgactgctgtcggtgtcgcggccggagcggccgcccgagtcggcggcgctgggcggcctgggccccgggctgtgctgctgggtgtcagtgttctcctgcctcagcctcgcctgctcctacgtgggcagcctctacgtctggaagagcgaactgcccagggaccatcccgcggtcatcaagcgacgcttcaccagcgtcctggtggtgtccagtctctcacccctgtgcgtgctgctctggagggaactcacaggcatccagccaggcacatccctgctcaccctgatgggcttcaggctggagggcattttcccagcggcgctgctgcccctgttgctgaccatgattcttttcctgggcccactgatgcagctctctatggattgcccttgtgacctggcagatgggctgaaggttgtcctggccccccgctcctgggcccgctgcctcacagacatgcgttggctgcggaaccaagtgatcgccccgctgacagaggagctggtgttccgggcctgtatgctgcccatgttagcaccgtgcatgggcctgggccctgctgtgttcacctgcccgctcttttttggagttgcccattttcaccatattattgagcagctgcgtttccgccagagcagcgtggggaacatcttcttgtctgctggacacctgattgggccggttctctgccattccttctgcaattacatgggtttcccagctgtttgcgcggccttggagcacccacagaggcggcccctgctggcaggctatgccctgggtgtgggactcttcctgcttctgctccagcccctcacggaccccaagctctacggcagccttcccctttgtgtgcttttggagcgggcaggggactcagaggctcccctgtgctcctgacctatgctcctggatacgctatgaactctcaccggctccccagccctccccaccaaggggtactgcaggggaagggctggctggggtccccgagatctcaggaatttttgtaggggattgaagccagagctagttgcgtcccagggaccaagagaaagaagcagatatccaaagggtgcagccccttttgaaaggggtgtttacgagcagctgtgagtgaggggacaaggggcaggtcccaggagccacacactcccttcctcactttggactgctgcttctcttagctcctctgcctctgaaaagctgctcggggttttttatttataaaacctctccccaccccccaccccccaacttcctgggttttctcattgtctttttgcatcagtactttgtattgggatattaaagagatttaacttgggtaaca

SEQ ID NO: 174181 - DNA, 5023 bp, Homo sapiens
  Payload ID: 14192
  Gene Symbol: RASGRP1
  Gene Name: RAS guanyl releasing protein 1 (calcium and DAG-regulated)
  Uniprot ID: O95267
  ENST ID: ENST00000310803
  CDS Start-End: 179-2572
acaaagtttgtgcctgcggtgcacctcggtcgggctcgccgggctcgagggctggcgggcgccggggctacgaggcccgggggggagagagccggcaggcggcggcggtggtggcgggggcgatgcgccgcgcccggccgcgctaggtgagccggcaccgggagcgcgggccgcggccatgggcaccctgggcaaggcgagagaggctccgcggaaaccttcccatggctgcagagctgcctctaaagcaagactagaggcaaagccagccaacagccccttcccctcccatcccagcttggcccacatcacccagttccgaatgatggtgtctctgggacatttagccaaaggagccagcctggacgatctcattgacagctgcattcaatcttttgatgcagatggaaacctgtgtcgaagtaaccaactgttgcaagtcatgctgaccatgcaccgaattgtcatctcctctgcagaactgctccaaaaagttatcaccctctataaggatgctttggcaaagaattcaccaggactttgcctgaagatctgttattttgtaaggtattggataacagaattctgggtcatgtttaaaatggacgccagcttgacagacactatggaggagtttcaggaactggtgaaagctaagggtgaggagttacattgccgcctgattgacacaactcaaatcaatgcccgtgactggtccaggaaacttactcaaaggataaaatcaaataccagcaagaaacggaaagtctccctgctctttgaccatctggaaccagaagagctatccgagcacctcacctaccttgagttcaagtctttccggaggatatcgttctctgattatcagaattaccttgtaaatagctgtgtgaaggaaaaccccaccatggagcgatctattgctctgtgcaacggcatctcccagtgggtacaactgatggttctcagccgccccacgccgcagctccgagcagaagtcttcatcaagttcatccaggtggctcagaagctccaccaactacagaacttcaatacactgatggctgtgataggtgggctgtgtcacagctcaatctcgaggctcaaggagacaagttcgcatgtcccacatgaaatcaataaggttctcggtgagatgactgagctgctgtcctcctccagaaactacgacaattaccggcgagcctatggagagtgcaccgacttcaagatccccattctgggtgtgcatctcaaggacctcatctccctgtatgaagccatgcctgactatctggaggacgggaaagtgaacgtccataagctactggccctatacaatcatatcagtgaattggtccagctgcaagaggtggccccacccttggaggctaacaaggacttggtacacttgctgacgttatccctggatctttactacactgaggatgaaatctatgagctttcctatgcccgggaaccaaggaaccacagagctccaccactaacaccttcaaagccaccagtagtagtggactgggcttctggagtgtctcccaaacctgatccaaaaaccattagcaaacacgtccagaggatggtggattctgtcttcaagaactatgatcacgaccaggatggatacatttctcaggaagaatttgaaaagattgctgcgagttttccattttccttctgtgtgatggacaaagacagggaaggcctcatcagcagggatgagatcacagcctacttcatgagagccagctcaatctattccaagctgggcctgggctttcctcacaacttccaagagaccacctacctgaagcccactttttgtgacaactgtgctggatttctctggggagtgatcaaacaaggatatcgatgtaaagactgcgggatgaactgtcacaaacaatgcaaagatctggttgtgtttgagtgtaagaagcgagccaagaacccagtagctcccacagagaacaacacttctgtggggccagtgtccaacctttgctcattgggagccaaagatctgctccatgcacctgaggaaggaccttttacattccctaatggggaggctgtggaacatggtgaggagagtaaggatcggaccatcatgctgatgggagtgtcctcacagaagatttctcttcggctgaagagggctgttgcccacaaggccacccagactgaatcacagccttggattggcagtgagggcccttcaggtccctttgtgctgtcttccccaaggaagacagcccaggatactctatatgtgcttcccagtcccacctctccatgtcctagcccagtcttggtcagaaagcgggcttttgtcaagtgggagaataaagactccctcataaaatcaaaggaggagctccgtcacctcagactgcctacctaccaagaactggaacaggaaataaatactctgaaagcagataatgatgccctaaagatccaactgaaatatgcacagaagaaaatagaatccctccagcttgaaaaaagcaatcatgtcttagctcaaatggagcagggtgactgttcttagcccagaaactaagtagcacaatctgtagatgagtatagtgatctcatttcctaaactgtaatgcacagacctgaggaactttacactgaccagctttaaaacagtactttaaaaggaaaagcctgttactgtttatttacctaaaagattcctaatgtgcagcactgttttctctttcagttagttgactcaaagggggaaaactaaagaatgcaaaacttttgctattcataccactgatgttcatcaaaagtatgcgatctaaaacatgactatcatttcctgacaatggggcatctcggtggcctgcctggctgattcttccttaaaactaaaatctctggaaaatggatttgcttcttaccctgtgttttctgcaaactgacttactttgttccagccaaagcttgctaataatagaaaactacccatattccaaaagtagatttcctctgtatcccagcatactttgtgaacctggctccttcttcactacctcagatctaatcaattagtccatgtaccctccttcctcactacagtcataacacatgagcatatctacctagaagccaatttctactgatgtagccacaactttttagaggcctattaaacatgacgttatccaattgcaggtcaacttatagttgtagccttacaacttacaggcatcagaaaataagtaatcaaattaggtacctggaaacatagctattaccatctcatattactgtctaattaaaataaacataacgcaaacatgtttgtccttatatattctacagtggatagaattaggaattgatggcttaaaaaaaaaagtctatgaagagtctgtttaactcttcatgttccatctttctcttctgaagtaaactattttgaaagttctctttttgaaatgaatttgtgcttaactgtcttcactattaatactatttagaaataagctaattggatcagtggcttaaataatagctgactgtgtgtacatatgtatataatatgtatatacaatatcaggcatgcatgtggcttggaattttgtttcctccataaaatgtggaagtgaattaaacaagttttagtcatttatacaaagtcacaaatataaagttcagtttgtcacaagattaaattgctcacaaggtaaaattgtattgtttggcaaaatcacaagtaacaatcctgtgagttttctattatgaaggttaataataaatgggctcatttagttgcctgggcacctattcacaaattcatttgtcagcctctttttagttctcttaaaaaaaaaaaaatcatatgatcattttcctttttgggggtacttagcttccatgcctataaagtctggtaccagactgacttgaaattcataaacaagttgtccaattgccaagaatatgttaacaattaaaagttccaaactaaagccaatagcaccaagtcttcataagaatacaaagtatacatacagtattgcttacctggaggattcagatcatttaggaattctctttgatgaaagatcagttcccatttgagttcctccttgcactgagttttagtgatatagaactagcttgtagttagtgtttcattacattataaagaatagttttacacacgtatttaccgttttccaaatttaaactcagaaatacccaaagcaggcctgcttaagcccactacctggcatataaacttatagtaacactttgttactttctttttaataggacaagcatgagttaggacaaactctaaaaattcatattcttcactattcttgttttcctttgattgatatagaccaaagatggtgtactctaattttttaaaacagtaatggaacacaatttttttcattcttcctcctctccattcgaagtaaagatccccagttagtttttatataaataatctatagggattcaaaaggtgtcacagtccacttaattagtcaaattagcaatggctaaacagtatcaagtactgcagaatttatcactgaaatggataagaggaaatagtttagtcacaggtttttacagtccagcaagggccaaagaggtatagtatacaagttaatagtatttgtgttgagcaacatggggctagtgggatcacagaaatctggaaaaaaaaaaaaaaggctttggcttatcaagcctagtgtaaatttctgcatctcacacgactttagtttggccaggtatttatctgccaaaacaaggacaaatcttgttgtattaacagcagggtcacttctcattttctttgctgacttacctttttactgaccgttgtgaatttctgtctcaaaatgtataatatagaaatgcaagaaaaaaacaaatgtacagattgtaaagttttttgatacctaatgtaagttttctttgtgtaatatttatatgataaaagacattaggatccctacaa

SEQ ID NO: 174182 - DNA, 2296 bp, Homo sapiens
  Payload ID: 14192
  Gene Symbol: RASGRP1
  Gene Name: RAS guanyl releasing protein 1 (calcium and DAG-regulated)
  Uniprot ID: O95267
  ENST ID: ENST00000450598
  CDS Start-End: 8-2296
cgcggccatgggcaccctgggcaaggcgagagaggctccgcggaaaccttcccatggctgcagagctgcctctaaagcaagactagaggcaaagccagccaacagccccttcccctcccatcccagcttggcccacatcacccagttccgaatgatggtgtctctgggacatttagccaaaggagccagcctggacgatctcattgacagctgcattcaatcttttgatgcagatggaaacctgtgtcgaagtaaccaactgttgcaagtcatgctgaccatgcaccgaattgtcatctcctctgcagaactgctccaaaaagttatcaccctctataaggatgctttggcaaagaattcaccaggactttgcctgaagatctgttattttgtaaggtattggataacagaattctgggtcatgtttaaaatggacgccagcttgacagacactatggaggagtttcaggaactggtgaaagctaagggtgaggagttacattgccgcctgattgacacaactcaaatcaatgcccgtgactggtccaggaaacttactcaaaggataaaatcaaataccagcaagaaacggaaagtctccctgctctttgaccatctggaaccagaagagctatccgagcacctcacctaccttgagttcaagtctttccggaggatatcgttctctgattatcagaattaccttgtaaatagctgtgtgaaggaaaaccccaccatggagcgatctattgctctgtgcaacggcatctcccagtgggtacaactgatggttctcagccgccccacgccgcagctccgagcagaagtcttcatcaagttcatccaggtggctcagaagctccaccaactacagaacttcaatacactgatggctgtgataggtgggctgtgtcacagctcaatctcgaggctcaaggagacaagttcgcatgtcccacatgaaatcaataaggttctcggtgagatgactgagctgctgtcctcctccagaaactacgacaattaccggcgagcctatggagagtgcaccgacttcaagatccccattctgggtgtgcatctcaaggacctcatctccctgtatgaagccatgcctgactatctggaggacgggaaagtgaacgtccataagctactggccctatacaatcatatcagtgaattggtccagctgcaagaggtggccccacccttggaggctaacaaggacttggtacacttgctgacgttatccctggatctttactacactgaggatgaaatctatgagctttcctatgcccgggaaccaaggaaccacagagctccatctgtcttcaagaactatgatcacgaccaggatggatacatttctcaggaagaatttgaaaagattgctgcgagttttccattttccttctgtgtgatggacaaagacagggaaggcctcatcagcagggatgagatcacagcctacttcatgagagccagctcaatctattccaagctgggcctgggctttcctcacaacttccaagagaccacctacctgaagcccactttttgtgacaactgtgctggatttctctggggagtgatcaaacaaggatatcgatgtaaagactgcgggatgaactgtcacaaacaatgcaaagatctggttgtgtttgagtgtaagaagcgagccaagaacccagtagctcccacagagaacaacacttctgtggggccagtgtccaacctttgctcattgggagccaaagatctgctccatgcacctgaggaaggaccttttacattccctaatggggaggctgtggaacatggtgaggagagtaaggatcggaccatcatgctgatgggagtgtcctcacagaagatttctcttcggctgaagagggctgttgcccacaaggccacccagactgaatcacagccttggattggcagtgagggcccttcaggtccctttgtgctgtcttccccaaggaagacagcccaggatactctatatgtgcttcccagtcccacctctccatgtcctagcccagtcttggtcagaaagcgggcttttgtcaagtgggagaataaagactccctcataaaatcaaaggaggagctccgtcacctcagactgcctacctaccaagaactggaacaggaaataaatactctgaaagcagataatgatgccctaaagatccaactgaaatatgcacagaagaaaatagaatccctccagcttgaaaaaagcaatcatgtcttagctcaaatggagcagggtgactgttcttag

SEQ ID NO: 174183 - DNA, 2151 bp, Homo sapiens
  Payload ID: 14192
  Gene Symbol: RASGRP1
  Gene Name: RAS guanyl releasing protein 1 (calcium and DAG-regulated)
  Uniprot ID: O95267
  ENST ID: ENST00000414708
  CDS Start-End: 8-1453
cgcggccatgggcaccctgggcaaggcgagagaggctccgcggaaaccttcccatggctgcagagctgcctctaaagcaagactagaggcaaagccagccaacagccccttcccctcccatcccagcttggcccacatcacccagttccgaatgatggtgtctctgggacatttagccaaaggagccagcctggacgatctcattgacagctgcattcaatcttttgatgcagatggaaacctgtgtcgaagtaaccaactgttgcaagtcatgctgaccatgcaccgaattgtcatctcctctgcagaactgctccaaaaagttatcaccctctataaggatgctttggcaaagaattcaccaggactttgcctgaagatctgttattttgtaaggtattggataacagaattctgggtcatgtttaaaatggacgccagcttgacagacactatggaggagtttcaggaactggtgaaagctaagggtgaggagttacattgccgcctgattgacacaactcaaatcaatgcccgtgactggtccaggaaacttactcaaaggataaaatcaaataccagcaagaaacggaaagtctccctgctctttgaccatctggaaccagaagagctatccgagcacctcacctaccttgagttcaagtctttccggaggatatcgttctctgattatcagaattaccttgtaaatagctgtgtgaaggaaaaccccaccatggagcgatctattgctctgtgcaacggcatctcccagtgggtacaactgatggttctcagccgccccacgccgcagctccgagcagaagtcttcatcaagttcatccaggtggctcagaagctccaccaactacagaacttcaatacactgatggctgtgataggtgggctgtgtcacagctcaatctcgaggctcaaggagacaagttcgcatgtcccacatgaaatcaataaggttctcggtgagatgactgagctgctgtcctcctccagaaactacgacaattaccggcgagcctatggagagtgcaccgacttcaagatccccattctgggtgtgcatctcaaggacctcatctccctgtatgaagccatgcctgactatctggaggacgggaaagtgaacgtccataagctactggccctatacaatcatatcagtgaattggtccagctgcaagaggtggccccacccttggaggctaacaaggacttggtacacttgctgacgttatccctggatctttactacactgaggatgaaatctatgagctttcctatgcccgggaaccaaggaaccacagagctccatctgtcttcaagaactatgatcacgaccaggatggatacatttctcaggaagaatttgaaaagattgctgcgagttttccattttccttctgtgtgatggacaaagacagctctggggagtgatcaaacaaggatatcgatgtaaagactgcgggatgaactgtcacaaacaatgcaaagatctggttgtgtttgagtgtaagaagcgagccaagaacccagtagctcccacagagaacaacacttctgtggggccagtgtccaacctttgctcattgggagccaaagatctgctccatgcacctgaggaaggaccttttacattccctaatggggaggctgtggaacatggtgaggagagtaaggatcggaccatcatgctgatgggagtgtcctcacagaagatttctcttcggctgaagagggctgttgcccacaaggccacccagactgaatcacagccttggattggcagtgagggcccttcaggtccctttgtgctgtcttccccaaggaagacagcccaggatactctatatgtgcttcccagtcccacctctccatgtcctagcccagtcttggtcagaaagcgggcttttgtcaagtgggagaataaagactccctcataaaatcaaaggaggagctccgtcacctcagactgcctacctaccaagaactggaacaggaaataaatactctgaaagcagataatgatgccctaaagatccaactgaaatatgcacagaagaaaatagaatccctccagcttgaaaaaagcaatcatgtcttagctcaaatggagcagggtgactgttcttag

SEQ ID NO: 174184 - DNA, 5021 bp, Homo sapiens
  Payload ID: 14192
  Gene Symbol: RASGRP1
  Gene Name: RAS guanyl releasing protein 1 (calcium and DAG-regulated)
  ENST ID: ENST00000539159
  CDS Start-End: 179-2572
acaaagtttgtgcctgcggtgcacctcggtcgggctcgccgggctcgagggctggcgggcgccggggctacgaggcccgggggggagagagccggcaggcggcggcggtggtggcgggggcgatgcgccgcgcccggccgcgctaggtgagccggcaccgggagcgcgggccgcggccatgggcaccctgggcaaggcgagagaggctccgcggaaaccttcccatggctgcagagctgcctctaaagcaagactagaggcaaagccagccaacagccccttcccctcccatcccagcttggcccacatcacccagttccgaatgatggtgtctctgggacatttagccaaaggagccagcctggacgatctcattgacagctgcattcaatcttttgatgcagatggaaacctgtgtcgaagtaaccaactgttgcaagtcatgctgaccatgcaccgaattgtcatctcctctgcagaactgctccaaaaagttatcaccctatatcctgatgctttggcaaagaattcaccaggactttgcctgaagatctgttattttgtaaggtattggataacagaattctgggtcatgtttaaaatggacgccagcttgacagacactatggaggagtttcaggaactggtgaaagctaagggtgaggagttacattgccgcctgattgacacaactcaaatcaatgcccgtgactggtccaggaaacttactcaaaggataaaatcaaataccagcaagaaacggaaagtctccctgctctttgaccatctggaaccagaagagctatccgagcacctcacctaccttgagttcaagtctttccggaggatatcgttctctgattatcagaattaccttgtaaatagctgtgtgaaggaaaaccccaccatggagcgatctattgctctgtgcaacggcatctcccagtgggtacaactgatggttctcagccgccccacgccgcagctccgagcagaagtcttcatcaagttcatccaggtggctcagaagctccaccaactacagaacttcaatacactgatggctgtgataggtgggctgtgtcacagctcaatctcgaggctcaaggagacaagttcgcatgtcccacatgaaatcaataaggttctcggtgagatgactgagctgctgtcctcctccagaaactacgacaattaccggcgagcctatggagagtgcaccgacttcaagatccccattctgggtgtgcatctcaaggacctcatctccctgtatgaagccatgcctgactatctggaggacgggaaagtgaacgtccataagctactggccctatacaatcatatcagtgaattggtccagctgcaagaggtggccccacccttggaggctaacaaggacttggtacacttgctgacgttatccctggatctttactacactgaggatgaaatctatgagctttcctatgcccgggaaccaaggaaccacagagctccaccactaacaccttcaaagccaccagtagtagtggactgggcttctggagtgtctcccaaacctgatccaaaaaccattagcaaacacgtccagaggatggtggattctgtcttcaagaactatgatcacgaccaggatggatacatttctcaggaagaatttgaaaagattgctgcgagttttccattttccttctgtgtgatggacaaagacagggaaggcctcatcagcagggatgagatcacagcctacttcatgagagccagctcaatctattccaagctgggcctgggctttcctcacaacttccaagagaccacctacctgaagcccactttttgtgacaactgtgctggatttctctggggagtgatcaaacaaggatatcgatgtaaagactgcgggatgaactgtcacaaacaatgcaaagatctggttgtgtttgagtgtaagaagcgagccaagaacccagtagctcccacagagaacaacacttctgtggggccagtgtccaacctttgctcattgggagccaaagatctgctccatgcacctgaggaaggaccttttacattccctaatggggaggctgtggaacatggtgaggagagtaaggatcggaccatcatgctgatgggagtgtcctcacagaagatttctcttcggctgaagagggctgttgcccacaaggccacccagactgaatcacagccttggattggcagtgagggcccttcaggtccctttgtgctgtcttccccaaggaagacagcccaggatactctatatgtgcttcccagtcccacctctccatgtcctagcccagtcttggtcagaaagcgggcttttgtcaagtgggagaataaagactccctcataaaatcaaaggaggagctccgtcacctcagactgcctacctaccaagaactggaacaggaaataaatactctgaaagcagataatgatgccctaaagatccaactgaaatatgcacagaagaaaatagaatccctccagcttgaaaaaagcaatcatgtcttagctcaaatggagcagggtgactgttcttagcccagaaactaagtagcacaatctgtagatgagtatagtgatctcatttcctaaactgtaatgcacagacctgaggaactttacactgaccagctttaaaacagtactttaaaaggaaaagcctgttactgtttatttacctaaaagattcctaatgtgcagcactgttttctctttcagttagttgactcaaagggggaaaactaaagaatgcaaaacttttgctattcataccactgatgttcatcaaaagtatgcgatctaaaacatgactatcatttcctgacaatggggcatctcggtggcctgcctggctgattcttccttaaaactaaaatctctggaaaatggatttgcttcttaccctgtgttttctgcaaactgacttactttgttccagccaaagcttgctaataatagaaaactacccatattccaaaagtagatttcctctgtatcccagcatactttgtgaacctggctccttcttcactacctcagatctaatcaattagtccatgtaccctccttcctcactacagtcataacacatgagcatatctacctagaagccaatttctactgatgtagccacaactttttagaggcctattaaacatgacgttatccaattgcaggtcaacttatagttgtagccttacaacttacaggcatcagaaaataagtaatcaaattaggtacctggaaacatagctattaccatctcatattactgtctaattaaaataaacataacgcaaacatgtttgtccttatatattctacagtggatagaattaggaattgatggcttaaaaaaaaaagtctatgaagagtctgtttaactcttcatgttccatctttctcttctgaagtaaactattttgaaagttctctttttgaaatgaatttgtgcttaactgtcttcactattaatactatttagaaataagctaattggatcagtggcttaaataatagctgactgtgtgtacatatgtatataatatgtatatacaatatcaggcatgcatgtggcttggaattttgtttcctccataaaatgtggaagtgaattaaacaagttttagtcatttatacaaagtcacaaatataaagttcagtttgtcacaagattaaattgctcacaaggtaaaattgtattgtttggcaaaatcacaagtaacaatcctgtgagttttctattatgaaggttaataataaatgggctcatttagttgcctgggcacctattcacaaattcatttgtcagcctctttttagttctcttaaaaaaaaaaaaatcatatgatcattttcctttttgggggtacttagcttccatgcctataaagtctggtaccagactgacttgaaattcataaacaagttgtccaattgccaagaatatgttaacaattaaaagttccaaactaaagccaatagcaccaagtcttcataagaatacaaagtatacatacagtattgcttacctggaggattcagatcatttaggaattctctttgatgaaagatcagttcccatttgagttcctccttgcactgagttttagtgatatagaactagcttgtagttagtgtttcattacattataaagaatagttttacacacgtatttaccgttttccaaatttaaactcagaaatacccaaagcaggcctgcttaagcccactacctggcatataaacttatagtaacactttgttactttctttttaataggacaagcatgagttaggacaaactctaaaaattcatattcttcactattcttgttttcctttgattgatatagaccaaagatggtgtactctaattttttaaaacagtaatggaacacaatttttttcattcttcctcctctccattcgaagtaaagatccccagttagtttttatataaataatctatagggattcaaaaggtgtcacagtccacttaattagtcaaattagcaatggctaaacagtatcaagtactgcagaatttatcactgaaatggataagaggaaatagtttagtcacaggtttttacagtccagcaagggccaaagaggtatagtatacaagttaatagtatttgtgttgagcaacatggggctagtgggatcacagaaatctggaaaaaaaaaaaaaaggctttggcttatcaagcctagtgtaaatttctgcatctcacacgactttagtttggccaggtatttatctgccaaaacaaggacaaatcttgttgtattaacagcagggtcacttctcattttctttgctgacttacctttttactgaccgttgtgaatttctgtctcaaaatgtataatatagaaatgcaagaaaaaaacaaatgtacagattgtaaagttttttgatacctaatgtaagttttctttgtgtaatatttatatgataaaagacattaggatccctac

SEQ ID NO: 174185 - DNA, 1910 bp, Homo sapiens
  Payload ID: 14192
  Gene Symbol: RASGRP1
  Gene Name: RAS guanyl releasing protein 1 (calcium and DAG-regulated)
  Uniprot ID: O95267
  ENST ID: ENST00000559830
  CDS Start-End: 8-1801
cgcggccatgggcaccctgggcaaggcgagagaggctccgcggaaaccttcccatggctgcagagctgcctctaaagcaagactagaggcaaagccagccaacagccccttcccctcccatcccagcttggcccacatcacccagttccgaatgatggtgtctctgggacatttagccaaaggagccagcctggacgatctcattgacagctgcattcaatcttttgatgcagatggaaacctgtgtcgaagtaaccaactgttgcaagtcatgctgaccatgcaccgaattgtcatctcctctgcagaactgctccaaaaagttatcaccctctataaggatgctttggcaaagaattcaccaggactttgcctgaagatctgttattttgtaaggtattggataacagaattctgggtcatgtttaaaatggacgccagcttgacagacactatggaggagtttcaggaactggtgaaagctaagggtgaggagttacattgccgcctgattgacacaactcaaatcaatgcccgtgactggtccaggaaacttactcaaaggataaaatcaaataccagcaagaaacggaaagtctccctgctctttgaccatctggaaccagaagagctatccgagcacctcacctaccttgagttcaagtctttccggaggatatcgttctctgattatcagaattaccttgtaaatagctgtgtgaaggaaaaccccaccatggagcgatctattgctctgtgcaacggcatctcccagtgggtacaactgatggttctcagccgccccacgccgcagctccgagcagaagtcttcatcaagttcatccaggtggctcagaagctccaccaactacagaacttcaatacactgatggctgtgataggtgggctgtgtcacagctcaatctcgaggctcaaggagacaagttcgcatgtcccacatgaaatcaataaggttctcggtgagatgactgagctgctgtcctcctccagaaactacgacaattaccggcgagcctatggagagtgcaccgacttcaagatccccattctgggtgtgcatctcaaggacctcatctccctgtatgaagccatgcctgactatctggaggacgggaaagtgaacgtccataagctactggccctatacaatcatatcagtgaattggtccagctgcaagaggtggccccacccttggaggctaacaaggacttggtacacttgctgacgttatccctggatctttactacactgaggatgaaatctatgagctttcctatgcccgggaaccaaggaaccacagagctccatctgtcttcaagaactatgatcacgaccaggatggatacatttctcaggaagaatttgaaaagattgctgcgagttttccattttccttctgtgtgatggacaaagacagggaaggcctcatcagcagggatgagatcacagcctacttcatgagagccagctcaatctattccaagctgggcctgggctttcctcacaacttccaagagaccacctacctgaagcccactttttgtgacaactgtgctggatttctctggggagtgatcaaacaaggatatcgatgtaaagactgcgggatgaactgtcacaaacaatgcaaagatctggttgtgtttgagtgtaagaagcgagccaagaacccagtagctcccacagagaacaacacttctgtggggccagtgtccaacctttgctcattgggagccaaagatctgctccatggaaataaatactctgaaagcagataatgatgccctaaagatccaactgaaatatgcacagaagaaaatagaatccctccagcttgaaaaaagcaatcatgtcttagctcaaatggagcagggtgactgttcttag

SEQ ID NO: 174186 - DNA, 2707 bp, Homo sapiens
  Payload ID: 14192
  Gene Symbol: RASGRP1
  Gene Name: RAS guanyl releasing protein 1 (calcium and DAG-regulated)
  ENST ID: ENST00000561180
  CDS Start-End: 87-2633
ctattgagattatcagcactatcacctggacaagcagcggatgggccgcccctcttggccaggtcttctgtgcgcactgacgttgtatgaaagttgtccccacatctcctacacccaccgacgccaggcggccgcgtctgggccagatatggatcacgcctgtggagcgcacctccacacaggcagccctcgtccaaggtgcagggcgcagggcacagggcacatgtctacggcccagtcctgcagacggctacctagagaccccagggcacaggaaaccttcccatggctgcagagctgcctctaaagcaagactagaggcaaagccagccaacagccccttcccctcccatcccagcttggcccacatcacccagttccgaatgatggtgtctctgggacatttagccaaaggagccagcctggacgatctcattgacagctgcattcaatcttttgatgcagatggaaacctgtgtcgaagtaaccaactgttgcaagtcatgctgaccatgcaccgaattgtcatctcctctgcagaactgctccaaaaagttatcaccctctataaggatgctttggcaaagaattcaccaggactttgcctgaagatctgttattttgtaaggtattggataacagaattctgggtcatgtttaaaatggacgccagcttgacagacactatggaggagtttcaggaactggtgaaagctaagggtgaggagttacattgccgcctgattgacacaactcaaatcaatgcccgtgactggtccaggaaacttactcaaaggataaaatcaaataccagcaagaaacggaaagtctccctgctctttgaccatctggaaccagaagagctatccgagcacctcacctaccttgagttcaagtctttccggaggatatcgttctctgattatcagaattaccttgtaaatagctgtgtgaaggaaaaccccaccatggagcgatctattgctctgtgcaacggcatctcccagtgggtacaactgatggttctcagccgccccacgccgcagctccgagcagaagtcttcatcaagttcatccaggtggctcagaagctccaccaactacagaacttcaatacactgatggctgtgataggtgggctgtgtcacagctcaatctcgaggctcaaggagacaagttcgcatgtcccacatgaaatcaataaggttctcggtgagatgactgagctgctgtcctcctccagaaactacgacaattaccggcgagcctatggagagtgcaccgacttcaagatccccattctgggtgtgcatctcaaggacctcatctccctgtatgaagccatgcctgactatctggaggacgggaaagtgaacgtccataagctactggccctatacaatcatatcagtgaattggtccagctgcaagaggtggccccacccttggaggctaacaaggacttggtacacttgctgacgttatccctggatctttactacactgaggatgaaatctatgagctttcctatgcccgggaaccaaggaaccacagagctccaccactaacaccttcaaagccaccagtagtagtggactgggcttctggagtgtctcccaaacctgatccaaaaaccattagcaaacacgtccagaggatggtggattctgtcttcaagaactatgatcacgaccaggatggatacatttctcaggaagaatttgaaaagattgctgcgagttttccattttccttctgtgtgatggacaaagacagggaaggcctcatcagcagggatgagatcacagcctacttcatgagagccagctcaatctattccaagctgggcctgggctttcctcacaacttccaagagaccacctacctgaagcccactttttgtgacaactgtgctggatttctctggggagtgatcaaacaaggatatcgatgtaaagactgcgggatgaactgtcacaaacaatgcaaagatctggttgtgtttgagtgtaagaagcgagccaagaacccagtagctcccacagagaacaacacttctgtggggccagtgtccaacctttgctcattgggagccaaagatctgctccatgcacctgaggaaggaccttttacattccctaatggggaggctgtggaacatggtgaggagagtaaggatcggaccatcatgctgatgggagtgtcctcacagaagatttctcttcggctgaagagggctgttgcccacaaggccacccagactgaatcacagccttggattggcagtgagggcccttcaggtccctttgtgctgtcttccccaaggaagacagcccaggatactctatatgtgcttcccagtcccacctctccatgtcctagcccagtcttggtcagaaagcgggcttttgtcaagtgggagaataaagactccctcataaaatcaaaggaggagctccgtcacctcagactgcctacctaccaagaactggaacaggaaataaatactctgaaagcagataatgatgccctaaagatccaactgaaatatgcacagaagaaaatagaatccctccagcttgaaaaaagcaatcatgtcttagctcaaatggagcagggtgactgttcttagcccagaaactaagtagcacaatctgtagatgagtatagtgatctcatttcctaaactgtaatgcacagacctga

SEQ ID NO: 174187 - DNA, 304 bp, Homo sapiens
  Payload ID: 14192
  Gene Symbol: RASGRP1
  Gene Name: RAS guanyl releasing protein 1 (calcium and DAG-regulated)
  ENST ID: ENST00000560929
  CDS Start-End: 208-304
ggcgtggaagctgcgggtcggctgcgggaaagggggtcccatgggagccgctaggcgcagcccgtttcccgagctgaggtggaggtcgacgggcacaggaaaccttcccatggctgcagagctgcctctaaagcaagactagaggcaaagccagccaacagccccttcccctcccatcccagcttggcccacatcacccagttccgaatgatggtgtctctgggacatttagccaaaggagccagcctggacgatctcattgacagctgcattcaatcttttgatgcagatggaaacctgtgtc

SEQ ID NO: 174188 - DNA, 2895 bp, Homo sapiens
  Payload ID: 14192
  Gene Symbol: RASGRP1
  Gene Name: RAS guanyl releasing protein 1 (calcium and DAG-regulated)
  ENST ID: ENST00000558432
  CDS Start-End: 1-2436
attcccttcctctccaatctgccttcagagcgtggagctgcccgtttgtcccctcactgccttctctctttccccaggaaaccttcccatggctgcagagctgcctctaaagcaagactagaggcaaagccagccaacagccccttcccctcccatcccagcttggcccacatcacccagttccgaatgatggtgtctctgggacatttagccaaaggagccagcctggacgatctcattgacagctgcattcaatcttttgatgcagatggaaacctgtgtcgaagtaaccaactgttgcaagtcatgctgaccatgcaccgaattgtcatctcctctgcagaactgctccaaaaagttatcaccctctataaggatgctttggcaaagaattcaccaggactttgcctgaagatctgttattttgtaaggtattggataacagaattctgggtcatgtttaaaatggacgccagcttgacagacactatggaggagtttcaggaactggtgaaagctaagggtgaggagttacattgccgcctgattgacacaactcaaatcaatgcccgtgactggtccaggaaacttactcaaaggataaaatcaaataccagcaagaaacggaaagtctccctgctctttgaccatctggaaccagaagagctatccgagcacctcacctaccttgagttcaagtctttccggaggatatcgttctctgattatcagaattaccttgtaaatagctgtgtgaaggaaaaccccaccatggagcgatctattgctctgtgcaacggcatctcccagtgggtacaactgatggttctcagccgccccacgccgcagctccgagcagaagtcttcatcaagttcatccaggtggctcagaagctccaccaactacagaacttcaatacactgatggctgtgataggtgggctgtgtcacagctcaatctcgaggctcaaggagacaagttcgcatgtcccacatgaaatcaataaggttctcggtgagatgactgagctgctgtcctcctccagaaactacgacaattaccggcgagcctatggagagtgcaccgacttcaagatccccattctgggtgtgcatctcaaggacctcatctccctgtatgaagccatgcctgactatctggaggacgggaaagtgaacgtccataagctactggccctatacaatcatatcagtgaattggtccagctgcaagaggtggccccacccttggaggctaacaaggacttggtacacttgctgacgttatccctggatctttactacactgaggatgaaatctatgagctttcctatgcccgggaaccaaggaaccacagagctccaccactaacaccttcaaagccaccagtagtagtggactgggcttctggagtgtctcccaaacctgatccaaaaaccattagcaaacacgtccagaggatggtggattctgtcttcaagaactatgatcacgaccaggatggatacatttctcaggaagaatttgaaaagattgctgcgagttttccattttccttctgtgtgatggacaaagacagggaaggcctcatcagcagggatgagatcacagcctacttcatgagagccagctcaatctattccaagctgggcctgggctttcctcacaacttccaagagaccacctacctgaagcccactttttgtgacaactgtgctggatttctctggggagtgatcaaacaaggatatcgatgtaaagactgcgggatgaactgtcacaaacaatgcaaagatctggttgtgtttgagtgtaagaagcgagccaagaacccagtagctcccacagagaacaacacttctgtggggccagtgtccaacctttgctcattgggagccaaagatctgctccatgcacctgaggaaggaccttttacattccctaatggggaggctgtggaacatggtgaggagagtaaggatcggaccatcatgctgatgggagtgtcctcacagaagatttctcttcggctgaagagggctgttgcccacaaggccacccagactgaatcacagccttggattggcagtgagggcccttcaggtccctttgtgctgtcttccccaaggaagacagcccaggatactctatatgtgcttcccagtcccacctctccatgtcctagcccagtcttggtcagaaagcgggcttttgtcaagtgggagaataaagactccctcataaaatcaaaggaggagctccgtcacctcagactgcctacctaccaagaactggaacaggaaataaatactctgaaagcagataatgatgccctaaagatccaactgaaatatgcacagaagaaaatagaatccctccagcttgaaaaaagcaatcatgtcttagctcaaatggagcagggtgactgttcttagcccagaaactaagtagcacaatctgtagatgagtatagtgatctcatttcctaaactgtaatgcacagacctgaggaactttacactgaccagctttaaaacagtactttaaaaggaaaagcctgttactgtttatttacctaaaagattcctaatgtgcagcactgttttctctttcagttagttgactcaaagggggaaaactaaagaatgcaaaacttttgctattcataccactgatgttcatcaaaagtatgcgatctaaaacatgactatcatttcctgacaatggggcatctcggtggcctgcctggctgattcttccttaaaactaaaatctctggaaaatggatttgcttcttaccctgtgttttctgcaaactgacttactttgttccagccaaagcttgctaataatagaaaactacccatattccaaaagtagatttcctctgtatc

SEQ ID NO: 174189 - DNA, 792 bp, Homo sapiens
  Payload ID: 14192
  Gene Symbol: RASGRP1
  Gene Name: RAS guanyl releasing protein 1 (calcium and DAG-regulated)
  ENST ID: ENST00000557875
  CDS Start-End: 1-372
gagaccacctacctgaagcccactttttgtgacaactgtgctggatttctctggggagtgatcaaacaaggatatcgatgtaaagatatcaggatactgcttctgatgctgagattcactgataagggctacatcaagagtgtgagctctgggcttcaccaagtgagaagaatgctagcttcattaggaatgttaagtgtcttagctccagaagatagaacagacatgtgtgacaagaaagcactgcatgaatttggttgtgagacacactggggaagagagaaaagtgaaagacttcttgacccaggatgtcttgtccacagactgcgggatgaactgtcacaaacaatgcaaagatctggttgtgtttgagtgtaagaagcgagccaagaacccagtagctcccacagagaacaacacttctgtggggccagtgtccaacctttgctcattgggagccaaagatctgctccatgcacctgaggaaggaccttttacattccctaatggggaggctgtggaacatggtgaggagagtaaggatcggaccatcatgctgatgggagtgtcctcacagaagatttctcttcggctgaagagggctgttgcccacaaggccacccagactgaatcacagccttggattggcagtgagggcccttcaggtccctttgtgctgtcttccccaaggaagacagcccaggatactctatatgtgcttcccagtcccacctctccatgtcctagcccagtcttggtcagaaagcgggcttttgtcaagtgggagaataa

SEQ ID NO: 174190 - DNA, 547 bp, Homo sapiens
  Payload ID: 14192
  Gene Symbol: RASGRP1
  Gene Name: RAS guanyl releasing protein 1 (calcium and DAG-regulated)
  ENST ID: ENST00000558418
  CDS Start-End: 260-547
ttccccttcaggaagtgggagacagtaggacagagcaatcctaatgccaggatgaagagcactagttgcaaccctgaaatctcacctttgctggggagatgtctctttaacagccaaccagtcatttggtgcatttgccaagtgggaggggaaaccttcccatggctgcagagctgcctctaaagcaagactagaggcaaagccagccaacagccccttcccctcccatcccagcttggcccacatcacccagttccgaatgatggtgtctctgggacatttagccaaaggagccagcctggacgatctcattgacagctgcattcaatcttttgatgcagatggaaacctgtgtcgaagtaaccaactgttgcaagtcatgctgaccatgcaccgaattgtcatctcctctgcagaactgctccaaaaagttatcaccctctataaggatgctttggcaaagaattcaccaggactttgcctgaagatctgttattttgtaaggtattggataacagaattctgggtcatgtttaaaatggacgcc

SEQ ID NO: 174191 - DNA, 548 bp, Homo sapiens
  Payload ID: 14192
  Gene Symbol: RASGRP1
  Gene Name: RAS guanyl releasing protein 1 (calcium and DAG-regulated)
  ENST ID: ENST00000561117
  CDS Start-End: 377-548
tatacaggagaggccctggaggggagaaggcgtcctcactgcagtgctccgagcagcggccgcaggaagaggcgtggaagctgcgggtcggctgcgggaaagggggtcccatgggagccgctaggcgcagcccgtttcccgagctgaggtggaggtcgacgggcacaggtgccctgcaaggcgcgggcgtggtagccgggagcccgctcctctccaactcccctgagacttaaccctttggccaagagaggtcgaaggcgggcaggggaaaccttcccatggctgcagagctgcctctaaagcaagactagaggcaaagccagccaacagccccttcccctcccatcccagcttggcccacatcacccagttccgaatgatggtgtctctgggacatttagccaaaggagccagcctggacgatctcattgacagctgcattcaatcttttgatgcagatggaaacctgtgtcgaagtaaccaactgttgcaagtcatgctgaccatgcaccgaattgtcatctcctctgcagaactgctccaaaaag

SEQ ID NO: 174192 - DNA, 843 bp, Homo sapiens
  Payload ID: 14192
  Gene Symbol: RASGRP1
  Gene Name: RAS guanyl releasing protein 1 (calcium and DAG-regulated)
  ENST ID: ENST00000560425
  CDS Start-End: 1-654
cagaacttcaatacactgatggctgtgataggtgggctgtgtcacagctcaatctcgaggctcaaggagacaagttcgcatgtcccacatgaaatcaataaggttctcggtgagatgactgagctgctgtcctcctccagaaactacgacaattaccggcgagcctatggagagtgcaccgacttcaagatccccattctgggtgtgcatctcaaggacctcatctccctgtatgaagccatgcctgactatctggaggacgggaaagtgaacgtccataagctactggccctatacaatcatatcagtgaattggtccagctgcaagaggtggccccacccttggaggctaacaaggacttggtacacttgctgacgttatccctggatctttactacactgaggatgaaatctatgagctttcctatgcccgggaaccaaggaaccacagagctccatctgtcttcaagaactatgatcacgaccaggatggatacatttctcaggaagaatttgaaaagattgctgcgagttttccattttccttctgtgtgatggacaaagacagggcccatggaagtaatcatgaggtagcacataccatattaccactgaggataaaaagaaagggaaggcctcatcagcagggatgagatcacagcctacttcatgagagccagctcaatctattccaagctgggcctgggctttcctcacaacttccaagagaccacctacctgaagcccactttttgtgacaactgtgctggatttctctggggagtgatcaaacaaggatatcgatgtaaagactgcgggatgaactgtcacaaacaatgcaa

SEQ ID NO: 174193 - DNA, 1757 bp, Homo sapiens
  Payload ID: 14192
  Gene Symbol: RASGRP1
  Gene Name: RAS guanyl releasing protein 1 (calcium and DAG-regulated)
  Uniprot ID: O95267
  ENST ID: ENST00000558164
  CDS Start-End: 8-1648
cgcggccatgggcaccctgggcaaggcgagagaggctccgcggaaaccttcccatggctgcagagctgcctctaaagcaagactagaggcaaagccagccaacagccccttcccctcccatcccagcttggcccacatcacccagttccgaatgatggtgtctctgggacatttagccaaaggagccagcctggacgatctcattgacagctgcattcaatcttttgatgcagatggaaacctgtgtcgaagtaaccaactgttgcaagtcatgctgaccatgcaccgaattgtcatctcctctgcagaactgctccaaaaagttatcaccctctataaggatgctttggcaaagaattcaccaggactttgcctgaagatctgttattttgtaaggtattggataacagaattctgggtcatgtttaaaatggacgccagcttgacagacactatggaggagtttcaggaactggtgaaagctaagggtgaggagttacattgccgcctgattgacacaactcaaatcaatgcccgtgactggtccaggaaacttactcaaaggataaaatcaaataccagcaagaaacggaaagtctccctgctctttgaccatctggaaccagaagagctatccgagcacctcacctaccttgagttcaagtctttccggaggatatcgttctctgattatcagaattaccttgtaaatagctgtgtgaaggaaaaccccaccatggagcgatctattgctctgtgcaacggcatctcccagtgggtacaactgatggttctcagccgccccacgccgcagctccgagcagaagtcttcatcaagttcatccaggtggctcagaagctccaccaactacagaacttcaatacactgatggctgtgataggtgggctgtgtcacagctcaatctcgaggctcaaggagacaagttcgcatgtcccacatgaaatcaataaggttctcggtgagatgactgagctgctgtcctcctccagaaactacgacaattaccggcgagcctatggagagtgcaccgacttcaagatccccattctgggtgtgcatctcaaggacctcatctccctgtatgaagccatgcctgactatctggaggacgggaaagtgaacgtccataagctactggccctatacaatcatatcagtgaattggtccagctgcaagaggtggccccacccttggaggctaacaaggacttggtacacttgctgacgttatccctggatctttactacactgaggatgaaatctatgagctttcctatgcccgggaaccaaggaaccacagagctccatctgtcttcaagaactatgatcacgaccaggatggatacatttctcaggaagaatttgaaaagattgctgcgagttttccattttccttctgtgtgatggacaaagacagggaaggcctcatcagcagggatgagatcacagcctacttcatgagagccagctcaatctattccaagctgggcctgggctttcctcacaacttccaagagaccacctacctgaagcccactttttgtgacaactgtgctggatttctctggggagtgatcaaacaaggatatcgatgtaaaggaaataaatactctgaaagcagataatgatgccctaaagatccaactgaaatatgcacagaagaaaatagaatccctccagcttgaaaaaagcaatcatgtcttagctcaaatggagcagggtgactgttcttag

SEQ ID NO: 174194 - DNA, 2310 bp, Homo sapiens
  Payload ID: 14193
  Gene Symbol: RASGRP2
  Gene Name: RAS guanyl releasing protein 2 (calcium and DAG-regulated)
  Uniprot ID: Q7LDG7
  ENST ID: ENST00000354024
  CDS Start-End: 254-2083
cgatttcattcctcgctccccacaggtccctctccccaaaatattcccatcttgtcctagcccatcccccagactatctcaaggaccagctgtccccacgcccccgacctccactaggcctgtgccacccgctgcctgcaggaagacgcccggtcccgggccgggttagccccatgggaacggggttcggtccgagcccggtgggaggctcccggagcgcagcctgggcccagcccaccccgcgccggcggccatggcaggcaccctggacctggacaagggctgcacggtggaggagctgctccgcgggtgcatcgaagccttcgatgactccgggaaggtgcgggacccgcagctggtgcgcatgttcctcatgatgcacccctggtacatcccctcctctcagctggcggccaagctgctccacatctaccaacaatcccggaaggacaactccaattccctgcaggtgaaaacgtgccacctggtcaggtactggatctccgccttcccagcggagtttgacttgaacccggagttggctgagcagatcaaggagctgaaggctctgctagaccaagaagggaaccgacggcacagcagcctaatcgacatagacagcgtccctacctacaagtggaagcggcaggtgactcagcggaaccctgtgggacagaaaaagcgcaagatgtccctgttgtttgaccacctggagcccatggagctggcggagcatctcacctacttggagtatcgctccttctgcaagatcctgtttcaggactatcacagtttcgtgactcatggctgcactgtggacaaccccgtcctggagcggttcatctccctcttcaacagcgtctcacagtgggtgcagctcatgatcctcagcaaacccacagccccgcagcgggccctggtcatcacacactttgtccacgtggcggagaagctgctacagctgcagaacttcaacacgctgatggcagtggtcgggggcctgagccacagctccatctcccgcctcaaggagacccacagccacgttagccctgagaccatcaagctctgggagggtctcacggaactagtgacggcgacaggcaactatggcaactaccggcgtcggctggcagcctgtgtgggcttccgcttcccgatcctgggtgtgcacctcaaggacctggtggccctgcagctggcactgcctgactggctggacccagcccggacccggctcaacggggccaagatgaagcagctctttagcatcctggaggagctggccatggtgaccagcctgcggccaccagtacaggccaaccccgacctgctgagcctgctcacggtgtctctggatcagtatcagacggaggatgagctgtaccagctgtccctgcagcgggagccgcgctccaagtcctcgccaaccagccccacgagttgcaccccaccaccccggcccccggtactggaggagtggacctcggctgccaaacccaagctggatcaggccctcgtggtggagcacatcgagaagatggtggagtctgtgttccggaactttgacgtcgatggggatggccacatctcacaggaagaattccagatcatccgtgggaacttcccttacctcagcgcctttggggacctcgaccagaaccaggatggctgcatcagcagggaggagatggtttcctatttcctgcgctccagctctgtgttgggggggcgcatgggcttcgtacacaacttccaggagagcaactccttgcgccccgtcgcctgccgccactgcaaagccctgatcctgggcatctacaagcagggcctcaaatgccgagcctgtggagtgaactgccacaagcagtgcaaggatcgcctgtcagttgagtgtcggcgcagggcccagagtgtgagcctggaggggtctgcaccctcaccctcacccatgcacagccaccatcaccgcgccttcagcttctctctgccccgccctggcaggcgaggctccaggcctccagagatccgtgaggaggaggtacagacggtggaggatggggtgtttgacatccacttgtaatagatgctgtggttggatcaaggactcattcctgccttggagaaaatacttcaaccagagcagggagcctgggggtgtcggggcaggaggctggggatgggggtgggatatgagggtggcatgcagctgagggcagggccagggctggtgtccctaaggttgtacagactcttgtgaatatttgtattttccagatggaataaaaaggcccgtgtaattaaccttca

SEQ ID NO: 174195 - DNA, 429 bp, Homo sapiens
  Payload ID: 14193
  Gene Symbol: RASGRP2
  Gene Name: RAS guanyl releasing protein 2 (calcium and DAG-regulated)
  ENST ID: ENST00000377485
  CDS Start-End: 137-429
gctgccgcagggaccgccgcgtgcggggcgagagggagcccccggtgggggtggcgcagccggcggggttcggtccgagcccggtgggaggctcccggagcgcagcctgggcccagcccaccccgcgccggcggccatggcaggcaccctggacctggacaagggctgcacggtggaggagctgctccgcgggtgcatcgaagccttcgatgactccgggaaggtgcgggacccgcagctggtgcgcatgttcctcatgatgcacccctggtacatcccctcctctcagctggcggccaagctgctccacatctaccaacaatcccggaaggacaactccaattccctgcaggtgaaaacgtgccacctggtcaggtactggatctccgccttcccagcggagtttgacttgaacccggagttggctga

SEQ ID NO: 174196 - DNA, 667 bp, Homo sapiens
  Payload ID: 14193
  Gene Symbol: RASGRP2
  Gene Name: RAS guanyl releasing protein 2 (calcium and DAG-regulated)
  ENST ID: ENST00000377486
  CDS Start-End: 215-661
ggcactgccttgcgtgtgtgcacacgtgtgaggatgtcagcgcctgtgtggccgcgggactcaaggctggcctggctcaagtgaacagcacgtccaggaggcgacctcgtccgcgggtttgcattctggggtggacgagctgggggttcggtccgagcccggtgggaggctcccggagcgcagcctgggcccagcccaccccgcgccggcggccatggcaggcaccctggacctggacaagggctgcacggtggaggagctgctccgcgggtgcatcgaagccttcgatgactccgggaaggtgcgggacccgcagctggtgcgcatgttcctcatgatgcacccctggtacatcccctcctctcagctggcggccaagctgctccacatctaccaacaatcccggaaggacaactccaattccctgcaggtgaaaacgtgccacctggtcaggtactggatctccgccttcccagcggagtttgacttgaacccggagttggctgagcagatcaaggagctgaaggctctgctagaccaagaagggaaccgacggcacagcagcctaatcgacatagacagcgtgtgcgtggggggagcacagagggctgggggggcactcagtatcctataccatctgtgcttaataaatgtctgttgaactgaa

SEQ ID NO: 174197 - DNA, 642 bp, Homo sapiens
  Payload ID: 14193
  Gene Symbol: RASGRP2
  Gene Name: RAS guanyl releasing protein 2 (calcium and DAG-regulated)
  ENST ID: ENST00000377487
  CDS Start-End: 190-636
gcggggccgcggcgtggagagcgggcgggagccgcagccgcagcgaggccggcgggcgggagcgcacggaggtggggtcggccaggccggtgcgggctccttgcggcaggtcccaagagggttcggtccgagcccggtgggaggctcccggagcgcagcctgggcccagcccaccccgcgccggcggccatggcaggcaccctggacctggacaagggctgcacggtggaggagctgctccgcgggtgcatcgaagccttcgatgactccgggaaggtgcgggacccgcagctggtgcgcatgttcctcatgatgcacccctggtacatcccctcctctcagctggcggccaagctgctccacatctaccaacaatcccggaaggacaactccaattccctgcaggtgaaaacgtgccacctggtcaggtactggatctccgccttcccagcggagtttgacttgaacccggagttggctgagcagatcaaggagctgaaggctctgctagaccaagaagggaaccgacggcacagcagcctaatcgacatagacagcgtgtgcgtggggggagcacagagggctgggggggcactcagtatcctataccatctgtgcttaataaatgtctgttgaactgaa

SEQ ID NO: 174198 - DNA, 583 bp, Homo sapiens
  Payload ID: 14193
  Gene Symbol: RASGRP2
  Gene Name: RAS guanyl releasing protein 2 (calcium and DAG-regulated)
  ENST ID: ENST00000377489
  CDS Start-End: 131-577
gccacccgctgcctgcaggaagacgcccggtcccgggccgggttagccccatgggaacggggttcggtccgagcccggtgggaggctcccggagcgcagcctgggcccagcccaccccgcgccggcggccatggcaggcaccctggacctggacaagggctgcacggtggaggagctgctccgcgggtgcatcgaagccttcgatgactccgggaaggtgcgggacccgcagctggtgcgcatgttcctcatgatgcacccctggtacatcccctcctctcagctggcggccaagctgctccacatctaccaacaatcccggaaggacaactccaattccctgcaggtgaaaacgtgccacctggtcaggtactggatctccgccttcccagcggagtttgacttgaacccggagttggctgagcagatcaaggagctgaaggctctgctagaccaagaagggaaccgacggcacagcagcctaatcgacatagacagcgtgtgcgtggggggagcacagagggctgggggggcactcagtatcctataccatctgtgcttaataaatgtctgttgaactgaa

SEQ ID NO: 174199 - DNA, 2983 bp, Homo sapiens
  Payload ID: 14193
  Gene Symbol: RASGRP2
  Gene Name: RAS guanyl releasing protein 2 (calcium and DAG-regulated)
  Uniprot ID: Q7LDG7
  ENST ID: ENST00000377494
  CDS Start-End: 924-2756
gttgctaatggtgtcatgcacccaccggccacccttggcgcgagcgcccccctctggacaccctgctccgtgcgcgctcacagttcgcctgtgcggggccggggccagggtcaggagccggggatagggaggaagagggcctgtggacaagctgagccgggacccctgggacctttgcggaggtggcctgggagcgctcagttcccaggctcaggcttcccgctgacgcctcctggccgcagcgggctccccccgccccaggaatgttcctctcccatccagtccgcctcccctagggcaggccccctgggggctgccgcagccccgcctcgccttcctgggctcccgggagggggcgaggcgggcaggacgcctgggttctctccccccacctcccataccagggagaaattcctccgaggtcccctcaggctctgggttcccaaaataaccctgcgggggaagggaggctgtggagggagggaagcgggaggggcgcagagccgagctgcggggtgctgcaggtgcctctggggagagggcgcgaggagaaggcgccctgcggggggctgggcgccagccagtcctgggatcttggttcgtccccatcctcgtgaagcccctcggccttcccgcgactccgagggtgggccggaagcctctctgcgggtccgtttcccaactggcgggttgcaccatcccgggccagaccgtttaaccccgggagtggccgcgggggacaactccgcccctgtccagcagggggcgtgcccgccccgccccgtttctgcccgcggggccgctcccccgcccgcgactccgcagactcccgctctgcctctcccgggacaggggttcggtccgagcccggtgggaggctcccggagcgcagcctgggcccagcccaccccgcgccggcggccatggcaggcaccctggacctggacaagggctgcacggtggaggagctgctccgcgggtgcatcgaagccttcgatgactccgggaaggtgcgggacccgcagctggtgcgcatgttcctcatgatgcacccctggtacatcccctcctctcagctggcggccaagctgctccacatctaccaacaatcccggaaggacaactccaattccctgcaggtgaaaacgtgccacctggtcaggtactggatctccgccttcccagcggagtttgacttgaacccggagttggctgagcagatcaaggagctgaaggctctgctagaccaagaagggaaccgacggcacagcagcctaatcgacatagacagcgtccctacctacaagtggaagcggcaggtgactcagcggaaccctgtgggacagaaaaagcgcaagatgtccctgttgtttgaccacctggagcccatggagctggcggagcatctcacctacttggagtatcgctccttctgcaagatcctgtttcaggactatcacagtttcgtgactcatggctgcactgtggacaaccccgtcctggagcggttcatctccctcttcaacagcgtctcacagtgggtgcagctcatgatcctcagcaaacccacagccccgcagcgggccctggtcatcacacactttgtccacgtggcggagaagctgctacagctgcagaacttcaacacgctgatggcagtggtcgggggcctgagccacagctccatctcccgcctcaaggagacccacagccacgttagccctgagaccatcaagctctgggagggtctcacggaactagtgacggcgacaggcaactatggcaactaccggcgtcggctggcagcctgtgtgggcttccgcttcccgatcctgggtgtgcacctcaaggacctggtggccctgcagctggcactgcctgactggctggacccagcccggacccggctcaacggggccaagatgaagcagctctttagcatcctggaggagctggccatggtgaccagcctgcggccaccagtacaggccaaccccgacctgctgagcctgctcacggtgtctctggatcagtatcagacggaggatgagctgtaccagctgtccctgcagcgggagccgcgctccaagtcctcgccaaccagccccacgagttgcaccccaccaccccggcccccggtactggaggagtggacctcggctgccaaacccaagctggatcaggccctcgtggtggagcacatcgagaagatggtggagtctgtgttccggaactttgacgtcgatggggatggccacatctcacaggaagaattccagatcatccgtgggaacttcccttacctcagcgcctttggggacctcgaccagaaccaggatggctgcatcagcagggaggagatggtttcctatttcctgcgctccagctctgtgttgggggggcgcatgggcttcgtacacaacttccaggagagcaactccttgcgccccgtcgcctgccgccactgcaaagccctgatcctgggcatctacaagcagggcctcaaatgccgagcctgtggagtgaactgccacaagcagtgcaaggatcgcctgtcagttgagtgtcggcgcagggcccagagtgtgagcctggaggggtctgcaccctcaccctcacccatgcacagccaccatcaccgcgccttcagcttctctctgccccgccctggcaggcgaggctccaggcctccagcagagatccgtgaggaggaggtacagacggtggaggatggggtgtttgacatccacttgtaatagatgctgtggttggatcaaggactcattcctgccttggagaaaatacttcaaccagagcagggagcctgggggtgtcggggcaggaggctggggatgggggtgggatatgagggtggcatgcagctgagggcagggccagggctggtgtccctaaggttgtacagactcttgtgaatatttgtattttccagatggaataaaaaggcccgtgtaattaaccttca

SEQ ID NO: 174200 - DNA, 2221 bp, Homo sapiens
  Payload ID: 14193
  Gene Symbol: RASGRP2
  Gene Name: RAS guanyl releasing protein 2 (calcium and DAG-regulated)
  Uniprot ID: Q7LDG7
  ENST ID: ENST00000377497
  CDS Start-End: 165-1994
cgggagccgcagccgcagcgaggccggcgggcgggagcgcacggaggtggggtcggccaggccggtgcgggctccttgcggcaggtcccaagagggttcggtccgagcccggtgggaggctcccggagcgcagcctgggcccagcccaccccgcgccggcggccatggcaggcaccctggacctggacaagggctgcacggtggaggagctgctccgcgggtgcatcgaagccttcgatgactccgggaaggtgcgggacccgcagctggtgcgcatgttcctcatgatgcacccctggtacatcccctcctctcagctggcggccaagctgctccacatctaccaacaatcccggaaggacaactccaattccctgcaggtgaaaacgtgccacctggtcaggtactggatctccgccttcccagcggagtttgacttgaacccggagttggctgagcagatcaaggagctgaaggctctgctagaccaagaagggaaccgacggcacagcagcctaatcgacatagacagcgtccctacctacaagtggaagcggcaggtgactcagcggaaccctgtgggacagaaaaagcgcaagatgtccctgttgtttgaccacctggagcccatggagctggcggagcatctcacctacttggagtatcgctccttctgcaagatcctgtttcaggactatcacagtttcgtgactcatggctgcactgtggacaaccccgtcctggagcggttcatctccctcttcaacagcgtctcacagtgggtgcagctcatgatcctcagcaaacccacagccccgcagcgggccctggtcatcacacactttgtccacgtggcggagaagctgctacagctgcagaacttcaacacgctgatggcagtggtcgggggcctgagccacagctccatctcccgcctcaaggagacccacagccacgttagccctgagaccatcaagctctgggagggtctcacggaactagtgacggcgacaggcaactatggcaactaccggcgtcggctggcagcctgtgtgggcttccgcttcccgatcctgggtgtgcacctcaaggacctggtggccctgcagctggcactgcctgactggctggacccagcccggacccggctcaacggggccaagatgaagcagctctttagcatcctggaggagctggccatggtgaccagcctgcggccaccagtacaggccaaccccgacctgctgagcctgctcacggtgtctctggatcagtatcagacggaggatgagctgtaccagctgtccctgcagcgggagccgcgctccaagtcctcgccaaccagccccacgagttgcaccccaccaccccggcccccggtactggaggagtggacctcggctgccaaacccaagctggatcaggccctcgtggtggagcacatcgagaagatggtggagtctgtgttccggaactttgacgtcgatggggatggccacatctcacaggaagaattccagatcatccgtgggaacttcccttacctcagcgcctttggggacctcgaccagaaccaggatggctgcatcagcagggaggagatggtttcctatttcctgcgctccagctctgtgttgggggggcgcatgggcttcgtacacaacttccaggagagcaactccttgcgccccgtcgcctgccgccactgcaaagccctgatcctgggcatctacaagcagggcctcaaatgccgagcctgtggagtgaactgccacaagcagtgcaaggatcgcctgtcagttgagtgtcggcgcagggcccagagtgtgagcctggaggggtctgcaccctcaccctcacccatgcacagccaccatcaccgcgccttcagcttctctctgccccgccctggcaggcgaggctccaggcctccagagatccgtgaggaggaggtacagacggtggaggatggggtgtttgacatccacttgtaatagatgctgtggttggatcaaggactcattcctgccttggagaaaatacttcaaccagagcagggagcctgggggtgtcggggcaggaggctggggatgggggtgggatatgagggtggcatgcagctgagggcagggccagggctggtgtccctaaggttgtacagactcttgtgaatatttgtattttccagatggaataaaaaggcccgtgtaattaaccttca

SEQ ID NO: 174201 - DNA, 444 bp, Homo sapiens
  Payload ID: 14193
  Gene Symbol: RASGRP2
  Gene Name: RAS guanyl releasing protein 2 (calcium and DAG-regulated)
  ENST ID: ENST00000394428
  CDS Start-End: 72-263
gggttcggtccgagcccggtgggaggctcccggagcgcagcctgggcccagcccaccccgcgccggcggccatggcaggcaccctggacctggacaagggctgcacggtggaggagctgctccgcgggtgcatcgaagccttcgctggcggccaagctgctccacatctaccaacaatcccggaaggacaactccaattccctgcaggtgaaaacgtgccacctggtcaggtactggatctccgccttcccagcggagtttgacttgaacccggagttggctgagcagatcaaggagctgaaggctctgctagaccaagaagggaaccgacggcacagcagcctaatcgacatagacagcgtgtgcgtggggggagcacagagggctgggggggcactcagtatcctataccatctgtgcttaataaatgtctgttgaactgaa

SEQ ID NO: 174202 - DNA, 453 bp, Homo sapiens
  Payload ID: 14193
  Gene Symbol: RASGRP2
  Gene Name: RAS guanyl releasing protein 2 (calcium and DAG-regulated)
  ENST ID: ENST00000394429
  CDS Start-End: 72-272
gggttcggtccgagcccggtgggaggctcccggagcgcagcctgggcccagcccaccccgcgccggcggccatggcaggcaccctggacctggacaagggctgcacggtggaggagctgctccgcgggtgcatcgaagccttcgagttaagcggcctccttaaccctctccttcacctaccaacaatcccggaaggacaactccaattccctgcaggtgaaaacgtgccacctggtcaggtactggatctccgccttcccagcggagtttgacttgaacccggagttggctgagcagatcaaggagctgaaggctctgctagaccaagaagggaaccgacggcacagcagcctaatcgacatagacagcgtgtgcgtggggggagcacagagggctgggggggcactcagtatcctataccatctgtgcttaataaatgtctgttgaactgaa

SEQ ID NO: 174203 - DNA, 2174 bp, Homo sapiens
  Payload ID: 14193
  Gene Symbol: RASGRP2
  Gene Name: RAS guanyl releasing protein 2 (calcium and DAG-regulated)
  ENST ID: ENST00000394430
  CDS Start-End: 1724-2170
agctaaggcgcgctggatccccggagggcggaggacctccacggtgcacccagcttttcccagccaccttccagcggggccctcccccgcgtacccccatttggcagatgagaaaattgaggctcccagaggccaagtgattctcaaggtcacacgaggaagcggtagagccaggcggggacggctctgggtggctcttaggaaaagtccgcctgagaactccgtacaggagctcccctgtcctccagcctgggggagtgagtatgtgtagggccggggtacctttccgtggggcaaggctctgccaaaatctgggagtgaggggagtcagggagctggggccgcagggcgggccctgcaccgcaaatgggaggggggcgacggaatgggcgtgcgcacccatgggggtgtgtgcatgtgtgtgggagtgtacatgcgtggagaggcactgccttgcgtgtgtgcacacgtgtgaggatgtcagcgcctgtgtggccgcgggactcaaggctggcctggctcaagtgaacagcacgtccaggaggcgacctcgtccgcgggtttgcattctggggtggacgagctgggtatgtgtgcctgagggtttcttcgtgcaggtgtgcacagggtgtgggtgccattgtgtgtgagagacggaggatgggaggccggtgcctgtggcccggtgcgtgtaagtgcggacgcctgcacctccacttaggtccccggcctccgacgaataacttgggtgtggagtgtttgcccctgccagggtgcgtatgaccccgccagtgaccggagttgctaatggtgtcatgcacccaccggccacccttggcgcgagcgcccccctctggacaccctgctccgtgcgcgctcacagttcgcctgtgcggggccggggccagggtcaggagccggggatagggaggaagagggcctgtggacaagctgagccgggacccctgggacctttgcggaggtggcctgggagcgctcagttcccaggctcaggcttcccgctgacgcctcctggccgcagcgggctccccccgccccaggaatgttcctctcccatccagtccgcctcccctagggcaggccccctgggggctgccgcagccccgcctcgccttcctgggctcccgggagggggcgaggcgggcaggacgcctgggttctctccccccacctcccataccagggagaaattcctccgaggtcccctcaggctctgggttcccaaaataaccctgcgggggaagggaggctgtggagggagggaagcgggaggggcgcagagccgagctgcggggtgctgcaggtgcctctggggagagggcgcgaggagaaggcgccctgcggggggctgggcgccagccagtcctgggatcttggttcgtccccatcctcgtgaagcccctcggccttcccgcgactccgagggtgggccggaagcctctctgcgggtccgtttcccaactggcgggttgcaccatcccgggccagaccgtttaaccccgggagtggccgcgggggacaactccgcccctgtccagcagggggcgtgcccgccccgccccgtttctgcccgcggggccgctcccccgcccgcgactccgcagactcccgctctgcctctcccgggacaggggttcggtccgagcccggtgggaggctcccggagcgcagcctgggcccagcccaccccgcgccggcggccatggcaggcaccctggacctggacaagggctgcacggtggaggagctgctccgcgggtgcatcgaagccttcgatgactccgggaaggtgcgggacccgcagctggtgcgcatgttcctcatgatgcacccctggtacatcccctcctctcagctggcggccaagctgctccacatctaccaacaatcccggaaggacaactccaattccctgcaggtgaaaacgtgccacctggtcaggtactggatctccgccttcccagcggagtttgacttgaacccggagttggctgagcagatcaaggagctgaaggctctgctagaccaagaagggaaccgacggcacagcagcctaatcgacatagacagcgtgtgcgtggggggagcacagagggctgggggggcactcagtatcctataccatctgtgcttaataaatgtctgttgaactg

SEQ ID NO: 174204 - DNA, 2304 bp, Homo sapiens
  Payload ID: 14193
  Gene Symbol: RASGRP2
  Gene Name: RAS guanyl releasing protein 2 (calcium and DAG-regulated)
  Uniprot ID: Q7LDG7
  ENST ID: ENST00000394432
  CDS Start-End: 248-2077
gtgcatgtgtgtgggagtgtacatgcgtggagaggcactgccttgcgtgtgtgcacacgtgtgaggatgtcagcgcctgtgtggccgcgggactcaaggctggcctggctcaagtgaacagcacgtccaggaggcgacctcgtccgcgggtttgcattctggggtggacgagctgggggttcggtccgagcccggtgggaggctcccggagcgcagcctgggcccagcccaccccgcgccggcggccatggcaggcaccctggacctggacaagggctgcacggtggaggagctgctccgcgggtgcatcgaagccttcgatgactccgggaaggtgcgggacccgcagctggtgcgcatgttcctcatgatgcacccctggtacatcccctcctctcagctggcggccaagctgctccacatctaccaacaatcccggaaggacaactccaattccctgcaggtgaaaacgtgccacctggtcaggtactggatctccgccttcccagcggagtttgacttgaacccggagttggctgagcagatcaaggagctgaaggctctgctagaccaagaagggaaccgacggcacagcagcctaatcgacatagacagcgtccctacctacaagtggaagcggcaggtgactcagcggaaccctgtgggacagaaaaagcgcaagatgtccctgttgtttgaccacctggagcccatggagctggcggagcatctcacctacttggagtatcgctccttctgcaagatcctgtttcaggactatcacagtttcgtgactcatggctgcactgtggacaaccccgtcctggagcggttcatctccctcttcaacagcgtctcacagtgggtgcagctcatgatcctcagcaaacccacagccccgcagcgggccctggtcatcacacactttgtccacgtggcggagaagctgctacagctgcagaacttcaacacgctgatggcagtggtcgggggcctgagccacagctccatctcccgcctcaaggagacccacagccacgttagccctgagaccatcaagctctgggagggtctcacggaactagtgacggcgacaggcaactatggcaactaccggcgtcggctggcagcctgtgtgggcttccgcttcccgatcctgggtgtgcacctcaaggacctggtggccctgcagctggcactgcctgactggctggacccagcccggacccggctcaacggggccaagatgaagcagctctttagcatcctggaggagctggccatggtgaccagcctgcggccaccagtacaggccaaccccgacctgctgagcctgctcacggtgtctctggatcagtatcagacggaggatgagctgtaccagctgtccctgcagcgggagccgcgctccaagtcctcgccaaccagccccacgagttgcaccccaccaccccggcccccggtactggaggagtggacctcggctgccaaacccaagctggatcaggccctcgtggtggagcacatcgagaagatggtggagtctgtgttccggaactttgacgtcgatggggatggccacatctcacaggaagaattccagatcatccgtgggaacttcccttacctcagcgcctttggggacctcgaccagaaccaggatggctgcatcagcagggaggagatggtttcctatttcctgcgctccagctctgtgttgggggggcgcatgggcttcgtacacaacttccaggagagcaactccttgcgccccgtcgcctgccgccactgcaaagccctgatcctgggcatctacaagcagggcctcaaatgccgagcctgtggagtgaactgccacaagcagtgcaaggatcgcctgtcagttgagtgtcggcgcagggcccagagtgtgagcctggaggggtctgcaccctcaccctcacccatgcacagccaccatcaccgcgccttcagcttctctctgccccgccctggcaggcgaggctccaggcctccagagatccgtgaggaggaggtacagacggtggaggatggggtgtttgacatccacttgtaatagatgctgtggttggatcaaggactcattcctgccttggagaaaatacttcaaccagagcagggagcctgggggtgtcggggcaggaggctggggatgggggtgggatatgagggtggcatgcagctgagggcagggccagggctggtgtccctaaggttgtacagactcttgtgaatatttgtattttccagatggaataaaaaggcccgtgtaattaaccttca

SEQ ID NO: 174205 - DNA, 400 bp, Homo sapiens
  Payload ID: 14193
  Gene Symbol: RASGRP2
  Gene Name: RAS guanyl releasing protein 2 (calcium and DAG-regulated)
  ENST ID: ENST00000419843
  CDS Start-End: 360-400
gccggggtacctttccgtggggcaaggctctgccaaaatctgggagtgaggggagtcagggagctggggccgcagggcgggccctgcaccgcaaatgggaggggggcgacggaatgggcgtgcgcacccatgggggtgtgtgcatgtgtgtgggagtgtacatgcgtggagaggcactgccttgcgtgtgtgcacacgtgtgaggatgtcagcgcctgtgtggccgcgggactcaaggctggcctggctcaagtgaacagcacgtccaggaggcgacctcgtccgcgggggttcggtccgagcccggtgggaggctcccggagcgcagcctgggcccagcccaccccgcgccggcggccatggcaggcaccctggacctggacaagggctgcacggtgga

SEQ ID NO: 174206 - DNA, 956 bp, Homo sapiens
  Payload ID: 14193
  Gene Symbol: RASGRP2
  Gene Name: RAS guanyl releasing protein 2 (calcium and DAG-regulated)
  ENST ID: ENST00000445445
  CDS Start-End: 81-461
ccgggacaggggttcggtccgagcccggtgggaggctcccggagcgcagcctgggcccagcccaccccgcgccggcggccatggcaggcaccctggacctggacaagggctgcacggtggaggagctgctccgcgggtgcatcgaagccttcgatgactccgggaaggtgcgggacccgcagctggtgcgcatgttcctcatgatgcacccctggtacatcccctcctctcagctggcggccaagctgctccacatctaccaacaatcccggaaggacaactccaattccctgcaggtgaaaacgtgccacctggtcaggtactggatctccgccttcccagcggagtttgacttgaacccggagttggctgagcagatcaaggagctgaaggctctgctagaccaagaagggaaccgacggcacagcagcctaatcgacatagacagcgttagactgtgagctcctcgagggcaggaaccgtgtcttactcatctctgtattcccagcgcctagcacagtgcctggcacagaccctacctacaagtggaagcggcaggtgactcagcggaaccctgtgggacagaaaaagcgcaagatgtccctgttgtttgaccacctggagcccatggagctggcggagcatctcacctacttggagtatcgctccttctgcaagatcctgtttcaggactatcacagtttcgtgactcatggctgcactgtggacaaccccgtcctggagcggttcatctccctcttcaacagcgtctcacagtgggtgcagctcatgatcctcagcaaacccacagccccgcagcgggccctggtcatcacacactttgtccacgtggcggagaagctgctacagctgcagaacttcaacacgctgatggcagtggtcgggggcctgagccacagctccatctcccgcctcaaggagacccacagccacgt

SEQ ID NO: 174207 - DNA, 649 bp, Homo sapiens
  Payload ID: 14193
  Gene Symbol: RASGRP2
  Gene Name: RAS guanyl releasing protein 2 (calcium and DAG-regulated)
  ENST ID: ENST00000441258
  CDS Start-End: 162-539
gagccgcagccgcagcgaggccggcgggcgggagcgcacggaggtggggtcggccaggccggtgcgggctccttgcggcaggtcccaagagggttcggtccgagcccggtgggaggctcccggagcgcagcctgggcccagcccaccccgcgccggcggccatggcaggcaccctggacctggacaagggctgcacggtggaggagctgctccgcgggtgcatcgaagccttcgatgactccgggaaggtgcgggacccgcagctggtgcgcatgttcctcatgatgcacccctggtacatcccctcctctcagctggcggccaagctgctccacatctaccaacaatcccggaaggacaactccaattccctgcaggtgaaaacgtgccacctggtcaggtactggatctccgccttcccagcggagtttgacttgaacccggagttggctgagcagatcaaggagctgaaggctctgctagaccaagaagggaaccgacggcacagcagcctaatcgacatagacagcgtactgtgagctcctcgagggcaggaaccgtgtcttactcatctctgtattcccagcgcctagcacagtgcctggcacagaccctacctacaagtggaagcggcaggtgactcagcgga

SEQ ID NO: 174208 - DNA, 935 bp, Homo sapiens
  Payload ID: 14193
  Gene Symbol: RASGRP2
  Gene Name: RAS guanyl releasing protein 2 (calcium and DAG-regulated)
  ENST ID: ENST00000431822
  CDS Start-End: 240-935
gtgaggatgtcagcgcctgtgtggccgcgggactcaaggctggcctggctcaagtgaacagcacgtccaggaggcgacctcgtccgcgggtttgcattctggggtggacgagctgggtccccggcctccgacgaataacttgggtgtggagtgtttgcccctgccagggggttcggtccgagcccggtgggaggctcccggagcgcagcctgggcccagcccaccccgcgccggcggccatggcaggcaccctggacctggacaagggctgcacggtggaggagctgctccgcgggtgcatcgaagccttcgatgactccgggaaggtgcgggacccgcagctggtgcgcatgttcctcatgatgcacccctggtacatcccctcctctcagctggcggccaagctgctccacatctaccaacaatcccggaaggacaactccaattccctgcaggtgaaaacgtgccacctggtcaggtactggatctccgccttcccagcggagtttgacttgaacccggagttggctgagcagatcaaggagctgaaggctctgctagaccaagaagggaaccgacggcacagcagcctaatcgacatagacagcgtccctacctacaagtggaagcggcaggtgactcagcggaaccctgtgggacagaaaaagcgcaagatgtccctgttgtttgaccacctggagcccatggagctggcggagcatctcacctacttggagtatcgctccttctgcaagatcctgtttcaggactatcacagtttcgtgactcatggctgcactgtggacaaccccgtcctggagcggttcatctccctcttcaacagcgtctcacagtgggtgcagctcatgatcctcagcaaacccacagccccgcagcgggccctggtcatcacacactttgtccacgtggcggag

SEQ ID NO: 174209 - DNA, 598 bp, Homo sapiens
  Payload ID: 14193
  Gene Symbol: RASGRP2
  Gene Name: RAS guanyl releasing protein 2 (calcium and DAG-regulated)
  ENST ID: ENST00000430645
  CDS Start-End: 348-598
ggcggggagcggggccgcggcgtggagagcgggcgggagccgcagccgcagcgaggccggcgggcgggagcgcacggaggtggggtcggccaggccggtgcgggctccttgcggcaggtcccaagaatgagaaaattgaggctcccagaggccaagtgattctcaaggtcacacgaggaagcggtagagccaggcggggacggctctgggtggctcttaggaaaagtccgcctgagaactccgtacaggagctcccctgtcctccagcctgggggagggttcggtccgagcccggtgggaggctcccggagcgcagcctgggcccagcccaccccgcgccggcggccatggcaggcaccctggacctggacaagggctgcacggtggaggagctgctccgcgggtgcatcgaagccttcgatgactccgggaaggtgcgggacccgcagctggtgcgcatgttcctcatgatgcacccctggtacatcccctcctctcagctggcggccaagctgctccacatctaccaacaatcccggaaggacaactccaattccctgcaggtgaaaacgtgccacctggtcaggtactggatctc

SEQ ID NO: 174210 - DNA, 2168 bp, Homo sapiens
  Payload ID: 14193
  Gene Symbol: RASGRP2
  Gene Name: RAS guanyl releasing protein 2 (calcium and DAG-regulated)
  ENST ID: ENST00000421556
  CDS Start-End: 192-383
acgtgtgaggatgtcagcgcctgtgtggccgcgggactcaaggctggcctggctcaagtgaacagcacgtccaggaggcgacctcgtccgcgggtttgcattctggggtggacgagctgggggttcggtccgagcccggtgggaggctcccggagcgcagcctgggcccagcccaccccgcgccggcggccatggcaggcaccctggacctggacaagggctgcacggtggaggagctgctccgcgggtgcatcgaagccttcgctggcggccaagctgctccacatctaccaacaatcccggaaggacaactccaattccctgcaggtgaaaacgtgccacctggtcaggtactggatctccgccttcccagcggagtttgacttgaacccggagttggctgagcagatcaaggagctgaaggctctgctagaccaagaagggaaccgacggcacagcagcctaatcgacatagacagcgtccctacctacaagtggaagcggcaggtgactcagcggaaccctgtgggacagaaaaagcgcaagatgtccctgttgtttgaccacctggagcccatggagctggcggagcatctcacctacttggagtatcgctccttctgcaagatcctgtttcaggactatcacagtttcgtgactcatggctgcactgtggacaaccccgtcctggagcggttcatctccctcttcaacagcgtctcacagtgggtgcagctcatgatcctcagcaaacccacagccccgcagcgggccctggtcatcacacactttgtccacgtggcggagaagctgctacagctgcagaacttcaacacgctgatggcagtggtcgggggcctgagccacagctccatctcccgcctcaaggagacccacagccacgttagccctgagaccatcaagctctgggagggtctcacggaactagtgacggcgacaggcaactatggcaactaccggcgtcggctggcagcctgtgtgggcttccgcttcccgatcctgggtgtgcacctcaaggacctggtggccctgcagctggcactgcctgactggctggacccagcccggacccggctcaacggggccaagatgaagcagctctttagcatcctggaggagctggccatggtgaccagcctgcggccaccagtacaggccaaccccgacctgctgagcctgctcacggtgtctctggatcagtatcagacggaggatgagctgtaccagctgtccctgcagcgggagccgcgctccaagtcctcgccaaccagccccacgagttgcaccccaccaccccggcccccggtactggaggagtggacctcggctgccaaacccaagctggatcaggccctcgtggtggagcacatcgagaagatggtggagtctgtgttccggaactttgacgtcgatggggatggccacatctcacaggaagaattccagatcatccgtgggaacttcccttacctcagcgcctttggggacctcgaccagaaccaggatggctgcatcagcagggaggagatggtttcctatttcctgcgctccagctctgtgttgggggggcgcatgggcttcgtacacaacttccaggagagcaactccttgcgccccgtcgcctgccgccactgcaaagccctgatcctgggcatctacaagcagggcctcaaatgccgagcctgtggagtgaactgccacaagcagtgcaaggatcgcctgtcagttgagtgtcggcgcagggcccagagtgtgagcctggaggggtctgcaccctcaccctcacccatgcacagccaccatcaccgcgccttcagcttctctctgccccgccctggcaggcgaggctccaggcctccagagatccgtgaggaggaggtacagacggtggaggatggggtgtttgacatccacttgtaatagatgctgtggttggatcaaggactcattcctgccttggagaaaatacttcaaccagagcagggagcctgggggtgtcggggcaggaggctggggatgggggtgggatatgagggtggcatgcagctgagggcagggccagggctggtgtccctaaggttgtacagactcttgtgaatatttgtattttccagatggaataaaaaggcccgtgtaattaaccttca

SEQ ID NO: 174211 - DNA, 4210 bp, Homo sapiens
  Payload ID: 14194
  Gene Symbol: RASGRP3
  Gene Name: RAS guanyl releasing protein 3 (calcium and DAG-regulated)
  Uniprot ID: Q8IV61
  ENST ID: ENST00000407811
  CDS Start-End: 273-2342
gataccctttacactagattagcaggcaaaactatgatggtttgtgatatccatgcttgtagaagtaataagaagaaagggaacacagaagctttattttatagtggagtcctgactctaggccttaataattgcatggttttggagttttcttgaagtacaactaaggacaggtcaccactaggcactaacatcgctgacttgcatgattatggagatggtctatctgatgctgaaaatgtctctagttttttgacaacggctaaataaccatgggatcaagtggccttgggaaagcagcaacattagatgaactgctgtgcacttgcattgagatgtttgatgacaatggagagctggataatagttatttgccaagaatagttctactgatgcaccgatggtatttatcttccactgaattggcagaaaaacttctctgcatgtatcgaaatgccactggagaaagctgcaatgaatttcgattaaagatctgctacttcatgaggtactggattctgaagtttcctgcagagtttaatttggatcttggtttgattcgtatgactgaggaatttcgggaagtagctagtcaactaggatatgaaaaacacgtcagcctcatcgacatatccagcattccttcctatgactggatgagaagagtcacacagaggaaaaaagtatccaagaagggaaaagcctgtctgctgtttgaccatctggagcccattgaattggctgagcacctcacttttctggagcataaatcttttagaaggatctcattcactgattaccaaagctatgtcatccatggctgcctggagaataatccaaccttggaaagatcgattgctttatttaatggaatctctaagtgggtccagttgatggttcttagcaaaccaaccccccagcaaagggcagaagtcatcacaaagtttatcaatgttgcaaagaagctccttcagctcaaaaattttaacaccctgatggcagtggtgggaggcctcagtcatagttccatttcacgcctcaaagagacccattctcatctttcttcagaagttacaaagaactggaatgaaatgacagagttggtctcctccaacggcaattactgcaattaccgcaaggcctttgccgactgcgatggcttcaaaatccccatccttggagtacacttgaaagacttgatagctgtccatgtcattttcccagactggacagaggagaacaaagtgaacattgtgaaaatgcaccagctctccgttaccctgagtgaactagtctccctgcagaatgcctctcaccacttagaacccaacatggatttgatcaacctgctcacgctttccctggacctctatcacactgaagatgatatttacaaactgtcactggtgctggagcctagaaattctaaatcgcctacctcccctacgacgcccaacaagcctgtggtacccctggagtgggcattaggggtgatgccaaagccagaccccacggtcatcaacaagcacataaggaaattagtggagtctgtatttagaaactatgatcacgaccatgatgggtacatttcccaagaggactttgaaagtatagctgccaattttcccttcttggattccttctgtgttctggacaaagatcaggatggcctaattagtaaagatgaaatgatggcttacttcctgagagctaaatcccaactacactgtaaaatgggaccaggatttatccataattttcaggagatgacctatctcaagccaaccttctgcgaacactgtgcgggatttctctggggcataatcaagcaaggatacaaatgcaaagactgtggagccaattgtcacaaacagtgcaaagacctcctggttctggcctgcaggagatttgcccgggcgccctccttgagcagtggtcatgggtcactgcctggaagcccctcgctgcccccagcgcaggatgaggtgtttgagttccctggagtcactgctggacacagggatttagacagcagagccatcacactggttacaggctcttctcgcaagatctctgtgaggctacagagggccaccaccagccaggccacccagactgaacctgtctggtcagaggctggctggggggactcggggtcccacaccttccctaaaatgaaatccaagttccatgacaaagcagcaaaggacaaaggctttgccaaatgggaaaatgagaagcccagggtgcatgctggtgtggatgttgtagaccggggcacggagtttgaacttgaccaggatgaaggagaagagaccagacaggatggtgaggatggctgacttcaggctgcggaaactgaaggcaataatgttggcttttggaaggggcaagacgagaaactctgaagaaagctctgactctcaggaagttatctggaaagatacctggatgtttactgccttgggacactgtgggatctccatgtttggactatgggacagagaattgaccctaactaactaactatgaactatttatttcctcctcccctacccctagttaagtgccacaaagactgtgttatgtagtcagtacttttttctcatgtatctttctctagaccatttatatacgggtgaaatgaaagcttttttgcatgtacttgatactcagtctgtaaactcagacttcgctttttttgtgagactatcctttcaatatttttataaacttttgtgtgtgctgtggcagggaacagttaacaaggagtttatttagaggggtttttttcattttttgtttttcttgttttgttttgttttgttttgttcttcttggtgtgctttttggatgggaccagaacttaacattttcctgaggactaggaagctcatcagacactggaatgcagtgattcttctaatgatggtcaactgcaaggagaaactgtttacatccttcccactacacagttgctatgatatgtaacaagtcacacatgtatatatcacacaagtcttaccaattctgcgtcactaggaagctatagcatggtcgtgaaagctctcctaatacttacttaaatagccatggaagaaaattatgcttgtcccttctgactgggttaagccatctttcttaagattcctgaagtagaaatagcaattaagaaattaattcaagttttgacggttaacatttagcagaaaaacaaaccattgaataagctactaggtgaaatgcaaaacaaccatcaatttttttaaactcaataattttgtgaaaaaaaaaaccaccaccaaacttttggttgtaaaagagaacccttgttcccttcctaagaaactgccttccacaattaaagaatactcatagaaagaaaataatcataaatcatatttgattaacatttcatttaagcttttaaaatatcaattttttaaatagctcccatttacccaaaataactagttatgggtctatttcttccatgattagaggagagagaacttgattcaagatactgaaaaatagagctgggactgagcctgtgaatgacaggaatgatctattaccaggtgactagtcggaaactacacagacgtgcactggtctgcatttgggggctaaagtgtatatattccatttaaaatggaatttgtttgtatttggggcagtcttcagtaaagcctttctcctttcttttctccattgaggacagttctgctcagcaaaattgttgagtacctgttctgggcaggtcccacgctatatgcacaaagttaagaaaaacttggtcttagcccttgggagctgacagcccatgggcattaaggcaaagtagttccagtgatttaaaatacggttccaaatacgctaaaaccaacttgtgccaaccagatttacagattggaaatactgcagatgatgtgaagttatcagttggaggagctgtgattaagctggataataagagaacgtgccatctgtaaagcactcagaaggcagccatccctagatgttggtttcatgtatattacactatctactactatccataaatgcaataatatgcatgttaacaacattaaaaacagcaaacagcaatctaagtacagaaaagctttttgtgtgtttaaaaaaattgaagaaaattcaggaagaaacgtgttaataaacattgtactgttcttttgcttctcaaagg

SEQ ID NO: 174212 - DNA, 4807 bp, Homo sapiens
  Payload ID: 14194
  Gene Symbol: RASGRP3
  Gene Name: RAS guanyl releasing protein 3 (calcium and DAG-regulated)
  Uniprot ID: Q8IV61
  ENST ID: ENST00000403687
  CDS Start-End: 741-2813
acagagcaacttccacctgctgtgcgagttggtgatcctctctcttgccgttcgagagccccagtgaaacttgagtgagatgagagagcatggagcctgccagtctccccctctgcgcacacacacacgcaaacacatttaactttccacttgcagtgacctgcccttcagtgtgacttatcagctgtttggcttttgtcactaaaggaaaacaaattgtggaatatcccgctctgcatgctcatgagatggctgagccaactcaggggttatgaggtggtttgcgagtgaggagaagaatgatcttcagtttctgacctcctggcacggtggcgggcggtatttatcaggaggtacatgtgactggttaagactcagagccccagcttgaaggaaacagctgctctcggcgtgctccggcacttggcagctggacaggcagagtgctgatgtgaaaaataccacgacaaaaccaccctagttctccaaaatacttatcattcaggttgaataaaccagttctacagactgcttcttccatgcatttcccaatgatgctagctgcccttaaaattctttcagatttggaactgtatctgtatggaaacaacagagttttcttgaagtacaactaaggacaggtcaccactaggcactaacatcgctgacttgcatgattatggagatggtctatctgatgctgaaaatgtctctagttttttgacaacggctaaataaccatgggatcaagtggccttgggaaagcagcaacattagatgaactgctgtgcacttgcattgagatgtttgatgacaatggagagctggataatagttatttgccaagaatagttctactgatgcaccgatggtatttatcttccactgaattggcagaaaaacttctctgcatgtatcgaaatgccactggagaaagctgcaatgaatttcgattaaagatctgctacttcatgaggtactggattctgaagtttcctgcagagtttaatttggatcttggtttgattcgtatgactgaggaatttcgggaagtagctagtcaactaggatatgaaaaacacgtcagcctcatcgacatatccagcattccttcctatgactggatgagaagagtcacacagaggaaaaaagtatccaagaagggaaaagcctgtctgctgtttgaccatctggagcccattgaattggctgagcacctcacttttctggagcataaatcttttagaaggatctcattcactgattaccaaagctatgtcatccatggctgcctggagaataatccaaccttggaaagatcgattgctttatttaatggaatctctaagtgggtccagttgatggttcttagcaaaccaaccccccagcaaagggcagaagtcatcacaaagtttatcaatgttgcaaagaagctccttcagctcaaaaattttaacaccctgatggcagtggtgggaggcctcagtcatagttccatttcacgcctcaaagagacccattctcatctttcttcagaagttacaaagaactggaatgaaatgacagagttggtctcctccaacggcaattactgcaattaccgcaaggcctttgccgactgcgatggcttcaaaatccccatccttggagtacacttgaaagacttgatagctgtccatgtcattttcccagactggacagaggagaacaaagtgaacattgtgaaaatgcaccagctctccgttaccctgagtgaactagtctccctgcagaatgcctctcaccacttagaacccaacatggatttgatcaacctgctcacgctttccctggacctctatcacactgaagatgatatttacaaactgtcactggtgctggagcctagaaattctaaatcgcagcctacctcccctacgacgcccaacaagcctgtggtacccctggagtgggcattaggggtgatgccaaagccagaccccacggtcatcaacaagcacataaggaaattagtggagtctgtatttagaaactatgatcacgaccatgatgggtacatttcccaagaggactttgaaagtatagctgccaattttcccttcttggattccttctgtgttctggacaaagatcaggatggcctaattagtaaagatgaaatgatggcttacttcctgagagctaaatcccaactacactgtaaaatgggaccaggatttatccataattttcaggagatgacctatctcaagccaaccttctgcgaacactgtgcgggatttctctggggcataatcaagcaaggatacaaatgcaaagactgtggagccaattgtcacaaacagtgcaaagacctcctggttctggcctgcaggagatttgcccgggcgccctccttgagcagtggtcatgggtcactgcctggaagcccctcgctgcccccagcgcaggatgaggtgtttgagttccctggagtcactgctggacacagggatttagacagcagagccatcacactggttacaggctcttctcgcaagatctctgtgaggctacagagggccaccaccagccaggccacccagactgaacctgtctggtcagaggctggctggggggactcggggtcccacaccttccctaaaatgaaatccaagttccatgacaaagcagcaaaggacaaaggctttgccaaatgggaaaatgagaagcccagggtgcatgctggtgtggatgttgtagaccggggcacggagtttgaacttgaccaggatgaaggagaagagaccagacaggatggtgaggatggctgacttcaggctgcggaaactgaaggcaataatgttggcttttggaaggggcaagacgagaaactctgaagaaagctctgactctcaggaagttatctggaaagatacctggatgtttactgccttgggacactgtgggatctccatgtttggactatgggacagagaattgaccctaactaactaactatgaactatttatttcctcctcccctacccctagttaagtgccacaaagactgtgttatgtagtcagtacttttttctcatgtatctttctctagaccatttatatacgggtgaaatgaaagcttttttgcatgtacttgatactcagtctgtaaactcagacttcgctttttttgtgagactatcctttcaatatttttataaacttttgtgtgtgctgtggcagggaacagttaacaaggagtttatttagaggggtttttttcattttttgtttttcttgttttgttttgttttgttttgttcttcttggtgtgctttttggatgggaccagaacttaacattttcctgaggactaggaagctcatcagacactggaatgcagtgattcttctaatgatggtcaactgcaaggagaaactgtttacatccttcccactacacagttgctatgatatgtaacaagtcacacatgtatatatcacacaagtcttaccaattctgcgtcactaggaagctatagcatggtcgtgaaagctctcctaatacttacttaaatagccatggaagaaaattatgcttgtcccttctgactgggttaagccatctttcttaagattcctgaagtagaaatagcaattaagaaattaattcaagttttgacggttaacatttagcagaaaaacaaaccattgaataagctactaggtgaaatgcaaaacaaccatcaatttttttaaactcaataattttgtgaaaaaaaaaaccaccaccaaacttttggttgtaaaagagaacccttgttcccttcctaagaaactgccttccacaattaaagaatactcatagaaagaaaataatcataaatcatatttgattaacatttcatttaagcttttaaaatatcaattttttaaatagctcccatttacccaaaataactagttatgggtctatttcttccatgattagaggagagagaacttgattcaagatactgaaaaatagagctgggactgagcctgtgaatgacaggaatgatctattaccaggtgactagtcggaaactacacagacgtgcactggtctgcatttgggggctaaagtgtatatattccatttaaaatggaatttgtttgtatttggggcagtcttcagtaaagcctttctcctttcttttctccattgaggacagttctgctcagcaaaattgttgagtacctgttctgggcaggtcccacgctatatgcacaaagttaagaaaaacttggtcttagcccttgggagctgacagcccatgggcattaaggcaaagtagttccagtgatttaaaatacggttccaaatacgctaaaaccaacttgtgccaaccagatttacagattggaaatactgcagatgatgtgaagttatcagttggaggagctgtgattaagctggataataagagaacgtgccatctgtaaagcactcagaaggcagccatccctagatgttggtttcatgtatattacactatctactactatccataaatgcaataatatgcatgttaacaacattaaaaacagcaaacagcaatctaagtacagaaaagctttttgtgtgtttaaaaaaattgaagaaaattcaggaagaaacgtgttaataaacattgtactgttcttttgcttctcaaaggaattattcacttgccactttggttatttttgagttttcgtacataggaagttttatattgccagccttcctgtgataaagatattaaatgtaacttgagtaaaaaataaaaaagaataactatgta

SEQ ID NO: 174213 - DNA, 4738 bp, Homo sapiens
  Payload ID: 14194
  Gene Symbol: RASGRP3
  Gene Name: RAS guanyl releasing protein 3 (calcium and DAG-regulated)
  Uniprot ID: Q8IV61
  ENST ID: ENST00000402538
  CDS Start-End: 653-2725
atttagccaaacaacctttaattcattgagctcaaagcttagcagcttcaatgttgttgttaggcataaacagcttgcaaatttcaattttttttctctcctcacttttgaactagatttgggcaatggaggtgatgacagcattttagaagacagaacaggaattctaggtgtttaggcacgttgaagagaaacttgctagaggtgatgaagtggaaagaaaaagacaattcactatagggatcaacattattgcagttctgcaaaggatattttcttttaaaacatccatatctcttctttgccatggaaactacacccaatctacctgaacctgcggcacccctctgatgacccatttggattctctgatttcactgccaagattctcagttctccaaaatacttatcattcaggttgaataaaccagttctacagactgcttcttccatgcatttcccaatgatgctagctgcccttaaaattctttcagatttggaactgtatctgtatggaaacaacagagttttcttgaagtacaactaaggacaggtcaccactaggcactaacatcgctgacttgcatgattatggagatggtctatctgatgctgaaaatgtctctagttttttgacaacggctaaataaccatgggatcaagtggccttgggaaagcagcaacattagatgaactgctgtgcacttgcattgagatgtttgatgacaatggagagctggataatagttatttgccaagaatagttctactgatgcaccgatggtatttatcttccactgaattggcagaaaaacttctctgcatgtatcgaaatgccactggagaaagctgcaatgaatttcgattaaagatctgctacttcatgaggtactggattctgaagtttcctgcagagtttaatttggatcttggtttgattcgtatgactgaggaatttcgggaagtagctagtcaactaggatatgaaaaacacgtcagcctcatcgacatatccagcattccttcctatgactggatgagaagagtcacacagaggaaaaaagtatccaagaagggaaaagcctgtctgctgtttgaccatctggagcccattgaattggctgagcacctcacttttctggagcataaatcttttagaaggatctcattcactgattaccaaagctatgtcatccatggctgcctggagaataatccaaccttggaaagatcgattgctttatttaatggaatctctaagtgggtccagttgatggttcttagcaaaccaaccccccagcaaagggcagaagtcatcacaaagtttatcaatgttgcaaagaagctccttcagctcaaaaattttaacaccctgatggcagtggtgggaggcctcagtcatagttccatttcacgcctcaaagagacccattctcatctttcttcagaagttacaaagaactggaatgaaatgacagagttggtctcctccaacggcaattactgcaattaccgcaaggcctttgccgactgcgatggcttcaaaatccccatccttggagtacacttgaaagacttgatagctgtccatgtcattttcccagactggacagaggagaacaaagtgaacattgtgaaaatgcaccagctctccgttaccctgagtgaactagtctccctgcagaatgcctctcaccacttagaacccaacatggatttgatcaacctgctcacgctttccctggacctctatcacactgaagatgatatttacaaactgtcactggtgctggagcctagaaattctaaatcgcagcctacctcccctacgacgcccaacaagcctgtggtacccctggagtgggcattaggggtgatgccaaagccagaccccacggtcatcaacaagcacataaggaaattagtggagtctgtatttagaaactatgatcacgaccatgatgggtacatttcccaagaggactttgaaagtatagctgccaattttcccttcttggattccttctgtgttctggacaaagatcaggatggcctaattagtaaagatgaaatgatggcttacttcctgagagctaaatcccaactacactgtaaaatgggaccaggatttatccataattttcaggagatgacctatctcaagccaaccttctgcgaacactgtgcgggatttctctggggcataatcaagcaaggatacaaatgcaaagactgtggagccaattgtcacaaacagtgcaaagacctcctggttctggcctgcaggagatttgcccgggcgccctccttgagcagtggtcatgggtcactgcctggaagcccctcgctgcccccagcgcaggatgaggtgtttgagttccctggagtcactgctggacacagggatttagacagcagagccatcacactggttacaggctcttctcgcaagatctctgtgaggctacagagggccaccaccagccaggccacccagactgaacctgtctggtcagaggctggctggggggactcggggtcccacaccttccctaaaatgaaatccaagttccatgacaaagcagcaaaggacaaaggctttgccaaatgggaaaatgagaagcccagggtgcatgctggtgtggatgttgtagaccggggcacggagtttgaacttgaccaggatgaaggagaagagaccagacaggatggtgaggatggctgacttcaggctgcggaaactgaaggcaataatgttggcttttggaaggggcaagacgagaaactctgaagaaagctctgactctcaggaagttatctggaaagatacctggatgtttactgccttgggacactgtgggatctccatgtttggactatgggacagagaattgaccctaactaactaactatgaactatttatttcctcctcccctacccctagttaagtgccacaaagactgtgttatgtagtcagtacttttttctcatgtatctttctctagaccatttatatacgggtgaaatgaaagcttttttgcatgtacttgatactcagtctgtaaactcagacttcgctttttttgtgagactatcctttcaatatttttataaacttttgtgtgtgctgtggcagggaacagttaacaaggagtttatttagaggggtttttttcattttttgtttttcttgttttgttttgttttgttttgttcttcttggtgtgctttttggatgggaccagaacttaacattttcctgaggactaggaagctcatcagacactggaatgcagtgattcttctaatgatggtcaactgcaaggagaaactgtttacatccttcccactacacagttgctatgatatgtaacaagtcacacatgtatatatcacacaagtcttaccaattctgcgtcactaggaagctatagcatggtcgtgaaagctctcctaatacttacttaaatagccatggaagaaaattatgcttgtcccttctgactgggttaagccatctttcttaagattcctgaagtagaaatagcaattaagaaattaattcaagttttgacggttaacatttagcagaaaaacaaaccattgaataagctactaggtgaaatgcaaaacaaccatcaatttttttaaactcaataattttgtgaaaaaaaaaaccaccaccaaacttttggttgtaaaagagaacccttgttcccttcctaagaaactgccttccacaattaaagaatactcatagaaagaaaataatcataaatcatatttgattaacatttcatttaagcttttaaaatatcaattttttaaatagctcccatttacccaaaataactagttatgggtctatttcttccatgattagaggagagagaacttgattcaagatactgaaaaatagagctgggactgagcctgtgaatgacaggaatgatctattaccaggtgactagtcggaaactacacagacgtgcactggtctgcatttgggggctaaagtgtatatattccatttaaaatggaatttgtttgtatttggggcagtcttcagtaaagcctttctcctttcttttctccattgaggacagttctgctcagcaaaattgttgagtacctgttctgggcaggtcccacgctatatgcacaaagttaagaaaaacttggtcttagcccttgggagctgacagcccatgggcattaaggcaaagtagttccagtgatttaaaatacggttccaaatacgctaaaaccaacttgtgccaaccagatttacagattggaaatactgcagatgatgtgaagttatcagttggaggagctgtgattaagctggataataagagaacgtgccatctgtaaagcactcagaaggcagccatccctagatgttggtttcatgtatattacactatctactactatccataaatgcaataatatgcatgttaacaacattaaaaacagcaaacagcaatctaagtacagaaaagctttttgtgtgtttaaaaaaattgaagaaaattcaggaagaaacgtgttaataaacattgtactgttcttttgcttctcaaaggaattattcacttgccactttggttatttttgagttttcgtacataggaagttttatattgccagccttcctgtgataaagatattaaatgtaacttgagtaaaaaataaaaaagaataactatgtatatacatatataaattaca

SEQ ID NO: 174214 - DNA, 557 bp, Homo sapiens
  Payload ID: 14194
  Gene Symbol: RASGRP3
  Gene Name: RAS guanyl releasing protein 3 (calcium and DAG-regulated)
  ENST ID: ENST00000423159
  CDS Start-End: 218-557
acttggcagctggacaggcagagtgctgatgtgaaaaataccacgacaaaaccaccctaatttggaactgtatctgtatggaaacaacagagttttcttgaagtacaactaaggacaggtcaccactaggcactaacatcgctgacttgcatgattatggagatggtctatctgatgctgaaaatgtctctagttttttgacaacggctaaataaccatgggatcaagtggccttgggaaagcagcaacattagatgaactgctgtgcacttgcattgagatgtttgatgacaatggagagctggataatagttatttgccaagaatagttctactgatgcaccgatggtatttatcttccactgaattggcagaaaaacttctctgcatgtatcgaaatgccactggagaaagctgcaatgaatttcgattaaagatctgctacttcatgaggtactggattctgaagtttcctgcagagtttaatttggatcttggtttgattcgtatgactgaggaatttcgggaagtagctagtcaactaggatatgaaaaac

SEQ ID NO: 174215 - DNA, 861 bp, Homo sapiens
  Payload ID: 14194
  Gene Symbol: RASGRP3
  Gene Name: RAS guanyl releasing protein 3 (calcium and DAG-regulated)
  ENST ID: ENST00000437184
  CDS Start-End: 346-861
gaaatagctgtctatcacaggcagctaggaactgcttgcccacttttttttgttctgaaagaaaggatacagaccatctgggccagttctccaaaatacttatcattcaggttgaataaaccagttctacagactgcttcttccatgcatttcccaatgatgctagctgcccttaaaattctttcagatttggaactgtatctgtatggaaacaacagagttttcttgaagtacaactaaggacaggtcaccactaggcactaacatcgctgacttgcatgattatggagatggtctatctgatgctgaaaatgtctctagttttttgacaacggctaaataaccatgggatcaagtggccttgggaaagcagcaacattagatgaactgctgtgcacttgcattgagatgtttgatgacaatggagagctggataatagttatttgccaagaatagttctactgatgcaccgatggtatttatcttccactgaattggcagaaaaacttctctgcatgtatcgaaatgccactggagaaagctgcaatgaatttcgattaaagatctgctacttcatgaggtactggattctgaagtttcctgcagagtttaatttggatcttggtttgattcgtatgactgaggaatttcgggaagtagctagtcaactaggatatgaaaaacacgtcagcctcatcgacatatccagcattccttcctatgactggatgagaagagtcacacagaggaaaaaagtatccaagaagggaaaagcctgtctgctgtttgaccatctggagcccattgaattggctgagcacctcacttttctggagcataaatcttttagaaggatctca

SEQ ID NO: 174216 - DNA, 554 bp, Homo sapiens
  Payload ID: 14194
  Gene Symbol: RASGRP3
  Gene Name: RAS guanyl releasing protein 3 (calcium and DAG-regulated)
  ENST ID: ENST00000444784
  CDS Start-End: 218-554
acttggcagctggacaggcagagtgctgatgtgaaaaataccacgacaaaaccaccctaatttggaactgtatctgtatggaaacaacagagttttcttgaagtacaactaaggacaggtcaccactaggcactaacatcgctgacttgcatgattatggagatggtctatctgatgctgaaaatgtctctagttttttgacaacggctaaataaccatgggatcaagtggccttgggaaagcagcaacattagatgaactgctgtgcacttgcattgagatgtttgatgacaatggagagctggataatagttatttgccaagaatagttctactgatgcaccgatggtatttatcttccactgaattggcagaaaaacttctctgcatgtatcgaaatgccactggagaaagctgcaatgaatttcgattaaagatctgctacttcatgaggtactggattctgaagtttcctgcagagtttaatttggatcttggtttgattcgtatgactgaggaatttcgggaagtagctagtcaactaggatatgaaa

SEQ ID NO: 174217 - DNA, 540 bp, Homo sapiens
  Payload ID: 14194
  Gene Symbol: RASGRP3
  Gene Name: RAS guanyl releasing protein 3 (calcium and DAG-regulated)
  ENST ID: ENST00000425210
  CDS Start-End: 439-540
acttggcagctggacaggcagagtgctgatgtgaaaaataccacgacaaaaccaccctagtgttcatttcactgggcaggttgtctaccagaaccaaggggcctctttgaattttctttcaagctattaataagaggcatgcatcctcctagacacaatcatccatttagtaaaataggttctccaaaatacttatcattcaggttgaataaaccagttctacagactgcttcttccatgcatttcccaatgatgctagctgcccttaaaattctttcagatttggaactgtatctgtatggaaacaacagagttttcttgaagtacaactaaggacaggtcaccactaggcactaacatcgctgacttgcatgattatggagatggtctatctgatgctgaaaatgtctctagttttttgacaacggctaaataaccatgggatcaagtggccttgggaaagcagcaacattagatgaactgctgtgcacttgcattgagatgtttgatgacaatggagagctggataatagttatttg

SEQ ID NO: 174218 - DNA, 596 bp, Homo sapiens
  Payload ID: 14194
  Gene Symbol: RASGRP3
  Gene Name: RAS guanyl releasing protein 3 (calcium and DAG-regulated)
  ENST ID: ENST00000442390
  CDS Start-End: 366-596
aacagctgctctcggcgtgctccggcacttggcagctggacaggcagagtgctgatgtgaaaaataccacgacaaaaccaccctaatggagtttcactctgtcgcccaggctggagtgcagtggcacgatctcggctcactgcaagctccgcctcccgggttcacaccattcttctgcctcagcctcccgagtagctgggactacagatttggaactgtatctgtatggaaacaacagagttttcttgaagtacaactaaggacaggtcaccactaggcactaacatcgctgacttgcatgattatggagatggtctatctgatgctgaaaatgtctctagttttttgacaacggctaaataaccatgggatcaagtggccttgggaaagcagcaacattagatgaactgctgtgcacttgcattgagatgtttgatgacaatggagagctggataatagttatttgccaagaatagttctactgatgcaccgatggtatttatcttccactgaattggcagaaaaacttctctgcatgtatcgaaatgccactggagaaagctgcaatgaatttcgattaaagatctgctacttc

SEQ ID NO: 174219 - DNA, 548 bp, Homo sapiens
  Payload ID: 14194
  Gene Symbol: RASGRP3
  Gene Name: RAS guanyl releasing protein 3 (calcium and DAG-regulated)
  ENST ID: ENST00000419772
  CDS Start-End: 1-417
gccgactgcgatggcttcaaaatccccatccttggagtacacttgaaagacttgatagctgtccatgtcattttcccagactggacagaggagaacaaagtgaacattgtgaaaatgcaccagctctccgttaccctgagtgaactagtctccctgcagaatgcctctcaccacttagaacccaacatggatttgatcaacctgctcacgctttccctggacctctatcacactgaagatgatatttacaaactgtcactggtgctggagcctagaaattctaaatcgcagcctacctcccctacgacgcccaacaagcctgtggtacccctggagtgggcattaggggtgatgccaaagccagaccccacggtcatcaacaagcacataaggaaattagtggaggtaagtggttgagggagaataaagagagggcactagaagaccctttctctttccagaatgttctgcgattgtccaggaatctgatggaacccctgaaaacaaccctctggcagcctgggagacagagtgagactccgtctgaa

SEQ ID NO: 174220 - DNA, 2926 bp, Homo sapiens
  Payload ID: 14195
  Gene Symbol: RASGRP4
  Gene Name: RAS guanyl releasing protein 4
  Uniprot ID: Q8TDF6
  ENST ID: ENST00000293062
  CDS Start-End: 215-1945
atccccgtgtgggggaggggggccttcggtctctccccagcctcttccttccccctggcctgagggtgggtggggaggggcagttcctctttccttcccaagcaccgaggaggccccagctccctaggggctgagaagctggagtcctgggcaaggggaggagctgagccctactcttgcaagacccccggcctcctcaccccacgcgggaagcatgaacagaaaagacagtaagaggaagtcccaccaggaatgcaccggaaaaataggagggcgaggccggccccgccaagtgcgccgccacaagacatgccccagccctcgggaaatcagcaaggtcatggcttccatgaacctgggcctgctgagtgagggcggctgcagcgaagatgagctgctggagaaatgcatccagtccttcgattcagctggcagcctgtgccacgaggaccacatgctcaacatggtgctggccatgcacagctgggtgctgccgtccgccgacctggctgcccgcctgctgacctcataccagaaggccacaggggacacccaggagctgagacggctgcagatctgtcacctggtcaggtactggctgatgcgacaccctgaggtgatgcaccaggatccccagctagaagaagtcataggtcgtttctgggccaccgtggcccgggagggcaactcagcccagagaagactgggagactcttctgacctcctgagccctggtggccctggccccccactcccaatgagcagcccaggcctgggcaaaaagcgcaaagtgtccttgcttttcgaccacttggagacgggggagctggctcagcacctcacctacctggagttccggtccttccaggctatcacggccctcctggagctcactgagctccttgcctcccacaacaactacgcccgctaccgccgcacctgggctggctgcgcgggtttccggctgcctgtactgggcgtgcacctcaaggacctggtgtccctgcatgaggcacagcccgacaggttgcctgacggccgcctgcacctacccaagctgaacaacctctacctgcggctgcaggagctggtggccctccaagggcagcatccaccctgcagcgccaatgaggatctgctgcacctgctcacgctctccctggacctcttctacacggaagacgagatctatgagctttcttatgcccgggagccgcgttgtcccaagagcctgccaccctcccccttcaatgcacctctggtggtggagtgggcccctggtgtgacacccaagccggacagggtcacactgggtcggcatgtggagcagctggtggagtctgtgttcaagaattatgaccctgaaggccgaggaacaatctctcaggaggactttgagcgactctcgggcaattttcccttcgcctgccatgggcttcacccacccccacgccaggggagaggatccttcagcagagaggagctgacagggtacctgctccgggccagcgccatctgctccaagttgggcctggccttcctgcacaccttccatgaggtcaccttccgaaagcctaccttctgcgacagctgcagtggcttcctctggggtgtcaccaagcaaggctaccgctgtcgggagtgcgggctgtgttgccacaaacactgcagagaccaggtgaaggtagaatgtaagaagaggccaggggccaagggcgatgcaggaccccccggagctcctgtcccatccacaccagctccccatgccagctgtggctccgaggaaaatcactcctacacgctatccctggagcctgagactgggtgccagcttcgccatgcctggacccagactgaatccccacacccttcctgggaaacagatacggtcccctgcccggtgatggacccaccatcaactgcatcctccaagctggattcctagacatctcttggtctcctctcttcctcactcccttcccccagtcagtcctgagtcctgccgtcagactctggcagggctcccagaggtaggcctccagaggcatccgccttcccatccacactgcctttagtggtacgtccgtcatctttttccctggaagtgactttcctcttttgcatcctggtggatgctaatcctgctccctttccctgcacttagtatctgtgcggctgtgtgttggatacatttagactcaggcctcattctaccaactccctacatctccatttctttttttttttgagacagagtcttgctctgtcacccaggctggagtgcaatgatgcaatctcagctcactgcaacttccgcctcctgggttcaagtgattcttctgcctcagcctcccaagtagctgggattacaggcacgcgccaccatgcccggctaatttttgtatttttagtagagacggggtttccccatgttggccaagatggtctcaaactcctgacctcatgatccaccagcctcagcctcccaaagtgctgggaatacaggcgtgagccaccacgcccagctcctgtttttctgcatagaatgtgctccctctgacagcctatactttttccctctttatctcgttgaacgtctgtctttcctcaacaggagcatcaactccaggagaacagggatttctatcaatgtcattcactgctgcatccccagtgcctagaacagggctggcaggtggtaggcgcctgacagatgcttgtctgatgcctgaatgtctccttacccatgcccacggcacaggatagatgtgctatagggcaaagaactttgagggtcgagcagcaggggcccattcagtcccagggagcagagacccccccaaccccttcacaaaccccaacacccctgacttggcccccacagagagaggtcctacagctgtcataaattaaatttattctctgg

SEQ ID NO: 174221 - DNA, 2941 bp, Homo sapiens
  Payload ID: 14195
  Gene Symbol: RASGRP4
  Gene Name: RAS guanyl releasing protein 4
  Uniprot ID: Q8TDF6
  ENST ID: ENST00000433821
  CDS Start-End: 215-1960
atccccgtgtgggggaggggggccttcggtctctccccagcctcttccttccccctggcctgagggtgggtggggaggggcagttcctctttccttcccaagcaccgaggaggccccagctccctaggggctgagaagctggagtcctgggcaaggggaggagctgagccctactcttgcaagacccccggcctcctcaccccacgcgggaagcatgaacagaaaagacagtaagaggaagtcccaccaggaatgcaccggaaaaataggagggcgaggccggccccgccaagtgcgccgccacaagacatgccccagccctcgggaaatcagcaaggtcatggcttccatgaacctgggcctgctgagtgagggcggctgcagcgaagatgagctgctggagaaatgcatccagtccttcgattcagctggcagcctgtgccacgaggaccacatgctcaacatggtgctggccatgcacagctgggtgctgccgtccgccgacctggctgcccgcctgctgacctcataccagaaggccacaggggacacccaggagctgagacggctgcagatctgtcacctggtcaggtactggctgatgcgacaccctgaggtgatgcaccaggatccccagctagaagaagtcataggtcgtttctgggccaccgtggcccgggagggcaactcagcccagagaagactgggagactcttctgacctcctgagccctggtggccctggccccccactcccaatgagcagcccaggcctgggcaaaaagcgcaaagtgtccttgcttttcgaccacttggagacgggggagctggctcagcacctcacctacctggagttccggtccttccaggctatcacgccccaggacctgcggagctacgttttgcagggctcagtacgaggctgcccggccctggagggctccgtaggtctcagcaacagcgtgtcccgctgggtgcaggtgatggtgctgagccgtcccgggcccctacagcgtgcacaggtgctggacaagttcattcacgtggcacagaggctccaccagctgcagaatttcaacacgctgatggcagtcacagggggcctgtgtcacagtgccatctccagactcaaggactcccatgcccacctgagccctgacagcaccaagctctccctggacctcttctacacggaagacgagatctatgagctttcttatgcccgggagccgcgttgtcccaagagcctgccaccctcccccttcaatgcacctctggtggtggagtgggcccctggtgtgacacccaagccggacagggtcacactgggtcggcatgtggagcagctggtggagtctgtgttcaagaattatgaccctgaaggccgaggaacaatctctcaggaggactttgagcgactctcgggcaattttcccttcgcctgccatgggcttcacccacccccacgccaggggagaggatccttcagcagagaggagctgacagggtacctgctccgggccagcgccatctgctccaagttgggcctggccttcctgcacaccttccatgaggtcaccttccgaaagcctaccttctgcgacagctgcagtggcttcctctggggtgtcaccaagcaaggctaccgctgtcgggagtgcgggctgtgttgccacaaacactgcagagaccaggtgaaggtagaatgtaagaagaggccaggggccaagggcgatgcaggaccccccggagctcctgtcccatccacaccagctccccatgccagctgtggctccgaggaaaatcactcctacacgctatccctggagcctgagactgggtgccagcttcgccatgcctggacccagactgaatccccacacccttcctgggaaacagatacggtcccctgcccggtgatggacccaccatcaactgcatcctccaagctggattcctagacatctcttggtctcctctcttcctcactcccttcccccagtcagtcctgagtcctgccgtcagactctggcagggctcccagaggtaggcctccagaggcatccgccttcccatccacactgcctttagtggtacgtccgtcatctttttccctggaagtgactttcctcttttgcatcctggtggatgctaatcctgctccctttccctgcacttagtatctgtgcggctgtgtgttggatacatttagactcaggcctcattctaccaactccctacatctccatttctttttttttttgagacagagtcttgctctgtcacccaggctggagtgcaatgatgcaatctcagctcactgcaacttccgcctcctgggttcaagtgattcttctgcctcagcctcccaagtagctgggattacaggcacgcgccaccatgcccggctaatttttgtatttttagtagagacggggtttccccatgttggccaagatggtctcaaactcctgacctcatgatccaccagcctcagcctcccaaagtgctgggaatacaggcgtgagccaccacgcccagctcctgtttttctgcatagaatgtgctccctctgacagcctatactttttccctctttatctcgttgaacgtctgtctttcctcaacaggagcatcaactccaggagaacagggatttctatcaatgtcattcactgctgcatccccagtgcctagaacagggctggcaggtggtaggcgcctgacagatgcttgtctgatgcctgaatgtctccttacccatgcccacggcacaggatagatgtgctatagggcaaagaactttgagggtcgagcagcaggggcccattcagtcccagggagcagagacccccccaaccccttcacaaaccccaacacccctgacttggcccccacagagagaggtcctacagctgtcataaattaaatttattctctgg

SEQ ID NO: 174222 - DNA, 3116 bp, Homo sapiens
  Payload ID: 14195
  Gene Symbol: RASGRP4
  Gene Name: RAS guanyl releasing protein 4
  Uniprot ID: Q8TDF6
  ENST ID: ENST00000454404
  CDS Start-End: 215-2134
atccccgtgtgggggaggggggccttcggtctctccccagcctcttccttccccctggcctgagggtgggtggggaggggcagttcctctttccttcccaagcaccgaggaggccccagctccctaggggctgagaagctggagtcctgggcaaggggaggagctgagccctactcttgcaagacccccggcctcctcaccccacgcgggaagcatgaacagaaaagacagtaagaggaagtcccaccaggaatgcaccggaaaaataggagggcgaggccggccccgccaagtgcgccgccacaagacatgccccagccctcgggaaatcagcaaggtcatggcttccatgaacctgggcctgctgagtgagggcggctgcagcgaagatgagctgctggagaaatgcatccagtccttcgattcagctggcagcctgtgccacgaggaccacatgctcaacatggtgctggccatgcacagctgggtgctgccgtccgccgacctggctgcccgcctgctgacctcataccagaaggccacaggggacacccaggagctgagacggctgcagatctgtcacctggtcaggtactggctgatgcgacaccctgaggtgatgcaccaggatccccagctagaagaagtcataggtcgtttctgggccaccgtggcccgggagggcaactcagcccagagaagactgggagactcttctgacctcctgagccctggtggccctggccccccactcccaatgagcagcccaggcctgggcaaaaagcgcaaagtgtccttgcttttcgaccacttggagacgggggagctggctcagcacctcacctacctggagttccggtccttccaggctatcacggtgatggtgctgagccgtcccgggcccctacagcgtgcacaggtgctggacaagttcattcacgtggcacagaggctccaccagctgcagaatttcaacacgctgatggcagtcacagggggcctgtgtcacagtgccatctccagactcaaggactcccatgcccacctgagccctgacagcaccaaggccctcctggagctcactgagctccttgcctcccacaacaactacgcccgctaccgccgcacctgggctggctgcgcgggtttccggctgcctgtactgggcgtgcacctcaaggacctggtgtccctgcatgaggcacagcccgacaggttgcctgacggccgcctgcacctacccaagctgaacaacctctacctgcggctgcaggagctggtggccctccaagggcagcatccaccctgcagcgccaatgaggatctgctgcacctgctcacgctctccctggacctcttctacacggaagacgagatctatgagctttcttatgcccgggagccgcgttgtcccaagagcctgccaccctcccccttcaatgcacctctggtggtggagtgggcccctggtgtgacacccaagccggacagggtcacactgggtcggcatgtggagcagctggtggagtctgtgttcaagaattatgaccctgaaggccgaggaacaatctctcaggaggactttgagcgactctcgggcaattttcccttcgcctgccatgggcttcacccacccccacgccaggggagaggatccttcagcagagaggagctgacagggtacctgctccgggccagcgccatctgctccaagttgggcctggccttcctgcacaccttccatgaggtcaccttccgaaagcctaccttctgcgacagctgcagtggcttcctctggggtgtcaccaagcaaggctaccgctgtcgggagtgcgggctgtgttgccacaaacactgcagagaccaggtgaaggtagaatgtaagaagaggccaggggccaagggcgatgcaggaccccccggagctcctgtcccatccacaccagctccccatgccagctgtggctccgaggaaaatcactcctacacgctatccctggagcctgagactgggtgccagcttcgccatgcctggacccagactgaatccccacacccttcctgggaaacagatacggtcccctgcccggtgatggacccaccatcaactgcatcctccaagctggattcctagacatctcttggtctcctctcttcctcactcccttcccccagtcagtcctgagtcctgccgtcagactctggcagggctcccagaggtaggcctccagaggcatccgccttcccatccacactgcctttagtggtacgtccgtcatctttttccctggaagtgactttcctcttttgcatcctggtggatgctaatcctgctccctttccctgcacttagtatctgtgcggctgtgtgttggatacatttagactcaggcctcattctaccaactccctacatctccatttctttttttttttgagacagagtcttgctctgtcacccaggctggagtgcaatgatgcaatctcagctcactgcaacttccgcctcctgggttcaagtgattcttctgcctcagcctcccaagtagctgggattacaggcacgcgccaccatgcccggctaatttttgtatttttagtagagacggggtttccccatgttggccaagatggtctcaaactcctgacctcatgatccaccagcctcagcctcccaaagtgctgggaatacaggcgtgagccaccacgcccagctcctgtttttctgcatagaatgtgctccctctgacagcctatactttttccctctttatctcgttgaacgtctgtctttcctcaacaggagcatcaactccaggagaacagggatttctatcaatgtcattcactgctgcatccccagtgcctagaacagggctggcaggtggtaggcgcctgacagatgcttgtctgatgcctgaatgtctccttacccatgcccacggcacaggatagatgtgctatagggcaaagaactttgagggtcgagcagcaggggcccattcagtcccagggagcagagacccccccaaccccttcacaaaccccaacacccctgacttggcccccacagagagaggtcctacagctgtcataaattaaatttattctctgga

SEQ ID NO: 174223 - DNA, 2650 bp, Homo sapiens
  Payload ID: 14195
  Gene Symbol: RASGRP4
  Gene Name: RAS guanyl releasing protein 4
  Uniprot ID: Q8TDF6
  ENST ID: ENST00000426920
  CDS Start-End: 215-1669
atccccgtgtgggggaggggggccttcggtctctccccagcctcttccttccccctggcctgagggtgggtggggaggggcagttcctctttccttcccaagcaccgaggaggccccagctccctaggggctgagaagctggagtcctgggcaaggggaggagctgagccctactcttgcaagacccccggcctcctcaccccacgcgggaagcatgaacagaaaagacagtaagaggaagtcccaccaggaatgcaccggaaaaataggagggcgaggccggccccgccaagtgcgccgccacaagacatgccccagccctcgggaaatcagcaaggtcatggcttccatgaacctgggcctgctgagtgagggcggctgcagcgaagatgagctgctggagaaatgcatccagtccttcgattcagctggcagcctgtgccacgaggaccacatgctcaacatggtgctggccatgcacagctgggtgctgccgtccgccgacctggctgcccgcctgctgacctcataccagaaggccacaggggacacccaggagctgagacggctgcagatctgtcacctggtcaggtactggctgatgcgacaccctgaggtgatgcaccaggatccccagctagaagaagtcataggtcgtttctgggccaccgtggcccgggagggcaactcagcccagagaagactgggagactcttctgacctcctgagccctggtggccctggccccccactcccaatgagcagcccaggcctgggcaaaaagcgcaaagtgtccttgcttttcgaccacttggagacgggggagctggctcagcacctcacctacctggagttccggtccttccaggctatcacgctctccctggacctcttctacacggaagacgagatctatgagctttcttatgcccgggagccgcgttgtcccaagagcctgccaccctcccccttcaatgcacctctggtggtggagtgggcccctggtgtgacacccaagccggacagggtcacactgggtcggcatgtggagcagctggtggagtctgtgttcaagaattatgaccctgaaggccgaggaacaatctctcaggaggactttgagcgactctcgggcaattttcccttcgcctgccatgggcttcacccacccccacgccaggggagaggatccttcagcagagaggagctgacagggtacctgctccgggccagcgccatctgctccaagttgggcctggccttcctgcacaccttccatgaggtcaccttccgaaagcctaccttctgcgacagctgcagtggcttcctctggggtgtcaccaagcaaggctaccgctgtcgggagtgcgggctgtgttgccacaaacactgcagagaccaggtgaaggtagaatgtaagaagaggccaggggccaagggcgatgcaggaccccccggagctcctgtcccatccacaccagctccccatgccagctgtggctccgaggaaaatcactcctacacgctatccctggagcctgagactgggtgccagcttcgccatgcctggacccagactgaatccccacacccttcctgggaaacagatacggtcccctgcccggtgatggacccaccatcaactgcatcctccaagctggattcctagacatctcttggtctcctctcttcctcactcccttcccccagtcagtcctgagtcctgccgtcagactctggcagggctcccagaggtaggcctccagaggcatccgccttcccatccacactgcctttagtggtacgtccgtcatctttttccctggaagtgactttcctcttttgcatcctggtggatgctaatcctgctccctttccctgcacttagtatctgtgcggctgtgtgttggatacatttagactcaggcctcattctaccaactccctacatctccatttctttttttttttgagacagagtcttgctctgtcacccaggctggagtgcaatgatgcaatctcagctcactgcaacttccgcctcctgggttcaagtgattcttctgcctcagcctcccaagtagctgggattacaggcacgcgccaccatgcccggctaatttttgtatttttagtagagacggggtttccccatgttggccaagatggtctcaaactcctgacctcatgatccaccagcctcagcctcccaaagtgctgggaatacaggcgtgagccaccacgcccagctcctgtttttctgcatagaatgtgctccctctgacagcctatactttttccctctttatctcgttgaacgtctgtctttcctcaacaggagcatcaactccaggagaacagggatttctatcaatgtcattcactgctgcatccccagtgcctagaacagggctggcaggtggtaggcgcctgacagatgcttgtctgatgcctgaatgtctccttacccatgcccacggcacaggatagatgtgctatagggcaaagaactttgagggtcgagcagcaggggcccattcagtcccagggagcagagacccccccaaccccttcacaaaccccaacacccctgacttggcccccacagagagaggtcctacagctgtcataaattaaatttattctctgg

SEQ ID NO: 174224 - DNA, 2634 bp, Homo sapiens
  Payload ID: 14195
  Gene Symbol: RASGRP4
  Gene Name: RAS guanyl releasing protein 4
  Uniprot ID: Q8TDF6
  ENST ID: ENST00000589358
  CDS Start-End: 215-2236
atccccgtgtgggggaggggggccttcggtctctccccagcctcttccttccccctggcctgagggtgggtggggaggggcagttcctctttccttcccaagcaccgaggaggccccagctccctaggggctgagaagctggagtcctgggcaaggggaggagctgagccctactcttgcaagacccccggcctcctcaccccacgcgggaagcatgaacagaaaagacagtaagaggaagtcccaccaggaatgcaccggaaaaataggagggcgaggccggccccgccaagtgcgccgccacaagacatgccccagccctcgggaaatcagcaaggtcatggcttccatgaacctgggcctgctgagtgagggcggctgcagcgaagatgagctgctggagaaatgcatccagtccttcgattcagctggcagcctgtgccacgaggaccacatgctcaacatggtgctggccatgcacagctgggtgctgccgtccgccgacctggctgcccgcctgctgacctcataccagaaggccacaggggacacccaggagctgagacggctgcagatctgtcacctggtcaggtactggctgatgcgacaccctgaggtgatgcaccaggatccccagctagaagaagtcataggtcgtttctgggccaccgtggcccgggagggcaactcagcccagagaagactgggagactcttctgacctcctgagccctggtggccctggccccccactcccaatgagcagcccaggcctgggcaaaaagcgcaaagtgtccttgcttttcgaccacttggagacgggggagctggctcagcacctcacctacctggagttccggtccttccaggctatcacgccccaggacctgcggagctacgttttgcagggctcagtacgaggctgcccggccctggagggctccgtaggtctcagcaacagcgtgtcccgctgggtgcaggtgatggtgctgagccgtcccgggcccctacagcgtgcacaggtgctggacaagttcattcacgtggcacagaggctccaccagctgcagaatttcaacacgctgatggcagtcacagggggcctgtgtcacagtgccatctccagactcaaggactcccatgcccacctgagccctgacagcaccaaggccctcctggagctcactgagctccttgcctcccacaacaactacgcccgctaccgccgcacctgggctggctgcgcgggtttccggctgcctgtactgggcgtgcacctcaaggacctggtgtccctgcatgaggcacagcccgacaggttgcctgacggccgcctgcacctacccaagctgaacaacctctacctgcggctgcaggagctggtggccctccaagggcagcatccaccctgcagcgccaatgaggatctgctgcacctgctcacgctctccctggacctcttctacacggaagacgagatctatgagctttcttatgcccgggagccgcgttgtcccaagagcctgccaccctcccccttcaatgcacctctggtggtggagtgggcccctggtgtgacacccaagccggacagggtcacactgggtcggcatgtggagcagctggtggagtctgtgttcaagaattatgaccctgaaggccgaggaacaatctctcaggaggactttgagcgactctcgggcaattttcccttcgcctgccatgggcttcacccacccccacgccaggggagaggatccttcagcagagaggagctgacagggtacctgctccgggccagcgccatctgctccaagttgggcctggccttcctgcacaccttccatgaggtcaccttccgaaagcctaccttctgcgacagctgcagtggcttcctctggggtgtcaccaagcaaggctaccgctgtcgggagtgcgggctgtgttgccacaaacactgcagagaccaggtgaaggtagaatgtaagaagaggccaggggccaagggcgatgcaggaccccccggagctcctgtcccatccacaccagctccccatgccagctgtggctccgaggaaaatcactcctacacgctatccctggagcctgagactgggtgccagcttcgccatgcctggacccagactgaatccccacacccttcctgggaaacagatacggtcccctgcccggtgatggacccaccatcaactgcatcctccaagctggattcctagacatctcttggtctcctctcttcctcactcccttcccccagtcagtcctgagtcctgccgtcagactctggcagggctcccagaggagcatcaactccaggagaacagggatttctatcaatgtcattcactgctgcatccccagtgcctagaacagggctggcaggtggtaggcgcctgacagatgcttgtctgatgcctgaatgtctccttacccatgcccacggcacaggatagatgtgctatagggcaaagaactttgagggtcgagcagcaggggcccattcagtcccagggagcagagacccccccaaccccttcacaaaccccaacacccctgacttggcccccacagagagaggtcctacagctgtcataaattaaatttattctctgga

SEQ ID NO: 174225 - DNA, 2293 bp, Homo sapiens
  Payload ID: 14195
  Gene Symbol: RASGRP4
  Gene Name: RAS guanyl releasing protein 4
  Uniprot ID: Q8TDF6
  ENST ID: ENST00000587738
  CDS Start-End: 72-2093
gtcctgggcaaggggaggagctgagccctactcttgcaagacccccggcctcctcaccccacgcgggaagcatgaacagaaaagacagtaagaggaagtcccaccaggaatgcaccggaaaaataggagggcgaggccggccccgccaagtgcgccgccacaagacatgccccagccctcgggaaatcagcaaggtcatggcttccatgaacctgggcctgctgagtgagggcggctgcagcgaagatgagctgctggagaaatgcatccagtccttcgattcagctggcagcctgtgccacgaggaccacatgctcaacatggtgctggccatgcacagctgggtgctgccgtccgccgacctggctgcccgcctgctgacctcataccagaaggccacaggggacacccaggagctgagacggctgcagatctgtcacctggtcaggtactggctgatgcgacaccctgaggtgatgcaccaggatccccagctagaagaagtcataggtcgtttctgggccaccgtggcccgggagggcaactcagcccagagaagactgggagactcttctgacctcctgagccctggtggccctggccccccactcccaatgagcagcccaggcctgggcaaaaagcgcaaagtgtccttgcttttcgaccacttggagacgggggagctggctcagcacctcacctacctggagttccggtccttccaggctatcacgccccaggacctgcggagctacgttttgcagggctcagtacgaggctgcccggccctggagggctccgtaggtctcagcaacagcgtgtcccgctgggtgcaggtgatggtgctgagccgtcccgggcccctacagcgtgcacaggtgctggacaagttcattcacgtggcacagaggctccaccagctgcagaatttcaacacgctgatggcagtcacagggggcctgtgtcacagtgccatctccagactcaaggactcccatgcccacctgagccctgacagcaccaaggccctcctggagctcactgagctccttgcctcccacaacaactacgcccgctaccgccgcacctgggctggctgcgcgggtttccggctgcctgtactgggcgtgcacctcaaggacctggtgtccctgcatgaggcacagcccgacaggttgcctgacggccgcctgcacctacccaagctgaacaacctctacctgcggctgcaggagctggtggccctccaagggcagcatccaccctgcagcgccaatgaggatctgctgcacctgctcacgctctccctggacctcttctacacggaagacgagatctatgagctttcttatgcccgggagccgcgttgtcccaagagcctgccaccctcccccttcaatgcacctctggtggtggagtgggcccctggtgtgacacccaagccggacagggtcacactgggtcggcatgtggagcagctggtggagtctgtgttcaagaattatgaccctgaaggccgaggaacaatctctcaggaggactttgagcgactctcgggcaattttcccttcgcctgccatgggcttcacccacccccacgccaggggagaggatccttcagcagagaggagctgacagggtacctgctccgggccagcgccatctgctccaagttgggcctggccttcctgcacaccttccatgaggtcaccttccgaaagcctaccttctgcgacagctgcagtggcttcctctggggtgtcaccaagcaaggctaccgctgtcgggagtgcgggctgtgttgccacaaacactgcagagaccaggtgaaggtagaatgtaagaagaggccaggggccaagggcgatgcaggaccccccggagctcctgtcccatccacaccagctccccatgccagctgtggctccgaggaaaatcactcctacacgctatccctggagcctgagactgggtgccagcttcgccatgcctggacccagactgaatccccacacccttcctgggaaacagatacggtcccctgcccggtgatggacccaccatcaactgcatcctccaagctggattcctagacatctcttggtctcctctcttcctcactcccttcccccagtcagtcctgagtcctgccgtcagactctggcagggctcccagaggtaggcctccagaggcatccgccttcccatccacactgcctttagtggtacgtccgtcatctttttccctggaagtgactttcctcttttgcatcctggtggatgctaatcctgc

SEQ ID NO: 174226 - DNA, 2592 bp, Homo sapiens
  Payload ID: 14195
  Gene Symbol: RASGRP4
  Gene Name: RAS guanyl releasing protein 4
  Uniprot ID: Q8TDF6
  ENST ID: ENST00000589474
  CDS Start-End: 215-2194
atccccgtgtgggggaggggggccttcggtctctccccagcctcttccttccccctggcctgagggtgggtggggaggggcagttcctctttccttcccaagcaccgaggaggccccagctccctaggggctgagaagctggagtcctgggcaaggggaggagctgagccctactcttgcaagacccccggcctcctcaccccacgcgggaagcatgaacagaaaagacagtaagaggaagtcccaccaggaatgcaccggaaaaataggagggcgaggccggccccgccaagtgcgccgccacaagacatgccccagccctcgggaaatcagcaaggtcatggcttccatgaacctgggcctgctgagtgagggcggctgcagcgaagatgagctgctggagaaatgcatccagtccttcgattcagctggcagcctgtgccacgaggaccacatgctcaacatggtgctggccatgcacagctgggtgctgccgtccgccgacctggctgcccgcctgctgacctcataccagaaggccacaggggacacccaggagctgagacggctgcagatctgtcacctggtcaggtactggctgatgcgacaccctgaggtgatgcaccaggatccccagctagaagaagtcataggtcgtttctgggccaccgtggcccgggagggcaactcagcccagagaagactgggagactcttctgacctcccaggcctgggcaaaaagcgcaaagtgtccttgcttttcgaccacttggagacgggggagctggctcagcacctcacctacctggagttccggtccttccaggctatcacgccccaggacctgcggagctacgttttgcagggctcagtacgaggctgcccggccctggagggctccgtaggtctcagcaacagcgtgtcccgctgggtgcaggtgatggtgctgagccgtcccgggcccctacagcgtgcacaggtgctggacaagttcattcacgtggcacagaggctccaccagctgcagaatttcaacacgctgatggcagtcacagggggcctgtgtcacagtgccatctccagactcaaggactcccatgcccacctgagccctgacagcaccaaggccctcctggagctcactgagctccttgcctcccacaacaactacgcccgctaccgccgcacctgggctggctgcgcgggtttccggctgcctgtactgggcgtgcacctcaaggacctggtgtccctgcatgaggcacagcccgacaggttgcctgacggccgcctgcacctacccaagctgaacaacctctacctgcggctgcaggagctggtggccctccaagggcagcatccaccctgcagcgccaatgaggatctgctgcacctgctcacgctctccctggacctcttctacacggaagacgagatctatgagctttcttatgcccgggagccgcgttgtcccaagagcctgccaccctcccccttcaatgcacctctggtggtggagtgggcccctggtgtgacacccaagccggacagggtcacactgggtcggcatgtggagcagctggtggagtctgtgttcaagaattatgaccctgaaggccgaggaacaatctctcaggaggactttgagcgactctcgggcaattttcccttcgcctgccatgggcttcacccacccccacgccaggggagaggatccttcagcagagaggagctgacagggtacctgctccgggccagcgccatctgctccaagttgggcctggccttcctgcacaccttccatgaggtcaccttccgaaagcctaccttctgcgacagctgcagtggcttcctctggggtgtcaccaagcaaggctaccgctgtcgggagtgcgggctgtgttgccacaaacactgcagagaccaggtgaaggtagaatgtaagaagaggccaggggccaagggcgatgcaggaccccccggagctcctgtcccatccacaccagctccccatgccagctgtggctccgaggaaaatcactcctacacgctatccctggagcctgagactgggtgccagcttcgccatgcctggacccagactgaatccccacacccttcctgggaaacagatacggtcccctgcccggtgatggacccaccatcaactgcatcctccaagctggattcctagacatctcttggtctcctctcttcctcactcccttcccccagtcagtcctgagtcctgccgtcagactctggcagggctcccagaggagcatcaactccaggagaacagggatttctatcaatgtcattcactgctgcatccccagtgcctagaacagggctggcaggtggtaggcgcctgacagatgcttgtctgatgcctgaatgtctccttacccatgcccacggcacaggatagatgtgctatagggcaaagaactttgagggtcgagcagcaggggcccattcagtcccagggagcagagacccccccaaccccttcacaaaccccaacacccctgacttggcccccacagagagaggtcctacagctgtcataaattaaatttattctctgga

SEQ ID NO: 174227 - DNA, 3061 bp, Homo sapiens
  Payload ID: 14195
  Gene Symbol: RASGRP4
  Gene Name: RAS guanyl releasing protein 4
  Uniprot ID: Q8TDF6
  ENST ID: ENST00000586305
  CDS Start-End: 97-2076
gctccctaggggctgagaagctggagtcctgggcaaggggaggagctgagccctactcttgcaagacccccggcctcctcaccccacgcgggaagcatgaacagaaaagacagtaagaggaagtcccaccaggaatgcaccggaaaaataggagggcgaggccggccccgccaagtgcgccgccacaagacatgccccagccctcgggaaatcagcaaggtcatggcttccatgaacctgggcctgctgagtgagggcggctgcagcgaagatgagctgctggagaaatgcatccagtccttcgattcagctggcagcctgtgccacgaggaccacatgctcaacatggtgctggccatgcacagctgggtgctgccgtccgccgacctggctgcccgcctgctgacctcataccagaaggccacaggggacacccaggagctgagacggctgcagatctgtcacctggtcaggtactggctgatgcgacaccctgaggtgatgcaccaggatccccagctagaagaagtcataggtcgtttctgggccaccgtggcccgggagggcaactcagcccagagaagactgggagactcttctgacctcccaggcctgggcaaaaagcgcaaagtgtccttgcttttcgaccacttggagacgggggagctggctcagcacctcacctacctggagttccggtccttccaggctatcacgccccaggacctgcggagctacgttttgcagggctcagtacgaggctgcccggccctggagggctccgtaggtctcagcaacagcgtgtcccgctgggtgcaggtgatggtgctgagccgtcccgggcccctacagcgtgcacaggtgctggacaagttcattcacgtggcacagaggctccaccagctgcagaatttcaacacgctgatggcagtcacagggggcctgtgtcacagtgccatctccagactcaaggactcccatgcccacctgagccctgacagcaccaaggccctcctggagctcactgagctccttgcctcccacaacaactacgcccgctaccgccgcacctgggctggctgcgcgggtttccggctgcctgtactgggcgtgcacctcaaggacctggtgtccctgcatgaggcacagcccgacaggttgcctgacggccgcctgcacctacccaagctgaacaacctctacctgcggctgcaggagctggtggccctccaagggcagcatccaccctgcagcgccaatgaggatctgctgcacctgctcacgctctccctggacctcttctacacggaagacgagatctatgagctttcttatgcccgggagccgcgttgtcccaagagcctgccaccctcccccttcaatgcacctctggtggtggagtgggcccctggtgtgacacccaagccggacagggtcacactgggtcggcatgtggagcagctggtggagtctgtgttcaagaattatgaccctgaaggccgaggaacaatctctcaggaggactttgagcgactctcgggcaattttcccttcgcctgccatgggcttcacccacccccacgccaggggagaggatccttcagcagagaggagctgacagggtacctgctccgggccagcgccatctgctccaagttgggcctggccttcctgcacaccttccatgaggtcaccttccgaaagcctaccttctgcgacagctgcagtggcttcctctggggtgtcaccaagcaaggctaccgctgtcgggagtgcgggctgtgttgccacaaacactgcagagaccaggtgaaggtagaatgtaagaagaggccaggggccaagggcgatgcaggaccccccggagctcctgtcccatccacaccagctccccatgccagctgtggctccgaggaaaatcactcctacacgctatccctggagcctgagactgggtgccagcttcgccatgcctggacccagactgaatccccacacccttcctgggaaacagatacggtcccctgcccggtgatggacccaccatcaactgcatcctccaagctggattcctagacatctcttggtctcctctcttcctcactcccttcccccagtcagtcctgagtcctgccgtcagactctggcagggctcccagaggtaggcctccagaggcatccgccttcccatccacactgcctttagtggtacgtccgtcatctttttccctggaagtgactttcctcttttgcatcctggtggatgctaatcctgctccctttccctgcacttagtatctgtgcggctgtgtgttggatacatttagactcaggcctcattctaccaactccctacatctccatttctttttttttttgagacagagtcttgctctgtcacccaggctggagtgcaatgatgcaatctcagctcactgcaacttccgcctcctgggttcaagtgattcttctgcctcagcctcccaagtagctgggattacaggcacgcgccaccatgcccggctaatttttgtatttttagtagagacggggtttccccatgttggccaagatggtctcaaactcctgacctcatgatccaccagcctcagcctcccaaagtgctgggaatacaggcgtgagccaccacgcccagctcctgtttttctgcatagaatgtgctccctctgacagcctatactttttccctctttatctcgttgaacgtctgtctttcctcaacaggagcatcaactccaggagaacagggatttctatcaatgtcattcactgctgcatccccagtgcctagaacagggctggcaggtggtaggcgcctgacagatgcttgtctgatgcctgaatgtctccttacccatgcccacggcacaggatagatgtgctatagggcaaagaactttgagggtcgagcagcaggggcccattcagtcccagggagcagagacccccccaaccccttcacaaaccccaacacccctgacttggcccccacagagagaggtcctacagctgtcataaattaaatttattctctggagaa

SEQ ID NO: 174228 - DNA, 3011 bp, Homo sapiens
  Payload ID: 14195
  Gene Symbol: RASGRP4
  Gene Name: RAS guanyl releasing protein 4
  Uniprot ID: Q8TDF6
  ENST ID: ENST00000587753
  CDS Start-End: 215-2029
atccccgtgtgggggaggggggccttcggtctctccccagcctcttccttccccctggcctgagggtgggtggggaggggcagttcctctttccttcccaagcaccgaggaggccccagctccctaggggctgagaagctggagtcctgggcaaggggaggagctgagccctactcttgcaagacccccggcctcctcaccccacgcgggaagcatgaacagaaaagacagtaagaggaagtcccaccaggaatgcaccggaaaaataggagggcgaggccggccccgccaagtgcgccgccacaagacatgccccagccctcgggaaatcagcaaggtcatggcttccatgaacctgggcctgctgagtgagggcggctgcagcgaagatgagctgctggagaaatgcatccagtccttcgattcagctggcagcctgtgccacgaggaccacatgctcaacatggtgctggccatgcacagctgggtgctgccgtccgccgacctggctgcccgcctgctgacctcataccagaaggccacaggggacacccaggagctgagacggctgcagatctgtcacctggtcaggtactggctgatgcgacaccctgaggtgatgcaccaggatccccagctagaagaagtcataggtcgtttctgggccaccgtggcccgggagggcaactcagcccagagaagactgggagactcttctgacctcctgagccctggtggccctggccccccactcccaatgagcagcccaggcctgggcaaaaagcgcaaagtgtccttgcttttcgaccacttggagacgggggagctggctcagcacctcacctacctggagttccggtccttccaggctatcacgccccaggacctgcggagctacgttttgcagggctcagtacgaggctgcccggccctggagggctccgtaggtctcagcaacagcgtgtcccgctgggtgcaggtgatggtgctgagccgtcccgggcccctacagcgtgcacaggtgctggacaagttcattcacgtggcacagaggctccaccagctgcagaatttcaacacgctgatggcagtcacagggggcctgtgtcacagtgccatctccagactcaaggactcccatgcccacctgagccctgacagcaccaaggagctggtggccctccaagggcagcatccaccctgcagcgccaatgaggatctgctgcacctgctcacgctctccctggacctcttctacacggaagacgagatctatgagctttcttatgcccgggagccgcgttgtcccaagagcctgccaccctcccccttcaatgcacctctggtggtggagtgggcccctggtgtgacacccaagccggacagggtcacactgggtcggcatgtggagcagctggtggagtctgtgttcaagaattatgaccctgaaggccgaggaacaatctctcaggaggactttgagcgactctcgggcaattttcccttcgcctgccatgggcttcacccacccccacgccaggggagaggatccttcagcagagaggagctgacagggtacctgctccgggccagcgccatctgctccaagttgggcctggccttcctgcacaccttccatgaggtcaccttccgaaagcctaccttctgcgacagctgcagtggcttcctctggggtgtcaccaagcaaggctaccgctgtcgggagtgcgggctgtgttgccacaaacactgcagagaccaggtgaaggtagaatgtaagaagaggccaggggccaagggcgatgcaggaccccccggagctcctgtcccatccacaccagctccccatgccagctgtggctccgaggaaaatcactcctacacgctatccctggagcctgagactgggtgccagcttcgccatgcctggacccagactgaatccccacacccttcctgggaaacagatacggtcccctgcccggtgatggacccaccatcaactgcatcctccaagctggattcctagacatctcttggtctcctctcttcctcactcccttcccccagtcagtcctgagtcctgccgtcagactctggcagggctcccagaggtaggcctccagaggcatccgccttcccatccacactgcctttagtggtacgtccgtcatctttttccctggaagtgactttcctcttttgcatcctggtggatgctaatcctgctccctttccctgcacttagtatctgtgcggctgtgtgttggatacatttagactcaggcctcattctaccaactccctacatctccatttctttttttttttgagacagagtcttgctctgtcacccaggctggagtgcaatgatgcaatctcagctcactgcaacttccgcctcctgggttcaagtgattcttctgcctcagcctcccaagtagctgggattacaggcacgcgccaccatgcccggctaatttttgtatttttagtagagacggggtttccccatgttggccaagatggtctcaaactcctgacctcatgatccaccagcctcagcctcccaaagtgctgggaatacaggcgtgagccaccacgcccagctcctgtttttctgcatagaatgtgctccctctgacagcctatactttttccctctttatctcgttgaacgtctgtctttcctcaacaggagcatcaactccaggagaacagggatttctatcaatgtcattcactgctgcatccccagtgcctagaacagggctggcaggtggtaggcgcctgacagatgcttgtctgatgcctgaatgtctccttacccatgcccacggcacaggatagatgtgctatagggcaaagaactttgagggtcgagcagcaggggcccattcagtcccagggagcagagacccccccaaccccttcacaaaccccaacacccctgacttggcccccacagagagaggtcctacagctgtcataaattaaatttattctctgga

SEQ ID NO: 174229 - DNA, 2942 bp, Homo sapiens
  Payload ID: 14195
  Gene Symbol: RASGRP4
  Gene Name: RAS guanyl releasing protein 4
  Uniprot ID: Q8TDF6
  ENST ID: ENST00000614135
  CDS Start-End: 215-1960
atccccgtgtgggggaggggggccttcggtctctccccagcctcttccttccccctggcctgagggtgggtggggaggggcagttcctctttccttcccaagcaccgaggaggccccagctccctaggggctgagaagctggagtcctgggcaaggggaggagctgagccctactcttgcaagacccccggcctcctcaccccacgcgggaagcatgaacagaaaagacagtaagaggaagtcccaccaggaatgcaccggaaaaataggagggcgaggccggccccgccaagtgcgccgccacaagacatgccccagccctcgggaaatcagcaaggtcatggcttccatgaacctgggcctgctgagtgagggcggctgcagcgaagatgagctgctggagaaatgcatccagtccttcgattcagctggcagcctgtgccacgaggaccacatgctcaacatggtgctggccatgcacagctgggtgctgccgtccgccgacctggctgcccgcctgctgacctcataccagaaggccacaggggacacccaggagctgagacggctgcagatctgtcacctggtcaggtactggctgatgcgacaccctgaggtgatgcaccaggatccccagctagaagaagtcataggtcgtttctgggccaccgtggcccgggagggcaactcagcccagagaagactgggagactcttctgacctcctgagccctggtggccctggccccccactcccaatgagcagcccaggcctgggcaaaaagcgcaaagtgtccttgcttttcgaccacttggagacgggggagctggctcagcacctcacctacctggagttccggtccttccaggctatcacgccccaggacctgcggagctacgttttgcagggctcagtacgaggctgcccggccctggagggctccgtaggtctcagcaacagcgtgtcccgctgggtgcaggtgatggtgctgagccgtcccgggcccctacagcgtgcacaggtgctggacaagttcattcacgtggcacagaggctccaccagctgcagaatttcaacacgctgatggcagtcacagggggcctgtgtcacagtgccatctccagactcaaggactcccatgcccacctgagccctgacagcaccaagctctccctggacctcttctacacggaagacgagatctatgagctttcttatgcccgggagccgcgttgtcccaagagcctgccaccctcccccttcaatgcacctctggtggtggagtgggcccctggtgtgacacccaagccggacagggtcacactgggtcggcatgtggagcagctggtggagtctgtgttcaagaattatgaccctgaaggccgaggaacaatctctcaggaggactttgagcgactctcgggcaattttcccttcgcctgccatgggcttcacccacccccacgccaggggagaggatccttcagcagagaggagctgacagggtacctgctccgggccagcgccatctgctccaagttgggcctggccttcctgcacaccttccatgaggtcaccttccgaaagcctaccttctgcgacagctgcagtggcttcctctggggtgtcaccaagcaaggctaccgctgtcgggagtgcgggctgtgttgccacaaacactgcagagaccaggtgaaggtagaatgtaagaagaggccaggggccaagggcgatgcaggaccccccggagctcctgtcccatccacaccagctccccatgccagctgtggctccgaggaaaatcactcctacacgctatccctggagcctgagactgggtgccagcttcgccatgcctggacccagactgaatccccacacccttcctgggaaacagatacggtcccctgcccggtgatggacccaccatcaactgcatcctccaagctggattcctagacatctcttggtctcctctcttcctcactcccttcccccagtcagtcctgagtcctgccgtcagactctggcagggctcccagaggtaggcctccagaggcatccgccttcccatccacactgcctttagtggtacgtccgtcatctttttccctggaagtgactttcctcttttgcatcctggtggatgctaatcctgctccctttccctgcacttagtatctgtgcggctgtgtgttggatacatttagactcaggcctcattctaccaactccctacatctccatttctttttttttttgagacagagtcttgctctgtcacccaggctggagtgcaatgatgcaatctcagctcactgcaacttccgcctcctgggttcaagtgattcttctgcctcagcctcccaagtagctgggattacaggcacgcgccaccatgcccggctaatttttgtatttttagtagagacggggtttccccatgttggccaagatggtctcaaactcctgacctcatgatccaccagcctcagcctcccaaagtgctgggaatacaggcgtgagccaccacgcccagctcctgtttttctgcatagaatgtgctccctctgacagcctatactttttccctctttatctcgttgaacgtctgtctttcctcaacaggagcatcaactccaggagaacagggatttctatcaatgtcattcactgctgcatccccagtgcctagaacagggctggcaggtggtaggcgcctgacagatgcttgtctgatgcctgaatgtctccttacccatgcccacggcacaggatagatgtgctatagggcaaagaactttgagggtcgagcagcaggggcccattcagtcccagggagcagagacccccccaaccccttcacaaaccccaacacccctgacttggcccccacagagagaggtcctacagctgtcataaattaaatttattctctgga

SEQ ID NO: 174230 - DNA, 3217 bp, Homo sapiens
  Payload ID: 14195
  Gene Symbol: RASGRP4
  Gene Name: RAS guanyl releasing protein 4
  Uniprot ID: Q8TDF6
  ENST ID: ENST00000615439
  CDS Start-End: 215-2236
atccccgtgtgggggaggggggccttcggtctctccccagcctcttccttccccctggcctgagggtgggtggggaggggcagttcctctttccttcccaagcaccgaggaggccccagctccctaggggctgagaagctggagtcctgggcaaggggaggagctgagccctactcttgcaagacccccggcctcctcaccccacgcgggaagcatgaacagaaaagacagtaagaggaagtcccaccaggaatgcaccggaaaaataggagggcgaggccggccccgccaagtgcgccgccacaagacatgccccagccctcgggaaatcagcaaggtcatggcttccatgaacctgggcctgctgagtgagggcggctgcagcgaagatgagctgctggagaaatgcatccagtccttcgattcagctggcagcctgtgccacgaggaccacatgctcaacatggtgctggccatgcacagctgggtgctgccgtccgccgacctggctgcccgcctgctgacctcataccagaaggccacaggggacacccaggagctgagacggctgcagatctgtcacctggtcaggtactggctgatgcgacaccctgaggtgatgcaccaggatccccagctagaagaagtcataggtcgtttctgggccaccgtggcccgggagggcaactcagcccagagaagactgggagactcttctgacctcctgagccctggtggccctggccccccactcccaatgagcagcccaggcctgggcaaaaagcgcaaagtgtccttgcttttcgaccacttggagacgggggagctggctcagcacctcacctacctggagttccggtccttccaggctatcacgccccaggacctgcggagctacgttttgcagggctcagtacgaggctgcccggccctggagggctccgtaggtctcagcaacagcgtgtcccgctgggtgcaggtgatggtgctgagccgtcccgggcccctacagcgtgcacaggtgctggacaagttcattcacgtggcacagaggctccaccagctgcagaatttcaacacgctgatggcagtcacagggggcctgtgtcacagtgccatctccagactcaaggactcccatgcccacctgagccctgacagcaccaaggccctcctggagctcactgagctccttgcctcccacaacaactacgcccgctaccgccgcacctgggctggctgcgcgggtttccggctgcctgtactgggcgtgcacctcaaggacctggtgtccctgcatgaggcacagcccgacaggttgcctgacggccgcctgcacctacccaagctgaacaacctctacctgcggctgcaggagctggtggccctccaagggcagcatccaccctgcagcgccaatgaggatctgctgcacctgctcacgctctccctggacctcttctacacggaagacgagatctatgagctttcttatgcccgggagccgcgttgtcccaagagcctgccaccctcccccttcaatgcacctctggtggtggagtgggcccctggtgtgacacccaagccggacagggtcacactgggtcggcatgtggagcagctggtggagtctgtgttcaagaattatgaccctgaaggccgaggaacaatctctcaggaggactttgagcgactctcgggcaattttcccttcgcctgccatgggcttcacccacccccacgccaggggagaggatccttcagcagagaggagctgacagggtacctgctccgggccagcgccatctgctccaagttgggcctggccttcctgcacaccttccatgaggtcaccttccgaaagcctaccttctgcgacagctgcagtggcttcctctggggtgtcaccaagcaaggctaccgctgtcgggagtgcgggctgtgttgccacaaacactgcagagaccaggtgaaggtagaatgtaagaagaggccaggggccaagggcgatgcaggaccccccggagctcctgtcccatccacaccagctccccatgccagctgtggctccgaggaaaatcactcctacacgctatccctggagcctgagactgggtgccagcttcgccatgcctggacccagactgaatccccacacccttcctgggaaacagatacggtcccctgcccggtgatggacccaccatcaactgcatcctccaagctggattcctagacatctcttggtctcctctcttcctcactcccttcccccagtcagtcctgagtcctgccgtcagactctggcagggctcccagaggtaggcctccagaggcatccgccttcccatccacactgcctttagtggtacgtccgtcatctttttccctggaagtgactttcctcttttgcatcctggtggatgctaatcctgctccctttccctgcacttagtatctgtgcggctgtgtgttggatacatttagactcaggcctcattctaccaactccctacatctccatttctttttttttttgagacagagtcttgctctgtcacccaggctggagtgcaatgatgcaatctcagctcactgcaacttccgcctcctgggttcaagtgattcttctgcctcagcctcccaagtagctgggattacaggcacgcgccaccatgcccggctaatttttgtatttttagtagagacggggtttccccatgttggccaagatggtctcaaactcctgacctcatgatccaccagcctcagcctcccaaagtgctgggaatacaggcgtgagccaccacgcccagctcctgtttttctgcatagaatgtgctccctctgacagcctatactttttccctctttatctcgttgaacgtctgtctttcctcaacaggagcatcaactccaggagaacagggatttctatcaatgtcattcactgctgcatccccagtgcctagaacagggctggcaggtggtaggcgcctgacagatgcttgtctgatgcctgaatgtctccttacccatgcccacggcacaggatagatgtgctatagggcaaagaactttgagggtcgagcagcaggggcccattcagtcccagggagcagagacccccccaaccccttcacaaaccccaacacccctgacttggcccccacagagagaggtcctacagctgtcataaattaaatttattctctgg

SEQ ID NO: 174231 - DNA, 2927 bp, Homo sapiens
  Payload ID: 14195
  Gene Symbol: RASGRP4
  Gene Name: RAS guanyl releasing protein 4
  Uniprot ID: Q8TDF6
  ENST ID: ENST00000617966
  CDS Start-End: 215-1945
atccccgtgtgggggaggggggccttcggtctctccccagcctcttccttccccctggcctgagggtgggtggggaggggcagttcctctttccttcccaagcaccgaggaggccccagctccctaggggctgagaagctggagtcctgggcaaggggaggagctgagccctactcttgcaagacccccggcctcctcaccccacgcgggaagcatgaacagaaaagacagtaagaggaagtcccaccaggaatgcaccggaaaaataggagggcgaggccggccccgccaagtgcgccgccacaagacatgccccagccctcgggaaatcagcaaggtcatggcttccatgaacctgggcctgctgagtgagggcggctgcagcgaagatgagctgctggagaaatgcatccagtccttcgattcagctggcagcctgtgccacgaggaccacatgctcaacatggtgctggccatgcacagctgggtgctgccgtccgccgacctggctgcccgcctgctgacctcataccagaaggccacaggggacacccaggagctgagacggctgcagatctgtcacctggtcaggtactggctgatgcgacaccctgaggtgatgcaccaggatccccagctagaagaagtcataggtcgtttctgggccaccgtggcccgggagggcaactcagcccagagaagactgggagactcttctgacctcctgagccctggtggccctggccccccactcccaatgagcagcccaggcctgggcaaaaagcgcaaagtgtccttgcttttcgaccacttggagacgggggagctggctcagcacctcacctacctggagttccggtccttccaggctatcacggccctcctggagctcactgagctccttgcctcccacaacaactacgcccgctaccgccgcacctgggctggctgcgcgggtttccggctgcctgtactgggcgtgcacctcaaggacctggtgtccctgcatgaggcacagcccgacaggttgcctgacggccgcctgcacctacccaagctgaacaacctctacctgcggctgcaggagctggtggccctccaagggcagcatccaccctgcagcgccaatgaggatctgctgcacctgctcacgctctccctggacctcttctacacggaagacgagatctatgagctttcttatgcccgggagccgcgttgtcccaagagcctgccaccctcccccttcaatgcacctctggtggtggagtgggcccctggtgtgacacccaagccggacagggtcacactgggtcggcatgtggagcagctggtggagtctgtgttcaagaattatgaccctgaaggccgaggaacaatctctcaggaggactttgagcgactctcgggcaattttcccttcgcctgccatgggcttcacccacccccacgccaggggagaggatccttcagcagagaggagctgacagggtacctgctccgggccagcgccatctgctccaagttgggcctggccttcctgcacaccttccatgaggtcaccttccgaaagcctaccttctgcgacagctgcagtggcttcctctggggtgtcaccaagcaaggctaccgctgtcgggagtgcgggctgtgttgccacaaacactgcagagaccaggtgaaggtagaatgtaagaagaggccaggggccaagggcgatgcaggaccccccggagctcctgtcccatccacaccagctccccatgccagctgtggctccgaggaaaatcactcctacacgctatccctggagcctgagactgggtgccagcttcgccatgcctggacccagactgaatccccacacccttcctgggaaacagatacggtcccctgcccggtgatggacccaccatcaactgcatcctccaagctggattcctagacatctcttggtctcctctcttcctcactcccttcccccagtcagtcctgagtcctgccgtcagactctggcagggctcccagaggtaggcctccagaggcatccgccttcccatccacactgcctttagtggtacgtccgtcatctttttccctggaagtgactttcctcttttgcatcctggtggatgctaatcctgctccctttccctgcacttagtatctgtgcggctgtgtgttggatacatttagactcaggcctcattctaccaactccctacatctccatttctttttttttttgagacagagtcttgctctgtcacccaggctggagtgcaatgatgcaatctcagctcactgcaacttccgcctcctgggttcaagtgattcttctgcctcagcctcccaagtagctgggattacaggcacgcgccaccatgcccggctaatttttgtatttttagtagagacggggtttccccatgttggccaagatggtctcaaactcctgacctcatgatccaccagcctcagcctcccaaagtgctgggaatacaggcgtgagccaccacgcccagctcctgtttttctgcatagaatgtgctccctctgacagcctatactttttccctctttatctcgttgaacgtctgtctttcctcaacaggagcatcaactccaggagaacagggatttctatcaatgtcattcactgctgcatccccagtgcctagaacagggctggcaggtggtaggcgcctgacagatgcttgtctgatgcctgaatgtctccttacccatgcccacggcacaggatagatgtgctatagggcaaagaactttgagggtcgagcagcaggggcccattcagtcccagggagcagagacccccccaaccccttcacaaaccccaacacccctgacttggcccccacagagagaggtcctacagctgtcataaattaaatttattctctgga

SEQ ID NO: 174232 - DNA, 3313 bp, Homo sapiens
  Payload ID: 14195
  Gene Symbol: RASGRP4
  Gene Name: RAS guanyl releasing protein 4
  ENST ID: ENST00000618320
  CDS Start-End: 215-2068
atccccgtgtgggggaggggggccttcggtctctccccagcctcttccttccccctggcctgagggtgggtggggaggggcagttcctctttccttcccaagcaccgaggaggccccagctccctaggggctgagaagctggagtcctgggcaaggggaggagctgagccctactcttgcaagacccccggcctcctcaccccacgcgggaagcatgaacagaaaagacagtaagaggaagtcccaccaggaatgcaccggaaaaataggagggcgaggccggccccgccaagtgcgccgccacaagacatgccccagccctcgggaaatcagcaaggtcatggcttccatgaacctgggcctgctgagtgagggcggctgcagcgaagatgagctgctggagaaatgcatccagtccttcgattcagctggcagcctgtgccacgaggaccacatgctcaacatggtgctggccatgcacagctgggtgctgccgtccgccgacctggctgcccgcctgctgacctcataccagaaggccacaggggacacccaggagctgagacggctgcagatctgtcacctggtcaggtactggctgatgcgacaccctgaggtgatgcaccaggatccccagctagaagaagtcataggtcgtttctgggccaccgtggcccgggagggcaactcagcccagagaagactgggagactcttctgacctcctgagccctggtggccctggccccccactcccaatgagcagcccaggcctgggcaaaaagcgcaaagtgtccttgcttttcgaccacttggagacgggggagctggctcagcacctcacctacctggagttccggtccttccaggctatcacgccccaggacctgcggagctacgttttgcagggctcagtacgaggctgcccggccctggagggctccgtaggtctcagcaacagcgtgtcccgctgggtgcaggtgatggtgctgagccgtcccgggcccctacagcgtgcacaggtgctggacaagttcattcacgtggcacagaggctccaccagctgcagaatttcaacacgctgatggcagtcacagggggcctgtgtcacagtgccatctccagactcaaggactcccatgcccacctgagccctgacagcaccaaggccctcctggagctcactgagctccttgcctcccacaacaactacgcccgctaccgccgcacctgggctggctgcgcgggtttccggctgcctgtactgggcgtgcacctcaaggacctggtgtccctgcatgaggcacagcccgacaggttgcctgacggccgcctgcacctacccaagctgaacaacctctacctgcggctgcaggagctggtggccctccaagggcagcatccaccctgcagcgccaatgaggatctgctgcacctgctcacgctctccctggacctcttctacacggaagacgagatctatgagctttcttatgcccgggagccgcgttgtcccaagagcctgccaccctcccccttcaatgcacctctggtggtggagtgggcccctggtgtgacacccaagccggacagggtcacactgggtcggcatgtggagcagctggtggagtctgtgttcaagaattatgaccctgaaggccgaggaacaatctctcaggaggactttgagcgactctcgggcaattttcccttcgcctgccatgggcttcacccacccccacgccaggggagaggatccttcagcagagaggagctgacagggtacctgctccgggccagcgccatctgctccaagttgggcctggccttcctgcacaccttccatgaggtcaccttccgaaagcctaccttctgcgacagctgcagtggcttcctctggggtgtcaccaagcaaggctaccgctgtcggggtgagtggggtgtcagtgagtgggagggaagccttggcccgcaggctggaagaatggatgacacagatcggacccctgccgctgccttcccccagagtgcgggctgtgttgccacaaacactgcagagaccaggtgaaggtagaatgtaagaagaggccaggggccaagggcgatgcaggaccccccggagctcctgtcccatccacaccagctccccatgccagctgtggctccgaggaaaatcactcctacacgctatccctggagcctgagactgggtgccagcttcgccatgcctggacccagactgaatccccacacccttcctgggaaacagatacggtcccctgcccggtgatggacccaccatcaactgcatcctccaagctggattcctagacatctcttggtctcctctcttcctcactcccttcccccagtcagtcctgagtcctgccgtcagactctggcagggctcccagaggtaggcctccagaggcatccgccttcccatccacactgcctttagtggtacgtccgtcatctttttccctggaagtgactttcctcttttgcatcctggtggatgctaatcctgctccctttccctgcacttagtatctgtgcggctgtgtgttggatacatttagactcaggcctcattctaccaactccctacatctccatttctttttttttttgagacagagtcttgctctgtcacccaggctggagtgcaatgatgcaatctcagctcactgcaacttccgcctcctgggttcaagtgattcttctgcctcagcctcccaagtagctgggattacaggcacgcgccaccatgcccggctaatttttgtatttttagtagagacggggtttccccatgttggccaagatggtctcaaactcctgacctcatgatccaccagcctcagcctcccaaagtgctgggaatacaggcgtgagccaccacgcccagctcctgtttttctgcatagaatgtgctccctctgacagcctatactttttccctctttatctcgttgaacgtctgtctttcctcaacaggagcatcaactccaggagaacagggatttctatcaatgtcattcactgctgcatccccagtgcctagaacagggctggcaggtggtaggcgcctgacagatgcttgtctgatgcctgaatgtctccttacccatgcccacggcacaggatagatgtgctatagggcaaagaactttgagggtcgagcagcaggggcccattcagtcccagggagcagagacccccccaaccccttcacaaaccccaacacccctgacttggcccccacagagagaggtcctacagctgtcataaattaaatttattctctgga

SEQ ID NO: 174233 - DNA, 2651 bp, Homo sapiens
  Payload ID: 14195
  Gene Symbol: RASGRP4
  Gene Name: RAS guanyl releasing protein 4
  Uniprot ID: Q8TDF6
  ENST ID: ENST00000622174
  CDS Start-End: 215-1669
atccccgtgtgggggaggggggccttcggtctctccccagcctcttccttccccctggcctgagggtgggtggggaggggcagttcctctttccttcccaagcaccgaggaggccccagctccctaggggctgagaagctggagtcctgggcaaggggaggagctgagccctactcttgcaagacccccggcctcctcaccccacgcgggaagcatgaacagaaaagacagtaagaggaagtcccaccaggaatgcaccggaaaaataggagggcgaggccggccccgccaagtgcgccgccacaagacatgccccagccctcgggaaatcagcaaggtcatggcttccatgaacctgggcctgctgagtgagggcggctgcagcgaagatgagctgctggagaaatgcatccagtccttcgattcagctggcagcctgtgccacgaggaccacatgctcaacatggtgctggccatgcacagctgggtgctgccgtccgccgacctggctgcccgcctgctgacctcataccagaaggccacaggggacacccaggagctgagacggctgcagatctgtcacctggtcaggtactggctgatgcgacaccctgaggtgatgcaccaggatccccagctagaagaagtcataggtcgtttctgggccaccgtggcccgggagggcaactcagcccagagaagactgggagactcttctgacctcctgagccctggtggccctggccccccactcccaatgagcagcccaggcctgggcaaaaagcgcaaagtgtccttgcttttcgaccacttggagacgggggagctggctcagcacctcacctacctggagttccggtccttccaggctatcacgctctccctggacctcttctacacggaagacgagatctatgagctttcttatgcccgggagccgcgttgtcccaagagcctgccaccctcccccttcaatgcacctctggtggtggagtgggcccctggtgtgacacccaagccggacagggtcacactgggtcggcatgtggagcagctggtggagtctgtgttcaagaattatgaccctgaaggccgaggaacaatctctcaggaggactttgagcgactctcgggcaattttcccttcgcctgccatgggcttcacccacccccacgccaggggagaggatccttcagcagagaggagctgacagggtacctgctccgggccagcgccatctgctccaagttgggcctggccttcctgcacaccttccatgaggtcaccttccgaaagcctaccttctgcgacagctgcagtggcttcctctggggtgtcaccaagcaaggctaccgctgtcgggagtgcgggctgtgttgccacaaacactgcagagaccaggtgaaggtagaatgtaagaagaggccaggggccaagggcgatgcaggaccccccggagctcctgtcccatccacaccagctccccatgccagctgtggctccgaggaaaatcactcctacacgctatccctggagcctgagactgggtgccagcttcgccatgcctggacccagactgaatccccacacccttcctgggaaacagatacggtcccctgcccggtgatggacccaccatcaactgcatcctccaagctggattcctagacatctcttggtctcctctcttcctcactcccttcccccagtcagtcctgagtcctgccgtcagactctggcagggctcccagaggtaggcctccagaggcatccgccttcccatccacactgcctttagtggtacgtccgtcatctttttccctggaagtgactttcctcttttgcatcctggtggatgctaatcctgctccctttccctgcacttagtatctgtgcggctgtgtgttggatacatttagactcaggcctcattctaccaactccctacatctccatttctttttttttttgagacagagtcttgctctgtcacccaggctggagtgcaatgatgcaatctcagctcactgcaacttccgcctcctgggttcaagtgattcttctgcctcagcctcccaagtagctgggattacaggcacgcgccaccatgcccggctaatttttgtatttttagtagagacggggtttccccatgttggccaagatggtctcaaactcctgacctcatgatccaccagcctcagcctcccaaagtgctgggaatacaggcgtgagccaccacgcccagctcctgtttttctgcatagaatgtgctccctctgacagcctatactttttccctctttatctcgttgaacgtctgtctttcctcaacaggagcatcaactccaggagaacagggatttctatcaatgtcattcactgctgcatccccagtgcctagaacagggctggcaggtggtaggcgcctgacagatgcttgtctgatgcctgaatgtctccttacccatgcccacggcacaggatagatgtgctatagggcaaagaactttgagggtcgagcagcaggggcccattcagtcccagggagcagagacccccccaaccccttcacaaaccccaacacccctgacttggcccccacagagagaggtcctacagctgtcataaattaaatttattctctgga

SEQ ID NO: 174234 - DNA, 2075 bp, Homo sapiens
  Payload ID: 14196
  Gene Symbol: RHEB
  Gene Name: Ras homolog enriched in brain
  Uniprot ID: Q15382
  ENST ID: ENST00000262187
  CDS Start-End: 414-968
ggcgtaattaaaaagcggcggaagaaggtgggagggtcatgacgcagcgagtttcagtcgtgacttttctgggggcatcgcggcgtcccctttttttgcctttaaagtaaaacgtcgccccgacgcaccccccgcgtatttcggggggcggaggcggcgggccacggcgcgaagaggggcggtgctgacgccggccggtcacgtgggcgtgttgtgggggggaggggcgccgccgcgcggtcggttccgggcggttgggagcgcgcgagctagcgagcgagaggcagccgcgcccgccgccgcccctgctctgtatgccgctctctcccggcgcggccgccgccgatcacagcagcaggagccaccgccgccgcggttgatgtggttgggccggggctgaggaggccgccaagatgccgcagtccaagtcccggaagatcgcgatcctgggctaccggtctgtggggaaatcctcattgacgattcaatttgttgaaggccaatttgtggactcctacgatccaaccatagaaaacacttttacaaagttgatcacagtaaatggacaagaatatcatcttcaacttgtagacacagccgggcaagatgaatattctatctttcctcagacatactccatagatattaatggctatattcttgtgtattctgttacatcaatcaaaagttttgaagtgattaaagttatccatggcaaattgttggatatggtggggaaagtacaaatacctattatgttggttgggaataagaaagacctgcatatggaaagggtgatcagttatgaagaagggaaagctttggcagaatcttggaatgcagcttttttggaatcttctgctaaagaaaatcagactgctgtggatgtttttcgaaggataattttggaggcagaaaaaatggacggggcagcttcacaaggcaagtcttcatgctcggtgatgtgattctgctgcaaagcctgaggacactgggaatatattctacctgaagaagcaaactgcccgttctccttgaagataaactatgcttcttttttcttctgttaacctgaaagatatcatttgggtcagagctcccctcccttcagattatgttaactctgagtctgtccaaatgagttcacttccattttcaaattttaagcaatcatattttcaatttatatattgtatttcttaatattatgaccaagaattttatcggcattaatttttcagtgtagtttgttgtttaaaataatgtaatcatcaaaatgatgcatattgttacactactattaactaggcttcagtatatcagtgtttatttcattgtgttaaatgtatacttgtaaataaaatagctgcaaacctcagtcctttgtgctacttgatgtggctttcaaagaagagaagccttgtcctgagtttctcacttggcttcaggaaggccccaggttggattccagaaaccagtgaagatgtggccacaggaggaggtgtgctgaggtggctgctgaccgtggactccctgcgcagtggcctgcagatgttggggctgggttacagctgattgaagctgagtggccctggggggtctgtgaggggagttcctccccagtgatgaaattctctccttccaccctcaaatccctagaccttgactgaaatgctccgtggtcgggagcctggtcaaggaggaggagctgctgagaggcattgttcgcccttgctcatagcttagctcgatgtccgtgtcagacaggagatgattgagaacagccttgcctgtcactgtcctagaacaccctggagtttagtgttctgtgtcagagtcttgggagcctccttcagacccagatgacgggcctccctctgtccaaggagcagctgtaaaggagaagagggatttcatttgtttggtggctgttaccttgtctgtaagtcaaacttggagttgagcagtgctttttaaacgattcccttttgcagctaaaatttcacagggctatttctaatacgtaagcaaatgttaccattgactttattaataaaatatagttttgctttgca

SEQ ID NO: 174235 - DNA, 501 bp, Homo sapiens
  Payload ID: 14196
  Gene Symbol: RHEB
  Gene Name: Ras homolog enriched in brain
  ENST ID: ENST00000470370
  CDS Start-End: 443-501
atggaggggttcaaagtcactaattgttcaaatatcaacatggaacctgggatccagcctttattggcagcctgaatccatgctcttgtctctgttctcttgatttcctcctctgcattttgaggagttgggaccgcgaggtgttctggctcttgggtgagccttccctagtcagtcaaggaaatcctcattgacgattcaatttgttgaaggccaatttgtggactcctacgatccaaccatagaaaacacttttacaaagttgatcacagtaaatggacaagaatatcatcttcaacttgtagacacagccgggcaagatgaatattctatctttcctcagacatactccatagatattaatggctatattcttgtgtattctgttacatcaatcaaaagttttgaagtgattaaagttatccatggcaaattgttggatatggtggggaaagtacaaatacctattatgttggttgggaataagaaagacctgcatat

SEQ ID NO: 174236 - DNA, 1153 bp, Homo sapiens
  Payload ID: 14196
  Gene Symbol: RHEB
  Gene Name: Ras homolog enriched in brain
  ENST ID: ENST00000478470
  CDS Start-End: 341-484
ggcatcgcggcgtcccctttttttgcctttaaagtaaaacgtcgccccgacgcaccccccgcgtatttcggggggcggaggcggcgggccacggcgcgaagaggggcggtgctgacgccggccggtcacgtgggcgtgttgtgggggggaggggcgccgccgcgcggtcggttccgggcggttgggagcgcgcgagctagcgagcgagaggcagccgcgcccgccgccgcccctgctctgtatgccgctctctcccggcgcggccgccgccgatcacagcagcaggagccaccgccgccgcggttgatgtggttgggccggggctgaggaggccgccaagatgccgcagtccaagtcccggaagatcgcgatcctgggctaccggtctgtgggttcctcaagccaggacctacgcacctgttgtgagtggtgttatagttctgcagggcgcacaggtgcatccccatgggcacatttaatttagggaaatcctcattgacgattcaatttgttgaaggccaatttgtggactcctacgatccaaccatagaaaacacttttacaaagttgatcacagtaaatggacaagaatatcatcttcaacttgtagacacagccgggcaagatgaatattctatctttcctcagacatactccatagatattaatggctatattcttgtgtattctgttacatcaatcaaaagttttgaagtgattaaagttatccatggcaaattgttggatatggtggggaaagtacaaatacctattatgttggttgggaataagaaagacctgcatatggaaagggtgatcagttatgaagaagggaaagctttggcagaatcttggaatgcagcttttttggaatcttctgctaaagaaaatcagactgctgtggatgtttttcgaaggataattttggaggcagaaaaaatggacggggcagcttcacaaggcaagtcttcatgctcggtgatgtgattctgctgcaaagcctgaggacactgggaatatattctacctgaagaagcaaactgcccgttctccttgaagataaactatgcttcttttttcttctgttaacctgaaagatatcatttgggtcagagctcccctcccttcagattatgttaactctgagtctgtc

SEQ ID NO: 174237 - DNA, 744 bp, Homo sapiens
  Payload ID: 14196
  Gene Symbol: RHEB
  Gene Name: Ras homolog enriched in brain
  ENST ID: ENST00000496004
  CDS Start-End: 487-726
accggttggaagtttgaagccttcaaacctagccggcgcccaacagcgcggtagcagcgaggtgtatttttagctcccgggcgggcagccccgcccccccctccccgcctccttgtttcccccaatgggagatggagtttccgacacgtcatcgcgcggctgtgcaggagctgtccaatcggcgctcggggagaatggcgtaattaaaaagcggcggaagaagggaaatcctcattgacgattcaatttgttgaaggccaatttgtggactcctacgatccaaccatagaaaacacttttacaaagttgatcacagtaaatggacaagaatatcatcttcaacttgtagacacagccgggcaagatgaatattctatctttcctcagacatactccatagatattaatggctatattcttgtgtattctgttacatcaatcaaaagttttgaagtgattaaagttatccatggcaaattgttggatatggtggggaaagtacaaatacctattatgttggttgggaataagaaagacctgcatatggaaagggtgatcagttatgaagaagggaaagctttggcagaatcttggaatgcagcttttttggaatcttctgctaaagaaaatcagactgctgtggatgtttttcgaaggataattttggaggcagaaaaaatggacggggcagcttcacaaggcaagtcttcatgctcggtgatgtgattctgctgcaaagcctga

SEQ ID NO: 174238 - DNA, 900 bp, Homo sapiens
  Payload ID: 14196
  Gene Symbol: RHEB
  Gene Name: Ras homolog enriched in brain
  ENST ID: ENST00000472642
  CDS Start-End: 416-655
ggccgccgaggagtccgggtctcgtctggggaagtgaggcggcgccggggagccgcgctagaggctgccgcgagggagtcacacctgcctccccgccttcgccgcgggcgcgcgtgaccggggctggcggtctcccccaccccgcccccgatggaaatcctcattgacgattcaatttgttgaaggccaatttgtggactcctacgatccaaccatagaaaacacttttacaaagttgatcacagtaaatggacaagaatatcatcttcaacttgtagacacagccgggcaagatgaatattctatctttcctcagacatactccatagatattaatggctatattcttgtgtattctgttacatcaatcaaaagttttgaagtgattaaagttatccatggcaaattgttggatatggtggggaaagtacaaatacctattatgttggttgggaataagaaagacctgcatatggaaagggtgatcagttatgaagaagggaaagctttggcagaatcttggaatgcagcttttttggaatcttctgctaaagaaaatcagactgctgtggatgtttttcgaaggataattttggaggcagaaaaaatggacggggcagcttcacaaggcaagtcttcatgctcggtgatgtgattctgctgcaaagcctgaggacactgggaatatattctacctgaagaagcaaactgcccgttctccttgaagataaactatgcttcttttttcttctgttaacctgaaagatatcatttgggtcagagctcccctcccttcagattatgttaactctgagtctgtccaaatgagttcacttccattttcaaattttaagcaatcatattttcaatttatatattgtatttcttaatattatgacc

SEQ ID NO: 174239 - DNA, 1210 bp, Homo sapiens
  Payload ID: 14197
  Gene Symbol: RHEBL1
  Gene Name: Ras homolog enriched in brain like 1
  Uniprot ID: Q8TAI7
  ENST ID: ENST00000301068
  CDS Start-End: 241-792
cggcgcggcgcggctcagtagttccccgggcgcccggctccctggcgttagacgtgctgtgttgtgatcacgtgggcagctccgggcgcggcgcttgttttggtttccttctaacttgcccacggcagcttcggggtgagcgactttcctgcaccagctgccgcgcctgctcacaccctgacctcgttttcgggctctctgagcccgcagttccgcaagcccctggggcgggctcctgccatgccgctagtccgctacaggaaggtggtcatcctcggataccgctgtgtagggaagacatctttggcacatcaatttgtggaaggcgagttctcggaaggctacgatcctacagtggagaatacttacagcaagatagtgactcttggcaaagatgagtttcacctacatctggtggacacagcagggcaggatgagtacagcattctgccctattcattcatcattggggtccatggttatgtgcttgtgtattctgtcacctctctgcatagcttccaagtcattgagagtctgtaccaaaagctacatgaaggccatgggaaaacccgggtgccagtggttctagtggggaacaaggcagatctctctccagagagagaggtacaggcagttgaaggaaagaagctggcagagtcctggggtgcgacatttatggagtcatctgctcgagagaatcagctgactcaaggcatcttcaccaaagtcatccaggagattgcccgtgtggagaattcctatgggcaagagcgtcgctgccatctcatgtgagcccttgggtgtggggtaactgccttgcttctgcccccggcacttgccatgttccagtggggggcagatcctcaggacttcacgggtatggttgccagctgtgttcctggcccctggacacacagtgtggcatcctcatgtttgcacactttccccaggctccagtggcctggatgtcaatgtttacaaaggggcaaggacctctcatggacactggcctctagccctctgtttttgtttgatgaattctgttataacctatggggtcaggatatgagtcctgggcattatttatccaggacccatcctcttgggtgggttttgggtgttggctgggtaaggggagccggggacttctgaaatagagctggctccctggggtgacaatgtatatatgcaaataaattgagaaatcttt

SEQ ID NO: 174240 - DNA, 1063 bp, Homo sapiens
  Payload ID: 14197
  Gene Symbol: RHEBL1
  Gene Name: Ras homolog enriched in brain like 1
  ENST ID: ENST00000420065
  CDS Start-End: 163-291
gctccgggcgcggcgcttgttttggtttccttctaacttgcccacggcagcttcggggtgagcgactttcctgcaccagctgccgcgcctgctcacaccctgacctcgttttcgggctctctgagcccgcagttccgcaagcccctggggcgggctcctgccatgccgctagtccgctacaggaaggtggtcatcctcggataccgctgtgtagggaagacatctttggcacatcaatttgtggaaggcgagttctcggaaggctacgatcctacagtggagaatagatgagtacagcattctgccctattcattcatcattggggtccatggttatgtgcttgtgtattctgtcacctctctgcatagcttccaagtcattgagagtctgtaccaaaagctacatgaaggccatgggaaaacccgggtgccagtggttctagtggggaacaaggcagatctctctccagagagagaggtacaggcagttgaaggaaagaagctggcagagtcctggggtgcgacatttatggagtcatctgctcgagagaatcagctgactcaaggcatcttcaccaaagtcatccaggagattgcccgtgtggagaattcctatgggcaagagcgtcgctgccatctcatgtgagcccttgggtgtggggtaactgccttgcttctgcccccggcacttgccatgttccagtggggggcagatcctcaggacttcacgggtatggttgccagctgtgttcctggcccctggacacacagtgtggcatcctcatgtttgcacactttccccaggctccagtggcctggatgtcaatgtttacaaaggggcaaggacctctcatggacactggcctctagccctctgtttttgtttgatgaattctgttataacctatggggtcaggatatgagtcctgggcattatttatccaggacccatcctcttgggtgggttttgggtgttggctgggtaaggggagccggggacttctgaaatagagctggctccctggggtgacaatgtatatatgcaaataaattgagaaatctt

SEQ ID NO: 174241 - DNA, 1261 bp, Homo sapiens
  Payload ID: 14197
  Gene Symbol: RHEBL1
  Gene Name: Ras homolog enriched in brain like 1
  Uniprot ID: Q8TAI7
  ENST ID: ENST00000550797
  CDS Start-End: 241-447
cggcgcggcgcggctcagtagttccccgggcgcccggctccctggcgttagacgtgctgtgttgtgatcacgtgggcagctccgggcgcggcgcttgttttggtttccttctaacttgcccacggcagcttcggggtgagcgactttcctgcaccagctgccgcgcctgctcacaccctgacctcgttttcgggctctctgagcccgcagttccgcaagcccctggggcgggctcctgccatgccgctagtccgctacaggaaggtggtcatcctcggataccgctgtgtagtccgaaaggacagaggatgtgaatgtggatggatgatttggatacaactgtcacactgctccccacagggaagacatctttggcacatcaatttgtggaaggcgagttctcggaaggctacgatcctacagtggagaatacttacagcaagatagtgactcttggcaaagatgagtttcacctacatctggtggacacagcagggcaggatgagtacagcattctgccctattcattcatcattggggtccatggttatgtgcttgtgtattctgtcacctctctgcatagcttccaagtcattgagagtctgtaccaaaagctacatgaaggccatgggaaaacccgggtgccagtggttctagtggggaacaaggcagatctctctccagagagagaggtacaggcagttgaaggaaagaagctggcagagtcctggggtgcgacatttatggagtcatctgctcgagagaatcagctgactcaaggcatcttcaccaaagtcatccaggagattgcccgtgtggagaattcctatgggcaagagcgtcgctgccatctcatgtgagcccttgggtgtggggtaactgccttgcttctgcccccggcacttgccatgttccagtggggggcagatcctcaggacttcacgggtatggttgccagctgtgttcctggcccctggacacacagtgtggcatcctcatgtttgcacactttccccaggctccagtggcctggatgtcaatgtttacaaaggggcaaggacctctcatggacactggcctctagccctctgtttttgtttgatgaattctgttataacctatggggtcaggatatgagtcctgggcattatttatccaggacccatcctcttgggtgggttttgggtgttggctgggtaaggggagccggggacttctgaaatagagctggctccctggggtgacaatgtatatatgcaaa

SEQ ID NO: 174242 - DNA, 380 bp, Homo sapiens
  Payload ID: 14197
  Gene Symbol: RHEBL1
  Gene Name: Ras homolog enriched in brain like 1
  ENST ID: ENST00000550675
  CDS Start-End: 53-380
ttcgggctctctgagcccgcagttccgcaagcccctggggcgggctcctgccatgccgctagtccgctacaggaaggtggtcatcctcggataccgctgtgtagggaagacatctttggcacatcaatttgtggaaggcgagttctcggaaggctacgatcctacagtggagaatacttacagcaagatagtgactcttggcaaagatgagtttcacctacatctggtggacacagcagggcaggtaccagttggggatgagtacagcattctgccctattcattcatcattggggtccatggttatgtgcttgtgtattctgtcacctctctgcatagcttccaagtcattgagagtctgtaccaaaagctacatgaag

SEQ ID NO: 174243 - DNA, 889 bp, Homo sapiens
  Payload ID: 14198
  Gene Symbol: RHOA
  Gene Name: ras homolog family member A
  ENST ID: ENST00000454011
  CDS Start-End: 112-384
tcgttagtccacggtctggtcttcagctacccgccttcgtctccgagtttgcgactcgcggaccggcgtccccggcgcgaagaggctggactcggattcgttgcctgagcaatggctgccatccggaagaaactggtgattgttggtgatggagcctgtggaaagacatgcttgctcatagtcttcagcaaggaccagttcccagaggtgtatgtgcccacagtgtttgagaactatgtggcagatatcgaggtggatggaaagcagaaaacatcccagaaaagtggaccccagaagtcaagcatttctgtcccaacgtgcccatcatcctggttgggaataagaaggatcttcggaatgatgagcacacaaggcgggagctagccaagatgaagcaggagccggtgaaacctgaagaaggcagagatatggcaaacaggattggcgcttttgggtacatggagtgttcagcaaagaccaaagatggagtgagagaggtttttgaaatggctacgagagctgctctgcaagctagacgtgggaagaaaaaatctgggtgccttgtcttgtgaaaccttgctgcaagcacagcccttatgcggttaattttgaagtgctgtttattaatcttagtgtatgattactggcctttttcatttatctataatttacctaagattacaaatcagaagtcatcttgctaccagtatttagaagccaactatgattattaacgatgtccaacccgtctggcccaccagggtccttttgacactgctctaacagccctcctctgcactcccacctgacacaccaggcgctaattcaaggaatttcttaacttcttgcttctttctagaaagagaaacagttggtaacttttgtgaat

SEQ ID NO: 174244 - DNA, 2031 bp, Homo sapiens
  Payload ID: 14198
  Gene Symbol: RHOA
  Gene Name: ras homolog family member A
  Uniprot ID: P61586
  ENST ID: ENST00000418115
  CDS Start-End: 386-967
aatagcaaccaggtcttttatagccccggagttcccgtgatgccccacgcggctgcaatgattggttaagggttttgcttttagggcgtggacgggctcctgagcaatagtggatgagctgtgagtgcgcgcgcgtgcgcggggccgcgacctgtgccggctcgagcccgctgggcactcggaggcgcgcacgtcgttccccgccctcccgccgccgcccgccctcgctctctcgcgctaccctcccgccgcccgcggtcctccgtcggttctctcgttagtccacggtctggtcttcagctacccgccttcgtctccgagtttgcgactcgcggaccggcgtccccggcgcgaagaggctggactcggattcgttgcctgagcaatggctgccatccggaagaaactggtgattgttggtgatggagcctgtggaaagacatgcttgctcatagtcttcagcaaggaccagttcccagaggtgtatgtgcccacagtgtttgagaactatgtggcagatatcgaggtggatggaaagcaggtagagttggctttgtgggacacagctgggcaggaagattatgatcgcctgaggcccctctcctacccagataccgatgttatactgatgtgtttttccatcgacagccctgatagtttagaaaacatcccagaaaagtggaccccagaagtcaagcatttctgtcccaacgtgcccatcatcctggttgggaataagaaggatcttcggaatgatgagcacacaaggcgggagctagccaagatgaagcaggagccggtgaaacctgaagaaggcagagatatggcaaacaggattggcgcttttgggtacatggagtgttcagcaaagaccaaagatggagtgagagaggtttttgaaatggctacgagagctgctctgcaagctagacgtgggaagaaaaaatctgggtgccttgtcttgtgaaaccttgctgcaagcacagcccttatgcggttaattttgaagtgctgtttattaatcttagtgtatgattactggcctttttcatttatctataatttacctaagattacaaatcagaagtcatcttgctaccagtatttagaagccaactatgattattaacgatgtccaacccgtctggcccaccagggtccttttgacactgctctaacagccctcctctgcactcccacctgacacaccaggcgctaattcaaggaatttcttaacttcttgcttctttctagaaagagaaacagttggtaacttttgtgaattaggctgtaactactttataactaacatgtcctgcctattatctgtcagctgcaaggtactctggtgagtcaccacttcagggctttactccgtaacagattttgttggcatagctctggggtgggcagttttttgaaaatgggctcaaccagaaaagcccaagttcatgcagctgtggcagagttacagttctgtggtttcatgttagttaccttatagttactgtgtaattagtgccacttaatgtatgttaccaaaaataaatatatctaccccagactagatgtagtattttttgtataattggatttcctaatactgtcatcctcaaagaaagtgtattggttttttaaaaaagaaagtgtatttggaaataaagtcagatggaaaattcattttttaaattcccgttttgtcactttttctgataaaagatggccatattaccccttttcggccccatgtatctcagtaccccatggagctgggctaagtaaataggaattggtttcacgcctgaggcaattagacactttggaagatggcataacctgtctcacctggacttaagcatctggctctaattcacagtgctcttttctcctcactgtatccaggttccctcccagaggagccaccagttctcatgggtggcactcagtctctcttctctccagctgactaaactttttttctgtaccagttaatttttccaactactaatagaataaaggcagttttctaaa

SEQ ID NO: 174245 - DNA, 633 bp, Homo sapiens
  Payload ID: 14198
  Gene Symbol: RHOA
  Gene Name: ras homolog family member A
  ENST ID: ENST00000445425
  CDS Start-End: 247-633
gcgctaccctcccgccgcccgcggtcctccgtcggttctctcgttagtccacggtctggtcttcagctacccgccttcgtctccgagtttgcgactcgcggaccggcgtccccggcgcgaagaggctggactcggattcgttgcctgagagatggtgtcttgctatgttgcccagacagatcttgtactcctgggctcaagttgtcctcctgcctcagcctcccaaagtgctgggattaaagatcaatggctgccatccggaagaaactggtgattgttggtgatggagcctgtggaaagacatgcttgctcatagtcttcagcaaggaccagttcccagaggtgtatgtgcccacagtgtttgagaactatgtggcagatatcgaggtggatggaaagcaggtagagttggctttgtgggacacagctgggcaggaagattatgatcgcctgaggcccctctcctacccagataccgatgttatactgatgtgtttttccatcgacagccctgatagtttagaaaacatcccagaaaagtggaccccagaagtcaagcatttctgtcccaacgtgcccatcatcctggttgggaataagaaggatcttcggaatgatgagcacacaaggcgg

SEQ ID NO: 174246 - DNA, 961 bp, Homo sapiens
  Payload ID: 14198
  Gene Symbol: RHOA
  Gene Name: ras homolog family member A
  ENST ID: ENST00000422781
  CDS Start-End: 154-717
tcgcgctaccctcccgccgcccgcggtcctccgtcggttctctcgttagtccacggtctggtcttcagctacccgccttcgtctccgagtttgcgactcgcggaccggcgtccccggcgcgaagaggctggactcggattcgttgcctgagcaatggctgccatccggaagaaactggtgattgttggtgatggagcctgtggaaagacatgcttgctcatagtcttcagcaaggaccagttcccagaggtgtatgtgcccacagtgtttgagaactatgtggcagatatcgaggtggatggaaagcaggtagagttggctttgtgggacacagctgggcaggaagattatgatcgcctgaggcccctctcctacccagataccgatgttatactgatgtgtttttccatcgacagccctgatagtttagaaaacatcccagaaaagtggaccccagaagtcaagcatttctgtcccaacgtgcccatcatcctggttgggaataagaaggatcttcggaatgatgagcacacaaggcgggagctagccaagatgaagcaggagcctcactgtgtcgccaggctggagtgctgtggcacgatcttggctcaactgcaacctccgcctcccagatttaagcgattcccctgcctcagcctcctgagtagctggggttacaggcgcccactaccacacccaggagccggtgaaacctgaagaaggcagagatatggcaaacaggattggcgcttttgggtacatggagtgttcagcaaagaccaaagatggagtgagagaggtttttgaaatggctacgagagctgctctgcaagctagacgtgggaagaaaaaatctgggtgccttgtcttgtgaaaccttgctgcaagcacagcccttatgcggttaattttgaagtgctgtttattaatcttagtgtatgattactggcctttttcattt

SEQ ID NO: 174247 - DNA, 2372 bp, Homo sapiens
  Payload ID: 14199
  Gene Symbol: RHOB
  Gene Name: ras homolog family member B
  Uniprot ID: P62745
  ENST ID: ENST00000272233
  CDS Start-End: 393-983
atctgccaccgcagtctggttggagctgttgtcttgtatgctcagcgaggcccggagagacccgggagagagctaggccgagtccaccgcccgagtctgctgcccgagcccgcgttacgcacaaagccgccgatccccggcctggggtgagcagagcgaccaccgcccgggagcagcgcggcgagacgcacggtgcgccctatgcccccgcgcccccaccgcccccgccgcggcagccgaagcgcagcgagagaacgcgccaccgcggggcccgggtgcagctagcgaccctctcgccacctgcgcgcagcccgaggtgagcagtgagcggcgagcgggagggcagcgaggcgttcgcgggccccctcctgctgcccgggcccggcccgctcatggcggccatccgcaagaagctggtggtggtgggcgacggcgcgtgtggcaagacgtgcctgctgatcgtgttcagtaaggacgagttccccgaggtgtacgtgcccaccgtcttcgagaactatgtggccgacattgaggtggacggcaagcaggtggagctggcgctgtgggacacggcgggccaggaggactacgaccgcctgcggccgctctcctacccggacaccgacgtcattctcatgtgcttctcggtggacagcccggactcgctggagaacatccccgagaagtgggtccccgaggtgaagcacttctgtcccaatgtgcccatcatcctggtggccaacaaaaaagacctgcgcagcgacgagcatgtccgcacagagctggcccgcatgaagcaggaacccgtgcgcacggatgacggccgcgccatggccgtgcgcatccaagcctacgactacctcgagtgctctgccaagaccaaggaaggcgtgcgcgaggtcttcgagacggccacgcgcgccgcgctgcagaagcgctacggctcccagaacggctgcatcaactgctgcaaggtgctatgagggccgcgcccgtcgcgcctgcccctgccggcacggctccccctcctggaccagtcccccgcgagcccggagaaggggagacccgtgtcccacaaggaccccaccggcctgcctggcatctgtctgctgacgcctctggcttgcgccaggacttggcgtgggcaccgggcgcccccatcccagtgtctgtgtgcgtccagctgtgttgcacaggcctgggctccccactgagtgccaagggtcccctgagcatgcttttctgaagagccgggcctcagagtgtgtggctgtgtgtctgttcgactcccctcgccccattttcaccccacccccgcctctgatccccgggggcgagattggcgcgggagtgtggccgcgccccatcagatgttcgcccttcaccagcgggagcttgatatcccttgtctgtaacatagaccccgggtactgcgggaggggagggctgctggggaggatggggggatgttatataaatatagatataattttattttcggagctaagatggtgttatttaagggtggtgatgggtgagcgctctggcccaggctgggccagactcccgcccaagcatgaacaggacttgaccatctttccaacccctggggaagacatttgcaactgacttggggaggacacagcttcagcacagcctctcctgcgggccagcccgctgcgaaccctccaccagctaccggagggaggagggaggatgcgctgtggggttgtttttgccataagcgaactttgtgcctgtcctagaagtgaaaattgttcagtccaagaaactgatgttatttgatttatttaaaggctaaaatttgtttttttattctttgcacaattgtttcattgtttgacacttaatgcactcgtcatttgcatacgacagtagcattctgaccacacttgtacgctgtaacctcatctacttctgatgtttttaaaaaatgacttttaacaaggagagggaaaagaaacccactaaattttgctttgtttccttgaagaatgtggcaacactgttttgtgattttatttgtgcaggtcatgcacacagttttgataaagggcagtaacaagtattggggcctattttttttttttccacaaggcattctctaaagctatgtgaaattttctctgcacctctgtacagagaatacacctgcccctgtatatccttttttcccctcccctccctcccagtggtacttctactaaattgttgtcttgttttttattttttaaataaactgacaaatgacaaaatggtgagcttatgatgtttacataaaagttctataagctgtgtatacagttttttatgtaaaatattaaaagactatgatgatgacatttataaaa

SEQ ID NO: 174248 - DNA, 2199 bp, Homo sapiens
  Payload ID: 14200
  Gene Symbol: RHOC
  Gene Name: ras homolog family member C
  Uniprot ID: P08134
  ENST ID: ENST00000285735
  CDS Start-End: 1211-1792
agtctgagcctccggcaccggccgcgcagctggaggcggcggagcggaaggtgtagggtgggccggcaaagtcaaccggccgctctggatcatctgggaattcaagagagcgattggagagaggtctgatgtagccacactgtcttgtcttggggaaggccccagaagttccaggctccattccaggccctgtgtggggctcagttgcccctcttaaggggtcagtgggacagtccctctggggctgcctctcacagggagttgtccatgccatcttggccttgggcctagtgtcctggcctgggctgcctgctgttctggcccaatcatagcctggagggaaagtcttctaattgggctggaggctccaggtcccttaacgcatgcctcaaccccgggtttctgtcctctgcctcccaccactctggtgccgtctgaattaccctgctggggggacagcagtggcatactcatgcctaagtgactggctttcaccccagtagtgattgccctccatcaacactgcccaccccaggttggggctaccccagcccatctttacaaaacagggcaaggtgaactaatggagtgggtggaggagttggaagaaatcccagcgtcagtcaccgggatagaattcccaaggaaccctctttttggaggatggtttccatttctggaggcgatctgccgacagggtgaatgccttcttgcttgtcttctggggaatcagagagagtccgttttgtggtgggaagagtgtggctgtgtactttgaactcctgtaaattctctgactcatgtccacaaaaccaacagttttgtgaatgtgtctggaggcaagggaagggccactcaggatctatgttgaagggaagaggcctggggctggagtattcgcttcctaaagggcagtgtgaggtggtggtggggtgtggggagtagaggcgttcagtcagcccagtttgacaggatgtgggactgagagaaaaagctaggtttgaggctgagatcaggttaccgtcgctttcttaactgctccctgcctggttggtgctgggactggccctcatttgtctcttcttttggggctcctcccagcccagactctagccccctcccccttcccaacagccttgacttcatctcagctccagagcccgccctctcttcctgcagcctgggaacttcagccggctggagccccaccatggctgcaatccgaaagaagctggtgatcgttggggatggtgcctgtgggaagacctgcctcctcatcgtcttcagcaaggatcagtttccggaggtctacgtccctactgtctttgagaactatattgcggacattgaggtggacggcaagcaggtggagctggctctgtgggacacagcagggcaggaagactatgatcgactgcggcctctctcctacccggacactgatgtcatcctcatgtgcttctccatcgacagccctgacagcctggaaaacattcctgagaagtggaccccagaggtgaagcacttctgccccaacgtgcccatcatcctggtggggaataagaaggacctgaggcaagacgagcacaccaggagagagctggccaagatgaagcaggagcccgttcggtctgaggaaggccgggacatggcgaaccggatcagtgcctttggctaccttgagtgctcagccaagaccaaggagggagtgcgggaggtgtttgagatggccactcgggctggcctccaggtccgcaagaacaagcgtcggaggggctgtcccattctctgagatccccaaggcctttcctacatgccccctcccttcacaggggtacagaaattatccccctacaaccccagcctcctgagggctccatgctgaaggctcccattttcagttccctcctgcccaggactgcattgttttctagccccgaggtggtggcacgggccctccctcccagcgctctgggagccacgcctatgccctgcccttcctcagggcccctggggatcttgccccctttgaccttccccaaaggatggtcacacaccagcactttatacacttctggctcacaggaaagtgtctgcagtaggggacccagagtcccaggcccctggagttgttttcggcaggggccttgtctctcactgcatttggtcaggggggcatgaataaaggctacaggctcc

SEQ ID NO: 174249 - DNA, 1418 bp, Homo sapiens
  Payload ID: 14200
  Gene Symbol: RHOC
  Gene Name: ras homolog family member C
  Uniprot ID: P08134
  ENST ID: ENST00000339083
  CDS Start-End: 403-984
attgaaggctgggcagagtctgagtccacccgggtcgtgctccccccgctcgcccggctcctccgcagtccaggaatctccccgtggctctccccgacctggaggggtggacgcccctggcccccagtccccggcctgcggagggggccggtggctgcggccctgcgcggggccggggcgggccgagccaagggccgcccccggccgaccctccccctgccgggcccgccctccccgccgcggcgctggaggagggcggggcggggccctggggtcagtctgagcctccggcaccggccgcgcagctggaggcggcggagcggaagccttgacttcatctcagctccagagcccgccctctcttcctgcagcctgggaacttcagccggctggagccccaccatggctgcaatccgaaagaagctggtgatcgttggggatggtgcctgtgggaagacctgcctcctcatcgtcttcagcaaggatcagtttccggaggtctacgtccctactgtctttgagaactatattgcggacattgaggtggacggcaagcaggtggagctggctctgtgggacacagcagggcaggaagactatgatcgactgcggcctctctcctacccggacactgatgtcatcctcatgtgcttctccatcgacagccctgacagcctggaaaacattcctgagaagtggaccccagaggtgaagcacttctgccccaacgtgcccatcatcctggtggggaataagaaggacctgaggcaagacgagcacaccaggagagagctggccaagatgaagcaggagcccgttcggtctgaggaaggccgggacatggcgaaccggatcagtgcctttggctaccttgagtgctcagccaagaccaaggagggagtgcgggaggtgtttgagatggccactcgggctggcctccaggtccgcaagaacaagcgtcggaggggctgtcccattctctgagatccccaaggcctttcctacatgccccctcccttcacaggggtacagaaattatccccctacaaccccagcctcctgagggctccatgctgaaggctcccattttcagttccctcctgcccaggactgcattgttttctagccccgaggtggtggcacgggccctccctcccagcgctctgggagccacgcctatgccctgcccttcctcagggcccctggggatcttgccccctttgaccttccccaaaggatggtcacacaccagcactttatacacttctggctcacaggaaagtgtctgcagtaggggacccagagtcccaggcccctggagttgttttcggcaggggccttgtctctcactgcatttggtcaggggggcatgaataaaggctacaggctccaacgtgtgtggcagctttcggtctttc

SEQ ID NO: 174250 - DNA, 1026 bp, Homo sapiens
  Payload ID: 14200
  Gene Symbol: RHOC
  Gene Name: ras homolog family member C
  Uniprot ID: P08134
  ENST ID: ENST00000369632
  CDS Start-End: 425-1006
aggtaccctgggccggggctgcgggcggtggggcgtcttgggaactcgtccccaggagagcactttcccttcctcgctggcccggagatcggggcccgtgcgaggaggggcttcggcctgggcgtggaccccgttccctccaagcggagtcggcatccgggctgggcggtggtcggaccgcgtcggcccctccccgggctgcagcgagggggcccggacctgccggcaggggctctggcctcctgaggtccgagtcggagccccttcccttctcctcccagcttcccggaacctgccccgccgggcgaggggcgagggaacttcaactcagacgccccagcccccaggccttgacttcatctcagctccagagcccgccctctcttcctgcagcctgggaacttcagccggctggagccccaccatggctgcaatccgaaagaagctggtgatcgttggggatggtgcctgtgggaagacctgcctcctcatcgtcttcagcaaggatcagtttccggaggtctacgtccctactgtctttgagaactatattgcggacattgaggtggacggcaagcaggtggagctggctctgtgggacacagcagggcaggaagactatgatcgactgcggcctctctcctacccggacactgatgtcatcctcatgtgcttctccatcgacagccctgacagcctggaaaacattcctgagaagtggaccccagaggtgaagcacttctgccccaacgtgcccatcatcctggtggggaataagaaggacctgaggcaagacgagcacaccaggagagagctggccaagatgaagcaggagcccgttcggtctgaggaaggccgggacatggcgaaccggatcagtgcctttggctaccttgagtgctcagccaagaccaaggagggagtgcgggaggtgtttgagatggccactcgggctggcctccaggtccgcaagaacaagcgtcggaggggctgtcccattctctgagatccccaaggcctttccta

SEQ ID NO: 174251 - DNA, 1295 bp, Homo sapiens
  Payload ID: 14200
  Gene Symbol: RHOC
  Gene Name: ras homolog family member C
  Uniprot ID: P08134
  ENST ID: ENST00000369633
  CDS Start-End: 301-882
ggcggtggggcgtcttgggaactcgtccccaggagagcactttcccttcctcgctggcccggagatcggggcccgtgcgaggaggggcttcggcctgggcgtggaccccgttccctccaagcggagtcggcatccgggctgggcggtggtcggaccgcgtcggcccctccccgggctgcagcgagggggcccggacctgccggcaggggctctggcctcctgagccttgacttcatctcagctccagagcccgccctctcttcctgcagcctgggaacttcagccggctggagccccaccatggctgcaatccgaaagaagctggtgatcgttggggatggtgcctgtgggaagacctgcctcctcatcgtcttcagcaaggatcagtttccggaggtctacgtccctactgtctttgagaactatattgcggacattgaggtggacggcaagcaggtggagctggctctgtgggacacagcagggcaggaagactatgatcgactgcggcctctctcctacccggacactgatgtcatcctcatgtgcttctccatcgacagccctgacagcctggaaaacattcctgagaagtggaccccagaggtgaagcacttctgccccaacgtgcccatcatcctggtggggaataagaaggacctgaggcaagacgagcacaccaggagagagctggccaagatgaagcaggagcccgttcggtctgaggaaggccgggacatggcgaaccggatcagtgcctttggctaccttgagtgctcagccaagaccaaggagggagtgcgggaggtgtttgagatggccactcgggctggcctccaggtccgcaagaacaagcgtcggaggggctgtcccattctctgagatccccaaggcctttcctacatgccccctcccttcacaggggtacagaaattatccccctacaaccccagcctcctgagggctccatgctgaaggctcccattttcagttccctcctgcccaggactgcattgttttctagccccgaggtggtggcacgggccctccctcccagcgctctgggagccacgcctatgccctgcccttcctcagggcccctggggatcttgccccctttgaccttccccaaaggatggtcacacaccagcactttatacacttctggctcacaggaaagtgtctgcagtaggggacccagagtcccaggcccctggagttgttttcggcaggggccttgtctctcactgcatttggtcaggggggcatgaataaaggctacaggctccaacgtg

SEQ ID NO: 174252 - DNA, 786 bp, Homo sapiens
  Payload ID: 14200
  Gene Symbol: RHOC
  Gene Name: ras homolog family member C
  ENST ID: ENST00000369636
  CDS Start-End: 51-650
gcctccggcaccggccgcgcagctggaggcggcggagcggaagccccaccatggctgcaatccgaaagaagctggtgatcgttggggatggtgcctgtgggaagacctgcctcctcatcgtcttcagcaaggatcagtttccggaggtctacgtccctactgtctttgagaactatattgcggacattgaggtggacggcaagcaggtggagctggctctgtgggacacagcagggcaggaagactatgatcgactgcggcctctctcctacccggacactgatgtcatcctcatgtgcttctccatcgacagccctgacagcctggaaaacattcctgagaagtggaccccagaggtgaagcacttctgccccaacgtgcccatcatcctggtggggaataagaaggacctgaggaaggccgggacatggcgaaccggatcagtgcctttggctaccttgagtgctcagccaagaccaaggagggagtgcgggaggtgtttgagatggccactcgggctggcctccaggtccgcaagaacaagcgtcggaggggctgtcccattctctgagatccccaaggcctttcctacatgccccctcccttcacaggggtacagaaattatccccctacaaccccagcctcctgagggctccatgctgaaggctcccattttcagttccctcctgcccaggactgcattgttttctagccccgaggtggtggcacgggccctccctcccagcgctctgggagccacgcctatgccctgcccttcctcaggg

SEQ ID NO: 174253 - DNA, 888 bp, Homo sapiens
  Payload ID: 14200
  Gene Symbol: RHOC
  Gene Name: ras homolog family member C
  Uniprot ID: P08134
  ENST ID: ENST00000369637
  CDS Start-End: 80-661
tctgagcctccggcaccggccgcgcagctggaggcggcggagcggaagcctgggaacttcagccggctggagccccaccatggctgcaatccgaaagaagctggtgatcgttggggatggtgcctgtgggaagacctgcctcctcatcgtcttcagcaaggatcagtttccggaggtctacgtccctactgtctttgagaactatattgcggacattgaggtggacggcaagcaggtggagctggctctgtgggacacagcagggcaggaagactatgatcgactgcggcctctctcctacccggacactgatgtcatcctcatgtgcttctccatcgacagccctgacagcctggaaaacattcctgagaagtggaccccagaggtgaagcacttctgccccaacgtgcccatcatcctggtggggaataagaaggacctgaggcaagacgagcacaccaggagagagctggccaagatgaagcaggagcccgttcggtctgaggaaggccgggacatggcgaaccggatcagtgcctttggctaccttgagtgctcagccaagaccaaggagggagtgcgggaggtgtttgagatggccactcgggctggcctccaggtccgcaagaacaagcgtcggaggggctgtcccattctctgagatccccaaggcctttcctacatgccccctcccttcacaggggtacagaaattatccccctacaaccccagcctcctgagggctccatgctgaaggctcccattttcagttccctcctgcccaggactgcattgttttctagccccgaggtggtggcacgggccctccctcccagcgctctgggagccacgcctatgccctgcccttcctcagggcccctggggatc

SEQ ID NO: 174254 - DNA, 1028 bp, Homo sapiens
  Payload ID: 14200
  Gene Symbol: RHOC
  Gene Name: ras homolog family member C
  Uniprot ID: P08134
  ENST ID: ENST00000369638
  CDS Start-End: 182-763
ctggggtcagtctgagcctccggcaccggccgcgcagctggaggcggcggagcggaagccttgacttcatctcagctccagagcccgccctctcttcctgcagcctgggaacttcagccggctggaggtcagttcccctccccagggaaggaggaagtgagggaagctgcgaagccccaccatggctgcaatccgaaagaagctggtgatcgttggggatggtgcctgtgggaagacctgcctcctcatcgtcttcagcaaggatcagtttccggaggtctacgtccctactgtctttgagaactatattgcggacattgaggtggacggcaagcaggtggagctggctctgtgggacacagcagggcaggaagactatgatcgactgcggcctctctcctacccggacactgatgtcatcctcatgtgcttctccatcgacagccctgacagcctggaaaacattcctgagaagtggaccccagaggtgaagcacttctgccccaacgtgcccatcatcctggtggggaataagaaggacctgaggcaagacgagcacaccaggagagagctggccaagatgaagcaggagcccgttcggtctgaggaaggccgggacatggcgaaccggatcagtgcctttggctaccttgagtgctcagccaagaccaaggagggagtgcgggaggtgtttgagatggccactcgggctggcctccaggtccgcaagaacaagcgtcggaggggctgtcccattctctgagatccccaaggcctttcctacatgccccctcccttcacaggggtacagaaattatccccctacaaccccagcctcctgagggctccatgctgaaggctcccattttcagttccctcctgcccaggactgcattgttttctagccccgaggtggtggcacgggccctccctcccagcgctctgggagccacgcctatgccctgcccttcctcagggcccctggggatcttgccccctttgaccttccccaaaggatggtcacacac

SEQ ID NO: 174255 - DNA, 1355 bp, Homo sapiens
  Payload ID: 14200
  Gene Symbol: RHOC
  Gene Name: ras homolog family member C
  Uniprot ID: P08134
  ENST ID: ENST00000369642
  CDS Start-End: 365-946
aactttcccgacgccggtcctcccctaggggattgaaggctgggcagagtctgagtccacccgggtcgtgctccccccgctcgcccggctcctccgcagtccaggaatctccccgtggctctccccgacctggaggggtggacgcccctggcccccagtccccggcctgcggagggggccggtggctgcggccctgcgcggggccggggcgggccgagccaagggccgcccccggccgaccctccccctgccgggcccgccctccccgccgcggcgctggaggagggcggggcggggccctggggtcagtctgagcctccggcaccggccgcgcagctggaggcggcggagcggaagccccaccatggctgcaatccgaaagaagctggtgatcgttggggatggtgcctgtgggaagacctgcctcctcatcgtcttcagcaaggatcagtttccggaggtctacgtccctactgtctttgagaactatattgcggacattgaggtggacggcaagcaggtggagctggctctgtgggacacagcagggcaggaagactatgatcgactgcggcctctctcctacccggacactgatgtcatcctcatgtgcttctccatcgacagccctgacagcctggaaaacattcctgagaagtggaccccagaggtgaagcacttctgccccaacgtgcccatcatcctggtggggaataagaaggacctgaggcaagacgagcacaccaggagagagctggccaagatgaagcaggagcccgttcggtctgaggaaggccgggacatggcgaaccggatcagtgcctttggctaccttgagtgctcagccaagaccaaggagggagtgcgggaggtgtttgagatggccactcgggctggcctccaggtccgcaagaacaagcgtcggaggggctgtcccattctctgagatccccaaggcctttcctacatgccccctcccttcacaggggtacagaaattatccccctacaaccccagcctcctgagggctccatgctgaaggctcccattttcagttccctcctgcccaggactgcattgttttctagccccgaggtggtggcacgggccctccctcccagcgctctgggagccacgcctatgccctgcccttcctcagggcccctggggatcttgccccctttgaccttccccaaaggatggtcacacaccagcactttatacacttctggctcacaggaaagtgtctgcagtaggggacccagagtcccaggcccctggagttgttttcggcaggggccttgtctctcactgcatttggtcaggggggcatgaataaaggctacaggctccaa

SEQ ID NO: 174256 - DNA, 866 bp, Homo sapiens
  Payload ID: 14200
  Gene Symbol: RHOC
  Gene Name: ras homolog family member C
  ENST ID: ENST00000425265
  CDS Start-End: 301-866
ggcggtggggcgtcttgggaactcgtccccaggagagcactttcccttcctcgctggcccggagatcggggcccgtgcgaggaggggcttcggcctgggcgtggaccccgttccctccaagcggagtcggcatccgggctgggcggtggtcggaccgcgtcggcccctccccgggctgcagcgagggggcccggacctgccggcaggggctctggcctcctgagccttgacttcatctcagctccagagcccgccctctcttcctgcagcctgggaacttcagccggctggagccccaccatggctgcaatccgaaagaagctggtgatcgttggggatggtgcctgtgggaagacctgcctcctcatcgtcttcagcaaggatcagtttccggaggtctacgtccctactgtctttgagaactatattgcggacattgaggtggacggcaagcaggtggagctggctctgtgggacacagcagggcaggaagactatgatcgactgcggcctctctcctacccggacactgatgtcatcctcatgtgcttctccatcgacagccctgacagcctggaaaacattcctgagaagtggaccccagaggtgaagcacttctgccccaacgtgcccatcatcctggtggggaataagaaggacctgaggcaagacgagcacaccaggagagagctggccaagatgaagcaggagcccgttcggtctgaggaaggccgggacatggcgaaccggatcagtgcctttggctaccttgagtgctcagccaagaccaaggagggagtgcgggaggtgtttgagatggccactcgggctggcctccaggtccgcaagaacaagcgtcggagggg

SEQ ID NO: 174257 - DNA, 470 bp, Homo sapiens
  Payload ID: 14200
  Gene Symbol: RHOC
  Gene Name: ras homolog family member C
  ENST ID: ENST00000414971
  CDS Start-End: 196-470
aggaaggggctgttccagagtgggtggaggcatctgggtaccgaaggagataattcctgccaaaatgcccgacagagtgcctggcacctaggggctctataactattcttcctttacccacctaccacctggtagctggttctgctactctggtcctagagagggactcctcatttgtgactggacagccccaccatggctgcaatccgaaagaagctggtgatcgttggggatggtgcctgtgggaagacctgcctcctcatcgtcttcagcaaggatcagtttccggaggtctacgtccctactgtctttgagaactatattgcggacattgaggtggacggcaagcaggtggagctggctctgtgggacacagcagggcaggaagactatgatcgactgcggcctctctcctacccggacactgatgtcatcctcatgtgcttctccatcgacagccctgacagcct

SEQ ID NO: 174258 - DNA, 517 bp, Homo sapiens
  Payload ID: 14200
  Gene Symbol: RHOC
  Gene Name: ras homolog family member C
  ENST ID: ENST00000436685
  CDS Start-End: 135-517
gcagctggaggcggcggagcggaagcccagactctagccccctcccccttcccaacagccttgacttcatctcagctccagagcccgccctctcttcctgcagcctgggaacttcagccggctggagccccaccatggctgcaatccgaaagaagctggtgatcgttggggatggtgcctgtgggaagacctgcctcctcatcgtcttcagcaaggatcagtttccggaggtctacgtccctactgtctttgagaactatattgcggacattgaggtggacggcaagcaggtggagctggctctgtgggacacagcagggcaggaagactatgatcgactgcggcctctctcctacccggacactgatgtcatcctcatgtgcttctccatcgacagccctgacagcctggaaaacattcctgagaagtggaccccagaggtgaagcacttctgccccaacgtgcccatcatcctggtggggaataagaaggacctgaggcaagacgagcacaccag

SEQ ID NO: 174259 - DNA, 1042 bp, Homo sapiens
  Payload ID: 14200
  Gene Symbol: RHOC
  Gene Name: ras homolog family member C
  ENST ID: ENST00000468093
  CDS Start-End: 57-257
gcagctggaggcggcggagcggaagcctgggaacttcagccggctggagccccaccatggctgcaatccgaaagaagctggtgatcgttggggatggtgcctgtgggaagacctgcctcctcatcgtcttcagcaaggatcagtttccggaggtctacgtccctactgtctttgagaactatattgcggacattgaggtggacggcaagcagactggctctgtaacctgggccgagtccctttgcctctgggtttaagctcccccacctgcaaaatggggatgatggtggagctggctctgtgggacacagcagggcaggaagactatgatcgactgcggcctctctcctacccggacactgatgtcatcctcatgtgcttctccatcgacagccctgacagcctggaaaacattcctgagaagtggaccccagaggtgaagcacttctgccccaacgtgcccatcatcctggtggggaataagaaggacctgaggcaagacgagcacaccaggagagagctggccaagatgaagcaggagcccgttcggtctgaggaaggccgggacatggcgaaccggatcagtgcctttggctaccttgagtgctcagccaagaccaaggagggagtgcgggaggtgtttgagatggccactcgggctggcctccaggtccgcaagaacaagcgtcggaggggctgtcccattctctgagatccccaaggcctttcctacatgccccctcccttcacaggggtacagaaattatccccctacaaccccagcctcctgagggctccatgctgaaggctcccattttcagttccctcctgcccaggactgcattgttttctagccccgaggtggtggcacgggccctccctcccagcgctctgggagccacgcctatgccctgcccttcctcagggcccctggggatcttgccccctttgaccttccccaaaggatggtcacacaccagcactttatacacttctggctcacaggaaagtgtctgcagtaggggacccagagtcccaggcc

SEQ ID NO: 174260 - DNA, 463 bp, Homo sapiens
  Payload ID: 14200
  Gene Symbol: RHOC
  Gene Name: ras homolog family member C
  ENST ID: ENST00000528831
  CDS Start-End: 90-290
gctggaggagggcggggcggggccctggggtcagtctgagcctccggcaccggccgcgcagctggaggcggcggagcggaagccccaccatggctgcaatccgaaagaagctggtgatcgttggggatggtgcctgtgggaagacctgcctcctcatcgtcttcagcaaggatcagtttccggaggtctacgtccctactgtctttgagaactatattgcggacattgaggtggacggcaagcagactggctctgtaacctgggccgagtccctttgcctctgggtttaagctcccccacctgcaaaatggggatgatggtggagctggctctgtgggacacagcagggcaggaagactatgatcgactgcggcctctctcctacccggacactgatgtcatcctcatgtgcttctccatcgacagccctgacagcctggaaaacattcctgagaagtggacc

SEQ ID NO: 174261 - DNA, 891 bp, Homo sapiens
  Payload ID: 14200
  Gene Symbol: RHOC
  Gene Name: ras homolog family member C
  ENST ID: ENST00000484280
  CDS Start-End: 133-333
ggggtcagtctgagcctccggcaccggccgcgcagctggaggcggcggagcggaagccttgacttcatctcagctccagagcccgccctctcttcctgcagcctgggaacttcagccggctggagccccaccatggctgcaatccgaaagaagctggtgatcgttggggatggtgcctgtgggaagacctgcctcctcatcgtcttcagcaaggatcagtttccggaggtctacgtccctactgtctttgagaactatattgcggacattgaggtggacggcaagcagactggctctgtaacctgggccgagtccctttgcctctgggtttaagctcccccacctgcaaaatggggatgatggtggagctggctctgtgggacacagcagggcaggaagactatgatcgactgcggcctctctcctacccggacactgatgtcatcctcatgtgcttctccatcgacagccctgacagcctggaaaacattcctgagaagtggaccccagaggtgaagcacttctgccccaacgtgcccatcatcctggtggggaataagaaggacctgaggcaagacgagcacaccaggagagagctggccaagatgaagcaggagcccgttcggtctgaggaaggccgggacatggcgaaccggatcagtgcctttggctaccttgagtgctcagccaagaccaaggagggagtgcgggaggtgtttgagatggccactcgggctggcctccaggtccgcaagaacaagcgtcggaggggctgtcccattctctgagatccccaaggcctttcctacatgccccctcccttcacaggggtacagaaattatccccctacaaccccagcctcctgagggctccatgctgaaggctcccat

SEQ ID NO: 174262 - DNA, 521 bp, Homo sapiens
  Payload ID: 14200
  Gene Symbol: RHOC
  Gene Name: ras homolog family member C
  ENST ID: ENST00000484054
  CDS Start-End: 134-521
ccggcaccggccgcgcagctggaggcggcggagcggaagggcaaggtgaactaatggagtgggtggaggagttggaagaaatcccagcgtcagtcaccgggatagaattcccaaggaaccctctttttggaggatggtttccatttctggaggcgatctgccgacaggccttgacttcatctcagctccagagcccgccctctcttcctgcagcctgggaacttcagccggctggagccccaccatggctgcaatccgaaagaagctggtgatcgttggggatggtgcctgtgggaagacctgcctcctcatcgtcttcagcaaggatcagtttccggaggtctacgtccctactgtctttgagaactatattgcggacattgaggtggacggcaagcaggtggagctggctctgtgggacacagcagggcaggaagactatgatcgactgcggcctctctcctacccggacactgatgtcatcctcatgtgcttctccatcgacagccctgacagcctgg

SEQ ID NO: 174263 - DNA, 574 bp, Homo sapiens
  Payload ID: 14200
  Gene Symbol: RHOC
  Gene Name: ras homolog family member C
  ENST ID: ENST00000534717
  CDS Start-End: 67-574
aagcccgggaagctgactccttgccctgagtcacagggaggggtgggcagggcatgcggccccaccatggctgcaatccgaaagaagctggtgatcgttggggatggtgcctgtgggaagacctgcctcctcatcgtcttcagcaaggatcagtttccggaggtctacgtccctactgtctttgagaactatattgcggacattgaggtggacggcaagcaggtggagctggctctgtgggacacagcagggcaggaagactatgatcgactgcggcctctctcctacccggacactgatgtcatcctcatgtgcttctccatcgacagccctgacagcctggaaaacattcctgagaagtggaccccagaggtgaagcacttctgccccaacgtgcccatcatcctggtggggaataagaaggacctgaggcaagacgagcacaccaggagagagctggccaagatgaagcaggagcccgttcggtctgaggaaggccgggacatggcgaaccggatcagtgcctttggctaccttgagtgctcagccaagaccaaggagggagtgcgggagg

SEQ ID NO: 174264 - DNA, 1129 bp, Homo sapiens
  Payload ID: 14201
  Gene Symbol: RHOD
  Gene Name: ras homolog family member D
  Uniprot ID: O00212
  ENST ID: ENST00000308831
  CDS Start-End: 86-718
attcctgccccgccgggcctgccccgcgcagtctgggtctctgcgccgcagccgcccgcccgcccgctcagcgcccggccccgggatgacggcggcccaggccgcgggtgaggaggcgccaccaggcgtgcggtccgtcaaggtggtcctggtgggcgacggcggctgcgggaagacgtcgctgctgatggtcttcgccgatggggccttccccgagagctacacccccacggtgtttgagcggtacatggtcaacctgcaagtgaaaggcaaacctgtgcacctccacatctgggacacagcagggcaagatgactatgaccgcctgcggcccctgttctaccctgacgccagcgtcctgctgctttgcttcgatgtcaccagcccgaacagctttgacaacatctttaaccggtggtacccagaagtgaatcatttctgcaagaaggtacccatcatcgtcgtgggctgcaagactgacctgcgcaaggacaaatcactggtgaacaagctccgaagaaacggattggagcctgtgacctaccacaggggccaggagatggcgaggtccgtgggcgcggtggcctacctcgagtgctcggctcggctccatgacaacgtccacgccgtcttccaggaggccgccgaggtggccctcagcagccgcggtcgcaacttctggcggcggattacccagggcttttgcgtggtgacctgagcggctcggggcgtcccagcgacgcgggaaggggcagggcgctgacctgctgctgagctggctgggctggacccggtccctaggctgtgaccgccgaactccactgcaacagacgggcgccaccaaagccaggccctgaggcctgggagtcctggactgagaaagggggttcctgggcccacctgctctgtgtagggctcgtcctgcggtgcccgagaatcactcgctaacccctatgcccggtcccggaccgacatcctggagccgcctgtgcagcctgatgccccctcgtggctgctcccagggctgcacctgccaggacctaatgttcttaggtccctctggccagaacccacacccggccccttcccacctgtcatactggtaactgtaacaagaaaaacgacatca

SEQ ID NO: 174265 - DNA, 538 bp, Homo sapiens
  Payload ID: 14201
  Gene Symbol: RHOD
  Gene Name: ras homolog family member D
  ENST ID: ENST00000532559
  CDS Start-End: 15-449
cgcccggccccgggatgacggcggcccaggccgcgggtgaggaggcgccaccaggcgtgcggtccgtcaaggtggtcctggtgggcgacggcggctgcgggaagacgtcgctgctgatggtcttcgccgatggggccttccccgagtggtacccagaagtgaatcatttctgcaagaaggtacccatcatcgtcgtgggctgcaagactgacctgcgcaaggacaaatcactggtgaacaagctccgaagaaacggattggagcctgtgacctaccacaggggccaggagatggcgaggtccgtgggcgcggtggcctacctcgagtgctcggctcggctccatgacaacgtccacgccgtcttccaggaggccgccgaggtggccctcagcagccgcggtcgcaacttctggcggcggattacccagggcttttgcgtggtgacctgagcggctcggggcgtcccagcgacgcgggaaggggcagggcgctgacctgctgctgagctggctgggctggacccggtccctaggctgtg

SEQ ID NO: 174266 - DNA, 3009 bp, Homo sapiens
  Payload ID: 14202
  Gene Symbol: RHOF
  Gene Name: ras homolog family member F (in filopodia)
  Uniprot ID: Q9HBH0
  ENST ID: ENST00000267205
  CDS Start-End: 630-1265
gtgcacgctggcgtccctggcccaggcgaggtgggcagacatgactctcgcgtcagcatcttccctggtgccaccgccgctacctcctgtggggaagctgaggccagaggcggacatgtgccaagccacaccgctggggcagtgcaaagttgaggggctcttcccggagctggaggccgggggcttctcgaacccggtgcggaggcacagccagccaatccgggagaccctgtctggccgcgccagccaatcagagggtccctgccgaaggcggagcctgctaatcaggggcacctggagtcgctgggcagccacgatcgggtctcgccggcgaggggcgcgacgtgacgcgcggagggtggcggtgggttgggggtgggagctttgctcgcagctgagccccgtttttccggtgctgcagtatccctgggactgagagctgaatacccacacccagggctgagaccttagcagaaaggaaactgaggctgggaggtcggccgggaggctgcctggcggaggcggcgctgctccgagtgggcggggctggttccggccccgccccgcccccgacctcttggctccgctagtgcccggcgcgccgccgccagtgctgcgggctccgggcaatggatgcccccggggccctggcccagaccgccgcccccggtccgggcaggaaggagctgaagatcgtgatcgtgggcgacggcggctgcggcaagacctcgctgctcatggtgtacagccagggctccttccccgagcactacgccccatcggtgttcgagaagtacacggccagcgtgaccgttggcagcaaggaggtgaccctgaacctctacgacacggccgggcaagaagactatgaccggctgcggcccctgtcctaccagaacacccacctcgtgctcatctgctatgacgtcatgaatcccaccagctacgacaacgtcctcatcaagtggttccctgaggtcacgcatttctgccgcgggatccccatggtgctcatcggctgcaagacagacctgaggaaggacaaggagcagctgcggaagctccgggccgcccagctggagcccatcacctacatgcagggcctgagcgcctgcgaacagatccgagctgctctctacctggaatgttccgccaagtttcgggagaatgtggaggacgtcttccgggaggccgccaaggtggctctcagcgctctgaagaaggcgcaacggcagaagaagcgccggctctgcctgctgctctgacccagggcagacagacctcacgacagcactgacagggcccgggggcccaggtgccgattgcaccagggaggctgccccatcccgaccctccagctcatggtgtctggggcctgcggctagactcttggaacattctggaactctctcctttcctggctggggctctgaccacaaactcccctccaggctgcccctgggacatggtggtgatgtgggtgcaggagccagtgtctgttgtcgggactcgcaagtgccctcatcacagccacccccaccacgagtgtctccccagtgcagactcaagttatgcttgaaatgaaaaagtctatctggtagtgggtaaacgtagacctggcactgttccacgcgggcgccccaagcctgccactcctgtgtccctgcctccctgggctcccgagataggcaccactgtatcctccagctccttccttccttcccccaggaacacggaggccaccgagggggctgggcctatcaggaggacacaggctgcagcctggcacccacccctcccatctccaccccacatggaagacttgtcttcaacttggccactgtctttgcagagctgggcacatgtgcccagggggcagaaaaaatggcttctcagttgttaaaagtataccctggaccacccatctgaccatctccttaaggtttcacccaaagcccccagtgtcagagacttgggatgggaagaacagtcggctcccagtgtggtcatgagcaagttttctgtggactgttccccccactgtggtaggacaggactggcccacttagtcctcaagctcccaacctgctgtccctcaagccccgcttctaccagcctgtggagttcaggaggcgagacatcctggcctcctttgagaactgatgggatctaccccctgtccacgcgggacagtttctcagaactggttcatagaccacctgtgtcaccaacagccagatacctaatccctgagcctcctttgggaaggtctggggccgagggtctgggaatttttttttttttttttttttgggacagagtctcattctgtcactcaggctagagtgcagtggcatgatcttggctcactgcaagctccacctcctgggttcaagcgattctcttgcctcagcctcctgagtagctgggactacatgcgcacaccaccacgtccggctaatttttgtatttttagtagagacagggtttcaccatgttggccaggctggtcttgaactcctgacctcgtgatccacccgccttagcctcccaaagtgctgggattacaggcgtgagccaccgtgcccggcccaggacttttaaaacaagcatcccaggggattccggtgcctaccagaagtcgcaagctgcttggctctggagggcgcctaggagtcggtgtcgcctaagatgggataatggcttcaggcaactcctagccttccccatatctcctgcctcagcccccctggcccagtgctggggcgtcagctaaacctgagcttccaagaagtcaggttgccaaaggaaggagccttctgagaccctccccaacccacccaggttcccaaggccctgccgtaccctggggaatcaaccaaggagttcttgttctcgaagaaccccaggcctcatgatggtctacggtagaggtccaacaactacagcctgtgggccacatctggccacagcctgatttgtaaataaagttttattggaacacagcaa

SEQ ID NO: 174267 - DNA, 670 bp, Homo sapiens
  Payload ID: 14202
  Gene Symbol: RHOF
  Gene Name: ras homolog family member F (in filopodia)
  ENST ID: ENST00000535560
  CDS Start-End: 332-670
ggcgattgcccggcagagggcgtcagacgtccaccctgcagcccagggtcggggtgcgggtaagcggagcccagtccctcaccccgaacccgcgtgcacgctggcgtccctggcccaggcgagtatccctgggactgagagctgaatacccacacccagggctgagaccttagcagaaaggaaactgaggctgggaggtcggccgggaggctgcctggcggaggcggcgctgctccgagtgggcggggctggttccggccccgccccgcccccgacctcttggctccgctagtgcccggcgcgccgccgccagtgctgcgggctccgggcaatggatgcccccggggccctggcccagaccgccgcccccggtccgggcaggaaggagctgaagatcgtgatcgtgggcgacggcggctgcggcaagacctcgctgctcatggtgtacagccagggctccttccccgagcactacgccccatcggtgttcgagaagtacacggccagcgtgaccgttggcagcaaggaggtgaccctgaacctctacgacacggccgggcaagaagactatgaccggctgcggcccctgtcctaccagaacacccacctcgtgctcatctgctatgacgtcatgaatcccaccagctacgacaacgtcctcatcaaggtg

SEQ ID NO: 174268 - DNA, 699 bp, Homo sapiens
  Payload ID: 14202
  Gene Symbol: RHOF
  Gene Name: ras homolog family member F (in filopodia)
  ENST ID: ENST00000537265
  CDS Start-End: 284-619
gagcccagcggggtgagggggggctgatccgggacgagtgaggggggtggacagtggattcagctggaactttggcccccgccggccccactaaggaccaacccgaccccctctcccgcagcactacgccccatcggtgttcgagaagtacacggccagcgtgaccgttggcagcaaggaggtgaccctgaacctctacgacacggccgggcaagaagactatgaccggctgcggcccctgtcctaccagaacacccacctcgtgctcatctgctatgacgtcatgaatcccaccagctacgacaacgtcctcatcaagtggttccctgaggtcacgcatttctgccgcgggatccccatggtgctcatcggctgcaagacagacctgaggaaggacaaggagcagctgcggaagctccgggccgcccagctggagcccatcacctacatgcagggcctgagcgcctgcgaacagatccgagctgctctctacctggaatgttccgccaagtttcgggagaatgtggaggacgtcttccgggaggccgccaaggtggctctcagcgctctgaagaaggcgcaacggcagaagaagcgccggctctgcctgctgctctgacccagggcagacagacctcacgacagcactgacagggcccgggggcccaggtgccgattgcaccagggaggctgccccat

SEQ ID NO: 174269 - DNA, 1626 bp, Homo sapiens
  Payload ID: 14202
  Gene Symbol: RHOF
  Gene Name: ras homolog family member F (in filopodia)
  ENST ID: ENST00000541657
  CDS Start-End: 1536-1626
ggccaacagatgagggaagccatttttctgcaatggaattaaatggccaagcccaaggactcacagttggaagactggagaagactttttaaaaagatctggatttttccttatgacttggaatccatctttgtcttgtataactaggtcatagcacaccattcatgtcagcagttaacagttttgaattccaaaaaaacctaagtaaatgacatattttttttcctctttttgttctatgggtgggtggggggagcttggagctgtcttaatctgtattctcttgactgaacaataaatttttaaatatatctagtttcctctattaaacacttaaacctggccatcttattaactccttctctctttttaacaaggtaatgttttaaatgtatatagctttaggactagcgaaatggcagcaacaaaaaattgtgagcagttgttactcttttagtttttaaaaaaccttttacattgtaagtacccaatccattctgtcctgacgcagtacagttttgatgttaatgttgctgagatgtccttaattttccgaaccttcatctgcatgtatgtctttgtctctcttgtctaatataagccagttaagatgcttgagacgatcttgctttataaagctaaggttctagctttatgcttttgaaaatgtttacagcactaaatgctagtcagctttcttccccgtagcttgtacactttctttgaaaatcgatctatttgaagaaaaacagccctgtttttctcgtctttggtgttgggggttggggggagctggtgggtgagggaaaggaagaccttttctttgtgtagagagactaaagccgtcacaggaaactagattaaaactggaaaacaagtcctagctggttccagcaaacaccaacgttaagtggggggtattttctatggtggttgggcggctggtgcgtcttgtgccttttgtttgatttgactgtattttcgccttttgtctcttaatgacgatcacaccattgctatatccagagcagtaaacagtcctcagcgaagccgcctttttgcctacccaaccctggaaagtttgcagaagtggaaggagcagaacgtgagggtgtaacttacaaaaaggtaataagaacaaagacaccaccataacccccaaatttcccaactaaatcaaaaaatatatatgtttttacaataacgtctccaaaaccaccgcccagcttgatcttctagactccatggcaccgggctgagcgggttctgggccggagaaggggcgacgttcgggcaccccccgaatggacaatctttccttctgtcaacggcaggggcaggcctagtttgactctgacagtcctcccactaagcactacgccccatcggtgttcgagaagtacacggccagcgtgaccgttggcagcaaggaggtgaccctgaacctctacgacacggccgggcaagaagactatgaccggctgcggcccctgtcctaccagaacacccacctcgtgctcatctgctatgacgtcatgaatcccaccagctacgacaacgtcctcatcaagtggttccctgaggtcacgcatttctgccgcgggatccccatggtgctcatcggct

SEQ ID NO: 174270 - DNA, 1219 bp, Homo sapiens
  Payload ID: 14202
  Gene Symbol: RHOF
  Gene Name: ras homolog family member F (in filopodia)
  ENST ID: ENST00000546227
  CDS Start-End: 994-1219
gcggccgccgcgcgccgggcgggaggagcggcaggggtagggggctgggcgacccggcggcccacgcgggcaccaggaggcctcgccccggaccgcttccctctttcgtctttgtcctgcgcgggcgcccgcagccgagggccacggggtcggcggggcttcgaggccgccccgggtcccaccggctcctccggaagccgcggaccggcctggccctgaccccaggccgccccccgctgcccacccagctctgggcgcccaggtccgacctcccagtcgccctctgagagccgagtcagcgcggggcggggggtcgccccctttgtcctcactcagggcgggaggccctcggggtggccgcagacgccccgttgggcagccctccagcccagctctccaggcaggaggtgggggaagcctgggaaagcggagggggggccccgggatcccccgaggcgcggggctcccggcgaagcctcagatctccggcccttcccggggagggtgcgggcggggcgggcctttggaaatgcagatgagccgccgcccgggccggggttgaaccttctgactcagccacccccggccgcccgggccgctgggggaggggcggcgtctggggtgctccctttcagccccggagcccgtctgctgtgtattcggccggtcacatctctctcccccaacgccctgatccgccctccaccttcctctcctccaggttctgggccggagaaggggcgacgttcgggcaccccccgaatggacaatctttccttctgtcaacggcaggggcaggcctagtttgactctgacagtcctcccactaagcactacgccccatcggtgttcgagaagtacacggccagcgtgaccgttggcagcaaggaggtgaccctgaacctctacgacacggccgggcaagaagactatgaccggctgcggcccctgtcctaccagaacacccacctcgtgctcatctgctatgacgtcatgaatcccaccagctacgacaacgtcctcatcaagtggttccctgaggtcacgcatttctgccgcgggatccccatggtgctcatcggctgcaagacagacctgaggaaggacaaggagcagctgcggaagctccgggccgcccagctggagcccatcacctacatgcagggcctgagcgcctgcgaacagatccgagctgctctctacctggaatgttccgcca

SEQ ID NO: 174271 - DNA, 1485 bp, Homo sapiens
  Payload ID: 14202
  Gene Symbol: RHOF
  Gene Name: ras homolog family member F (in filopodia)
  Uniprot ID: Q9HBH0
  ENST ID: ENST00000537171
  CDS Start-End: 630-1142
gtgcacgctggcgtccctggcccaggcgaggtgggcagacatgactctcgcgtcagcatcttccctggtgccaccgccgctacctcctgtggggaagctgaggccagaggcggacatgtgccaagccacaccgctggggcagtgcaaagttgaggggctcttcccggagctggaggccgggggcttctcgaacccggtgcggaggcacagccagccaatccgggagaccctgtctggccgcgccagccaatcagagggtccctgccgaaggcggagcctgctaatcaggggcacctggagtcgctgggcagccacgatcgggtctcgccggcgaggggcgcgacgtgacgcgcggagggtggcggtgggttgggggtgggagctttgctcgcagctgagccccgtttttccggtgctgcagtatccctgggactgagagctgaatacccacacccagggctgagaccttagcagaaaggaaactgaggctgggaggtcggccgggaggctgcctggcggaggcggcgctgctccgagtgggcggggctggttccggccccgccccgcccccgacctcttggctccgctagtgcccggcgcgccgccgccagtgctgcgggctccgggcaatggatgcccccggggccctggcccagaccgccgcccccggtccgggcaggaaggagctgaagatcgtgatcgtgggcgacggcggctgcggcaagacctcgctgctcatggtgtacagccagggctccttccccgagcactacgccccatcggtgttcgagaagtacacggccagcgtgaccgttggcagcaaggaggtgaccctgaacctctacgacacggccgggcaagaagactatgaccggctgcggcccctgtcctaccagaacacccacctcgtgctcatctgctatgacgtcatgaatcccaccagctacgacaacgtcctcatcaagtggttccctgaggtcacgcatttctgccgcgggatccccatggtgctcatcggctgcaagacagacctgaggaaggacaaggagcagctgcggaagctccgggccgcccagctggagcccatcacctacatgcaggtgggccggggccaagaccctggggcacagccgtggctgtgaagcctcccggacctttggcctctgcaactggggtgccttagtggcctttcagggagctgagggaagcaagattctaagaataatttttaactattagtattgatggcctgtggacctgagcactttacacgactactcccaatccttaggactcggaggcaggcgctgttcacatcccccagtttacagggggagaaactgaggcccagagaggttaagcagcttgcccagggccacacagctagcgagaagtggagccaggatctggtcccatccactgcaatccaaagtctgtgctatgagccgccgtcctgtcgtgtcctgtctgccttgtttgaaagta

SEQ ID NO: 174272 - DNA, 1319 bp, Homo sapiens
  Payload ID: 14203
  Gene Symbol: RHOG
  Gene Name: ras homolog family member G
  Uniprot ID: P84095
  ENST ID: ENST00000351018
  CDS Start-End: 159-734
cacttcctccggcctcccgctctcacttccttctcgagcccggagccgctgccgccgcccccagctcccccgcctcggggagggcaccaggtcactgcagccagaggggtccagaagagagaggaggcactgcctccactacagcaactgcacccacgatgcagagcatcaagtgcgtggtggtgggtgatggggctgtgggcaagacgtgcctgctcatctgctacacaactaacgctttccccaaagagtacatccccaccgtgttcgacaattacagcgcgcagagcgcagttgacgggcgcacagtgaacctgaacctgtgggacactgcgggccaggaggagtatgaccgcctccgtacactctcctaccctcagaccaacgttttcgtcatctgtttctccattgccagtccgccgtcctatgagaacgtgcggcacaagtggcatccagaggtgtgccaccactgccctgatgtgcccatcctgctggtgggcaccaagaaggacctgagagcccagcctgacaccctacggcgcctcaaggagcagggccaggcgcccatcacaccgcagcagggccaggcactggccaagcagatccacgctgtgcgctacctcgaatgctcagccctgcaacaggatggtgtcaaggaagtgttcgccgaggctgtccgggctgtgctcaaccccacgccgatcaagcgtgggcggtcctgcatcctcttgtgaccctggcacttggcttggaggctgcccctgccctccccccaccagttgtgccttggtgccttgtccgcctcagctgtgccttaaggactaattctggcacccctttccagggggttccctgaatgcctttttctctgagtgcctttttctccttaaggaggcctgcagagaaaggggctttgggctctgcccccctctgcttgggaacactgggtattctcatgagctcatccaagccaaggttggacccctccccaagaggccaacccagtgccccctcccattttccgctactgaccagttcatccagctttccacacagttgttgctgcctattgtggtgccgcctcaggttaggggctctcagccatctctaacctctgccctcgctgctcttggaattgcgcccccaagatgctctctcccttctccaatgagggagccacagaatcctgagaaggtgaatgtgccctaacctgctcctctgtgcctaggccttacgcatttgctgactgactcagcccccatgcttctggggacctttcctacccccatcagcatcaataaaacctcctgtctccagtg

SEQ ID NO: 174273 - DNA, 1066 bp, Homo sapiens
  Payload ID: 14203
  Gene Symbol: RHOG
  Gene Name: ras homolog family member G
  Uniprot ID: P84095
  ENST ID: ENST00000396978
  CDS Start-End: 344-919
ccggcccaggactcggcgcgggcgccggctcatgagtttgctggcggaggccgcgggcgggagcttctcggttcagtccaagtagggcgggcgcggccggccgggcggggcgggaacggggccactgcgagccggcggaggctcggcgagggtggcttcccggcggctgtaccgcctctagggagccgagagggacccctgaggtcggagggtcccgggctccaagataagtgtctctgaagtggaagagctcagagctgggagatcggacgcaggtcactgcagccagaggggtccagaagagagaggaggcactgcctccactacagcaactgcacccacgatgcagagcatcaagtgcgtggtggtgggtgatggggctgtgggcaagacgtgcctgctcatctgctacacaactaacgctttccccaaagagtacatccccaccgtgttcgacaattacagcgcgcagagcgcagttgacgggcgcacagtgaacctgaacctgtgggacactgcgggccaggaggagtatgaccgcctccgtacactctcctaccctcagaccaacgttttcgtcatctgtttctccattgccagtccgccgtcctatgagaacgtgcggcacaagtggcatccagaggtgtgccaccactgccctgatgtgcccatcctgctggtgggcaccaagaaggacctgagagcccagcctgacaccctacggcgcctcaaggagcagggccaggcgcccatcacaccgcagcagggccaggcactggccaagcagatccacgctgtgcgctacctcgaatgctcagccctgcaacaggatggtgtcaaggaagtgttcgccgaggctgtccgggctgtgctcaaccccacgccgatcaagcgtgggcggtcctgcatcctcttgtgaccctggcacttggcttggaggctgcccctgccctccccccaccagttgtgccttggtgccttgtccgcctcagctgtgccttaaggactaattctggcacccctttccagggggttccctgaatgcctttttctctgagtgcctttt

SEQ ID NO: 174274 - DNA, 1289 bp, Homo sapiens
  Payload ID: 14203
  Gene Symbol: RHOG
  Gene Name: ras homolog family member G
  Uniprot ID: P84095
  ENST ID: ENST00000396979
  CDS Start-End: 133-708
catgaatgcaccaggatgggctaggcatgagagcctgggaacttggaagcaaaaaggctcagatgtcactgcagccagaggggtccagaagagagaggaggcactgcctccactacagcaactgcacccacgatgcagagcatcaagtgcgtggtggtgggtgatggggctgtgggcaagacgtgcctgctcatctgctacacaactaacgctttccccaaagagtacatccccaccgtgttcgacaattacagcgcgcagagcgcagttgacgggcgcacagtgaacctgaacctgtgggacactgcgggccaggaggagtatgaccgcctccgtacactctcctaccctcagaccaacgttttcgtcatctgtttctccattgccagtccgccgtcctatgagaacgtgcggcacaagtggcatccagaggtgtgccaccactgccctgatgtgcccatcctgctggtgggcaccaagaaggacctgagagcccagcctgacaccctacggcgcctcaaggagcagggccaggcgcccatcacaccgcagcagggccaggcactggccaagcagatccacgctgtgcgctacctcgaatgctcagccctgcaacaggatggtgtcaaggaagtgttcgccgaggctgtccgggctgtgctcaaccccacgccgatcaagcgtgggcggtcctgcatcctcttgtgaccctggcacttggcttggaggctgcccctgccctccccccaccagttgtgccttggtgccttgtccgcctcagctgtgccttaaggactaattctggcacccctttccagggggttccctgaatgcctttttctctgagtgcctttttctccttaaggaggcctgcagagaaaggggctttgggctctgcccccctctgcttgggaacactgggtattctcatgagctcatccaagccaaggttggacccctccccaagaggccaacccagtgccccctcccattttccgctactgaccagttcatccagctttccacacagttgttgctgcctattgtggtgccgcctcaggttaggggctctcagccatctctaacctctgccctcgctgctcttggaattgcgcccccaagatgctctctcccttctccaatgagggagccacagaatcctgagaaggtgaatgtgccctaacctgctcctctgtgcctaggccttacgcatttgctgactgactcagcccccatgcttctggggacctttcctacccccatcagcatcaataaaacctcctgtctcc

SEQ ID NO: 174275 - DNA, 886 bp, Homo sapiens
  Payload ID: 14203
  Gene Symbol: RHOG
  Gene Name: ras homolog family member G
  Uniprot ID: P84095
  ENST ID: ENST00000533217
  CDS Start-End: 193-768
cagggtcttgctctgtcgcacaggctggagtgcagtggtgtgatcatagcccactgcagccttgaccaccctgggatcaagtgatgctcccacctcagcctcccgagtagctgggactacaggtgtcactgcagccagaggggtccagaagagagaggaggcactgcctccactacagcaactgcacccacgatgcagagcatcaagtgcgtggtggtgggtgatggggctgtgggcaagacgtgcctgctcatctgctacacaactaacgctttccccaaagagtacatccccaccgtgttcgacaattacagcgcgcagagcgcagttgacgggcgcacagtgaacctgaacctgtgggacactgcgggccaggaggagtatgaccgcctccgtacactctcctaccctcagaccaacgttttcgtcatctgtttctccattgccagtccgccgtcctatgagaacgtgcggcacaagtggcatccagaggtgtgccaccactgccctgatgtgcccatcctgctggtgggcaccaagaaggacctgagagcccagcctgacaccctacggcgcctcaaggagcagggccaggcgcccatcacaccgcagcagggccaggcactggccaagcagatccacgctgtgcgctacctcgaatgctcagccctgcaacaggatggtgtcaaggaagtgttcgccgaggctgtccgggctgtgctcaaccccacgccgatcaagcgtgggcggtcctgcatcctcttgtgaccctggcacttggcttggaggctgcccctgccctccccccaccagttgtgccttggtgccttgtccgcctcagctgtgccttaaggactaattctggcacccctttccagggggttcc

SEQ ID NO: 174276 - DNA, 4305 bp, Homo sapiens
  Payload ID: 14204
  Gene Symbol: RHOH
  Gene Name: ras homolog family member H
  Uniprot ID: Q15669
  ENST ID: ENST00000381799
  CDS Start-End: 725-1300
tattctaatggagagaaacgcacgtgcacacacacccccctaaacccacacaaatgaaaccccctctgcggagaagccggctacaggaaattgacttaggcacaggaacttgctaatctcttttgtcacattcggattgctcctgctgccccacacacactaacccaaccatcttggggtggactccctgccagcccaactgttgtattttcagttcttccagtgtgaatcagttaatattctcgggaacgagggagaggttgatcctatgaggaaatcaaccacagtgaaaaggcttgggccgcttttgttttcacctgcttttgttgaacaaatttgatttccggagtcagtcattttactgtcaagacatttcttcggcattctgcaacagtttccaacatggctagatccatcagaaactgaagccgtggagaacgctctcggggcctttgccacttcttggagtagaagccgacagagagctgtttggaaacttctccttcacacaccagttgaagactaggctttggaggttttcaaagcagacggtgcttggatgggcagggagaagtaacattctgcaaatcgccgtcagaggtcctgaggacacagacctacctggcttgcattccccttgctgaatggcgtgtgctgcagctgcccactgagggctcttttccctgggattctggacttcagagtaggacagcaggctgggaagatgctgagttccatcaagtgcgtgttggtgggcgactctgctgtggggaaaacctctctgttggtgcgcttcacctccgagaccttcccggaggcctacaagcccacagtgtacgagaacacaggggtggacgtcttcatggatggcatccagatcagcctgggcctctgggacacagccggcaatgacgccttcagaagcatccggcccctgtcctaccagcaggcagacgtggtgctgatgtgctactctgtggccaaccataactcattcctgaacttgaagaacaagtggattggtgaaattaggagcaacttgccctgtacccctgtgctggtggtggccacccagactgaccagcgggagatggggccccacagggcctcctgcgtcaatgccatggaagggaagaaactggcccaggatgtcagagccaagggctacctggagtgctcagcccttagcaatcggggagtacagcaggtgtttgagtgcgccgtccgaactgccgtcaaccaggccaggagacgaaacagaaggaggctcttctccatcaatgagtgcaagatcttctaaaccccaagagacttcacacaacacttatgtatgcaccccaaagactaatggggagagggagggccgggaagccaggaaagcttggtgttttctctgggtacaccccaagcagcgtctccttttggatacagttattgatgaggcttggccactggatgttttcactaactacactctacaagtgaactccttgcccaggccagttagaaaatcccttggggaactgtgatgaatattccatctttgattaaaaaagtgaaatagtctccataattttggacgatgaagtgagtttttcaaagaattccatatttaaagacacattttatttaactaataacaaaatgtattgcttttgtatatatttagttttcacacttggaaaatcttttcctacatcctcgaaaacataaactcctctgtgagtgaaatgcttgtacgaagctctgccatatgtttgtagtgttattattttcacctcaagtagaaagtctgttgaaaccacttggctgctggatttaaatgggtaatcaaatttaaaaatgaccataaatgaatctttgcaatttgttttctacttacctgttattcacagttggatataaaatacagttccataagatatcctaatactgcctaatgattttaaagttatcactatatttttctgaaatgataaaacatcattcatttatttactatattgtctttcactcaactccagttatgcactaaatattctcctctcattcaccaagattgattgaaacaccatctttcaggtagagaatcagactgctccaagcaatggcaacagaacttggaacagaagcaagagagtgtcactttcacttctggtagggtggttcccaggcgactgcaggtcctgtgaaagacaggggtctcaaagttctgttaatttcacaaatttgttataaatttgtctaaactgagctgttgtggcaacataatttatgaatcgtaaggtctagttaggcttattggggggatatctacatatatatgtgtatgtaagggaaaaaaggtagaatttacagccttcaaaaaagaaaaatcaaattccaagcacaggaataagaaagctatatagcaactgctcagagaacagaaagttatcaggggaaatactgaataaatagacacacacatactcgcacacaacctgctctcacacacacaactcaaacctcattctatcgaatagtttaaaagcaatggtgttgctcatctgttaaagtggagaacagaggactacataacttaaggtagaaattgcaaaggctgggttgggcagggcgtggtggctcactttgggaggctgagacgggtggatcacgaggccaggagttcaagaccagcctggccaacatggtgaaaccccgtctcttctaaatattagctaaaaattagctgggtgtggtggcacatgcctgtagttctagctactcaagaggctgaggcaaaagaattgctcgaacctgggaggcggaggttgcagtaagccaagatcgcgccactgcactccagcctgggcaacagagggagactccatctcaaaaaaaaaaaaaagaaaagaaaaaaaagaaagaaattgcaaaggctggcacctagatagatcaatcaattactgccctaatcaaaacttagaaacactctgaaccacctttatgaaggtacatcattgttatggggtaacgtgactattacacacaaaaggtaaggtggctggcataaatgactttgattagaattatgttgacatagccaaaccagtttctctgttcccttgtgtggtcaattccttacagctataatcagtatcaaaaaccaaatgtgtgctcattcacacattgctttctccttctctctctcctcctatccacagccagtaaaaggcctgggaccggggtcttgatctctggtgggaggattgcctcggttccctggggctgacacagctgccttcactcagacttctctgctctccaggcggtggcttgtactcacctctaagtcacccgcctcccttgattggagagcccgtgtctctagttctcagctcagggttggggggcttgaaagatgaccgggcaggggaggggaagggatctcatatcctctgatatccctgggattctcttcttctccctcaacccacagagtcttaaatcacggatgcgggtgttcagggccagcctttgccatgagaggtatttaacatgtcagtgggaaggaatttctattcactgcagtgggctgtcccccaggcttttctttctctcttgttgaagagagatgggggtgggtatctgaaagtgggaagggccaccatacatgatcctaagtgaaggaagaggaggtggttccacggtggcagcagagcaggaagggaaggccagagagggcacactcaaatggctttgctgtcacctgggcaaagacacacaggtgagacctccacctgttggcgggagccaagcttaacagctccgtctgggaactctcatacctgagaccaggaatctatgtgtaaaccctttccagtggcagaatctggcagaaatggagccgataagtgtctgtcttcctgctagactgctgttcttgaaggtagcactgcctcctggtctcctcagtgtccccagggctcagcacagggaaggcaatggaggtaaagttgtgttaaactgaaatggagagaaagacagtaattgggcttctgtgccacacagtggttatagaaagcaagcagaccctcaccagccttgtaggggtaagaagaaaaataggtcatatgggtagaatccgtgtgttgtgtgttctacataagcacatacttacttttgcctgcctagatgcagacacaggtttcttatacttcaaaatttgtggtacctttttgtagactattgcatatcgattcttaactattccaagtagcagcattaaatatgttcttgatgacattaaagagttaattttca

SEQ ID NO: 174277 - DNA, 571 bp, Homo sapiens
  Payload ID: 14204
  Gene Symbol: RHOH
  Gene Name: ras homolog family member H
  ENST ID: ENST00000511121
  CDS Start-End: 553-571
actgtggaatagtggtttctaaagctggctggacagcaaaaccacctggggagcttttaagaaactgaaattccatgtctcataccccagccctcacgtgaggtccaggaatctgtgtgattaaaaaatacaagccccaaaacaacttggaaagtggtcgttttgcaggtggggatttaggaaccaagaatccagaactctcctaccagggccccagaaacctttccaacatggctagatccatcagaaactgaagccgtggagaacgctctcggggcctttgccacttcttggagtagaagccgacagagagctgtttggaaacttctccttcacacaccagttgaagactaggctttggaggttttcaaagcagacggtgcttggatgggcagggagaagtaacattctgcaaatcgccgtcagaggtcctgaggacacagacctacctggcttgcattccccttgctgaatggcgtgtgctgcagctgcccactgagggctcttttccctgggattctggacttcagagtaggacagcaggctgggaagatgctgagttccatcaagt

SEQ ID NO: 174278 - DNA, 874 bp, Homo sapiens
  Payload ID: 14204
  Gene Symbol: RHOH
  Gene Name: ras homolog family member H
  ENST ID: ENST00000508513
  CDS Start-End: 827-874
tgtgaggctgtgagatgggagaatcaatctatttattggtcagaaagtggttgttcagtaccttggatttctgagtgggcaaggctggaccctgagccctgggacctctgaagtgaacactgcagggccatttgttcttccagtgtgaatcagttaatattctcgggaacgagggagaggttgatcctatgaggaaatcaaccacagtgaaaaggcttgggccgcttttgttttcacctgcttttgttgaacaaatttgatttccggagtcagtcattttactgtcaagacatttcttcggcattctgcaacagttttatctacatacaggaaagtgaacaccacgtgggtatacagcttggtggattttcacaaactgcacacacttgtggaaccagcatccagatcaggaagcaacagatgtcctttaaaacatcaagaactgggccggacatggtggctcacgcctgtaatcccagcactttgggaggccaagtttccaacatggctagatccatcagaaactgaagccgtggagaacgctctcggggcctttgccacttcttggagtagaagccgacagagagctgtttggaaacttctccttcacacaccagttgaagactaggctttggaggttttcaaagcagacggtgcttggatgggcagggagaagtaacattctgcaaatcgccgtcagaggtcctgaggacacagacctacctggcttgcattccccttgctgaatggcgtgtgctgcagctgcccactgagggctcttttccctgggattctggacttcagagtaggacagcaggctgggaagatgctgagttccatcaagtgcgtgttggtgggcgactctgctgtgggg

SEQ ID NO: 174279 - DNA, 814 bp, Homo sapiens
  Payload ID: 14204
  Gene Symbol: RHOH
  Gene Name: ras homolog family member H
  ENST ID: ENST00000507851
  CDS Start-End: 488-814
aagtgtttaccataaagggcagctgtgaggctgtgagatgggagaatcaatctatttattggtcagaaagtggttgttcagtaccttggatttctgagtgggcaaggctggaccctgagccctgggacctctgaagtgaacactgcagggccatttgtttccaacatggctagatccatcagaaactgaagccgtggagaacgctctcggggcctttgccacttcttggagtagaagccgacagagagctgtttggaaacttctccttcacacaccagttgaagactaggctttggaggttttcaaagcagacggtgcttggatgggcagggagaagtaacattctgcaaatcgccgtcagaggtcctgaggacacagacctacctggcttgcattccccttgctgaatggcgtgtgctgcagctgcccactgagggctcttttccctgggattctggacttcagagtaggacagcaggctgggaagatgctgagttccatcaagtgcgtgttggtgggcgactctgctgtggggaaaacctctctgttggtgcgcttcacctccgagaccttcccggaggcctacaagcccacagtgtacgagaacacaggggtggacgtcttcatggatggcatccagatcagcctgggcctctgggacacagccggcaatgacgccttcagaagcatccggcccctgtcctaccagcaggcagacgtggtgctgatgtgctactctgtggccaaccataactcattcctgaacttgaagaacaagtggattggtgaaattaggagcaacttgccctgtacc

SEQ ID NO: 174280 - DNA, 1225 bp, Homo sapiens
  Payload ID: 14204
  Gene Symbol: RHOH
  Gene Name: ras homolog family member H
  Uniprot ID: Q15669
  ENST ID: ENST00000505618
  CDS Start-End: 617-1192
agtttgagaagaagcagtgatcaccttcttcttcactcttcacgctgatgaatttctacatcactgtgcatgtcctgtgctttgcagtcattccctaggagctcgggcccttgacccaaagatactgctcttactaacactacattttaaactcctcctctggactcactctcagagcctgccgcacaatctttaaaaactttgtcaatgattgcaaaatctttttccttttagagtggatttgattttaggagacagccattcggagctacatccagtgaataagtttccaacatggctagatccatcagaaactgaagccgtggagaacgctctcggggcctttgccacttcttggagtagaagccgacagagagctgtttggaaacttctccttcacacaccagttgaagactaggctttggaggttttcaaagcagacggtgcttggatgggcagggagaagtaacattctgcaaatcgccgtcagaggtcctgaggacacagacctacctggcttgcattccccttgctgaatggcgtgtgctgcagctgcccactgagggctcttttccctgggattctggacttcagagtaggacagcaggctgggaagatgctgagttccatcaagtgcgtgttggtgggcgactctgctgtggggaaaacctctctgttggtgcgcttcacctccgagaccttcccggaggcctacaagcccacagtgtacgagaacacaggggtggacgtcttcatggatggcatccagatcagcctgggcctctgggacacagccggcaatgacgccttcagaagcatccggcccctgtcctaccagcaggcagacgtggtgctgatgtgctactctgtggccaaccataactcattcctgaacttgaagaacaagtggattggtgaaattaggagcaacttgccctgtacccctgtgctggtggtggccacccagactgaccagcgggagatggggccccacagggcctcctgcgtcaatgccatggaagggaagaaactggcccaggatgtcagagccaagggctacctggagtgctcagcccttagcaatcggggagtacagcaggtgtttgagtgcgccgtccgaactgccgtcaaccaggccaggagacgaaacagaaggaggctcttctccatcaatgagtgcaagatcttctaaaccccaagagacttcacacaacacttatgtatg

SEQ ID NO: 174281 - DNA, 789 bp, Homo sapiens
  Payload ID: 14204
  Gene Symbol: RHOH
  Gene Name: ras homolog family member H
  ENST ID: ENST00000503941
  CDS Start-End: 481-789
agaggcgtgtaggtcaggagcaggaggaagcccaacgctggactgtaccagatcatctaaaactggcaattccaggcacagaaaaccagttcttcagaagcagaagggtggtcagccagggggtgaaagggacaggggtctcgcagccagtttccaacatggctagatccatcagaaactgaagccgtggagaacgctctcggggcctttgccacttcttggagtagaagccgacagagagctgtttggaaacttctccttcacacaccagttgaagactaggctttggaggttttcaaagcagacggtgcttggatgggcagggagaagtaacattctgcaaatcgccgtcagaggtcctgaggacacagacctacctggcttgcattccccttgctgaatggcgtgtgctgcagctgcccactgagggctcttttccctgggattctggacttcagagtaggacagcaggctgggaagatgctgagttccatcaagtgcgtgttggtgggcgactctgctgtggggaaaacctctctgttggtgcgcttcacctccgagaccttcccggaggcctacaagcccacagtgtacgagaacacaggggtggacgtcttcatggatggcatccagatcagcctgggcctctgggacacagccggcaatgacgccttcagaagcatccggcccctgtcctaccagcaggcagacgtggtgctgatgtgctactctgtggccaaccataactcattcctgaacttgaagaacaagtggattggtgaaattagg

SEQ ID NO: 174282 - DNA, 2114 bp, Homo sapiens
  Payload ID: 14204
  Gene Symbol: RHOH
  Gene Name: ras homolog family member H
  Uniprot ID: Q15669
  ENST ID: ENST00000614836
  CDS Start-End: 737-1312
tattctaatggagagaaacgcacgtgcacacacacccccctaaacccacacaaatgaaaccccctctgcggagaagccggctacaggaaattgacttaggcacaggaacttgctaatctcttttgtcacattcggattgctcctgctgccccacacacactaacccaaccatcttggggtggactccctgccagcccaactgttgtattttcagttcttccagtgtgaatcagttaatattctcgggaacgagggagaggttgatcctatgaggaaatcaaccacagtgaaaaggcttgggccgcttttgttttcacctgcttttgttgaacaaatttgatttccggagtcagtcattttactgtcaagacatttcttcggcattctgcaacagtttccaacatggctagatccatcagaaactgaagccgtggagaacgctctcggggcctttgccacttcttggagtagaagccgacagagagctgtttggaaacttctccttcacacaccaggttgctactgagttgaagactaggctttggaggttttcaaagcagacggtgcttggatgggcagggagaagtaacattctgcaaatcgccgtcagaggtcctgaggacacagacctacctggcttgcattccccttgctgaatggcgtgtgctgcagctgcccactgagggctcttttccctgggattctggacttcagagtaggacagcaggctgggaagatgctgagttccatcaagtgcgtgttggtgggcgactctgctgtggggaaaacctctctgttggtgcgcttcacctccgagaccttcccggaggcctacaagcccacagtgtacgagaacacaggggtggacgtcttcatggatggcatccagatcagcctgggcctctgggacacagccggcaatgacgccttcagaagcatccggcccctgtcctaccagcaggcagacgtggtgctgatgtgctactctgtggccaaccataactcattcctgaacttgaagaacaagtggattggtgaaattaggagcaacttgccctgtacccctgtgctggtggtggccacccagactgaccagcgggagatggggccccacagggcctcctgcgtcaatgccatggaagggaagaaactggcccaggatgtcagagccaagggctacctggagtgctcagcccttagcaatcggggagtacagcaggtgtttgagtgcgccgtccgaactgccgtcaaccaggccaggagacgaaacagaaggaggctcttctccatcaatgagtgcaagatcttctaaaccccaagagacttcacacaacacttatgtatgcaccccaaagactaatggggagagggagggccgggaagccaggaaagcttggtgttttctctgggtacaccccaagcagcgtctccttttggatacagttattgatgaggcttggccactggatgttttcactaactacactctacaagtgaactccttgcccaggccagttagaaaatcccttggggaactgtgatgaatattccatctttgattaaaaaagtgaaatagtctccataattttggacgatgaagtgagtttttcaaagaattccatatttaaagacacattttatttaactaataacaaaatgtattgcttttgtatatatttagttttcacacttggaaaatcttttcctacatcctcgaaaacataaactcctctgtgagtgaaatgcttgtacgaagctctgccatatgtttgtagtgttattattttcacctcaagtagaaagtctgttgaaaccacttggctgctggatttaaatgggtaatcaaatttaaaaatgaccataaatgaatctttgcaatttgttttctacttacctgttattcacagttggatataaaatacagttccataagatatcctaatactgcctaatgattttaaagttatcactatatttttctgaaatgataaaacatcattcatttatttactatattgtctttcactcaactccagttatgcactaaatattctcctctcattcaccaagattgattgaaacaccatctttcaggtagagaatcagactgctcc

SEQ ID NO: 174283 - DNA, 2268 bp, Homo sapiens
  Payload ID: 14204
  Gene Symbol: RHOH
  Gene Name: ras homolog family member H
  Uniprot ID: Q15669
  ENST ID: ENST00000610353
  CDS Start-End: 891-1466
tattctaatggagagaaacgcacgtgcacacacacccccctaaacccacacaaatgaaaccccctctgcggagaagccggctacaggaaattgacttaggcacaggaacttgctaatctcttttgtcacattcggattgctcctgctgccccacacacactaacccaaccatcttggggtggactccctgccagcccaactgttgtattttcagttcttccagtgtgaatcagttaatattctcgggaacgagggagaggttgatcctatgaggaaatcaaccacagtgaaaaggcttgggccgcttttgttttcacctgcttttgttgaacaaatttgatttccggagtcagtcattttactgtcaagacatttcttcggcattctgcaacaggaaagtgaacaccacgtgggtatacagcttggtggattttcacaaactgcacacacttgtggaaccagcatccagatcaggaagcaacagatgtcctttaaaacatcaagaactgggccggacatggtggctcacgcctgtaatcccagcactttgggaggccaagtttccaacatggctagatccatcagaaactgaagccgtggagaacgctctcggggcctttgccacttcttggagtagaagccgacagagagctgtttggaaacttctccttcacacaccagttgaagactaggctttggaggttttcaaagcagacggtgcttggatgggcagggagaagtaacattctgcaaatcgccgtcagaggtcctgaggacacagacctacctggcttgcattccccttgctgaatggcgtgtgctgcagctgcccactgagggctcttttccctgggattctggacttcagagtaggacagcaggctgggaagatgctgagttccatcaagtgcgtgttggtgggcgactctgctgtggggaaaacctctctgttggtgcgcttcacctccgagaccttcccggaggcctacaagcccacagtgtacgagaacacaggggtggacgtcttcatggatggcatccagatcagcctgggcctctgggacacagccggcaatgacgccttcagaagcatccggcccctgtcctaccagcaggcagacgtggtgctgatgtgctactctgtggccaaccataactcattcctgaacttgaagaacaagtggattggtgaaattaggagcaacttgccctgtacccctgtgctggtggtggccacccagactgaccagcgggagatggggccccacagggcctcctgcgtcaatgccatggaagggaagaaactggcccaggatgtcagagccaagggctacctggagtgctcagcccttagcaatcggggagtacagcaggtgtttgagtgcgccgtccgaactgccgtcaaccaggccaggagacgaaacagaaggaggctcttctccatcaatgagtgcaagatcttctaaaccccaagagacttcacacaacacttatgtatgcaccccaaagactaatggggagagggagggccgggaagccaggaaagcttggtgttttctctgggtacaccccaagcagcgtctccttttggatacagttattgatgaggcttggccactggatgttttcactaactacactctacaagtgaactccttgcccaggccagttagaaaatcccttggggaactgtgatgaatattccatctttgattaaaaaagtgaaatagtctccataattttggacgatgaagtgagtttttcaaagaattccatatttaaagacacattttatttaactaataacaaaatgtattgcttttgtatatatttagttttcacacttggaaaatcttttcctacatcctcgaaaacataaactcctctgtgagtgaaatgcttgtacgaagctctgccatatgtttgtagtgttattattttcacctcaagtagaaagtctgttgaaaccacttggctgctggatttaaatgggtaatcaaatttaaaaatgaccataaatgaatctttgcaatttgttttctacttacctgttattcacagttggatataaaatacagttccataagatatcctaatactgcctaatgattttaaagttatcactatatttttctgaaatgataaaacatcattcatttatttactatattgtctttcactcaactccagttatgcactaaatattctcctctcattcaccaagattgattgaaacaccatctttcaggtagagaatcagactgctcc

SEQ ID NO: 174284 - DNA, 2156 bp, Homo sapiens
  Payload ID: 14204
  Gene Symbol: RHOH
  Gene Name: ras homolog family member H
  Uniprot ID: Q15669
  ENST ID: ENST00000615083
  CDS Start-End: 779-1354
tattctaatggagagaaacgcacgtgcacacacacccccctaaacccacacaaatgaaaccccctctgcggagaagccggctacaggaaattgacttaggcacaggaacttgctaatctcttttgtcacattcggattgctcctgctgccccacacacactaacccaaccatcttggggtggactccctgccagcccaactgttgtattttcagttcttccagtgtgaatcagttaatattctcgggaacgagggagaggttgatcctatgaggaaatcaaccacagtgaaaaggcttgggccgcttttgttttcacctgcttttgttgaacaaatttgatttccggagtcagtcattttactgtcaagacatttcttcggcattctgcaacaggtggggatttaggaaccaagaatccagaactctcctaccagggccccagaaacctttccaacatggctagatccatcagaaactgaagccgtggagaacgctctcggggcctttgccacttcttggagtagaagccgacagagagctgtttggaaacttctccttcacacaccagttgaagactaggctttggaggttttcaaagcagacggtgcttggatgggcagggagaagtaacattctgcaaatcgccgtcagaggtcctgaggacacagacctacctggcttgcattccccttgctgaatggcgtgtgctgcagctgcccactgagggctcttttccctgggattctggacttcagagtaggacagcaggctgggaagatgctgagttccatcaagtgcgtgttggtgggcgactctgctgtggggaaaacctctctgttggtgcgcttcacctccgagaccttcccggaggcctacaagcccacagtgtacgagaacacaggggtggacgtcttcatggatggcatccagatcagcctgggcctctgggacacagccggcaatgacgccttcagaagcatccggcccctgtcctaccagcaggcagacgtggtgctgatgtgctactctgtggccaaccataactcattcctgaacttgaagaacaagtggattggtgaaattaggagcaacttgccctgtacccctgtgctggtggtggccacccagactgaccagcgggagatggggccccacagggcctcctgcgtcaatgccatggaagggaagaaactggcccaggatgtcagagccaagggctacctggagtgctcagcccttagcaatcggggagtacagcaggtgtttgagtgcgccgtccgaactgccgtcaaccaggccaggagacgaaacagaaggaggctcttctccatcaatgagtgcaagatcttctaaaccccaagagacttcacacaacacttatgtatgcaccccaaagactaatggggagagggagggccgggaagccaggaaagcttggtgttttctctgggtacaccccaagcagcgtctccttttggatacagttattgatgaggcttggccactggatgttttcactaactacactctacaagtgaactccttgcccaggccagttagaaaatcccttggggaactgtgatgaatattccatctttgattaaaaaagtgaaatagtctccataattttggacgatgaagtgagtttttcaaagaattccatatttaaagacacattttatttaactaataacaaaatgtattgcttttgtatatatttagttttcacacttggaaaatcttttcctacatcctcgaaaacataaactcctctgtgagtgaaatgcttgtacgaagctctgccatatgtttgtagtgttattattttcacctcaagtagaaagtctgttgaaaccacttggctgctggatttaaatgggtaatcaaatttaaaaatgaccataaatgaatctttgcaatttgttttctacttacctgttattcacagttggatataaaatacagttccataagatatcctaatactgcctaatgattttaaagttatcactatatttttctgaaatgataaaacatcattcatttatttactatattgtctttcactcaactccagttatgcactaaatattctcctctcattcaccaagattgattgaaacaccatctttcaggtagagaatcagactgctcc

SEQ ID NO: 174285 - DNA, 1865 bp, Homo sapiens
  Payload ID: 14204
  Gene Symbol: RHOH
  Gene Name: ras homolog family member H
  Uniprot ID: Q15669
  ENST ID: ENST00000613272
  CDS Start-End: 488-1063
aagtgtttaccataaagggcagctgtgaggctgtgagatgggagaatcaatctatttattggtcagaaagtggttgttcagtaccttggatttctgagtgggcaaggctggaccctgagccctgggacctctgaagtgaacactgcagggccatttgtttccaacatggctagatccatcagaaactgaagccgtggagaacgctctcggggcctttgccacttcttggagtagaagccgacagagagctgtttggaaacttctccttcacacaccagttgaagactaggctttggaggttttcaaagcagacggtgcttggatgggcagggagaagtaacattctgcaaatcgccgtcagaggtcctgaggacacagacctacctggcttgcattccccttgctgaatggcgtgtgctgcagctgcccactgagggctcttttccctgggattctggacttcagagtaggacagcaggctgggaagatgctgagttccatcaagtgcgtgttggtgggcgactctgctgtggggaaaacctctctgttggtgcgcttcacctccgagaccttcccggaggcctacaagcccacagtgtacgagaacacaggggtggacgtcttcatggatggcatccagatcagcctgggcctctgggacacagccggcaatgacgccttcagaagcatccggcccctgtcctaccagcaggcagacgtggtgctgatgtgctactctgtggccaaccataactcattcctgaacttgaagaacaagtggattggtgaaattaggagcaacttgccctgtacccctgtgctggtggtggccacccagactgaccagcgggagatggggccccacagggcctcctgcgtcaatgccatggaagggaagaaactggcccaggatgtcagagccaagggctacctggagtgctcagcccttagcaatcggggagtacagcaggtgtttgagtgcgccgtccgaactgccgtcaaccaggccaggagacgaaacagaaggaggctcttctccatcaatgagtgcaagatcttctaaaccccaagagacttcacacaacacttatgtatgcaccccaaagactaatggggagagggagggccgggaagccaggaaagcttggtgttttctctgggtacaccccaagcagcgtctccttttggatacagttattgatgaggcttggccactggatgttttcactaactacactctacaagtgaactccttgcccaggccagttagaaaatcccttggggaactgtgatgaatattccatctttgattaaaaaagtgaaatagtctccataattttggacgatgaagtgagtttttcaaagaattccatatttaaagacacattttatttaactaataacaaaatgtattgcttttgtatatatttagttttcacacttggaaaatcttttcctacatcctcgaaaacataaactcctctgtgagtgaaatgcttgtacgaagctctgccatatgtttgtagtgttattattttcacctcaagtagaaagtctgttgaaaccacttggctgctggatttaaatgggtaatcaaatttaaaaatgaccataaatgaatctttgcaatttgttttctacttacctgttattcacagttggatataaaatacagttccataagatatcctaatactgcctaatgattttaaagttatcactatatttttctgaaatgataaaacatcattcatttatttactatattgtctttcactcaactccagttatgcactaaatattctcctctcattcaccaagattgattgaaacaccatctttcaggtagagaatcagactgctcc

SEQ ID NO: 174286 - DNA, 2227 bp, Homo sapiens
  Payload ID: 14204
  Gene Symbol: RHOH
  Gene Name: ras homolog family member H
  Uniprot ID: Q15669
  ENST ID: ENST00000615577
  CDS Start-End: 850-1425
aagtgtttaccataaagggcagctgtgaggctgtgagatgggagaatcaatctatttattggtcagaaagtggttgttcagtaccttggatttctgagtgggcaaggctggaccctgagccctgggacctctgaagtgaacactgcagggccatttgttcttccagtgtgaatcagttaatattctcgggaacgagggagaggttgatcctatgaggaaatcaaccacagtgaaaaggcttgggccgcttttgttttcacctgcttttgttgaacaaatttgatttccggagtcagtcattttactgtcaagacatttcttcggcattctgcaacagttttatctacatacaggaaagtgaacaccacgtgggtatacagcttggtggattttcacaaactgcacacacttgtggaaccagcatccagatcaggaagcaacagatgtcctttaaaacatcaagaactgggccggacatggtggctcacgcctgtaatcccagcactttgggaggccaagtttccaacatggctagatccatcagaaactgaagccgtggagaacgctctcggggcctttgccacttcttggagtagaagccgacagagagctgtttggaaacttctccttcacacaccagttgaagactaggctttggaggttttcaaagcagacggtgcttggatgggcagggagaagtaacattctgcaaatcgccgtcagaggtcctgaggacacagacctacctggcttgcattccccttgctgaatggcgtgtgctgcagctgcccactgagggctcttttccctgggattctggacttcagagtaggacagcaggctgggaagatgctgagttccatcaagtgcgtgttggtgggcgactctgctgtggggaaaacctctctgttggtgcgcttcacctccgagaccttcccggaggcctacaagcccacagtgtacgagaacacaggggtggacgtcttcatggatggcatccagatcagcctgggcctctgggacacagccggcaatgacgccttcagaagcatccggcccctgtcctaccagcaggcagacgtggtgctgatgtgctactctgtggccaaccataactcattcctgaacttgaagaacaagtggattggtgaaattaggagcaacttgccctgtacccctgtgctggtggtggccacccagactgaccagcgggagatggggccccacagggcctcctgcgtcaatgccatggaagggaagaaactggcccaggatgtcagagccaagggctacctggagtgctcagcccttagcaatcggggagtacagcaggtgtttgagtgcgccgtccgaactgccgtcaaccaggccaggagacgaaacagaaggaggctcttctccatcaatgagtgcaagatcttctaaaccccaagagacttcacacaacacttatgtatgcaccccaaagactaatggggagagggagggccgggaagccaggaaagcttggtgttttctctgggtacaccccaagcagcgtctccttttggatacagttattgatgaggcttggccactggatgttttcactaactacactctacaagtgaactccttgcccaggccagttagaaaatcccttggggaactgtgatgaatattccatctttgattaaaaaagtgaaatagtctccataattttggacgatgaagtgagtttttcaaagaattccatatttaaagacacattttatttaactaataacaaaatgtattgcttttgtatatatttagttttcacacttggaaaatcttttcctacatcctcgaaaacataaactcctctgtgagtgaaatgcttgtacgaagctctgccatatgtttgtagtgttattattttcacctcaagtagaaagtctgttgaaaccacttggctgctggatttaaatgggtaatcaaatttaaaaatgaccataaatgaatctttgcaatttgttttctacttacctgttattcacagttggatataaaatacagttccataagatatcctaatactgcctaatgattttaaagttatcactatatttttctgaaatgataaaacatcattcatttatttactatattgtctttcactcaactccagttatgcactaaatattctcctctcattcaccaagattgattgaaacaccatctttcaggtagagaatcagactgctcc

SEQ ID NO: 174287 - DNA, 2230 bp, Homo sapiens
  Payload ID: 14204
  Gene Symbol: RHOH
  Gene Name: ras homolog family member H
  Uniprot ID: Q15669
  ENST ID: ENST00000619474
  CDS Start-End: 853-1428
tattctaatggagagaaacgcacgtgcacacacacccccctaaacccacacaaatgaaaccccctctgcggagaagccggctacaggaaattgacttaggcacaggaacttgctaatctcttttgtcacattcggattgctcctgctgccccacacacactaacccaaccatcttggggtggactccctgccagcccaactgttgtattttcagttcttccagtgtgaatcagttaatattctcgggaacgagggagaggttgatcctatgaggaaatcaaccacagtgaaaaggcttgggccgcttttgttttcacctgcttttgttgaacaaatttgatttccggagtcagtcattttactgtcaagacatttcttcggcattctgcaacagggatatttgcatttcaacaaagtaccaaacctcaagagaaagggctgctccaaggatggaagatatatttggtagggagaggactttttatcacccttgattcactccatgtaagcagggaccttctgtttccaacatggctagatccatcagaaactgaagccgtggagaacgctctcggggcctttgccacttcttggagtagaagccgacagagagctgtttggaaacttctccttcacacaccagttgaagactaggctttggaggttttcaaagcagacggtgcttggatgggcagggagaagtaacattctgcaaatcgccgtcagaggtcctgaggacacagacctacctggcttgcattccccttgctgaatggcgtgtgctgcagctgcccactgagggctcttttccctgggattctggacttcagagtaggacagcaggctgggaagatgctgagttccatcaagtgcgtgttggtgggcgactctgctgtggggaaaacctctctgttggtgcgcttcacctccgagaccttcccggaggcctacaagcccacagtgtacgagaacacaggggtggacgtcttcatggatggcatccagatcagcctgggcctctgggacacagccggcaatgacgccttcagaagcatccggcccctgtcctaccagcaggcagacgtggtgctgatgtgctactctgtggccaaccataactcattcctgaacttgaagaacaagtggattggtgaaattaggagcaacttgccctgtacccctgtgctggtggtggccacccagactgaccagcgggagatggggccccacagggcctcctgcgtcaatgccatggaagggaagaaactggcccaggatgtcagagccaagggctacctggagtgctcagcccttagcaatcggggagtacagcaggtgtttgagtgcgccgtccgaactgccgtcaaccaggccaggagacgaaacagaaggaggctcttctccatcaatgagtgcaagatcttctaaaccccaagagacttcacacaacacttatgtatgcaccccaaagactaatggggagagggagggccgggaagccaggaaagcttggtgttttctctgggtacaccccaagcagcgtctccttttggatacagttattgatgaggcttggccactggatgttttcactaactacactctacaagtgaactccttgcccaggccagttagaaaatcccttggggaactgtgatgaatattccatctttgattaaaaaagtgaaatagtctccataattttggacgatgaagtgagtttttcaaagaattccatatttaaagacacattttatttaactaataacaaaatgtattgcttttgtatatatttagttttcacacttggaaaatcttttcctacatcctcgaaaacataaactcctctgtgagtgaaatgcttgtacgaagctctgccatatgtttgtagtgttattattttcacctcaagtagaaagtctgttgaaaccacttggctgctggatttaaatgggtaatcaaatttaaaaatgaccataaatgaatctttgcaatttgttttctacttacctgttattcacagttggatataaaatacagttccataagatatcctaatactgcctaatgattttaaagttatcactatatttttctgaaatgataaaacatcattcatttatttactatattgtctttcactcaactccagttatgcactaaatattctcctctcattcaccaagattgattgaaacaccatctttcaggtagagaatcagactgctcc

SEQ ID NO: 174288 - DNA, 2254 bp, Homo sapiens
  Payload ID: 14204
  Gene Symbol: RHOH
  Gene Name: ras homolog family member H
  Uniprot ID: Q15669
  ENST ID: ENST00000622175
  CDS Start-End: 877-1452
tattctaatggagagaaacgcacgtgcacacacacccccctaaacccacacaaatgaaaccccctctgcggagaagccggctacaggaaattgacttaggcacaggaacttgctaatctcttttgtcacattcggattgctcctgctgccccacacacactaacccaaccatcttggggtggactccctgccagcccaactgttgtattttcagttcttccagtgtgaatcagttaatattctcgggaacgagggagaggttgatcctatgaggaaatcaaccacagtgaaaaggcttgggccgcttttgttttcacctgcttttgttgaacaaatttgatttccggagtcagtcattttactgtcaagacatttcttcggcattctgcaacagcacgaggatgctttggagaacggaaggatttcatcgagtccaaaggacactcacctctaggcctctcagcctccttggccacgtggttgttctgctactgagagtctgcagatgagctggtggtttctccaagcttccgagagctctctcagtttccaacatggctagatccatcagaaactgaagccgtggagaacgctctcggggcctttgccacttcttggagtagaagccgacagagagctgtttggaaacttctccttcacacaccagttgaagactaggctttggaggttttcaaagcagacggtgcttggatgggcagggagaagtaacattctgcaaatcgccgtcagaggtcctgaggacacagacctacctggcttgcattccccttgctgaatggcgtgtgctgcagctgcccactgagggctcttttccctgggattctggacttcagagtaggacagcaggctgggaagatgctgagttccatcaagtgcgtgttggtgggcgactctgctgtggggaaaacctctctgttggtgcgcttcacctccgagaccttcccggaggcctacaagcccacagtgtacgagaacacaggggtggacgtcttcatggatggcatccagatcagcctgggcctctgggacacagccggcaatgacgccttcagaagcatccggcccctgtcctaccagcaggcagacgtggtgctgatgtgctactctgtggccaaccataactcattcctgaacttgaagaacaagtggattggtgaaattaggagcaacttgccctgtacccctgtgctggtggtggccacccagactgaccagcgggagatggggccccacagggcctcctgcgtcaatgccatggaagggaagaaactggcccaggatgtcagagccaagggctacctggagtgctcagcccttagcaatcggggagtacagcaggtgtttgagtgcgccgtccgaactgccgtcaaccaggccaggagacgaaacagaaggaggctcttctccatcaatgagtgcaagatcttctaaaccccaagagacttcacacaacacttatgtatgcaccccaaagactaatggggagagggagggccgggaagccaggaaagcttggtgttttctctgggtacaccccaagcagcgtctccttttggatacagttattgatgaggcttggccactggatgttttcactaactacactctacaagtgaactccttgcccaggccagttagaaaatcccttggggaactgtgatgaatattccatctttgattaaaaaagtgaaatagtctccataattttggacgatgaagtgagtttttcaaagaattccatatttaaagacacattttatttaactaataacaaaatgtattgcttttgtatatatttagttttcacacttggaaaatcttttcctacatcctcgaaaacataaactcctctgtgagtgaaatgcttgtacgaagctctgccatatgtttgtagtgttattattttcacctcaagtagaaagtctgttgaaaccacttggctgctggatttaaatgggtaatcaaatttaaaaatgaccataaatgaatctttgcaatttgttttctacttacctgttattcacagttggatataaaatacagttccataagatatcctaatactgcctaatgattttaaagttatcactatatttttctgaaatgataaaacatcattcatttatttactatattgtctttcactcaactccagttatgcactaaatattctcctctcattcaccaagattgattgaaacaccatctttcaggtagagaatcagactgctcc

SEQ ID NO: 174289 - DNA, 1872 bp, Homo sapiens
  Payload ID: 14204
  Gene Symbol: RHOH
  Gene Name: ras homolog family member H
  Uniprot ID: Q15669
  ENST ID: ENST00000617441
  CDS Start-End: 495-1070
actgtgtgaagattagaggcgtgtaggtcaggagcaggaggaagcccaacgctggactgtaccagatcatctaaaactggcaattccaggcacagaaaaccagttcttcagaagcagaagggtggtcagccagggggtgaaagggacaggggtctcgcagccagtttccaacatggctagatccatcagaaactgaagccgtggagaacgctctcggggcctttgccacttcttggagtagaagccgacagagagctgtttggaaacttctccttcacacaccagttgaagactaggctttggaggttttcaaagcagacggtgcttggatgggcagggagaagtaacattctgcaaatcgccgtcagaggtcctgaggacacagacctacctggcttgcattccccttgctgaatggcgtgtgctgcagctgcccactgagggctcttttccctgggattctggacttcagagtaggacagcaggctgggaagatgctgagttccatcaagtgcgtgttggtgggcgactctgctgtggggaaaacctctctgttggtgcgcttcacctccgagaccttcccggaggcctacaagcccacagtgtacgagaacacaggggtggacgtcttcatggatggcatccagatcagcctgggcctctgggacacagccggcaatgacgccttcagaagcatccggcccctgtcctaccagcaggcagacgtggtgctgatgtgctactctgtggccaaccataactcattcctgaacttgaagaacaagtggattggtgaaattaggagcaacttgccctgtacccctgtgctggtggtggccacccagactgaccagcgggagatggggccccacagggcctcctgcgtcaatgccatggaagggaagaaactggcccaggatgtcagagccaagggctacctggagtgctcagcccttagcaatcggggagtacagcaggtgtttgagtgcgccgtccgaactgccgtcaaccaggccaggagacgaaacagaaggaggctcttctccatcaatgagtgcaagatcttctaaaccccaagagacttcacacaacacttatgtatgcaccccaaagactaatggggagagggagggccgggaagccaggaaagcttggtgttttctctgggtacaccccaagcagcgtctccttttggatacagttattgatgaggcttggccactggatgttttcactaactacactctacaagtgaactccttgcccaggccagttagaaaatcccttggggaactgtgatgaatattccatctttgattaaaaaagtgaaatagtctccataattttggacgatgaagtgagtttttcaaagaattccatatttaaagacacattttatttaactaataacaaaatgtattgcttttgtatatatttagttttcacacttggaaaatcttttcctacatcctcgaaaacataaactcctctgtgagtgaaatgcttgtacgaagctctgccatatgtttgtagtgttattattttcacctcaagtagaaagtctgttgaaaccacttggctgctggatttaaatgggtaatcaaatttaaaaatgaccataaatgaatctttgcaatttgttttctacttacctgttattcacagttggatataaaatacagttccataagatatcctaatactgcctaatgattttaaagttatcactatatttttctgaaatgataaaacatcattcatttatttactatattgtctttcactcaactccagttatgcactaaatattctcctctcattcaccaagattgattgaaacaccatctttcaggtagagaatcagactgctcc

SEQ ID NO: 174290 - DNA, 3302 bp, Homo sapiens
  Payload ID: 14205
  Gene Symbol: RHOJ
  Gene Name: ras homolog family member J
  Uniprot ID: Q9H4E5
  ENST ID: ENST00000316754
  CDS Start-End: 463-1107
cggcaagctggaggaagcaaagggaaaaaaactccattaaaaagcccagctttcctccatgttagatgtgacttggaaaatgagaaagatttagcaaaattccaccgtatcttttgccaggctagagacagggagagcagagtaaaaccctcaggctgctgaaatttctaggctgttaggaagcccctcgaattctgtgaaaatgagggtttcttaactcacactgagagcggaaaggggcagacccttttcataactccctcaagtgtgtgttacctttctttaccagcatggtaagcaacaggacatatcccagcctcggacatgtctgtatgatccaaggtacccaaagtcagacagagtaaactcaagcctggcactggctttctgccgcttcatgtgctttggaaaaagcaggagaagcaatagcagcaggagtccccagcagctggagccgcaagaatgaactgcaaagagggaactgacagcagctgcggctgcaggggcaacgacgagaagaagatgttgaagtgtgtggtggtgggggacggtgccgtggggaaaacctgcctgctgatgagctacgccaacgacgccttcccagaggaatacgtgcccactgtgtttgaccactatgcagttactgtgactgtgggaggcaagcaacacttgctcggactgtatgacaccgcgggacaggaggactacaaccagctgaggccactctcctaccccaacacggatgtgtttttgatctgcttctctgtcgtaaaccctgcctcttaccacaatgtccaggaggaatgggtccccgagctcaaggactgcatgcctcacgtgccttatgtcctcatagggacccagattgatctccgtgatgacccaaaaaccttggcccgtttgctgtatatgaaagagaaacctctcacttacgagcatggtgtgaagctcgcaaaagcgatcggagcacagtgctacttggaatgttcagctctgactcagaaaggtctcaaagcggtttttgatgaagcaatcctcaccattttccaccccaagaaaaagaagaaacgctgttctgagggtcacagctgctgttcaattatctgaggttgtctgggacctgcctccaccccatccagggatgagaatggcagccaatctctgtggccaagctccagccaaaaaggagggcacgaccagaaaggaactccctttgcacggaggcttgccccatcaccctctgagccctcccaacacagcacactagtcagcccactgccacgacctccctgccagccagaagcatccgtactgcacgctgtctgagaatgctgggcctggattgcagacagtgccgctgctgatcgcatcaaaaacaaagtcaaaggccatctcacattttacaaatccccagctcatgaacgtgaagctgataggaaatcaccccagggaacccgaaaaagaaacttgattcctctattgctggccttacttgatgtcttttataaaacttgggactacaatactaacctttttttctgaatctgctgttctacccatgtgtctcacattcatttgtattatttcaagaaatgtactaatttccagttcactcaggccttactaatccataccaaattagcctaaagacaaggcattttatattcatttctattttcagcatgtttctaccaaagctattagaaccaacacgtacctctgaatgcccgattataagaagacatgagaagactttaaaagttttggaaatttacagagccatgatttttgaacctaattgaaagaaaaccatctgaattgttgcaggtccacatttttgccaaagatacactctatagatgcttagtagtggcctgatttttttccatgtattgccacgacaaactaaaaatgaactgtgtttaagaatgtagtatttctgtttttcatccaagttgattgggggaagaatatggcaggatccatcttttacagtattttgtattcagtaaagtggacattcctgctcctcccttcccccattgcatgccctcttcctcccttgatttcactttctctcatgcccggatccttttattctccccagttataacccagttataaaagaaagatctgagcataaagatacgtgtttaaaaataactaaaagtaaaggaaagtgccttaatttttctatttgcttcaactgaaagtgcttctcagctcgccccatgtaagttctcattccatgtaaatgacattttccagttacaactggtactgagattttgcctctctctttccttactcatcctcccaaatgtctttgtgggagccatatcagtggataccaagctctgtatccatttgtcccctgccctccacaatgtgtgacatagaacagggactttggccctgggaaagcaaaagctcccagtaaggaatcctgtgcccaatgatgtaaaacaattccaaacatccaggaatttttgtatcatagagcgaattacttcctatcttttcattagaggctatgaggacttctaattagtcttagttgcttataagtgccctggaatcacccaggtaggcacttaatttttttttcagttgcatgagcaaagtgcttcttagtagtgtgaaattacaacaactttaagactttccagattcaagctcccactgttggaaaaagccagcctttctaatctcttctgctactggaataagcacttaagaattgcgtgatagccaggcaccgtggctcatgcctgtaatcccaacacttagggaggctgaggtgggtgggccgcttgagctcaggagttcaagaccagcctgggtaatatagtgagatcctgtgtctctataaaaaaattaaaaattagtcagttgtagtgacacatacctgtagtcccagctactcaggaggctgaggtggaaggatcacttgagcccagaaggtaaggctgcagtgagctgtgactgtgccactacactccagcctgagtgacagagaaagaacctgtcaaaaaaaaaaaaaaaacaacctacatttcaagtactatttcccttctctcccatctaattgctaaagattttctttcatacgcacacactccagtgactggaaaaacgggagttttcagtcaaagcttgacatttagagaaaacaaggactttctgcctttataaatggaaatcaactgtgtatgaactataactctgcagaggttatgaattcatcctttacaaacaataatgaacttttagtcctgtaataaatgaaatgttattaggca

SEQ ID NO: 174291 - DNA, 548 bp, Homo sapiens
  Payload ID: 14205
  Gene Symbol: RHOJ
  Gene Name: ras homolog family member J
  ENST ID: ENST00000555125
  CDS Start-End: 12-548
gagccgcaagaatgaactgcaaagagggaactgacagcagctgcggctgcaggggcaacgacgagaagaagatgttgaagtgtgtggtggtgggggacggtgccgtggggaaaacctgcctgctgatgagctacgccaacgacgccttcccagaggaatacgtgcccactgtgtttgaccactatgcagttactgtgactgtgggaggcaagcaacacttgctcggactgtatgacaccgcgggacaggaggactacaaccagctgaggccactctcctaccccaacacggatgtgtttttgatctgcttctctgtcgtaaaccctgcctcttaccacaatgtccaggaggaatgggtccccgagctcaaggactgcatgcctcacgtgccttatgtcctcatagggacccagattgatctccgtgatgacccaaaaaccttggcccgtttgctgtatatgaaagagaaacctctcacttacgagcatggtgtgaagctcgcaaaagcggtacagtcagatttgaatttcattttaaatgtatgctga

SEQ ID NO: 174292 - DNA, 1837 bp, Homo sapiens
  Payload ID: 14205
  Gene Symbol: RHOJ
  Gene Name: ras homolog family member J
  ENST ID: ENST00000557447
  CDS Start-End: 757-1218
gctcgctctaaccattccccctgcttctgtggcaggcagtaatccccgctttccatcctctagtcagcttcttcccagccagccacaagcgaacaggctcgcaagcagcggatgaaacaggaagtctgacagcttgagtctgcagtgggacccctagtgttttcccactccatgtcctggcatcgttccccagaagtacaaacacacacacacagagctcccattgttgcagccttcctcagcccactgatcctaatatggaattcagcaggaaacccatgatttcctgacactcggcaagctggaggaagcaaagggaaaaaaactccattaaaaagcccagctttcctccatgttagatgtgacttggaaaatgagaaagatttagcaaaattccaccgtatcttttgccaggctagagacagggagagcagagtaaaaccctcaggctgctgaaatttctaggctgttaggaagcccctcgaattctgtgaaaatgagggtttcttaactcacactgagagcggaaaggggcagacccttttcataactccctcaagtgtgtgttacctttctttaccagcatggtaagcaacaggacatatcccagcctcggacatgtctgtatgatccaaggtacccaaagtcagacagagtaaactcaagcctggcactggctttctgccgcttcatgtgctttggaaaaagcaggagaagcaatagcagcaggagtccccagcagctggagccgcaagaatgaactgcaaagagggaactgacagcagctgcggctgcaggggcaacgacgagaagaagatgttgaagtgtgtggtggtgggggacggtgccgtggggaaaacctgcctgctgatgagctacgccaacgacgccttcccagaggaatacgtgcccactgtgtttgaccactatgcagttactgtgactgtgggaggcaagcaacacttgctcggactgtatgacaccgcgggacaggaggactacaaccagctgaggccactctcctaccccaacacggatgtgtttttgatctgcttctctgttgtctgggacctgcctccaccccatccagggatgagaatggcagccaatctctgtggccaagctccagccaaaaaggagggcacgaccagaaaggaactccctttgcacggaggcttgccccatcaccctctgagccctcccaacacagcacactagtcagcccactgccacgacctccctgccagccagaagcatccgtactgcacgctgtctgagaatgctgggcctggattgcagacagtgccgctgctgatcgcatcaaaaacaaagtcaaaggccatctcacattttacaaatccccagctcatgaacgtgaagctgataggaaatcaccccagggaacccgaaaaagaaacttgattcctctattgctggccttacttgatgtcttttataaaacttgggactacaatactaacctttttttctgaatctgctgttctacccatgtgtctcacattcatttgtattatttcaagaaattgacagagaaagaacctgtcaaaaaaaaaaaaaaaacaacctacatttcaagtactatttcccttctctcccatctaattgctaaagattttctttcatacgcacacactccagtgactggaaaaacgggagttttcagtcaaagcttgacatttagagaaaacaaggactttctgcctttataaatggaaatcaactgtgtatgaactataactctgcagaggttatgaattcatcctttacaaacaataatgaacttttagtcctgtaataaatgaaatgttattaggca

SEQ ID NO: 174293 - DNA, 2975 bp, Homo sapiens
  Payload ID: 14206
  Gene Symbol: RHOQ
  Gene Name: ras homolog family member Q
  Uniprot ID: P17081
  ENST ID: ENST00000238738
  CDS Start-End: 320-937
ccggtcttatgatccggcggatcctcctggggaggccgggccggggagagggcgcgggcgccgagtggcgggggcagcgggcgggcgcggcgaccggggccggggcggggatccgggcggcgaccgcggcggcggcagcgccccgggcccgccgccccctcccctcctgcgaggggagccgctgcatggggccgggggggcggccctgcggcgcggagcggcggcgacggcggcggaccccccaggcgggctggggctgagcccggggccggggcgggggctccggggggaccatgcccggaggccggccggcagcagcatggctcacgggcccggcgcgctgatgctcaagtgcgtggtggtcggcgacggggcggtgggcaagacgtgcctactcatgagctatgccaacgacgccttcccggaggagtacgtgcccaccgtcttcgaccactacgcagtcagcgtcaccgtggggggcaagcagtacctcctaggactctatgacacggccggacaggaagactatgaccgtctgaggcctttatcttacccaatgaccgatgtcttccttatatgcttctcggtggtaaatccagcctcatttcaaaatgtgaaagaggagtgggtaccggaacttaaggaatacgcaccaaatgtaccctttttattaataggaactcagattgatctccgagatgaccccaaaactttagcaagactgaatgatatgaaagaaaaacctatatgtgtggaacaaggacagaaactagcaaaagagataggagcatgctgctatgtggaatgttcagctttaacccagaagggattgaagactgtttttgatgaggctatcatagccattttaactccaaagaaacacactgtaaaaaaaagaataggatcaagatgtataaactgttgtttaattacgtgagaaacatcttcagtggccaaggaaactgtccatttctctcagaaagcaaatgaaatgctacagctatacccagaccttttataggtaatgaagcagttcaaaacttgaaagaaaacaaaacctgtcctcagaattctataaagtgtattaagaatgttccttaaaggtttaagaagcagtaagcagcatctgaagccacaatctattataaatactttatttcaactagaaggtacaatctctcaggggtttcatagtttaaaaagctacaatcacatcatgttgtaactacgtaaaaaacagagctgtaaatggaactgcttggctttgaccatacacatttctgcccagcccttacagaatctgcacaaagaaatatctccctttgctccagttaattgttcttgtatgtaagttgctttctattccagtatatccagagtggtgaaataacaaggccagccacgtagccaaaggtcgctccaagcgtacaggagatgggccatacctgaggagagaatgtatgagatcaaaaaagaacaaatgttttattattacttgagcacaagtgtaacctaaatatttctatattaaagcttaatgtgctttcttaaagaatgccaaaagtgtaataaggtcataactgcatttatcatgaacactaaaaatgtacacattttagttaatgtgcattaaactgtaacaaggcttctggcaattgtagatttagtttgacgctccccaaagtgcatgagacacatgctaaaattacaaattaaaattttgggtcagactttgccataatgatagactcaatttagctctctgaactagttggtaattttttttttttaattcccactttggctgtgtacatcaaatgaaatgagaagtgtgtatgctgaccaaaccacaagaaactttctttaagttgtgttaaagaggaaagacctagaatccaagcgtgttacatgaaaattgtaacagagcagctgcttccacctttcagatatagatgttggaaccacagcagaagttatagagcgacaacttatatacacacctagaatgtaagttaaacaaaataccggcttccagagaccccttttctccagccatattacatcaggctagaagtaattaatgttgatttatttcatctacaagcagttggtccctaagtgaaaggctctgcttgaaaaaaaaaagaaaaaaaagttggaggaaaattttcatgttcttctgtgaagcttatttggtacactggagccatttctaatctttctctggggggaacaggccacagaactgtgttagaggtgaaccatcttaattactagttctattacctaattcagcttccttgtttggtctgctgtggatctgccttattgcatatgccatgcatcagataatggatgcatcagataatggtgttagacaaagcttcattgtgaacaacctaatgcattttagagaaacaatctcatcacattttttctagcctttcctacatttaaacttgctgttgcccaaattataattttttaaatgtctttggtgggcttctgttaattcacatgacttgagcttatagctatgtctactgcacagattgggtaatggaacactaaacttttatacttgaaaatgacagccttaaatgctcatatcagtcacaaatctaggatgtactgtcttgttgtatgtgagctttgtagagatttttaaaaatataagcatcaccttcccattgaagagtggagagagtctactggatgactggccaggaactttctctctgaatcggacatttggatgtcttctttcttccaagaaatggtggttcacattaaagtatcatggccttatgtatgctcaaatggaatcttatgtaactttcttatttaattttggtctgcttatttttagataaaattgaaaggaattgtataaatcaattaacatattagctgagttgtccaacacatggtataaacgaattacaacagtaaactattacacatttccaacttgc

SEQ ID NO: 174294 - DNA, 714 bp, Homo sapiens
  Payload ID: 14206
  Gene Symbol: RHOQ
  Gene Name: ras homolog family member Q
  ENST ID: ENST00000432183
  CDS Start-End: 312-464
atgatccggcggatcctcctggggaggccgggccggggagagggcgcgggcgccgagtggcgggggcagcgggcgggcgcggcgaccggggccggggcggggatccgggcggcgaccgcggcggcggcagcgccccgggcccgccgccccctcccctcctgcgaggggagccgctgcatggggccgggggggcggccctgcggcgcggagcggcggcgacggcggcggaccccccaggcgggctggggctgagcccggggccggggcgggggctccggggggaccatgcccggaggccggccggcagcagcatggctcacgggcccggcgcgctgatgctcaagtgcgtggtggtcggcgacggggcggtgggcaagacgtgcctactcatgagctatgccaacgacgccttcccggaggagtacgtgcccaccgtcttcgaccactacgcaggaagactatgaccgtctgaggcctttatcttacccaatgaccgatgtcttccttatatgcttctcggtggtaaatccagcctcatttcaaaatgtgaaagaggagtgggtaccggaacttaaggaatacgcaccaaatgtaccctttttattaataggaactcagattgatctccgagatgaccccaaaactttagcaagactgaatgatatgaaagaaaaacctatatgtgtggaacaaggacagaaactagcaaaagag

SEQ ID NO: 174295 - DNA, 674 bp, Homo sapiens
  Payload ID: 14206
  Gene Symbol: RHOQ
  Gene Name: ras homolog family member Q
  ENST ID: ENST00000482449
  CDS Start-End: 450-674
ggctcctgctccccgcacttcctacccctcggcgccctgggccgtcctccttgaccttcccacatcccctttcctactgccccaaggccccgggggaaatattcgaggggaccgagcgagacgtggctacgggacttgggagaagggggtggacggctggggaccacatcacaccccggccctttgccggttcacagtgagctggccgcacgggaaaagggggtgacatctcgcggggagcgcccccacgcctctagctgggttgggagaggagggtccgggtggggagcgaaattgccccagagcccaggtcactgtgagcttctctccccgcccccacttctgtccttgcagtcagcgtcaccgtggggggcaagcagtacctcctaggactctatgacacggccggacaggaagactatgaccgtctgaggcctttatcttacccaatgaccgatgtcttccttatatgcttctcggtggtaaatccagcctcatttcaaaatgtgaaagaggagtgggtaccggaacttaaggaatacgcaccaaatgtaccctttttattaataggaactcagattgatctccgagatgaccccaaaactttagcaagactgaatgatatgaaagaaaaacctatatgtgtggaacaaggacagaaactagcaaaagag

SEQ ID NO: 174296 - DNA, 869 bp, Homo sapiens
  Payload ID: 14206
  Gene Symbol: RHOQ
  Gene Name: ras homolog family member Q
  ENST ID: ENST00000489471
  CDS Start-End: 1-276
ccggaggagtacgtgcccaccgtcttcgaccactacgcagtcagcgtcaccgtggggggcaagcagtacctcctaggactctatgacacggccggacaggctttgcagcaaagcgagttggatttctgggaggagatttctgtttcatctggatcctggggtcacgtgatcacgttttccttccatacgagagcatgggtttccagtggccaggatctgttgtgtccactagctccagcatccgctgtcttactgttggacagaggaagactatgaccgtctgaggcctttatcttacccaatgaccgatgtcttccttatatgcttctcggtggtaaatccagcctcatttcaaaatgtgaaagaggagtgggtaccggaacttaaggaatacgcaccaaatgtaccctttttattaataggaactcagattgatctccgagatgaccccaaaactttagcaagactgaatgatatgaaagaaaaacctatatgtgtggaacaaggacagaaactagcaaaagagataggagcatgctgctatgtggaatgttcagctttaacccagaagggattgaagactgtttttgatgaggctatcatagccattttaactccaaagaaacacactgtaaaaaaaagaataggatcaagatgtataaactgttgtttaattacgtgagaaacatcttcagtggccaaggaaactgtccatttctctcagaaagcaaatgaaatgctacagctatacccagaccttttataggtaatgaagcagttcaaaacttgaaagaaaacaaaacctgtcctcagaattctataaagtgtattaagaatgttccttaaaggtttaagaagcagtaagcagc

SEQ ID NO: 174297 - DNA, 757 bp, Homo sapiens
  Payload ID: 14206
  Gene Symbol: RHOQ
  Gene Name: ras homolog family member Q
  ENST ID: ENST00000473428
  CDS Start-End: 1-103
ggggggcaagcagtacctcctaggactctatgacacggccggacaggaggacactggagagttggctgtgagaagttgtgactttgataagtcgatcttttaaaagaagactatgaccgtctgaggcctttatcttacccaatgaccgatgtcttccttatatgcttctcggtggtaaatccagcctcatttcaaaatgtgaaagaggagtgggtaccggaacttaaggaatacgcaccaaatgtaccctttttattaataggaactcagattgatctccgagatgaccccaaaactttagcaagactgaatgatatgaaagaaaaacctatatgtgtggaacaaggacagaaactagcaaaagagataggagcatgctgctatgtggaatgttcagctttaacccagaagggattgaagactgtttttgatgaggctatcatagccattttaactccaaagaaacacactgtaaaaaaaagaataggatcaagatgtataaactgttgtttaattacgtgagaaacatcttcagtggccaaggaaactgtccatttctctcagaaagcaaatgaaatgctacagctatacccagaccttttataggtaatgaagcagttcaaaacttgaaagaaaacaaaacctgtcctcagaattctataaagtgtattaagaatgttccttaaaggtttaagaagcagtaagcagcatctgaagccacaatctattataaatactttatttcaactagaaggta

SEQ ID NO: 174298 - DNA, 642 bp, Homo sapiens
  Payload ID: 14206
  Gene Symbol: RHOQ
  Gene Name: ras homolog family member Q
  ENST ID: ENST00000616091
  CDS Start-End: 1-642
atgcccggagccggccggagcagcatggctcacgggcccggcgcgctgatgctcaagtgcgtggtggtcggcgacggggcggtgggcaagacgtgcctactcatgagctatgccaacgacgccttcccggaggagtacgtgcccaccgtcttcgaccactacgcagtcagcgtcaccgtggggggcaagcagtacctcctaggactctatgacacggccggacaggaagactatgaccgtctgaggcctttatcttacccaatgaccgatgtcttccttatatgcttctcggtggtaaatccagcctcatttcaaaatgtgaaagaggagtgggtaccggaacttaaggaatacgcaccaaatgtaccctttttattaataggaactcagattgatctccgagatgaccccaaaactttagcaagactgaatgatatgaaagaaaaacctatatgtgtggaacaaggacagaaactagcaaaagagataggagcatgctgctatgtggaatgttcagctttaacccagaagggattgaagactgtttttgatgaggctatcatagccattttaactccaaagaaacacactgtaaaaaaaagaataggatcaagatgtataaactgttgtttaattacgtga

SEQ ID NO: 174299 - DNA, 3133 bp, Homo sapiens
  Payload ID: 14207
  Gene Symbol: RHOT1
  Gene Name: ras homolog family member T1
  Uniprot ID: Q8IXI2
  ENST ID: ENST00000333942
  CDS Start-End: 240-2096
gccgccgccgccgccgccgccgccgccgccgccgccgccgccgccgccacagcccgctgggccggaggaggcggagctggcgctgtcccggctctcttgcggggaagcaactgagggggcggcgcggcgggccccggcggccgaagaggctggcaggtggcgccgtggggtgggtgctcctggtgagaggagtccactccgtgcgtgcgggcggaggccggcccccgagagccgccgacatgaagaaagacgtgcggatcctgctggtgggagaacctagagttgggaagacatcactgattatgtctctggtcagtgaagaatttccagaagaggttcctccccgggcagaagaaatcaccattccagctgatgtcaccccagagagagttccaacacacattgtagattactcagaagcagaacagagtgatgaacaacttcatcaagaaatatctcaggctaatgtcatctgtatagtgtatgccgttaacaacaagcattctattgataaggtaacaagtcgatggattcctctcataaatgaaagaacagacaaagacagcaggctgcctttaatattggttgggaacaaatctgatctggtggaatatagtagtatggagaccatccttcctattatgaaccagtatacagaaatagaaacctgtgtggagtgttcagcgaaaaacctgaagaacatatcagagctcttttattacgcacagaaagctgttcttcatcctacagggcccctgtactgcccagaggagaaggagatgaaaccagcttgtataaaagcccttactcgtatatttaaaatatctgatcaagataatgatggtactctcaatgatgctgaactcaacttctttcagaggatttgtttcaacactccattagctcctcaagctctggaggatgtcaagaatgtagtcagaaaacatataagtgatggtgtggctgacagtgggttgaccctgaaaggttttctctttttacacacactttttatccagagagggagacacgaaactacttggactgtgcttcgacgatttggttatgatgatgacctggatttgacacctgaatatttgttccccctgctgaaaatacctcctgattgcactactgaattaaatcatcatgcatatttatttctccaaagcacctttgacaagcatgatttggatagagactgtgctttgtcacctgatgagcttaaagatttatttaaagttttcccttacataccttgggggccagatgtgaataacacagtttgtaccaatgaaagaggctggataacctaccagggattcctttcccagtggacgctcacgacttatttagatgtacagcggtgcctggaatatttgggctatctaggctattcaatattgactgagcaagagtctcaagcttcagctgttacagtgacaagagataaaaagatagacctgcagaaaaaacaaactcaaagaaatgtgttcagatgtaatgtaattggagtgaaaaactgtgggaaaagtggagttcttcaggctcttcttggaagaaacttaatgaggcagaagaaaattcgtgaagatcataaatcctactatgcgattaacactgtttatgtatatggacaagagaaatacttgttgttgcatgatatctcagaatcggaatttctaactgaagctgaaatcatttgtgatgttgtatgcctggtatatgatgtcagcaatcccaaatcctttgaatactgtgccaggatttttaagcaacactttatggacagcagaataccttgcttaatcgtagctgcaaagtcagacctgcatgaagttaaacaagaatacagtatttcacctactgatttctgcaggaaacacaaaatgcctccaccacaagccttcacttgcaatactgctgatgcccccagtaaggatatctttgttaaattgacaacaatggccatgtatccgcacgtgacacaagctgacctcaagagctccacgttttggcttcgagcaagttttggtgctactgtttttgcagttttgggctttgctatgtacaaagcattattgaaacagcgatgatataaaaagaaatactgtccctaccaaaaacaaatacttttatgtacattctgaatgctttaagttctgctagaattattgagatatttatacatgcagagttactttattaatatttgtaattcatgcataagagtattttaatgatagttataactgcagtattggctagcatatggaaagaaaacagctaacagccaaactaaaatggctaaattccagaggccaaaagggaatattttgtaaatatatgtacatattcaggcaagatatggtctcccaagctgagttctagaaatgatgtttctagacatttctaagtggtattgttagtgctcacttggctcactcttctaggtttaagttagcccagagattgtatttactcatggatcactttatttatttcacatttactcagaatgatcctttgggttctataaggacataaggtacaatttgccattgtctctccatttttaaaaacatacaagtcagtgtcagcttaccaacatgacattttttcagtcagttgtggtaggccagccttgaagccatcgcacagtctagaaacttgtgtagctgagtgtgcagctcacctttaagggtgaagttaggtaaaagcaattagcagaggcgttatctatgtgattatgttgcttccttgtcagtatgttgaattttatagccctttcaatgaaataaaaaaaaaatttgtatattaccaatgtttttagtttaaataaagagtcacccttactactgttgaatttcatcccaagtgtaaatcattctataatggctgtgtctgttatagtatattacagtaactgcatgtgtcaccaagtgttctatatcaggctaggataacctagaggcagtaattttttaaatgataaaataaatctaatgaatataaactctcatgataaacctattttttccatcatcagccttttcaagtatttaaataaataactgctgtgtactgtgatcttgagttcttttgtcatctaaagtaaatatttctgtacaga

SEQ ID NO: 174300 - DNA, 2919 bp, Homo sapiens
  Payload ID: 14207
  Gene Symbol: RHOT1
  Gene Name: ras homolog family member T1
  ENST ID: ENST00000354266
  CDS Start-End: 193-1986
gcaactgagggggcggcgcggcgggccccggcggccgaagaggctggcaggtggcgccgtggggtgggtgctcctggtgagaggagtccactccgtgcgtgcgggcggaggccggcccccgagagccgccgacatgaagaaagacgtgcggatcctgctggtgggagaacagttgggaagacatcactgattatgtctctggtcagtgaagaatttccagaagaggttcctccccgggcagaagaaatcaccattccagctgatgtcaccccagagagagttccaacacacattgtagattactcagaagcagaacagagtgatgaacaacttcatcaagaaatatctcaggctaatgtcatctgtatagtgtatgccgttaacaacaagcattctattgataaggtaacaagtcgatggattcctctcataaatgaaagaacagacaaagacagcaggctgcctttaatattggttgggaacaaatctgatctggtggaatatagtagtatggagaccatccttcctattatgaaccagtatacagaaatagaaacctgtgtggagtgttcagcgaaaaacctgaagaacatatcagagctcttttattacgcacagaaagctgttcttcatcctacagggcccctgtactgcccagaggagaaggagatgaaaccagcttgtataaaagcccttactcgtatatttaaaatatctgatcaagataatgatggtactctcaatgatgctgaactcaacttctttcagaggatttgtttcaacactccattagctcctcaagctctggaggatgtcaagaatgtagtcagaaaacatataagtgatggtgtggctgacagtgggttgaccctgaaaggttttctctttttacacacactttttatccagagagggagacacgaaactacttggactgtgcttcgacgatttggttatgatgatgacctggatttgacacctgaatatttgttccccctgctgaaaatacctcctgattgcactactgaattaaatcatcatgcatatttatttctccaaagcacctttgacaagcatgatttggatagagactgtgctttgtcacctgatgagcttaaagatttatttaaagttttcccttacataccttgggggccagatgtgaataacacagtttgtaccaatgaaagaggctggataacctaccagggattcctttcccagtggacgctcacgacttatttagatgtacagcggtgcctggaatatttgggctatctaggctattcaatattgactgagcaagagtctcaagcttcagctgttacagtgacaagagataaaaagatagacctgcagaaaaaacaaactcaaagaaatgtgttcagatgtaatgtaattggagtgaaaaactgtgggaaaagtggagttcttcaggctcttcttggaagaaacttaatgaggcagaagaaaattcgtgaagatcataaatcctactatgcgattaacactgtttatgtatatggacaagagaaatacttgttgttgcatgatatctcagaatcggaatttctaactgaagctgaaatcatttgtgatgttgtatgcctggtatatgatgtcagcaatcccaaatcctttgaatactgtgccaggatttttaagcaacactttatggacagcagaataccttgcttaatcgtagctgcaaagtcagacctgcatgaagttaaacaagaatacagtatttcacctactgatttctgcaggaaacacaaaatgcctccaccacaagccttcacttgcaatactgctgatgcccccagtaaggatatctttgttaaattgacaacaatggccatgtatccgcacgtgacacaagctgacctcaagagctccacgttttggcttcgagcaagttttggtgctactgtttttgcagttttgggctttgctatgtacaaagcattattgaaacagcgatgatataaaaagaaatactgtccctaccaaaaacaaatacttttatgtacattctgaatgctttaagttctgctagaattattgagatatttatacatgcagagttactttattaatatttgtaattcatgcataagagtattttaatgatagttataactgcagtattggctagcatatggaaagaaaacagctaacagccaaactaaaatggctaaattccagaggccaaaagggaatattttgtaaatatatgtacatattcaggcaagatatggtctcccaagctgagttctagaaatgatgtttctagacatttctaagtggtattgttagtgctcacttggctcactcttctaggtttaagttagcccagagattgtatttactcatggatcactttatttatttcacatttactcagaatgatcctttgggttctataaggacataaggtacaatttgccattgtctctccatttttaaaaacatacaagtcagtgtcagcttaccaacatgacattttttcagtcagttgtggtaggccagccttgaagccatcgcacagtctagaaacttgtgtagctgagtgtgcagctcacctttaagggtgaagttaggtaaaagcaattagcagaggcgttatctatgtgattatgttgcttccttgtcagtatgttgaattttatagccctttcaatgaaataaaaaaaaaatttgtatattaccaatgtttttagtttaaataaagagtcacccttactactgttgaatttcatcccaagtgtaaatcattctataatggctgtgtctgttatagtatattacagtaactgcatgtgtcaccaagtgttctatatcaggctaggataacctagaggcagtaattttttaaatgataaaataaatctaatgaatataaactctcatgataaa

SEQ ID NO: 174301 - DNA, 3297 bp, Homo sapiens
  Payload ID: 14207
  Gene Symbol: RHOT1
  Gene Name: ras homolog family member T1
  Uniprot ID: Q8IXI2
  ENST ID: ENST00000358365
  CDS Start-End: 228-2303
gccgccgccgccgccgccgccgccgccgccgccgccacagcccgctgggccggaggaggcggagctggcgctgtcccggctctcttgcggggaagcaactgagggggcggcgcggcgggccccggcggccgaagaggctggcaggtggcgccgtggggtgggtgctcctggtgagaggagtccactccgtgcgtgcgggcggaggccggcccccgagagccgccgacatgaagaaagacgtgcggatcctgctggtgggagaacctagagttgggaagacatcactgattatgtctctggtcagtgaagaatttccagaagaggttcctccccgggcagaagaaatcaccattccagctgatgtcaccccagagagagttccaacacacattgtagattactcagaagcagaacagagtgatgaacaacttcatcaagaaatatctcaggctaatgtcatctgtatagtgtatgccgttaacaacaagcattctattgataaggtaacaagtcgatggattcctctcataaatgaaagaacagacaaagacagcaggctgcctttaatattggttgggaacaaatctgatctggtggaatatagtagtatggagaccatccttcctattatgaaccagtatacagaaatagaaacctgtgtggagtgttcagcgaaaaacctgaagaacatatcagagctcttttattacgcacagaaagctgttcttcatcctacagggcccctgtactgcccagaggagaaggagatgaaaccagcttgtataaaagcccttactcgtatatttaaaatatctgatcaagataatgatggtactctcaatgatgctgaactcaacttctttcagaggatttgtttcaacactccattagctcctcaagctctggaggatgtcaagaatgtagtcagaaaacatataagtgatggtgtggctgacagtgggttgaccctgaaaggttttctctttttacacacactttttatccagagagggagacacgaaactacttggactgtgcttcgacgatttggttatgatgatgacctggatttgacacctgaatatttgttccccctgctgaaaatacctcctgattgcactactgaattaaatcatcatgcatatttatttctccaaagcacctttgacaagcatgatttggatagagactgtgctttgtcacctgatgagcttaaagatttatttaaagttttcccttacataccttgggggccagatgtgaataacacagtttgtaccaatgaaagaggctggataacctaccagggattcctttcccagtggacgctcacgacttatttagatgtacagcggtgcctggaatatttgggctatctaggctattcaatattgactgagcaagagtctcaagcttcagctgttacagtgacaagagataaaaagatagacctgcagaaaaaacaaactcaaagaaatgtgttcagatgtaatgtaattggagtgaaaaactgtgggaaaagtggagttcttcaggctcttcttggaagaaacttaatgaggcagaagaaaattcgtgaagatcataaatcctactatgcgattaacactgtttatgtatatggacaagagaaatacttgttgttgcatgatatctcagaatcggaatttctaactgaagctgaaatcatttgtgatgttgtatgcctggtatatgatgtcagcaatcccaaatcctttgaatactgtgccaggatttttaagcaacactttatggacagcagaataccttgcttaatcgtagctgcaaagtcagacctgcatgaagttaaacaagaatacagtatttcacctactgatttctgcaggaaacacaaaatgcctccaccacaagccttcacttgcaatactgctgatgcccccagtaaggatatctttgttaaattgacaacaatggccatgtatccagaggatcattacagagacagactctcccgagacatgggccacactgatagaatagagaatttgagaaaaatctgggtctttctaaaaactgctttccatgcccggttacgctgtatgtgcacctgcaacaggtgtacattttgcatctgtcagaacttcctcaactcagacttgctgcaatctgtaaagaacaaaatcttcactgcagttcttaacaggcacgtgacacaagctgacctcaagagctccacgttttggcttcgagcaagttttggtgctactgtttttgcagttttgggctttgctatgtacaaagcattattgaaacagcgatgatataaaaagaaatactgtccctaccaaaaacaaatacttttatgtacattctgaatgctttaagttctgctagaattattgagatatttatacatgcagagttactttattaatatttgtaattcatgcataagagtattttaatgatagttataactgcagtattggctagcatatggaaagaaaacagctaacagccaaactaaaatggctaaattccagaggccaaaagggaatattttgtaaatatatgtacatattcaggcaagatatggtctcccaagctgagttctagaaatgatgtttctagacatttctaagtggtattgttagtgctcacttggctcactcttctaggtttaagttagcccagagattgtatttactcatggatcactttatttatttcacatttactcagaatgatcctttgggttctataaggacataaggtacaatttgccattgtctctccatttttaaaaacatacaagtcagtgtcagcttaccaacatgacattttttcagtcagttgtggtaggccagccttgaagccatcgcacagtctagaaacttgtgtagctgagtgtgcagctcacctttaagggtgaagttaggtaaaagcaattagcagaggcgttatctatgtgattatgttgcttccttgtcagtatgttgaattttatagccctttcaatgaaataaaaaaaaaatttgtatattaccaatgtttttagtttaaataaagagtcacccttactactgttgaatttcatcccaagtgtaaatcattctataatggctgtgtctgttatagtatattacagtaactgcatgtgtcaccaagtgttctatatcaggctaggataacctagaggcagtaattttttaaatgataaaataaatctaatgaatataaactctcatgataaacctattttttccatcatcagccttttcaagtatttaaataaataactgctgtgtactgtga

SEQ ID NO: 174302 - DNA, 2960 bp, Homo sapiens
  Payload ID: 14207
  Gene Symbol: RHOT1
  Gene Name: ras homolog family member T1
  Uniprot ID: Q8IXI2
  ENST ID: ENST00000394692
  CDS Start-End: 14-1966
gagagccgccgacatgaagaaagacgtgcggatcctgctggtgggagaacctagagttgggaagacatcactgattatgtctctggtcagtgaagaatttccagaagaggttcctccccgggcagaagaaatcaccattccagctgatgtcaccccagagagagttccaacacacattgtagattactcagaagcagaacagagtgatgaacaacttcatcaagaaatatctcaggctaatgtcatctgtatagtgtatgccgttaacaacaagcattctattgataaggtaacaagtcgatggattcctctcataaatgaaagaacagacaaagacagcaggctgcctttaatattggttgggaacaaatctgatctggtggaatatagtagtatggagaccatccttcctattatgaaccagtatacagaaatagaaacctgtgtggagtgttcagcgaaaaacctgaagaacatatcagagctcttttattacgcacagaaagctgttcttcatcctacagggcccctgtactgcccagaggagaaggagatgaaaccagcttgtataaaagcccttactcgtatatttaaaatatctgatcaagataatgatggtactctcaatgatgctgaactcaacttctttcagaggatttgtttcaacactccattagctcctcaagctctggaggatgtcaagaatgtagtcagaaaacatataagtgatggtgtggctgacagtgggttgaccctgaaaggttttctctttttacacacactttttatccagagagggagacacgaaactacttggactgtgcttcgacgatttggttatgatgatgacctggatttgacacctgaatatttgttccccctgctgaaaatacctcctgattgcactactgaattaaatcatcatgcatatttatttctccaaagcacctttgacaagcatgatttggatagagactgtgctttgtcacctgatgagcttaaagatttatttaaagttttcccttacataccttgggggccagatgtgaataacacagtttgtaccaatgaaagaggctggataacctaccagggattcctttcccagtggacgctcacgacttatttagatgtacagcggtgcctggaatatttgggctatctaggctattcaatattgactgagcaagagtctcaagcttcagctgttacagtgacaagagataaaaagatagacctgcagaaaaaacaaactcaaagaaatgtgttcagatgtaatgtaattggagtgaaaaactgtgggaaaagtggagttcttcaggctcttcttggaagaaacttaatgaggcagaagaaaattcgtgaagatcataaatcctactatgcgattaacactgtttatgtatatggacaagagaaatacttgttgttgcatgatatctcagaatcggaatttctaactgaagctgaaatcatttgtgatgttgtatgcctggtatatgatgtcagcaatcccaaatcctttgaatactgtgccaggatttttaagcaacactttatggacagcagaataccttgcttaatcgtagctgcaaagtcagacctgcatgaagttaaacaagaatacagtatttcacctactgatttctgcaggaaacacaaaatgcctccaccacaagccttcacttgcaatactgctgatgcccccagtaaggatatctttgttaaattgacaacaatggccatgtatccagaggatcattacagagacagactctcccgagacatgggccacactgatagaatagagaatttgagaaaaatctgggtctttctaaaaactgctttgcacgtgacacaagctgacctcaagagctccacgttttggcttcgagcaagttttggtgctactgtttttgcagttttgggctttgctatgtacaaagcattattgaaacagcgatgatataaaaagaaatactgtccctaccaaaaacaaatacttttatgtacattctgaatgctttaagttctgctagaattattgagatatttatacatgcagagttactttattaatatttgtaattcatgcataagagtattttaatgatagttataactgcagtattggctagcatatggaaagaaaacagctaacagccaaactaaaatggctaaattccagaggccaaaagggaatattttgtaaatatatgtacatattcaggcaagatatggtctcccaagctgagttctagaaatgatgtttctagacatttctaagtggtattgttagtgctcacttggctcactcttctaggtttaagttagcccagagattgtatttactcatggatcactttatttatttcacatttactcagaatgatcctttgggttctataaggacataaggtacaatttgccattgtctctccatttttaaaaacatacaagtcagtgtcagcttaccaacatgacattttttcagtcagttgtggtaggccagccttgaagccatcgcacagtctagaaacttgtgtagctgagtgtgcagctcacctttaagggtgaagttaggtaaaagcaattagcagaggcgttatctatgtgattatgttgcttccttgtcagtatgttgaattttatagccctttcaatgaaataaaaaaaaaatttgtatattaccaatgtttttagtttaaataaagagtcacccttactactgttgaatttcatcccaagtgtaaatcattctataatggctgtgtctgttatagtatattacagtaactgcatgtgtcaccaagtgttctatatcaggctaggataacctagaggcagtaattttttaaatgataaaataaatctaatgaatataaactctcatgataaacctattttttccatcatcagccttttcaagtatttaaataaataactgctgtgtactgtga

SEQ ID NO: 174303 - DNA, 2516 bp, Homo sapiens
  Payload ID: 14207
  Gene Symbol: RHOT1
  Gene Name: ras homolog family member T1
  Uniprot ID: Q8IXI2
  ENST ID: ENST00000545287
  CDS Start-End: 157-2136
tgtcccggctctcttgcggggaagcaactgagggggcggcgcggcgggccccggcggccgaagaggctggcaggtggcgccgtggggtgggtgctcctggtgagaggagtccactccgtgcgtgcgggcggaggccggcccccgagagccgccgacatgaagaaagacgtgcggatcctgctggtgggagaacctagagttgggaagacatcactgattatgtctctggtcagtgaagaatttccagaagaggttcctccccgggcagaagaaatcaccattccagctgatgtcaccccagagagagttccaacacacattgtagattactcagaagcagaacagagtgatgaacaacttcatcaagaaatatctcaggctaatgtcatctgtatagtgtatgccgttaacaacaagcattctattgataaggtaacaagtcgatggattcctctcataaatgaaagaacagacaaagacagcaggctgcctttaatattggttgggaacaaatctgatctggtggaatatagtagtatggagaccatccttcctattatgaaccagtatacagaaatagaaacctgtgtggagtgttcagcgaaaaacctgaagaacatatcagagctcttttattacgcacagaaagctgttcttcatcctacagggcccctgtactgcccagaggagaaggagatgaaaccagcttgtataaaagcccttactcgtatatttaaaatatctgatcaagataatgatggtactctcaatgatgctgaactcaacttctttcagaggatttgtttcaacactccattagctcctcaagctctggaggatgtcaagaatgtagtcagaaaacatataagtgatggtgtggctgacagtgggttgaccctgaaaggttttctctttttacacacactttttatccagagagggagacacgaaactacttggactgtgcttcgacgatttggttatgatgatgacctggatttgacacctgaatatttgttccccctgctgaaaatacctcctgattgcactactgaattaaatcatcatgcatatttatttctccaaagcacctttgacaagcatgatttggatagagactgtgctttgtcacctgatgagcttaaagatttatttaaagttttcccttacataccttgggggccagatgtgaataacacagtttgtaccaatgaaagaggctggataacctaccagggattcctttcccagtggacgctcacgacttatttagatgtacagcggtgcctggaatatttgggctatctaggctattcaatattgactgagcaagagtctcaagcttcagctgttacagtgacaagagataaaaagatagacctgcagaaaaaacaaactcaaagaaatgtgttcagatgtaatgtaattggagtgaaaaactgtgggaaaagtggagttcttcaggctcttcttggaagaaacttaatgaggcagaagaaaattcgtgaagatcataaatcctactatgcgattaacactgtttatgtatatggacaagagaaatacttgttgttgcatgatatctcagaatcggaatttctaactgaagctgaaatcatttgtgatgttgtatgcctggtatatgatgtcagcaatcccaaatcctttgaatactgtgccaggatttttaagcaacactttatggacagcagaataccttgcttaatcgtagctgcaaagtcagacctgcatgaagttaaacaagaatacagtatttcacctactgatttctgcaggaaacacaaaatgcctccaccacaagccttcacttgcaatactgctgatgcccccagtaaggatatctttgttaaattgacaacaatggccatgtatccccatgcccggttacgctgtatgtgcacctgcaacaggtgtacattttgcatctgtcagaacttcctcaactcagacttgctgcaatctgtaaagaacaaaatcttcactgcagttcttaacaggcacgtgacacaagctgacctcaagagctccacgttttggcttcgagcaagttttggtgctactgtttttgcagttttgggctttgctatgtacaaagcattattgaaacagcgatgatataaaaagaaatactgtccctaccaaaaacaaatacttttatgtacattctgaatgctttaagttctgctagaattattgagatatttatacatgcagagttactttattaatatttgtaattcatgcataagagtattttaatgatagttataactgcagtattggctagcatatggaaagaaaacagctaacagccaaactaaaatggctaaattccagaggccaaaagggaatattttgtaaatatatgtacatattcaggcaagatatggtctcccaagctgagttctagaaatgatgtttctagacatttctaagtggtattgttagtgctcacttggctcactcttctaggtttaagttagcccagagattgt

SEQ ID NO: 174304 - DNA, 421 bp, Homo sapiens
  Payload ID: 14207
  Gene Symbol: RHOT1
  Gene Name: ras homolog family member T1
  ENST ID: ENST00000584852
  CDS Start-End: 1-174
atgtatccccatgcccggttacgctgtatgtgcacctgcaacaggtgtacattttgcatctgtcagaacttcctcaactcagacttgctgcaatctgtaaagaacaaaatcttcactgcagttcttaacaggcatgaaaacagccctggaagtctgccctggcgcctgcactgagactaatccaggtcactttagggaaactgcccagctctggcaccgcactgtgtgtctgtcagctctgtggggtgctatggcctcattttcccactagaggacactgtggctccaggacttcatgtggcgcccagccagtcttgctactccagcacctctaaggaggcaaagcctttagtgtgcatttattaggtaccaactgggtgctttctgtatcaagcagagaaataaaagaggtcaaacacaa

SEQ ID NO: 174305 - DNA, 2771 bp, Homo sapiens
  Payload ID: 14207
  Gene Symbol: RHOT1
  Gene Name: ras homolog family member T1
  ENST ID: ENST00000578205
  CDS Start-End: 21-176
ggcccccgagagccgccgacatgaagaaagacgtgcggatcctgctggtgggagaacctagagttgggaagacatcactgattatgtctctggtcagtgaagaatttccagaagagattgttgtggatttaaatacctcctcatttgcagagtatcttcagccttcaacaaaatagaatgaaaacaacatatttaaaaaatctaacaccgaaacaccaaattaatccaagaatccactgagttcctccccgggcagaagaaatcaccattccagctgatgtcaccccagagagagttccaacacacattgtagattactcagaagcagaacagagtgatgaacaacttcatcaagaaatatctcaggctaatgtcatctgtatagtgtatgccgttaacaacaagcattctattgataaggtaacaagtcgatggattcctctcataaatgaaagaacagacaaagacagcaggctgcctttaatattggttgggaacaaatctgatctggtggaatatagtagtatggagaccatccttcctattatgaaccagtatacagaaatagaaacctgtgtggagtgttcagcgaaaaacctgaagaacatatcagagctcttttattacgcacagaaagctgttcttcatcctacagggcccctgtactgcccagaggagaaggagatgaaaccagcttgtataaaagcccttactcgtatatttaaaatatctgatcaagataatgatggtactctcaatgatgctgaactcaacttctttcagaggatttgtttcaacactccattagctcctcaagctctggaggatgtcaagaatgtagtcagaaaacatataagtgatggtgtggctgacagtgggttgaccctgaaaggttttctctttttacacacactttttatccagagagggagacacgaaactacttggactgtgcttcgacgatttggttatgatgatgacctggatttgacacctgaatatttgttccccctgctgaaaatacctcctgattgcactactgaattaaatcatcatgcatatttatttctccaaagcacctttgacaagcatgatttggatagagactgtgctttgtcacctgatgagcttaaagatttatttaaagttttcccttacataccttgggggccagatgtgaataacacagtttgtaccaatgaaagaggctggataacctaccagggattcctttcccagtggacgctcacgacttatttagatgtacagcggtgcctggaatatttgggctatctaggctattcaatattgactgagcaagagtctcaagcttcagctgttacagtgacaagagataaaaagatagacctgcagaaaaaacaaactcaaagaaatgtgttcagatgtaatgtaattggagtgaaaaactgtgggaaaagtggagttcttcaggctcttcttggaagaaacttaatgaggcagaagaaaattcgtgaagatcataaatcctactatgcgattaacactgtttatgtatatggacaagagaaatacttgttgttgcatgatatctcagaatcggaatttctaactgaagctgaaatcatttgtgatgttgtatgcctggtatatgatgtcagcaatcccaaatcctttgaatactgtgccaggatttttaagcaacactttatggacagcagaataccttgcttaatcgtagctgcaaagtcagacctgcatgaagttaaacaagaatacagtatttcacctactgatttctgcaggaaacacaaaatgcctccaccacaagccttcacttgcaatactgctgatgcccccagtaaggatatctttgttaaattgacaacaatggccatgtatccgcacgtgacacaagctgacctcaagagctccacgttttggcttcgagcaagttttggtgctactgtttttgcagttttgggctttgctatgtacaaagcattattgaaacagcgatgatataaaaagaaatactgtccctaccaaaaacaaatacttttatgtacattctgaatgctttaagttctgctagaattattgagatatttatacatgcagagttactttattaatatttgtaattcatgcataagagtattttaatgatagttataactgcagtattggctagcatatggaaagaaaacagctaacagccaaactaaaatggctaaattccagaggccaaaagggaatattttgtaaatatatgtacatattcaggcaagatatggtctcccaagctgagttctagaaatgatgtttctagacatttctaagtggtattgttagtgctcacttggctcactcttctaggtttaagttagcccagagattgtatttactcatggatcactttatttatttcacatttactcagaatgatcctttgggttctataaggacataaggtacaatttgccattgtctctccatttttaaaaacatacaagtcagtgtcagcttaccaacatgacattttttcagtcagttgtggtaggccagccttgaagccatcgcacagtctagaaacttgtgtagctgagtgtgcagctcacctttaagggtgaagttaggtaaaagcaattagcagaggcgttatctatgtgattatgttgcttccttgtcagtatgttgaattttatagccctttcaatgaaataaaaaaaaaatttgtatattaccaatgtttttagtttaaataaagagtcacccttactactgttgaa

SEQ ID NO: 174306 - DNA, 3231 bp, Homo sapiens
  Payload ID: 14207
  Gene Symbol: RHOT1
  Gene Name: ras homolog family member T1
  Uniprot ID: Q8IXI2
  ENST ID: ENST00000581094
  CDS Start-End: 64-1806
ctcctggtgagaggagtccactccgtgcgtgcgggcggaggccggcccccgagagccgccgacatgaagaaagacgtgcggatcctgctggtgggagaacctagagttgggaagacatcactgattatgtctctggtcagtgaagaatttccagaagaggttcctccccgggcagaagaaatcaccattccagctgatgtcaccccagagagagttccaacacacattgtagattactcagaagcagaacagagtgatgaacaacttcatcaagaaatatctcaggctaatgtcatctgtatagtgtatgccgttaacaacaagcattctattgataaggtaacaagtcgatggattcctctcataaatgaaagaacagacaaagacagcaggctgcctttaatattggttgggaacaaatctgatctggtggaatatagtagtatggagaccatccttcctattatgaaccagtatacagaaatagaaacctgtgtggagtgttcagcgaaaaacctgaagaacatatcagagctcttttattacgcacagaaagctgttcttcatcctacagggcccctgtactgcccagaggagaaggagatgaaaccagcttgtataaaagcccttactcgtatatttaaaatatctgatcaagataatgatggtactctcaatgatgctgaactcaacttctttcagaggatttgtttcaacactccattagctcctcaagctctggaggatgtcaagaatgtagtcagaaaacatataagtgatggtgtggctgacagtgggttgaccctgaaaggttttctctttttacacacactttttatccagagagggagacacgaaactacttggactgtgcttcgacgatttggttatgatgatgacctggatttgacacctgaatatttgttccccctgctgaaaatacctcctgattgcactactgaattaaatcatcatgcatatttatttctccaaagcacctttgacaagcatgatttggatagagactgtgctttgtcacctgatgagcttaaagatttatttaaagttttcccttacataccttgggggccagatgtgaataacacagtttgtaccaatgaaagaggctggataacctaccagggattcctttcccagtggacgctcacgacttatttagatgtacagcggtgcctggaatatttgggctatctaggctattcaatattgactgagcaagagtctcaagcttcagctgttacagtgacaagagataaaaagatagacctgcagaaaaaacaaactcaaagaaatgtgttcagatgtaatgtaattggagtgaaaaactgtgggaaaagtggagttcttcaggctcttcttggaagaaacttaatgaggcagaagaaaattcgtgaagatcataaatcctactatgcgattaacactgtttatgtatatggacaagagaaatacttgttgttgcatgatatctcagaatcggaatttctaactgaagctgaaatcatttgtgatgttgtatgcctggtatatgatgtcagcaatcccaaatcctttgaatactgtgccaggatttttaagcaacactttatggacagcagaataccttgcttaatcgtagctgcaaagtcagacctgcatgaagttaaacaagaatacagtatttcacctactgatttctgcaggaaacacaaaatgcctccaccacaagccttcacttgcaatactgctgatgcccccagtaaggatatctttgttaaattgacaacaatggccatgtatccgtaagtacttgctgtcttcattttcatgttgcatggttcataacattgcatgccattattagccatgaagggaatatctttgtcacataggaattgttcagcaacagaaagatactttgtaatgagaaggtacaaatttgagtaaatgcaagtttggtttgaatgccataataaaatgatataaacagtgcttctgacaatatctgtatatttttgagcaggctgtaactatcttaatagaatagtacaataaaacacaaccccccacccagcattaaaaaatagttttactggaataaaatgggtttggcatcatgttgttttatgcttataaagcattttcatatgaacagaaagtttatatttttctgtttttgaccttaggtatatgaagttttctaaaatattttattaatttatgttgaaattgtgggtatgcttcagttaggatatgtcttttttaagtgctgtaaagagtagttgtaattggaatttctactgtataaatgttttacattaagtgttacgagccacaaatttcatgtacatttattatatatctatacatgcatatgcacaagcacataactgtggtcatctctgtagtttactaactgccttaaaattgcatggttcttaatggcattcgcctcaagtagtgtgtttgtataaattctgttttgtaacaaaatagtttttcaggcagtgcgtttctcaggactttatagcttattctacttattcttatgttagtctctaaattatttttcttcttatgaaaactacagtgtaacacagagtaataatcaaacattgctataaaccaagaatgacatttttcaaaaaggtgttgatttgtacagatttttaaagtcagttaactttactgctattttattacctaatactttttttagatgcaacaaacccttgaatttctatttgtattcgaagacaagtcattcctattattatagaataaccaaaaccttatttatgttttacctttgctttaaaactctcatgtatgttatctacagagaggatcattacagagacagactctcccgagacatgggccacactgatagaatagagaatttgagaaaaatctgggtctttctaaaaactgctttgtaagttactttttctttatgacttctgtgggattttgttgatattttcttagagaatgaccaaatctcctttcttgccataattaacatttagtaattatgtagaaacgcactgcttggtcaggcttcctgcctagctatatattacgttgtcttccttactacataaatgtacttctttaatcttgtgattacagtaactgcaagtgtgtttttacatctgcatttttaaaacattttactgtaattctgttgtgtgtgtgtgtgttatatgataaatgtacatacatgga

SEQ ID NO: 174307 - DNA, 3289 bp, Homo sapiens
  Payload ID: 14207
  Gene Symbol: RHOT1
  Gene Name: ras homolog family member T1
  ENST ID: ENST00000583994
  CDS Start-End: 219-374
gccgccgccgccgccgccgccgccgccacagcccgctgggccggaggaggcggagctggcgctgtcccggctctcttgcggggaagcaactgagggggcggcgcggcgggccccggcggccgaagaggctggcaggtggcgccgtggggtgggtgctcctggtgagaggagtccactccgtgcgtgcgggcggaggccggcccccgagagccgccgacatgaagaaagacgtgcggatcctgctggtgggagaacctagagttgggaagacatcactgattatgtctctggtcagtgaagaatttccagaagagattgttgtggatttaaatacctcctcatttgcagagtatcttcagccttcaacaaaatagaatgaaaacaacatatttaaaaaatctaacaccgaaacaccaaattaatccaagaatccactgagttcctccccgggcagaagaaatcaccattccagctgatgtcaccccagagagagttccaacacacattgtagattactcagaagcagaacagagtgatgaacaacttcatcaagaaatatctcaggctaatgtcatctgtatagtgtatgccgttaacaacaagcattctattgataaggtaacaagtcgatggattcctctcataaatgaaagaacagacaaagacagcaggctgcctttaatattggttgggaacaaatctgatctggtggaatatagtagtatggagaccatccttcctattatgaaccagtatacagaaatagaaacctgtgtggagtgttcagcgaaaaacctgaagaacatatcagagctcttttattacgcacagaaagctgttcttcatcctacagggcccctgtactgcccagaggagaaggagatgaaaccagcttgtataaaagcccttactcgtatatttaaaatatctgatcaagataatgatggtactctcaatgatgctgaactcaacttctttcagaggatttgtttcaacactccattagctcctcaagctctggaggatgtcaagaatgtagtcagaaaacatataagtgatggtgtggctgacagtgggttgaccctgaaaggttttctctttttacacacactttttatccagagagggagacacgaaactacttggactgtgcttcgacgatttggttatgatgatgacctggatttgacacctgaatatttgttccccctgctgaaaatacctcctgattgcactactgaattaaatcatcatgcatatttatttctccaaagcacctttgacaagcatgatttggatagagactgtgctttgtcacctgatgagcttaaagatttatttaaagttttcccttacataccttgggggccagatgtgaataacacagtttgtaccaatgaaagaggctggataacctaccagggattcctttcccagtggacgctcacgacttatttagatgtacagcggtgcctggaatatttgggctatctaggctattcaatattgactgagcaagagtctcaagcttcagctgttacagtgacaagagataaaaagatagacctgcagaaaaaacaaactcaaagaaatgtgttcagatgtaatgtaattggagtgaaaaactgtgggaaaagtggagttcttcaggctcttcttggaagaaacttaatgaggcagaagaaaattcgtgaagatcataaatcctactatgcgattaacactgtttatgtatatggacaagagaaatacttgttgttgcatgatatctcagaatcggaatttctaactgaagctgaaatcatttgtgatgttgtatgcctggtatatgatgtcagcaatcccaaatcctttgaatactgtgccaggatttttaagcaacactttatggacagcagaataccttgcttaatcgtagctgcaaagtcagacctgcatgaagttaaacaagaatacagtatttcacctactgatttctgcaggaaacacaaaatgcctccaccacaagccttcacttgcaatactgctgatgcccccagtaaggatatctttgttaaattgacaacaatggccatgtatccagaggatcattacagagacagactctcccgagacatgggccacactgatagaatagagaatttgagaaaaatctgggtctttctaaaaactgctttgcacgtgacacaagctgacctcaagagctccacgttttggcttcgagcaagttttggtgctactgtttttgcagttttgggctttgctatgtacaaagcattattgaaacagcgatgatataaaaagaaatactgtccctaccaaaaacaaatacttttatgtacattctgaatgctttaagttctgctagaattattgagatatttatacatgcagagttactttattaatatttgtaattcatgcataagagtattttaatgatagttataactgcagtattggctagcatatggaaagaaaacagctaacagccaaactaaaatggctaaattccagaggccaaaagggaatattttgtaaatatatgtacatattcaggcaagatatggtctcccaagctgagttctagaaatgatgtttctagacatttctaagtggtattgttagtgctcacttggctcactcttctaggtttaagttagcccagagattgtatttactcatggatcactttatttatttcacatttactcagaatgatcctttgggttctataaggacataaggtacaatttgccattgtctctccatttttaaaaacatacaagtcagtgtcagcttaccaacatgacattttttcagtcagttgtggtaggccagccttgaagccatcgcacagtctagaaacttgtgtagctgagtgtgcagctcacctttaagggtgaagttaggtaaaagcaattagcagaggcgttatctatgtgattatgttgcttccttgtcagtatgttgaattttatagccctttcaatgaaataaaaaaaaaatttgtatattaccaatgtttttagtttaaataaagagtcacccttactactgttgaatttcatcccaagtgtaaatcattctataatggctgtgtctgttatagtatattacagtaactgcatgtgtcaccaagtgttctatatcaggctaggataacctagaggcagtaattttttaaatgataaaataaatctaatgaatataaactctcatgataaacctattttttccatcatcagccttttcaagtatttaaataaataactgctgtgtactgtga

SEQ ID NO: 174308 - DNA, 650 bp, Homo sapiens
  Payload ID: 14207
  Gene Symbol: RHOT1
  Gene Name: ras homolog family member T1
  ENST ID: ENST00000580392
  CDS Start-End: 1-403
cactgtttatgtatatggacaagagaaatacttgttgttgcatgatatctcagaatcggaatttctaactgaagctgaaatcatttgtgatgttgtatgcctggtatatgatgtcagcaatcccaaatcctttgaatactgtgccaggatttttaagcaacactttatggacagcagaataccttgcttaatcgtagctgcaaagtcagacctgcatgaagttaaacaagaatacagtatttcacctactgatttctgcaggaaacacaaaatgcctccaccacaagccttcacttgcaatactgctgatgcccccagtaaggatatctttgttaaattgacaacaatggccatgtatccgcatgaaaacagccctggaagtctgccctggcgcctgcactgagactaatccaggtcactttagggaaactgcccagctctggcaccgcactgtgtgtctgtcagctctgtggggtgctatggcctcattttcccactagaggacactgtggctccaggacttcatgtggcgcccagccagtcttgctactccagcacctctaaggaggcaaagcctttagtgtgcatttattaggtaccaactgggtgctttctgtatcaagcagagaaataaaagaggtcaaacacaa

SEQ ID NO: 174309 - DNA, 3013 bp, Homo sapiens
  Payload ID: 14207
  Gene Symbol: RHOT1
  Gene Name: ras homolog family member T1
  Uniprot ID: Q8IXI2
  ENST ID: ENST00000581031
  CDS Start-End: 126-2003
gggggcggcgcggcgggccccggcggccgaagaggctggcaggtggcgccgtggggtgggtgctcctggtgagaggagtccactccgtgcgtgcgggcggaggccggcccccgagagccgccgacatgaagaaagacgtgcggatcctgctggtgggagaacctagagttgggaagacatcactgattatgtctctggtcagtgaagaatttccagaagaggttcctccccgggcagaagaaatcaccattccagctgatgtcaccccagagagagttccaacacacattgtagattactcagaagcagaacagagtgatgaacaacttcatcaagaaatatctcaggctaatgtcatctgtatagtgtatgccgttaacaacaagcattctattgataaggtaacaagtcgatggattcctctcataaatgaaagaacagacaaagacagcaggctgcctttaatattggttgggaacaaatctgatctggtggaatatagtagtatggagaccatccttcctattatgaaccagtatacagaaatagaaacctgtgtggagtgttcagcgaaaaacctgaagaacatatcagagctcttttattacgcacagaaagctgttcttcatcctacagggcccctgtactgcccagaggagaaggagatgaaaccagcttgtataaaagcccttactcgtatatttaaaatatctgatcaagataatgatggtactctcaatgatgctgaactcaacttctttcagaggatttgtttcaacactccattagctcctcaagctctggaggatgtcaagaatgtagtcagaaaacatataagtgatggtgtggctgacagtgggttgaccctgaaaggttttctctttttacacacactttttatccagagagggagacacgaaactacttggactgtgcttcgacgatttggttatgatgatgacctggatttgacacctgaatatttgttccccctgctgaaaatacctcctgattgcactactgaattaaatcatcatgcatatttatttctccaaagcacctttgacaagcatgatttggatagagactgtgctttgtcacctgatgagcttaaagatttatttaaagttttcccttacataccttgggggccagatgtgaataacacagtttgtaccaatgaaagaggctggataacctaccagggattcctttcccagtggacgctcacgacttatttagatgtacagcggtgcctggaatatttgggctatctaggctattcaatattgactgagcaagagtctcaagcttcagctgttacagtgacaagagataaaaagatagacctgcagaaaaaacaaactcaaagaaatgtgttcagatgtaatgtaattggagtgaaaaactgtgggaaaagtggagttcttcaggctcttcttggaagaaacttaatgaggcagaagaaaattcgtgaagatcataaatcctactatgcgattaacactgtttatgtatatggacaagagaaatacttgttgttgcatgatatctcagaatcggaatttctaactgaagctgaaatcatttgtgatgttgtatgcctggtatatgatgtcagcaatcccaaatcctttgaatactgtgccaggatttttaagcaacactttatggacagcagaataccttgcttaatcgtagctgcaaagtcagacctgcatgaagttaaacaagaatacagtatttcacctactgatttctgcaggaaacacaaaatgcctccaccacaagccttcacttgcaatactgctgatgcccccagtaaggatatctttgttaaattgacaacaatggccatgtatccccatgcccggttacgctgtatgtgcacctgcaacaggtgtacattttgcatctgtcagaacttcctcaactcagacttgctgcaatctgtaaagaacaaaatcttcactgcagttcttaacagaattatttctgcttaagtttagaaatgagccagaagcggccaggcgtggtggctcacgcctgtaatctcagcactttcggaagccgaggtgggtggatcacctgagatcaggagatcgagaccatcgtggccaacacggcacgtgacacaagctgacctcaagagctccacgttttggcttcgagcaagttttggtgctactgtttttgcagttttgggctttgctatgtacaaagcattattgaaacagcgatgatataaaaagaaatactgtccctaccaaaaacaaatacttttatgtacattctgaatgctttaagttctgctagaattattgagatatttatacatgcagagttactttattaatatttgtaattcatgcataagagtattttaatgatagttataactgcagtattggctagcatatggaaagaaaacagctaacagccaaactaaaatggctaaattccagaggccaaaagggaatattttgtaaatatatgtacatattcaggcaagatatggtctcccaagctgagttctagaaatgatgtttctagacatttctaagtggtattgttagtgctcacttggctcactcttctaggtttaagttagcccagagattgtatttactcatggatcactttatttatttcacatttactcagaatgatcctttgggttctataaggacataaggtacaatttgccattgtctctccatttttaaaaacatacaagtcagtgtcagcttaccaacatgacattttttcagtcagttgtggtaggccagccttgaagccatcgcacagtctagaaacttgtgtagctgagtgtgcagctcacctttaagggtgaagttaggtaaaagcaattagcagaggcgttatctatgtgattatgttgcttccttgtcagtatgttgaattttatagccctttcaatgaaataaaaaaaaaatttgtatattaccaatgtttttagtttaaataaagagtcacccttactactgttgaa

SEQ ID NO: 174310 - DNA, 680 bp, Homo sapiens
  Payload ID: 14207
  Gene Symbol: RHOT1
  Gene Name: ras homolog family member T1
  ENST ID: ENST00000584692
  CDS Start-End: 1-123
aaatcatttgtgatgttgtatgcctggtatatgatgtcagcaatcccaaatcctttgaatactgtgccaggatttttaaggaaaaaactggaaataatcaagatggctaacaatggacgatgatttactgaacaacactttatggacagcagaataccttgcttaatcgtagctgcaaagtcagacctgcatgaagttaaacaagaatacagtatttcacctactgatttctgcaggaaacacaaaatgcctccaccacaagccttcacttgcaatactgctgatgcccccagtaaggatatctttgttaaattgacaacaatggccatgtatccgcacgtgacacaagctgacctcaagagctccacgttttggcttcgagcaagttttggtgctactgtttttgcagttttgggctttgctatgtacaaagcattattgaaacagcgatgatataaaaagaaatactgtccctaccaaaaacaaatacttttatgtacattctgaatgctttaagttctgctagaattattgagatatttatacatgcagagttactttattaatatttgtaattcatgcataagagtattttaatgatagttataactgcagtattggctagcatatggaaagaaaacagctaacagccaaactaaaatggctaaattccagaggcc

SEQ ID NO: 174311 - DNA, 570 bp, Homo sapiens
  Payload ID: 14207
  Gene Symbol: RHOT1
  Gene Name: ras homolog family member T1
  ENST ID: ENST00000582602
  CDS Start-End: 1-570
tcagatgtaatgtaattggagtgaaaaactgtgggaaaagtggagttcttcaggctcttcttggaagaaacttaatggtgagaaggcagaagaaaattcgtgaagatcataaatcctactatgcgattaacactgtttatgtatatggacaagagaaatacttgttgttgcatgatatctcagaatcggaatttctaactgaagctgaaatcatttgtgatgttgtatgcctggtatatgatgtcagcaatcccaaatcctttgaatactgtgccaggatttttaagcaacactttatggacagcagaataccttgcttaatcgtagctgcaaagtcagacctgcatgaagttaaacaagaatacagtatttcacctactgatttctgcaggaaacacaaaatgcctccaccacaagccttcacttgcaatactgctgatgcccccagtaaggatatctttgttaaattgacaacaatggccatgtatccccatgcccggttacgctgtatgtgcacctgcaacaggtgtacattttgcatctgtcagaacttcctcaactcagacttgc

SEQ ID NO: 174312 - DNA, 628 bp, Homo sapiens
  Payload ID: 14207
  Gene Symbol: RHOT1
  Gene Name: ras homolog family member T1
  ENST ID: ENST00000581148
  CDS Start-End: 1-471
gaatcggaatttctaactgaagctgaaatcatttgtgatgttgtatgcctggtatatgatgtcagcaatcccaaatcctttgaatactgtgccaggatttttaagcaacactttatggacagcagaataccttgcttaatcgtagctgcaaagtcagacctgcatgaagttaaacaagaatacagtatttcacctactgatttctgcaggaaacacaaaatgcctccaccacaagccttcacttgcaatactgctgatgcccccagtaaggatatctttgttaaattgacaacaatggccatgtatccccatgcccggttacgctgtatgtgcacctgcaacaggtgtacattttgcatctgtcagaacttcctcaactcagacttgctgcaatctgtaaagaacaaaatcttcactgcagttcttaacaggttcttaactttatttactgggtaccaggcattctgttaaaatacaaaagaaaaaagcggataactatttattatacagatactcactacaaagacaagctgactgatgcccaactaacttccactaaaattctcactgtgatgacaatgtttagttttggaagcatccttaataatgtttttaaattaataggtat

SEQ ID NO: 174313 - DNA, 2539 bp, Homo sapiens
  Payload ID: 14208
  Gene Symbol: RHOT2
  Gene Name: ras homolog family member T2
  Uniprot ID: Q8IXI1
  ENST ID: ENST00000315082
  CDS Start-End: 115-1971
gacagcgcggggccgagaaccggaagtgcggggcgggcgcgggggcagagcgaaaggcttgaggaccaggtcggggccgggttccgggtcggggagcggctccgggcggcagctatgaggcgggacgtgcgcatcctgttactgggcgaggcccaggtggggaagacgtcgctgatcctgtccctggtgggcgaggagttccccgaggaggtccctccccgcgcggaggagatcaccatccccgcggacgtcaccccggagaaggtgcccacccacatcgtggactactcagaagccgagcagacggacgaggagctgcgggaggagatccacaaggcaaacgtggtgtgtgtggtgtatgacgtctctgaggaggccaccattgagaagattcgaactaagtggatcccactggtgaatggggggaccacgcaggggcccagggtgcccatcatcctagtgggcaacaagtcagacctgcggtcggggagctccatggaggccgtgctccccatcatgagccagtttcccgagattgagacctgcgtggagtgttcggccaagaacctgaggaacatctcagagctgttctactacgcccagaaggccgtcctgcatcccacagcccccctctatgaccctgaggccaagcagttgaggcccgcgtgcgcccaggcgctgacgcgcatcttcaggctctcagatcaggacctggaccaggcgctcagtgacgaagagctcaacgctttccagaaatcctgctttgggcaccccctggccccgcaggccctggaggacgtgaagacggtggtgtgcaggaacgtggcgggcggcgtgcgggaggaccggctgaccctggatggtttcctcttcctgaacacgctcttcatccagcgcggccggcacgagaccacctggaccatcctgcggcgcttcggctacagcgatgccctggagctgactgcggactatctctcccctctgatccacgtgccccccggctgcagcacggagctcaaccaccttggctaccagtttgtgcagagagtgtttgagaagcacgaccaggaccgcgacggcgccctctcgcccgtggagctgcaaagccttttcagtgtgttcccagcagcgccctggggccccgagctcccacgcacagtccgcacagaggccggccggttgcccctgcacggatacctctgccagtggaccctggtgacctacctggacgtccggagctgccttggacacctaggctacctgggctaccccaccctctgtgagcaggaccaggcccatgccatcacagtcactcgtgagaagaggctggaccaggagaagggacagacgcagcggagcgtcctcctgtgcaaggtggtaggggcccgtggagtgggcaagtctgccttcctgcaggcctttctcggccgcggcctggggcaccaggacacgagggagcagcctcccggctacgccatcgacacggtgcaggtcaatggacaggagaagtacttgatcctctgtgaggtgggcacagatggtctgctggccacatcgctggacgccacctgtgacgttgcctgcttgatgtttgatggcagtgacccaaagtcctttgcacattgtgccagcgtctacaagcaccattacatggacgggcagaccccctgcctctttgtctcctccaaggccgacctgcccgaaggtgtcgcggtgtctggcccatcaccggccgagttttgccgcaagcaccggctacccgctcccgtgccgttctcctgtgctggcccagccgagcccagcaccaccatcttcacccagctcgccaccatggccgccttcccacatttggtccacgcagagctgcatccctcttccttctggctccgggggctgctgggggttgtcggggccgccgtggccgcagtcctcagcttctcactctacagggtcctggtgaagagccagtgaggcccctggtacccaagccccctcccctgacctgggtgtgcctcgctgctggggctctgcaggggcagcacagctggggtgcaggccaggctgccactccgggaacgcctttgcgccgggactttttgtttctgaaggcagtcgatctgcagcggggccttatgctgccatgcactgccctggctcctgccggacccccagggtgggccgtggcaggtggctgagcaggagctcccaagtgccggccaccgctgtcagggattgcccacccctgggcatcatgtgtgtggggccggggagcacaggtgtgggagctggtgaccccagacccagaattctcagggctctacccccctttcctggtcctaggtggccagtgggtatgaggagggctggaaggcagagctttgggccaaaagcaggcgttggggggtcccccctcaagtttggagccgtttccgtggttgtagcagaggaccggaggttgggttcctgattaaacttcactgtgtgttttctatctcggatcccagtctctgaagacaacttgctttgattcaacctagaa

SEQ ID NO: 174314 - DNA, 1044 bp, Homo sapiens
  Payload ID: 14208
  Gene Symbol: RHOT2
  Gene Name: ras homolog family member T2
  ENST ID: ENST00000561983
  CDS Start-End: 96-503
ccggaagtgcggggcgggcgcgggggcagagcgaaaggcttgaggaccaggtcggggccgggttccgggtcggggagcggctccgggcggcagctatgaggcgggacgtgcgcatcctgttactgggcgaggcccaggtggggaagacgtcgctgatcctgtccctggtgggcgaggagttccccgaggaggtccctccccgcgcggaggagatcaccatccccgcggacgtcaccccggagaaggtgcccacccacatcgtggactactcagaagccgagcagacggacgaggagctgcgggaggagatccacaaggcaaacgtggtgtgtgtggtgtatgacgtctctgaggaggccaccattgagaagattcgaactaagtggatcccactggtgaatggggggaccacgcaggggcccagtgggcaacaagtcagacctgcggtcggggagctccatggaggccgtgctccccatcatgagccagtttcccgagattgagacctgcgtggagtgttcggccaagaacctgaggaacatctcagagctgttctactacgcccagaaggccgtcctgcatcccacagcccccctctatgaccctgaggccaagcaggtgtgcccctgccccaccctcggtgcccagcccccttgaacctccgctgccgttagtgactggaacgggtcgtctccgggtggctggctgactcccaacaacgttctctcggaagcagaaatcctgctttgggcaccccctggccccgcaggccctggaggacgtgaagacggtggtgtgcaggaacgtggcgggcggcgtgcgggaggaccggctgaccctggatggtgaggccgggtgcccgcctgtgcctggggagtgtggggagggggctgtgcctggtgctccccctgctttgtctcggtgcaggtttcctcttcctgaacacgctcttcatccagcgcggccggcacgagaccacctggaccatcctgcggcgcttcggctacagcgatgccctggagctgactgcggactatctctccc

SEQ ID NO: 174315 - DNA, 708 bp, Homo sapiens
  Payload ID: 14208
  Gene Symbol: RHOT2
  Gene Name: ras homolog family member T2
  ENST ID: ENST00000570280
  CDS Start-End: 48-215
aggtcggggccgggttccgggtcggggagcggctccgggcggcagctatgaggcgggacgtgcgcatcctgttactgggcgaggcccaggtggggaagacgtcgctgatcctgtccctggtgggcgaggagttccccgaggagaagccgagcagacggacgaggagctgcgggaggagatccacaagattcgaactaagtggatcccactggtgaatggggggaccacgcaggggcccagggtgcccatcatcctagtgggcaacaagtcagacctgcggtcggggagctccatggaggccgtgctccccatcatgagccagtttcccgagattgagacctgcgtggagtgttcggccaagaacctgaggaacatctcagagctgttctactacgcccagaaggccgtcctgcatcccacagcccccctctatgaccctgaggccaagcagttgaggcccgcgtgcgcccaggcgctgacgcgcatcttcaggctctcagatcaggacctggaccaggcgctcagtgacgaagagctcaacgctttccagaaatcctgctttgggcaccccctggccccgcaggccctggaggacgtgaagacggtggtgtgcaggaacgtggcgggcggcgtgcgggaggaccggctgaccctggatggtttcctcttcctgaacacgctcttcatccagcgcggccggcacgagac

SEQ ID NO: 174316 - DNA, 683 bp, Homo sapiens
  Payload ID: 14208
  Gene Symbol: RHOT2
  Gene Name: ras homolog family member T2
  ENST ID: ENST00000566214
  CDS Start-End: 50-292
ccaggtcggggccgggttccgggtcggggagcggctccgggcggcagctatgaggcgggacgtgcgcatcctgttactgggcgagggtggggaagacgtcgctgatcctgtccctggtgggcgaggagttccccgaggaggtccctccccgcgcggaggagatcaccatccccgcggacgtcaccccggagaaggtgcccacccacatcgtggactactcagaagccgagcagacggacgaggagctgcgggaggagatccacaaggcaaacgtggtgtgtgtggtgtatgacgtctctgaggaggccaccattgagaagattcgaactaagtggatcccactggtgaatggggggaccacgcaggggcccagggtgcccatcatcctagtgggcaacaagtcagacctgcggtcggggagctccatggaggccgtgctccccatcatgagccagtttcccgagattgagacctgcgtggagtgttcggccaagaacctgaggaacatctcagagctgttctactacgcccagaaggccgtcctgcatcccacagcccccctctatgaccctgaggccaagcagttgaggcccgcgtgcgcccaggcgctgacgcgcatcttcaggctctcagatcaggacctggaccaggcgctcagtgacgaagagctcaacgctttccag

SEQ ID NO: 174317 - DNA, 625 bp, Homo sapiens
  Payload ID: 14208
  Gene Symbol: RHOT2
  Gene Name: ras homolog family member T2
  ENST ID: ENST00000561929
  CDS Start-End: 1-625
gacgtgcgcatcctgttactgggcgaggcccaggtggggaagacgtcgctgatcctgtccctggtgggcgaggagttccccgaggaggtccctccccgcgcggaggagatcaccatccccgcggacgtcaccccggagaaggtgcccacccacatcgtggactactcagaagccgagcagacggacgaggagctgcgggaggagatccacaagattcgaactaagtggatcccactggtgaatggggggaccacgcaggggcccagggtgcccatcatcctagtgggcaacaagtcagacctgcggtcggggagctccatggaggccgtgctccccatcatgagccagtttcccgagattgagacctgcgtggagtgttcggccaagaacctgaggaacatctcagagctgttctactacgcccagaaggccgtcctgcatcccacagcccccctctatgaccctgaggccaagcagttgaggcccgcgtgcgcccaggcgctgacgcgcatcttcaggctctcagatcaggacctggaccaggcgctcagtgacgaagagctcaacgctttccagaaatcctgctttgggcaccccctggccccgcaggccctggaggacgtga

SEQ ID NO: 174318 - DNA, 530 bp, Homo sapiens
  Payload ID: 14208
  Gene Symbol: RHOT2
  Gene Name: ras homolog family member T2
  ENST ID: ENST00000569197
  CDS Start-End: 1-467
ccacctgtgacgttgcctgcttgatgtttgatggcagtgacccaaagtcctttgcacattgtgccagcgtctacaagcaccattacatggacgggcagaccccctgcctctttgtctcctccaaggccgacctgcccgaaggtgtcgcggtgtctggcccatcaccggccgagttttgccgcaagcaccggctacccgctcccgtgccgttctcctgtgctggcccagccgagcccagcaccaccatcttcacccagctcgccaccatggccgccttcccacatttggtccacgcagaacccagaattctcagggctctacccccctttcctggtcctaggtggccagtgggtatgaggagggctggaaggcagagctttgggccaaaagcaggcgttggggggtcccccctcaagtttggagccgtttccgtggttgtagcagaggaccggaggttgggttcctgattaaacttcactgtgtgttttctatctcggatcccagtctctgaagacaacttgctttgattc

SEQ ID NO: 174319 - DNA, 1052 bp, Homo sapiens
  Payload ID: 14208
  Gene Symbol: RHOT2
  Gene Name: ras homolog family member T2
  ENST ID: ENST00000562333
  CDS Start-End: 14-421
ccgggcggcagctatgaggcgggacgtgcgcatcctgttactgggcgaggcccaggtggggaagacgtcgctgatcctgtccctggtgggcgaggagttccccgaggaggtccctccccgcgcggaggagatcaccatccccgcggacgtcaccccggagaaggtgcccacccacatcgtggactactcagaagccgagcagacggacgaggagctgcgggaggagatccacaaggcaaacgtggtgtgtgtggtgtatgacgtctctgaggaggccaccattgagaagattcgaactaagtggatcccactggtgaatggggggaccacgcaggggcccagtgggcaacaagtcagacctgcggtcggggagctccatggaggccgtgctccccatcatgagccagtttcccgagattgagacctgcgtggagtgttcggccaagaacctgaggaacatctcagagctgttctactacgcccagaaggccgtcctgcatcccacagcccccctctatgaccctgaggccaagcagttgaggcccgcgtgcgcccaggcgctgacgcgcatcttcaggctctcagatcaggacctggaccaggcgctcagtgacgaagagctcaacgctttccagaaatcctgctttgggcaccccctggccccgcaggccctggaggacgtgaagacggtggtgtgcaggaacgtggcgggcggcgtgcgggaggaccggctgaccctggatgcgcggccggcacgagaccacctggaccatcctgcggcgcttcggctacagcgatgccctggagctgactgcggactatctctcccctctgatccacgtgccccccggctgcagcacggagctcaaccaccttggctaccagtttgtgcagagagtgtttgagaagcacgaccaggaccgcgacggcgccctctcgcccgtggagctgcaaagccttttcagtgtgttcccagcagcgccctggggccccgagctcccacgcacagtccgcacagaggccggccggttgcccctgcacggatacctctg

SEQ ID NO: 174320 - DNA, 993 bp, Homo sapiens
  Payload ID: 14208
  Gene Symbol: RHOT2
  Gene Name: ras homolog family member T2
  ENST ID: ENST00000563637
  CDS Start-End: 50-268
ccaggtcggggccgggttccgggtcggggagcggctccgggcggcagctatgaggcgggacgtgcgcatcctgttactgggcgaggcccaggtggggaagacgtcgctgatcctgtccctggtgggcgaggagttccccgaggagccgagcagacggacgaggagctgcgggaggagatccacaaggcaaacgtggtgtgtgtggtgtatgacgtctctgaggaggccaccattgagaagattcgaactaagtggatcccactggtgaatggggggaccacgcaggggcccagggtgcccatcatcctagtgggcaacaagtcagacctgcggtcggggagctccatggaggccgtgctccccatcatgagccagtttcccgagattgagacctgcgtggagtgttcggccaagaacctgaggaacatctcagagctgttctactacgcccagaaggccgtcctgcatcccacagcccccctctatgaccctgaggccaagcagttgaggcccgcgtgcgcccaggcgctgacgcgcatcttcaggctctcagatcaggacctggaccaggcgctcagtgacgaagagctcaacgctttccagaaatcctgctttgggcaccccctggccccgcaggccctggaggacgtgaagacggtggtgtgcaggaacgtggcgggcggcgtgcgggaggaccggctgaccctggatggtttcctcttcctgaacacgctcttcatccagcgcggccggcacgagaccacctggaccatcctgcggcgcttcggctacagcgatgccctggagctgactgcggactatctctcccctctgatccacgtgccccccggctgcagcacggagctcaaccaccttggctaccagtttgtgcagagagtgtttgagaagcacgaccaggaccgcgacggcgccctctcgcccgtggagctgcaaagccttttcagtgtgttcccagcagcgccctggggcccc

SEQ ID NO: 174321 - DNA, 736 bp, Homo sapiens
  Payload ID: 14208
  Gene Symbol: RHOT2
  Gene Name: ras homolog family member T2
  ENST ID: ENST00000563134
  CDS Start-End: 95-736
cggaagtgcggggcgggcgcgggggcagagcgaaaggcttgaggaccaggtcggggccgggttccgggtcggggagcggctccgggcggcagctatgaggcgggacgtgcgcatcctgttactgggcgaggcccaggtggggaagacgtcgctgatcctgtccctggtgggcgaggagttccccgaggaggtccctccccgcgcggaggagatcaccatccccgcggacgtcaccccggagaaggtgcccacccacatcgtggactactcagaagccgagcagacggacgaggagctgcgggaggagatccacaaggcaaacgtggtgtgtgtggtgtatgacgtctctgaggaggccaccattgagaagattcgaactaagtggatcccactggtgaatggggggaccacgcaggggcccagggtgcccatcatcctagtgggcaacaagtcagacctgcggtcggggagctccatggaggccgtgctccccatcatgagccagtttcccgagattgagacctgcgtggagtgttcggccaagaacctgaggaacatctcagagctgttctactacgcccagaaggccgtcctgcatcccacagcccccctctatgaccctgaggccaagcagaaatcctgctttgggcaccccctggccccgcaggccctggaggacgtgaagacggtggtgtgcaggaacgtggcgggcggcgtgcgggaggaccggctgacc

SEQ ID NO: 174322 - DNA, 4372 bp, Homo sapiens
  Payload ID: 14209
  Gene Symbol: RHOU
  Gene Name: ras homolog family member U
  Uniprot ID: Q7L0Q8
  ENST ID: ENST00000366691
  CDS Start-End: 667-1443
gggctccacggagtgaataggaggcggctcaggcttcctggctcgcgtgggcgccagaaagcggaacctcccgggccagtcgcgcggtggtcaccctcttgggagctggggaggaggctgcggaggctggcccggctccttcgggcgtcgcttcccggaccgggtgcgcggggtcccccggaacgtgtgttccaggtcctcccgcgccagtgttcgcagtccccgcctggtcgcggcggcgcctcgggcgcgggtgcaggcgcgcggcgcgcaggcggggggcgctgtggtcttggcgcggggaccgagccgctcggccagacccgcctcttttccctccccgccagcccgcccgcctgcccgccccccacgcgtcgtgtcgccgggaagccgggcggagacagagcgcttgggatccacggcgctcggaccgctgtcctccaacagcgcagggcagagcggctggcgccgccggagcgcggagccacgaccctccctggccgcctttgtctactggccgtgcggcccggaaccgccactctccagggccggggacgcgcccgcagctgtcggtgacagctcctccctaccgcaaccctccggggcggaggggcggtcgggccgggccctgctagcccgcgaccgcaagcccgcgctcgcggatcgatgcccccgcagcagggggaccccgcgttccccgaccgctgcgaggcgcctccggtgccgccgcgtcgggagcgcggtggacgcgggggacgcgggcctggggagccggggggccgggggcgtgcggggggtgccgaggggcgcggcgtcaagtgcgtgctggtcggcgacggcgcggtgggcaagacgagcctggtggtgagctacaccaccaacggctaccccaccgagtacatccctactgccttcgacaacttctccgcggtggtgtctgtggatgggcggcccgtgagactccaactctgtgacactgccggacaggatgaatttgacaagctgaggcctctctgctacaccaacacagacatcttcctgctctgcttcagtgtcgtgagcccctcatccttccagaacgtcagtgagaaatgggtgccggagattcgatgccactgtcccaaagcccccatcatcctagttggaacgcagtcggatctcagagaagatgtcaaagtcctcattgagttggacaaatgcaaagaaaagccagtgcctgaagaggcggctaagctgtgcgccgaggaaatcaaagccgcctcctacatcgagtgttcagccttgactcaaaaaaacctcaaagaggtctttgatgcagccatcgtcgctggcattcaatactcggacactcagcaacagccaaagaagtctaaaagcaggactccagataaaatgaaaaacctctccaagtcctggtggaagaagtactgctgtttcgtatgatgctggcaagacacccagaaaggctattttcagatgaaatcgatattagaagctatattagctgaaacaactccttttactgcgtagaacctatatcgagagtgtgtgtatatgtattataggaggagctctcaattttatgtattctttctgcctttaattttcttgtttgtttgagcttagggatgagatacttatgcaagatatttttgaagtaaattaaacatttttcacatctctggaaatttagagttctagacctctggttaatttatatctaatatgaagaagacacctctaatctggatgttaagaatgaagttctgctacattataatgtacagaagagcaaaagggaggaacactatggttaaccctctcttgattaagggctacttaatgcacagtgcattatgtacacaggtcaaccatggtaacaatagttcttagctttgaaactccatgcaaaccatgccttttttttaaggagcaaaaatctgagaaaaaaagtgagagacctctgcctacaaaacctcaaaccagtcacttttgtcaattgctaatacccagttacttatgatttaaaaacaaccaacagaaaacatcccactgactgtatggcactctgtagtcaaaaaaggaaacttccttattgggacttttctttcttagtccagttgtgttgacacatatgaacacagacaaagtgctatgcggaggaaagcaagtgttggtcagtagtttcatgttttagggagtggttcctgtggagatcagaaagtgacatttgctttcggtactgtaatacgtgcaccaaactgcctcaatcctaggtaacgagggcaacagggagcacctgtctggattgtttttaaacctccatactcaagctgtctcttcggcagggaggtgaatactcttgaaaggccaacagcaagtgtttgtgggacacaacacagataattttttcttaagtcggccaagatgtacttctctgtgtgcacacccatgcacactcatgcacacagatacataggtctgtatggctgtatttgctgttgattcagactttcacaccattaatggggaaaagcgtggccacaaaaacagatgctaggaagcttggcttcctcttcttgttgacccttttttgaaccaacatcttttttattatattcagagtatgtttttaagtgtatcttaatatatacattttttaggacatcttaaatctaaacaaaaaataaaatgaacatctcttgaaacctgttaaaacaaccagttaaagccacagatggctttcagggcagtagcagcagaggccagtggactctgaggactcctgaggggcggggcgtgtagccagccaggtgcatgccgggaccatggcccccatacttggctgcttcctgtgacagtgaaatacatccttcaaggtggcagctgttagggctgaatcttctggagaaaaaggtgccatctcaggagaatagcttttactctggtaggaatgcttccgagacaccacaaggcagcctgaacactcagttgcagggtcgggcttgcggtgggtgacccagagccaccaaagtcacatccacaactaatgagggaaatctgtaaagccagttagatagaagaattttatttttctgtgggttttgtgttgtcttttttatgttaaaaagaaatccagtttgtgtttttctatagaaaaagtaaaagatcaggttatactttaggttaggggttctatttattcctgttagtaaataaaattaacaaatttctttgtttaacaaaagattaatctttaaaccactaaaatacatagactgattgattattcaacacattggaattgatgtcggtcatagtttcctgaagcatttagttacaacctgaaggaataaaatgatttgtggaaatgcttaaaatagacctaactgaatacagtctcatcttgccgcgcctggcttacctatctgtggaaagctaggcttcccaggctgggctctgcctgtctggtgcctggaggtgtgggagggaagatgagttatttaactggtaagcgatttgaaacactatttttatattaaagtaaatggcatggagtatagtgcaaattcatttttaagatagaacacaaaacttgaaagaagttttatgcgtgtgacagtgtatggggctgcagttggtctccctggaggggacttccacacctcctgcctttaggccatgggtggaaagtgctcagtgaagtacacctgtgtggcccagttctgaaagctttatacagttgaattttaagtggggttgataacaccttggactgttagtgttaaaaatctagtgggttgacctttaaatgcaacagtttttaaaatatattgctgcattttatagaatagtaaaggtacgattatacttgagattttcctccatttttatttcttcgtgaacatagagtttggggccgaaaatgtttttaaagtatgtgtttgagttaaatataaagttggttcacttcaaagctaaaaaattgttaaacttgcagcttggtattgcagagaagattttataagaattttgctttagagaatgccactttggctgaactacaagtgtaggccaccattataatttataaatacagcatacttcaaaactgtttgttatctcttgttaccatgtatgtataaatggaccttttataaccttgttctctgcttgacagactcaagagaaactacccaggtattacacaagccaaaatgggagcaaggccttctctccagactatcgtaacctggtgccttaccaagttgtgcttttctgttttcaagtgtaaatgatgttgagcagaatgttgtacttgaaaatgctataagtgagatggtatgaaataaattctgacttatgaatataa

SEQ ID NO: 174323 - DNA, 1705 bp, Homo sapiens
  Payload ID: 14210
  Gene Symbol: RHOV
  Gene Name: ras homolog family member V
  Uniprot ID: Q96L33
  ENST ID: ENST00000220507
  CDS Start-End: 151-861
gggcggggccctacacaaacccgctggtagcgctgggccgactcgcccagcctggacccattcagtcagaggcagccagcgggacctgcttcaccgagcgcagcgaagccgagacccgggctggcccctctgctgcccccggagcgggccatgccgccgcgggagctgagcgaggccgagccgcccccgctccgggccccgacccctcccccgcggcggcgtagcgcgcccccagagctgggcatcaagtgcgtgctggtgggcgacggcgccgtgggcaagagcagcctcatcgtcagctacacctgcaatgggtaccccgcgcgctaccggcccactgcgctggacaccttctctgtgcaagtcctggtggatggagctccggtgcgcattgagctctgggacacagcgggacaggaggattttgaccgacttcgttccctttgctacccggataccgatgtcttcctggcgtgcttcagcgtggtgcagcccagctcctttcaaaacatcacagagaaatggctgcccgagatccgcacgcacaacccccaggcgcctgtgctgctggtgggcacccaggccgacctgagggacgatgtcaacgtactaattcagctggaccaggggggccgggagggccccgtgccccaaccccaggctcagggtctggccgagaagatccgagcctgctgctaccttgagtgctcagccttgacgcagaagaacttgaaggaagtatttgactcggctattctcagtgccattgagcacaaagcccggctggagaagaaactgaatgccaaaggtgtgcgcaccctctcccgctgccgctggaagaagttcttctgcttcgtttgagcagctatggctgcatagcaagtagtaggcaggaggccaaagacttctgagacctggggcacccgggcctttgcggcagctactggcagggcctggccacctcataggactcagttcccttctgaacactcgggggacatgggcctctaactgcccactctgatatgcctgggtgagcctaggagggaaggctctgatttggatttctccagtcaaagctcacagaaaaaaacctggcactttgattttcatgggatggtcctaacagggtcagtcacctccgagcagtttgggaacccagtttcttgtcctgggccctcaggtcagcctggctgaattaggacccttccttggcacaggggtgagaaagagcttggggaacgcttggcattatggagggctggaaggggctcaaccccgatttggagagaagtttgggatggagtgggcgagagattgagagagcgagcaggaaaagaggtcttggagcctgggactgatggtggataaggcctggaaagaagatgacgaggaggaggagagagggaagtggggtggatgaggagcaggctgacacctgggctgccctcaatccccaaggccagggagggcggggctggcccctgggaagaactgggtctctgggctccctaggcactgcccaaactggctgagccaggagtggggcaggaagtgagagtcaaggcccagcaaaaggagggggaggagctgcaaattagaacctgaaggaggaccgggttggggatcatccctttcctcaaggtcacacagcctagaagctagagcagtgcagagtctgcaaataaaaccttaagtctgtgaa

SEQ ID NO: 174324 - DNA, 3308 bp, Homo sapiens
  Payload ID: 14211
  Gene Symbol: RASIP1
  Gene Name: Ras interacting protein 1
  Uniprot ID: Q5U651
  ENST ID: ENST00000222145
  CDS Start-End: 206-3097
ggcagggccaaccctacccagatctcctcccccaggcctggtctcctcacaggacgccccctccccgctcttcctgccgggtttcctcttgccttttcctgtcccccacccagtgctgggagccgtggcagaggcaagagcagtggaactgacccaggccagtggagccagggcctccgggtgtgccggacccgaagcaggggccatgctgtctggtgaacggaaggagggcggaagcccccgcttcgggaagcttcatctccccgtgggcctgtggatcaattcccccaggaagcagctggcgaagctggggcggcgctggcccagcgcagcctctgtcaagtcttcttcgtcggacacggggagccgcagcagcgagccgctacctccgcccccgccgcacgtggagctgcggcgagtgggcgctgtcaaggcggccgggggagcctccggtagccgcgccaagcgcatctcccagctcttccggggctcggggaccgggaccacggggtccagcggcgcaggaggccctgggaccccggggggcgcgcagcgctgggccagcgagaagaagctgccggagctggcggcgggcgtggcccccgagcccccgctggctacccgcgccacggcgcctccgggggtcctcaagatcttcggcgccggactggcatcgggcgccaactacaagagcgtgctggccacggcgcgctccacggcgcgcgagctcgtggccgaggcgctagagcgctacggcctagcaggcagccccggcggtggccccggcgagagcagctgcgtggacgccttcgctttgtgcgacgctctgggccggcccgcggcggcgggcgtgggaagcggcgagtggcgggcggagcacctgcgcgtgctgggcgactccgagcgcccgctgctggtgcaggagctgtggcgggcgcggcccggctgggcgcggcgcttcgagttgcgcggccgcgaggaggcgcggcgcctggagcaggaggccttcggggccgcggacagcgaaggcaccggcgccccttcgtggcggccacagaagaaccgctcccgggcggcgtcgggtggggcagcgctggccagtcctggcccggggaccggatcaggggccccagctgggtctggaggcaaggagcgctcagaaaacttgtctttgcggcgcagcgtgtcggagcttagccttcaggggcggcggcggcggcagcaggagcggagacagcaggcacttagcatggccccaggggcagccgacgcccaaatcggaactgcagaccccggggacttcgatcagttgactcagtgcctcatccaggcccccagcaaccgcccctacttcctgctgctccagggctaccaggacgcccaggactttgtggtgtatgtgatgacgcgagagcagcacgtgtttgggcgaggtgggaactcgtctggccgcggggggtccccggctccctatgtggacaccttcctcaacgccccggacatcctgccgcgtcactgcacagtgcgcgcgggccctgagcacccggccatggtgcgcccgtcccggggcgccccagtcacgcacaacgggtgcctcctgctgcgggaggctgagctgcacccgggcgacctcctggggctgggcgagcacttcctgttcatgtacaaggacccccgcactgggggctcggggcctgcgaggccgccgtggctgcccgcgcgccccggggccacgccgccaggccctggctgggccttctcctgtcgcctgtgcggccgcggcctgcaggagcgcggcgaggcactggccgcctacctggacggccgtgagccagtcctgcgcttccggccgcgcgaggaggaggcgctgctgggcgagatcgtgcgcgccgcagccgccggctcgggagacctgccgcccctcgggcccgccacgctgctggcgctgtgcgtgcagcattccgcccgtgagctggagctgggccacctgccacgactgctgggccgcctggcccggctcatcaaggaggccgtctgggaaaagattaaggaaattggagaccgtcagccagaaaaccaccctgagggggtccccgaggtgcccctgactcctgaagctgtgtctgtggagctgcggccactcatgctgtggatggccaacaccacggagctgcttagctttgtgcaggagaaggtgctggaaatggagaaggaggctgaccaagaggacccacagctctgcaatgacttggaattatgtgatgaggccatggccctcctggatgaggtcatcatgtgtaccttccagcagtctgtctactacctcaccaagactctctattcaacgctgcctgctctcctggatagtaaccctttcacagctggtgcagagctgccggggcctggcgcggagctgggggccatgcctccaggattgagacctaccctgggcgtgttccaggcagccttggagctgaccagccagtgcgagctgcaccctgacctcgtgtctcagacttttggctacttgttcttcttctccaacgcatcccttctcaactcgctgatggaacgaggtcaaggccggcctttctatcaatggtcccgagctgttcaaatccgaaccaacctggacctcgtcttggactggctacagggagctgggctgggcgacattgccactgagttcttccggaaactctccatggctgtgaacctgctctgtgtgccccgcacttccctgctcaaggcttcatggagcagcctaagaaccgaccaccccaccttgacccccgcccagctgcaccatctgctcagccactatcagctgggccctggccgcgggccgccagccgcgtgggaccctccccctgcagagcgggaggctgtggacacaggggacatcttcgaaagcttctcctcgcacccgcccctcatcctccccctggggagctcgcgcctgcgcctcactggtccagtgacggacgatgccttgcaccgtgaactccgtaggctccgccgcctcctctgggatcttgagcagcaggagctgccagccaattatcgccatgggcctcccgtggccacgtctccttgagaaccaataccaaacgagcgcgcgaaccttgaaatgtcacgggcttctacggacaggagcccgcctgagcgcaaagctttctgggagttgtagttcttatcccgcgtggaatgttgggagattgagttttcgggaagtagcggatgggacggtgggagcatgggcttaggatgtgaatgccagggagcaataaaggtatccgtggtatcgg

SEQ ID NO: 174325 - DNA, 546 bp, Homo sapiens
  Payload ID: 14211
  Gene Symbol: RASIP1
  Gene Name: Ras interacting protein 1
  ENST ID: ENST00000599291
  CDS Start-End: 1-546
cggccgcgaggaggcgcggcgcctggagcaggaggccttcggggccgcggacagcgaaggcaccggcgccccttcgtggcggccacagaagaaccgctcccgggcggcgtcgggtggggcagcgctggccagtcctggcccggggaccggatcaggggccccagctgggtctggaggcaaggagcgctcagaaaacttgtctttgcggcgcagcgtgtcggagcttagccttcaggggcggcggcggcggcagcaggagcggagacagcaggcacttagcatggccccaggggcagccgacgcccaaatcggaactgcagaccccggggacttcgatcagttgactcagtgcctcatccaggcccccagcaaccgcccctacttcctgctgctccagggctaccaggacgcccagactctctattcaacgctgcctgctctcctggatagtaaccctttcacagctggtgcagagctgccggggcctggcgcggagctgggggccatgcctccaggattgagacctaccctgggcgtgttccaggc

SEQ ID NO: 174326 - DNA, 3165 bp, Homo sapiens
  Payload ID: 14211
  Gene Symbol: RASIP1
  Gene Name: Ras interacting protein 1
  ENST ID: ENST00000621604
  CDS Start-End: 66-2954
cagtggaactgacccaggccagtggagccagggcctccgggtgtgccggacccgaagcaggggccatgctgtctggtgaacggaaggagggcggaagcccccgcttcgggaagcttcatctccccgtgggcctgtggatcaattcccccaggaagcagctggcgaagctggggcggcgctggcccagcgcagcctctgtcaagtcttcttcgtcggacacggggagccgcagcagcgagccgctacctccgcccccgccgcacgtggagctgcggcgagtgggcgctgtcaaggcggccgggggagcctccggtagccgcgccaagcgcatctcccagctcttccggggctcggggaccgggaccacggggtccagcggcgcaggaggccctgggaccccggggggcgcgcagcgctgggccagcgagaagaagctgccggagctggcggcgggcgtggcccccgagcccccgctggctacccgcgccacggcgcctccgggggtcctcaagatcttcggcgccggactggcatcgggcgccaactacaagagcgtgctggccacggcgcgctccacggcgcgcgagctcgtggccgaggcgctagagcgctacggcctagcaggcagccccggcggtggccccggcgagagcagctgcgtggacgccttcgctttgtgcgacgctctgggccggcccgcggcggcgggcgtgggaagcggcgagtggcgggcggagcacctgcgcgtgctgggcgactccgagcgcccgctgctggtgcaggagctgtggcgggcgcggcccggctgggcgcggcgcttcgagttgcgcggccgcgaggaggcgcggcgcctggagcaggaggccttcggggccgcggacagcgaaggcaccggcgccccttcgtggcggccacagaagaaccgctcccgggcggcgtcgggtggggcagcgctggccagtcctggcccggggaccggatcaggggccccagctgggtctggaggcaaggagcgctcagaaaacttgtctttgcggcgcagcgtgtcggagcttagccttcaggggcggcggcggcggcagcaggagcggagacagcaggcacttagcatggccccaggggcagccgacgcccaaatcggaactgcagaccccggggacttcgatcagttgactcagtgcctcatccaggcccccagcaaccgcccctacttcctgctgctccagggctaccaggacgcccaggactttgtggtgtatgtgatgacgcgagagcagcacgtgtttgggcgaggtgggaactcgtctggccgcggggggtccccggctccctatgtggacaccttcctcaacgccccggacatcctgccgcgtcactgcacagtgcgcgcgggccctgagcacccggccatggtgcgcccgtcccggggcgccccagtcacgcacaacgggtgcctcctgctgcgggaggctgagctgcacccgggcgacctcctggggctgggcgagcacttcctgttcatgtacaaggacccccgcactgggggctcggggcctgcgaggccgccgtggctgcccgcgcgccccggggccacgcgccagccctggctgggcttctcctgtcgcctgtgcggccgcggcctgcaggagcgcggcgaggcactggccgcctacctggacggccgtgagccagtcctgcgcttccggccgcgcgaggaggaggcgctgctgggcgagatcgtgcgcgccgcagccgccggctcgggagacctgccgcccctcgggcccgccacgctgctggcgctgtgcgtgcagcattccgcccgtgagctggagctgggccacctgccacgactgctgggccgcctggcccggctcatcaaggaggccgtctgggaaaagattaaggaaattggagaccgtcagccagaaaaccaccctgagggggtccccgaggtgcccctgactcctgaagctgtgtctgtggagctgcggccactcatgctgtggatggccaacaccacggagctgcttagctttgtgcaggagaaggtgctggaaatggagaaggaggctgaccaagaggacccacagctctgcaatgacttggaattatgtgatgaggccatggccctcctggatgaggtcatcatgtgtaccttccagcagtctgtctactacctcaccaagactctctattcaacgctgcctgctctcctggatagtaaccctttcacagctggtgcagagctgccggggcctggcgcggagctgggggccatgcctccaggattgagacctaccctgggcgtgttccaggcagccttggagctgaccagccagtgcgagctgcaccctgacctcgtgtctcagacttttggctacttgttcttcttctccaacgcatcccttctcaactcgctgatggaacgaggtcaaggccggcctttctatcaatggtcccgagctgttcaaatccgaaccaacctggacctcgtcttggactggctacagggagctgggctgggcgacattgccactgagttcttccggaaactctccatggctgtgaacctgctctgtgtgccccgcacttccctgctcaaggcttcatggagcagcctaagaaccgaccaccccaccttgacccccgcccagctgcaccatctgctcagccactatcagctgggccctggccgcgggccgccagccgcgtgggaccctccccctgcagagcgggaggctgtggacacaggggacatcttcgaaagcttctcctcgcacccgcccctcatcctccccctggggagctcgcgcctgcgcctcactggtccagtgacggacgatgccttgcaccgtgaactccgtaggctccgccgcctcctctgggatcttgagcagcaggagctgccagccaattatcgccatgggcctcccgtggccacgtctccttgagaaccaataccaaacgagcgcgcgaaccttgaaatgtcacgggcttctacggacaggagcccgcctgagcgcaaagctttctgggagttgtagttcttatcccgcgtggaatgttgggagattgagttttcgggaagtagcggatgggacggtgggagcatgggcttaggatgtgaatgccagggagcaataaaggtatccgtggtatcgg

SEQ ID NO: 174327 - DNA, 3752 bp, Homo sapiens
  Payload ID: 14212
  Gene Symbol: RASA1
  Gene Name: RAS p21 protein activator (GTPase activating protein) 1
  Uniprot ID: P20936
  ENST ID: ENST00000274376
  CDS Start-End: 565-3708
ctgagagctccaggtagtgagcagttcagtcgatttcctcgttaccccgcccccctttctcttgcccccccacccctctcatctgcctggtggaggatgaagcggctgcagtggccccagcctcagcagcggcaccggcggtggctgcggtgtgggtggccggaactggggtggtgaagaagcggtggtggcggctgaaggagcggtagcagcctcagcctctttccctgtgcttcctttcctctttagtgcagcgaggaagttttcgcttctgtacatgtgtttgtgtgcgtgagtgtgggtgtgtgcggtgaggtttgggtggcgtttgtgcaggcgttgggttttttgcccacttggcttcccgtaacccaggcagctggggagcctgggctgtggccctaggagggggcgcggcggcgggctctctccttttgttgttgtttcctcagcctggggagctgaaggggagacgcgtctgggtggggctgctcggagcccgggcctggtggcccctggggctcccgggcgggcagggtagggcagagtagagcgggcttcaacatgatggcggccgaggccggcagtgaggagggcggcccggtaacagccggagctggaggaggcggcgcggcagcgggctccagtgcctatcccgcagtgtgtcgggtgaagatacccgcggccctgcctgtggcagccgccccctatcctgggctggtggagaccggagtggctggaactctgggtggcggagccgctttggggtcagagttcctaggagccgggtctgtggcaggggcactggggggagctggactgacagggggaggtactgctgctggcgtagctggtgctgctgctggcgtggccggtgctgctgttgctggacctagtggagacatggctctcaccaaactgcccacttcgttgcttgctgagactctcgggccaggcggcggttttccccctctgccccctcccccttacctgccccctttgggggcgggcctcgggacagtggacgaaggtgactctctggatggaccagaatacgaggaggaagaggtggccataccgttgaccgctcctccaactaaccagtggtatcacggaaaacttgacagaacgatagcagaagaacgcctcaggcaggcagggaagtctggcagttatcttataagagagagtgatcggaggccagggtcctttgtactttcatttcttagccagatgaatgttgtcaaccattttaggattattgctatgtgtggagattactacattggtggaagacgtttttcttcactgtcagacctaataggttattacagtcatgtttcttgtttgcttaaaggagaaaaattactttacccagttgcaccaccagagccagtagaagatagaaggcgtgtacgagctattctaccttacacaaaagtaccagacactgatgaaataagtttcttaaaaggagatatgttcattgttcataatgaattagaagatggatggatgtgggttacaaatttaagaacagatgaacaaggccttattgttgaagacctagtagaagaggtgggccgggaagaagatccacatgaaggaaaaatatggttccatgggaagatttccaaacaggaagcttataatttactaatgacagttggtcaagtctgcagttttcttgtgaggccctcagataatactcctggcgattattcactttatttccggaccaatgaaaatattcagcgatttaaaatatgtccaacgccaaacaatcagtttatgatgggaggccggtattataacagcattggggacatcatagatcactatcgaaaagaacagattgttgaaggatattatcttaaggaacctgtaccaatgcaggatcaagaacaagtactcaatgacacagtggatggcaaggaaatctataataccatccgtcgtaaaacaaaggatgccttttataaaaacattgttaagaaaggttatcttctgaaaaagggcaaaggaaaacgttggaaaaatttatattttatcttagagggtagtgatgcccaacttatttattttgaaagcgaaaaacgagctaccaaaccaaaaggattaatagatctcagtgtatgttctgtctatgtcgttcatgatagtctctttggcaggccaaactgttttcagatagtagttcagcactttagtgaagaacattacatcttttactttgcaggagaaactccagaacaagcagaggattggatgaaaggtctgcaggcattttgcaatttacggaaaagtagtccagggacatccaataaacgccttcgtcaggtcagcagccttgttttacatattgaagaagcccataaactcccagtaaaacattttactaatccatattgtaacatctacctgaatagtgtccaagtagcaaaaactcatgcaagggaagggcaaaacccagtatggtcagaagagtttgtctttgatgatcttcctcctgacatcaatagatttgaaataactcttagtaataaaacaaagaaaagcaaagatcctgatatcttatttatgcgctgccagttgagccgattacagaaagggcatgccacagatgaatggtttctgctcagctcccatataccattaaaaggtattgaaccagggtccctgcgtgttcgagcacgatactctatggaaaaaatcatgccagaagaagagtacagtgaatttaaagagcttatactgcaaaaggaacttcatgtagtctatgctttatcacatgtatgtggacaagaccgaacactactggccagcatcctactgaggatttttcttcacgaaaagcttgaatcgttgttgttatgcacactaaatgacagagaaataagcatggaagatgaagccactaccctatttcgagccacaacacttgcaagcaccttgatggagcagtatatgaaagccactgctacacagtttgttcatcatgctttgaaagactctattttaaagataatggaaagcaagcagtcttgtgagttaagtccatcaaagttagaaaaaaatgaagatgtgaacactaatttaacacacctattgaacatactttcagagcttgtggagaaaatattcatggcttcagaaatacttccaccgacattgagatatatttatgggtgtttacagaaatctgttcagcataagtggcctacaaataccaccatgagaacaagagttgttagtggttttgtttttcttcgactcatctgtcctgccatcctgaatccacggatgttcaatatcatctcagattctccatctcctattgctgcaagaacactgatattagtggctaaatctgtgcagaacttagcaaatcttgtggaatttggagctaaggagccctacatggaaggtgtcaatccattcatcaaaagcaacaaacatcgtatgatcatgtttttagatgaacttgggaatgtacctgaacttccggacactacagagcattctagaacggacctgtcccgtgatttagcagcattgcatgagatttgcgtggctcattcagatgaacttcgaacgctcagtaatgagcgtggtgcacagcagcacgtattgaaaaagcttctggctataacagaactgcttcaacaaaaacaaaaccagtatacaaaaaccaatgatgtcaggtagcagccttcgccccagtgttctgcatggattcagcatgtccaaca

SEQ ID NO: 174328 - DNA, 3776 bp, Homo sapiens
  Payload ID: 14212
  Gene Symbol: RASA1
  Gene Name: RAS p21 protein activator (GTPase activating protein) 1
  Uniprot ID: P20936
  ENST ID: ENST00000456692
  CDS Start-End: 116-2728
gaccagaatacgaggaggaagaggtggccataccgttgaccgctcctccaactaaccagtaagttaagactgctgttcaggaatttgggaagctggctccagaaaagaagtggaaatgaaggggtggtatcacggaaaacttgacagaacgatagcagaagaacgcctcaggcaggcagggaagtctggcagttatcttataagagagagtgatcggaggccagggtcctttgtactttcatttcttagccagatgaatgttgtcaaccattttaggattattgctatgtgtggagattactacattggtggaagacgtttttcttcactgtcagacctaataggttattacagtcatgtttcttgtttgcttaaaggagaaaaattactttacccagttgcaccaccagagccagtagaagatagaaggcgtgtacgagctattctaccttacacaaaagtaccagacactgatgaaataagtttcttaaaaggagatatgttcattgttcataatgaattagaagatggatggatgtgggttacaaatttaagaacagatgaacaaggccttattgttgaagacctagtagaagaggtgggccgggaagaagatccacatgaaggaaaaatatggttccatgggaagatttccaaacaggaagcttataatttactaatgacagttggtcaagtctgcagttttcttgtgaggccctcagataatactcctggcgattattcactttatttccggaccaatgaaaatattcagcgatttaaaatatgtccaacgccaaacaatcagtttatgatgggaggccggtattataacagcattggggacatcatagatcactatcgaaaagaacagattgttgaaggatattatcttaaggaacctgtaccaatgcaggatcaagaacaagtactcaatgacacagtggatggcaaggaaatctataataccatccgtcgtaaaacaaaggatgccttttataaaaacattgttaagaaaggttatcttctgaaaaagggcaaaggaaaacgttggaaaaatttatattttatcttagagggtagtgatgcccaacttatttattttgaaagcgaaaaacgagctaccaaaccaaaaggattaatagatctcagtgtatgttctgtctatgtcgttcatgatagtctctttggcaggccaaactgttttcagatagtagttcagcactttagtgaagaacattacatcttttactttgcaggagaaactccagaacaagcagaggattggatgaaaggtctgcaggcattttgcaatttacggaaaagtagtccagggacatccaataaacgccttcgtcaggtcagcagccttgttttacatattgaagaagcccataaactcccagtaaaacattttactaatccatattgtaacatctacctgaatagtgtccaagtagcaaaaactcatgcaagggaagggcaaaacccagtatggtcagaagagtttgtctttgatgatcttcctcctgacatcaatagatttgaaataactcttagtaataaaacaaagaaaagcaaagatcctgatatcttatttatgcgctgccagttgagccgattacagaaagggcatgccacagatgaatggtttctgctcagctcccatataccattaaaaggtattgaaccagggtccctgcgtgttcgagcacgatactctatggaaaaaatcatgccagaagaagagtacagtgaatttaaagagcttatactgcaaaaggaacttcatgtagtctatgctttatcacatgtatgtggacaagaccgaacactactggccagcatcctactgaggatttttcttcacgaaaagcttgaatcgttgttgttatgcacactaaatgacagagaaataagcatggaagatgaagccactaccctatttcgagccacaacacttgcaagcaccttgatggagcagtatatgaaagccactgctacacagtttgttcatcatgctttgaaagactctattttaaagataatggaaagcaagcagtcttgtgagttaagtccatcaaagttagaaaaaaatgaagatgtgaacactaatttaacacacctattgaacatactttcagagcttgtggagaaaatattcatggcttcagaaatacttccaccgacattgagatatatttatgggtgtttacagaaatctgttcagcataagtggcctacaaataccaccatgagaacaagagttgttagtggttttgtttttcttcgactcatctgtcctgccatcctgaatccacggatgttcaatatcatctcagattctccatctcctattgctgcaagaacactgatattagtggctaaatctgtgcagaacttagcaaatcttgtggaatttggagctaaggagccctacatggaaggtgtcaatccattcatcaaaagcaacaaacatcgtatgatcatgtttttagatgaacttgggaatgtacctgaacttccggacactacagagcattctagaacggacctgtcccgtgatttagcagcattgcatgagatttgcgtggctcattcagatgaacttcgaacgctcagtaatgagcgtggtgcacagcagcacgtattgaaaaagcttctggctataacagaactgcttcaacaaaaacaaaaccagtatacaaaaaccaatgatgtcaggtagcagccttcgccccagtgttctgcatggattcagcatgtccaacatggtaattcacttcagtttaatgtctcctttgctcttgccaaaaaatagcacacttttccacattccagtgatgtgtgagctatgcaaacaaaatccaagattctgctggtgaataactatgccagcaaccttgtaagctatctgtgcaggatatttgcactatttccacatggaatcaatctttaacaacctctgagccttggtgtacagaccacctttcacaaaacgaaatgctatgactgtatcttgatatctcgaactttcaaaatatattttcagtacacccagttgccaaagttttgctgtctcttagagaaagaactatgaaatcaactgacaagaaacacattcttattgacaattgtgtataactggattgcagactgttcttactgtaactacttcctgattaggaatatgaccatttgactgttcaatgattatttgtatttacagtttccagagtttgtcattataataggaacaatctttgctgtatacttttaaaaaatactctgctatttctcttgctggaactgttgaaagaaaatatatagaatgatctattgctcatcagctttattttttaaacatacgacttattttgttgaaattgtcaaagactgtatttagatctcataatgctttgttaaatgtttacaagtaaatagtttgaattcagtaaatattattggttgttgtattgatcaatgcatgttacccattcaaccattttatagactaccaatttcttttatgttaactagaatgcttttgttaaaagttatttgttcattatttgtgctacccctttgattatgcagacaacctcatcagctgcctaacttatccatctttgaacttctgactacttgttgtatctgctggatatttagttcaactgtatagttttatttacttctgtatgtgtatttttgtgaagtattcacaaaggttaagttaaaataaaaccaagggatatcttgcataattgattacttct

SEQ ID NO: 174329 - DNA, 3009 bp, Homo sapiens
  Payload ID: 14212
  Gene Symbol: RASA1
  Gene Name: RAS p21 protein activator (GTPase activating protein) 1
  ENST ID: ENST00000506290
  CDS Start-End: 118-2763
gaggaggaagaggtggccataccgttgaccgctcctccaactaaccagtaagttaagactgctgttcaggaatttgggaagctggctccagaaaagaagtggaaatgaaggggttccatgtgccttgtgaagtcatggttcctcagtataagatcgaggtggtatcacggaaaacttgacagaacgatagcagaagaacgcctcaggcaggcagggaagtctggcagttatcttataagagagagtgatcggaggccagggtcctttgtactttcatttcttagccagatgaatgttgtcaaccattttaggattattgctatgtgtggagattactacattggtggaagacgtttttcttcactgtcagacctaataggttattacagtcatgtttcttgtttgcttaaaggagaaaaattactttacccagttgcaccaccagagccagtagaagatagaaggcgtgtacgagctattctaccttacacaaaagtaccagacactgatgaaataagtttcttaaaaggagatatgttcattgttcataatgaattagaagatggatggatgtgggttacaaatttaagaacagatgaacaaggccttattgttgaagacctagtagaagaggtgggccgggaagaagatccacatgaaggaaaaatatggttccatgggaagatttccaaacaggaagcttataatttactaatgacagttggtcaagtctgcagttttcttgtgaggccctcagataatactcctggcgattattcactttatttccggaccaatgaaaatattcagcgatttaaaatatgtccaacgccaaacaatcagtttatgatgggaggccggtattataacagcattggggacatcatagatcactatcgaaaagaacagattgttgaaggatattatcttaaggaacctgtaccaatgcaggatcaagaacaagtactcaatgacacagtggatggcaaggaaatctataataccatccgtcgtaaaacaaaggatgccttttataaaaacattgttaagaaaggttatcttctgaaaaagggcaaaggaaaacgttggaaaaatttatattttatcttagagggtagtgatgcccaacttatttattttgaaagcgaaaaacgagctaccaaaccaaaaggattaatagatctcagtgtatgttctgtctatgtcgttcatgatagtctctttggcaggccaaactgttttcagatagtagttcagcactttagtgaagaacattacatcttttactttgcaggagaaactccagaacaagcagaggattggatgaaaggtctgcaggcattttgcaatttacggaaaagtagtccagggacatccaataaacgccttcgtcaggtcagcagccttgttttacatattgaagaagcccataaactcccagtaaaacattttactaatccatattgtaacatctacctgaatagtgtccaagtagcaaaaactcatgcaagggaagggcaaaacccagtatggtcagaagagtttgtctttgatgatcttcctcctgacatcaatagatttgaaataactcttagtaataaaacaaagaaaagcaaagatcctgatatcttatttatgcgctgccagttgagccgattacagaaagggcatgccacagatgaatggtttctgctcagctcccatataccattaaaaggtattgaaccagggtccctgcgtgttcgagcacgatactctatggaaaaaatcatgccagaagaagagtacagtgaatttaaagagcttatactgcaaaaggaacttcatgtagtctatgctttatcacatgtatgtggacaagaccgaacactactggccagcatcctactgaggatttttcttcacgaaaagcttgaatcgttgttgttatgcacactaaatgacagagaaataagcatggaagatgaagccactaccctatttcgagccacaacacttgcaagcaccttgatggagcagtatatgaaagccactgctacacagtttgttcatcatgctttgaaagactctattttaaagataatggaaagcaagcagtcttgtgagttaagtccatcaaagttagaaaaaaatgaagatgtgaacactaatttaacacacctattgaacatactttcagagcttgtggagaaaatattcatggcttcagaaatacttccaccgacattgagatatatttatgggtgtttacagaaatctgttcagcataagtggcctacaaataccaccatgagaacaagagttgttagtggttttgtttttcttcgactcatctgtcctgccatcctgaatccacggatgttcaatatcatctcagattctccatctcctattgctgcaagaacactgatattagtggctaaatctgtgcagaacttagcaaatcttgtggaatttggagctaaggagccctacatggaaggtgtcaatccattcatcaaaagcaacaaacatcgtatgatcatgtttttagatgaacttgggaatgtacctgaacttccggacactacagagcattctagaacggacctgtcccgtgatttagcagcattgcatgagatttgcgtggctcattcagatgaacttcgaacgctcagtaatgagcgtggtgcacagcagcacgtattgaaaaagcttctggctataacagaactgcttcaacaaaaacaaaaccagtatacaaaaaccaatgatgtcaggtagcagccttcgccccagtgttctgcatggattcagcatgtccaacatggtaattcacttcagtttaatgtctcctttgctcttgccaaaaaatagcacacttttccacattccagtgatgtgtgagctatgcaaacaaaatccaagattctgctggtgaataactatgccagcaaccttgtaagctatctgtgcaggatatttgcactatttccacatggaatcaatctttaacaacctctgagcctt

SEQ ID NO: 174330 - DNA, 3060 bp, Homo sapiens
  Payload ID: 14212
  Gene Symbol: RASA1
  Gene Name: RAS p21 protein activator (GTPase activating protein) 1
  Uniprot ID: P20936
  ENST ID: ENST00000512763
  CDS Start-End: 202-2844
gaggaggaagaggtggccataccgttgaccgctcctccaactaaccagtaagttaagactgctgttcaggaatttgggaagctggctccagaaaagaagtggaaatgaaggggcatactacctggcgtcttcctacatttattgctcctctgggaaagtgtaaagtctttaagatggaaagcatgagaaaatgtgtatctaatgagaaccggatatagttctgtcccttccaagttgaggtggtatcacggaaaacttgacagaacgatagcagaagaacgcctcaggcaggcagggaagtctggcagttatcttataagagagagtgatcggaggccagggtcctttgtactttcatttcttagccagatgaatgttgtcaaccattttaggattattgctatgtgtggagattactacattggtggaagacgtttttcttcactgtcagacctaataggttattacagtcatgtttcttgtttgcttaaaggagaaaaattactttacccagttgcaccaccagagccagtagaagatagaaggcgtgtacgagctattctaccttacacaaaagtaccagacactgatgaaataagtttcttaaaaggagatatgttcattgttcataatgaattagaagatggatggatgtgggttacaaatttaagaacagatgaacaaggccttattgttgaagacctagtagaagaggtgggccgggaagaagatccacatgaaggaaaaatatggttccatgggaagatttccaaacaggaagcttataatttactaatgacagttggtcaagtctgcagttttcttgtgaggccctcagataatactcctggcgattattcactttatttccggaccaatgaaaatattcagcgatttaaaatatgtccaacgccaaacaatcagtttatgatgggaggccggtattataacagcattggggacatcatagatcactatcgaaaagaacagattgttgaaggatattatcttaaggaacctgtaccaatgcaggatcaagaacaagtactcaatgacacagtggatggcaaggaaatctataataccatccgtcgtaaaacaaaggatgccttttataaaaacattgttaagaaaggttatcttctgaaaaagggcaaaggaaaacgttggaaaaatttatattttatcttagagggtagtgatgcccaacttatttattttgaaagcgaaaaacgagctaccaaaccaaaaggattaatagatctcagtgtatgttctgtctatgtcgttcatgatagtctctttggcaggccaaactgttttcagatagtagttcagcactttagtgaagaacattacatcttttactttgcaggagaaactccagaacaagcagaggattggatgaaaggtctgcaggcattttgcaatttacggaaaagtagtccagggacatccaataaacgccttcgtcaggtcagcagccttgttttacatattgaagaagcccataaactcccagtaaaacattttactaatccatattgtaacatctacctgaatagtgtccaagtagcaaaaactcatgcaagggaagggcaaaacccagtatggtcagaagagtttgtctttgatgatcttcctcctgacatcaatagatttgaaataactcttagtaataaaacaaagaaaagcaaagatcctgatatcttatttatgcgctgccagttgagccgattacagaaagggcatgccacagatgaatggtttctgctcagctcccatataccattaaaaggtattgaaccagggtccctgcgtgttcgagcacgatactctatggaaaaaatcatgccagaagaagagtacagtgaatttaaagagcttatactgcaaaaggaacttcatgtagtctatgctttatcacatgtatgtggacaagaccgaacactactggccagcatcctactgaggatttttcttcacgaaaagcttgaatcgttgttgttatgcacactaaatgacagagaaataagcatggaagatgaagccactaccctatttcgagccacaacacttgcaagcaccttgatggagcagtatatgaaagccactgctacacagtttgttcatcatgctttgaaagactctattttaaagataatggaaagcaagcagtcttgtgagttaagtccatcaaagttagaaaaaaatgaagatgtgaacactaatttaacacacctattgaacatactttcagagcttgtggagaaaatattcatggcttcagaaatacttccaccgacattgagatatatttatgggtgtttacagaaatctgttcagcataagtggcctacaaataccaccatgagaacaagagttgttagtggttttgtttttcttcgactcatctgtcctgccatcctgaatccacggatgttcaatatcatctcagattctccatctcctattgctgcaagaacactgatattagtggctaaatctgtgcagaacttagcaaatcttgtggaatttggagctaaggagccctacatggaaggtgtcaatccattcatcaaaagcaacaaacatcgtatgatcatgtttttagatgaacttgggaatgtacctgaacttccggacactacagagcattctagaacggacctgtcccgtgatttagcagcattgcatgagatttgcgtggctcattcagatgaacttcgaacgctcagtaatgagcgtggtgcacagcagcacgtattgaaaaagcttctggctataacagaactgcttcaacaaaaacaaaaccagtatacaaaaaccaatgatgtcaggtagcagccttcgccccagtgttctgcatggattcagcatgtccaacatggtaattcacttcagtttaatgtctcctttgctcttgccaaaaaatagcacacttttccacattccagtgatgtgtgagctatgcaaacaaaatccaagattctgctggtgaataactatgccagcaaccttgtaagctatctgtgcaggatatttgcactatttccacat

SEQ ID NO: 174331 - DNA, 4979 bp, Homo sapiens
  Payload ID: 14212
  Gene Symbol: RASA1
  Gene Name: RAS p21 protein activator (GTPase activating protein) 1
  Uniprot ID: P20936
  ENST ID: ENST00000515800
  CDS Start-End: 565-2184
ctgagagctccaggtagtgagcagttcagtcgatttcctcgttaccccgcccccctttctcttgcccccccacccctctcatctgcctggtggaggatgaagcggctgcagtggccccagcctcagcagcggcaccggcggtggctgcggtgtgggtggccggaactggggtggtgaagaagcggtggtggcggctgaaggagcggtagcagcctcagcctctttccctgtgcttcctttcctctttagtgcagcgaggaagttttcgcttctgtacatgtgtttgtgtgcgtgagtgtgggtgtgtgcggtgaggtttgggtggcgtttgtgcaggcgttgggttttttgcccacttggcttcccgtaacccaggcagctggggagcctgggctgtggccctaggagggggcgcggcggcgggctctctccttttgttgttgtttcctcagcctggggagctgaaggggagacgcgtctgggtggggctgctcggagcccgggcctggtggcccctggggctcccgggcgggcagggtagggcagagtagagcgggcttcaacatgatggcggccgaggccggcagtgaggagggcggcccggtaacagccggagctggaggaggcggcgcggcagcgggctccagtgcctatcccgcagtgtgtcgggtgaagatacccgcggccctgcctgtggcagccgccccctatcctgggctggtggagaccggagtggctggaactctgggtggcggagccgctttggggtcagagttcctaggagccgggtctgtggcaggggcactggggggagctggactgacagggggaggtactgctgctggcgtagctggtgctgctgctggcgtggccggtgctgctgttgctggacctagtggagacatggctctcaccaaactgcccacttcgttgcttgctgagactctcgggccaggcggcggttttccccctctgccccctcccccttacctgccccctttgggggcgggcctcgggacagtggacgaaggtgactctctggatggaccagaatacgaggaggaagaggtggccataccgttgaccgctcctccaactaaccagtggtatcacggaaaacttgacagaacgatagcagaagaacgcctcaggcaggcagggaagtctggcagttatcttataagagagagtgatcggaggccagggtcctttgtactttcatttcttagccagatgaatgttgtcaaccattttaggattattgctatgtgtggagattactacattggtggaagacgtttttcttcactgtcagacctaataggttattacagtcatgtttcttgtttgcttaaaggagaaaaattactttacccagttgcaccaccagagccagtagaagatagaaggcgtgtacgagctattctaccttacacaaaagtaccagacactgatgaaataagtttcttaaaaggagatatgttcattgttcataatgaattagaagatggatggatgtgggttacaaatttaagaacagatgaacaaggccttattgttgaagacctagtagaagaggtgggccgggaagaagatccacatgaaggaaaaatatggttccatgggaagatttccaaacaggaagcttataatttactaatgacagttggtcaagtctgcagttttcttgtgaggccctcagataatactcctggcgattattcactttatttccggaccaatgaaaatattcagcgatttaaaatatgtccaacgccaaacaatcagtttatgatgggaggccggtattataacagcattggggacatcatagatcactatcgaaaagaacagattgttgaaggatattatcttaaggaacctgtaccaatgcaggatcaagaacaagtactcaatgacacagtggatggcaaggaaatctataataccatccgtcgtaaaacaaaggatgccttttataaaaacattgttaagaaaggttatcttctgaaaaagggcaaaggaaaacgttggaaaaatttatattttatcttagagggtagtgatgcccaacttatttattttgaaagcgaaaaacgagctaccaaaccaaaaggattaatagatctcagtgtatgttctgtctatgtcgttcatgatagtctctttggcagatgcagttagattggaagtctgttggcacaatcaaaagaaaggtccacattacacttgatggtaaaagagaaagaattgccagagtaaaaagaaggatcagatccttgaagcacaagttgaagattgtgaatgattcctattctggccaaactgttttcagatagtagttcagcactttagtgaagaacattacatcttttactttgcaggagaaactccagaacaagcagaggattggatgaaaggtctgcaggcattttgcaatttacggaaaagtagtccagggacatccaataaacgccttcgtcaggtcagcagccttgttttacatattgaagaagcccataaactcccagtaaaacattttactaatccatattgtaacatctacctgaatagtgtccaagtagcaaaaactcatgcaagggaagggcaaaacccagtatggtcagaagagtttgtctttgatgatcttcctcctgacatcaatagatttgaaataactcttagtaataaaacaaagaaaagcaaagatcctgatatcttatttatgcgctgccagttgagccgattacagaaagggcatgccacagatgaatggtttctgctcagctcccatataccattaaaaggtattgaaccagggtccctgcgtgttcgagcacgatactctatggaaaaaatcatgccagaagaagagtacagtgaatttaaagagcttatactgcaaaaggaacttcatgtagtctatgctttatcacatgtatgtggacaagaccgaacactactggccagcatcctactgaggatttttcttcacgaaaagcttgaatcgttgttgttatgcacactaaatgacagagaaataagcatggaagatgaagccactaccctatttcgagccacaacacttgcaagcaccttgatggagcagtatatgaaagccactgctacacagtttgttcatcatgctttgaaagactctattttaaagataatggaaagcaagcagtcttgtgagttaagtccatcaaagttagaaaaaaatgaagatgtgaacactaatttaacacacctattgaacatactttcagagcttgtggagaaaatattcatggcttcagaaatacttccaccgacattgagatatatttatgggtgtttacagaaatctgttcagcataagtggcctacaaataccaccatgagaacaagagttgttagtggttttgtttttcttcgactcatctgtcctgccatcctgaatccacggatgttcaatatcatctcagattctccatctcctattgctgcaagaacactgatattagtggctaaatctgtgcagaacttagcaaatcttgtggaatttggagctaaggagccctacatggaaggtgtcaatccattcatcaaaagcaacaaacatcgtatgatcatgtttttagatgaacttgggcctgggcaacaagagcgaaactctgtctcaaaaaaaacaaaaaaaaagaagatttgtatttctaaatgcaattttacgattcccttaaagaatgtacctgaacttccggacactacagagcattctagaacggacctgtcccgtgatttagcagcattgcatgagatttgcgtggctcattcagatgaacttcgaacgctcagtaatgagcgtggtgcacagcagcacgtattgaaaaagcttctggctataacagaactgcttcaacaaaaacaaaaccagtatacaaaaaccaatgatgtcaggtagcagccttcgccccagtgttctgcatggattcagcatgtccaacatggtaattcacttcagtttaatgtctcctttgctcttgccaaaaaatagcacacttttccacattccagtgatgtgtgagctatgcaaacaaaatccaagattctgctggtgaataactatgccagcaaccttgtaagctatctgtgcaggatatttgcactatttccacatggaatcaatctttaacaacctctgagccttggtgtacagaccacctttcacaaaacgaaatgctatgactgtatcttgatatctcgaactttcaaaatatattttcagtacacccagttgccaaagttttgctgtctcttagagaaagaactatgaaatcaactgacaagaaacacattcttattgacaattgtgtataactggattgcagactgttcttactgtaactacttcctgattaggaatatgaccatttgactgttcaatgattatttgtatttacagtttccagagtttgtcattataataggaacaatctttgctgtatacttttaaaaaatactctgctatttctcttgctggaactgttgaaagaaaatatatagaatgatctattgctcatcagctttattttttaaacatacgacttattttgttgaaattgtcaaagactgtatttagatctcataatgctttgttaaatgtttacaagtaaatagtttgaattcagtaaatattattggttgttgtattgatcaatgcatgttacccattcaaccattttatagactaccaatttcttttatgttaactagaatgcttttgttaaaagttatttgttcattatttgtgctacccctttgattatgcagacaacctcatcagctgcctaacttatccatctttgaacttctgactacttgttgtatctgctggatatttagttcaactgtatagttttatttacttctgtatgtgtatttttgtgaagtattcacaaaggttaagttaaaataaaaccaagggatatcttgcataa

SEQ ID NO: 174332 - DNA, 5614 bp, Homo sapiens
  Payload ID: 14213
  Gene Symbol: RASA2
  Gene Name: RAS p21 protein activator 2
  Uniprot ID: Q15283
  ENST ID: ENST00000286364
  CDS Start-End: 36-2585
aggcggcagggctgcggcacgggccgggcggcaccatggcggcggcggcgcctgctgctgcggcggcttcttccgaggcgccagcggcgagtgcgactgcagagcccgaggccggggaccaggacagtcgcgaggttcgagtgttgcagagcctgcggggcaagatctgtgaagcaaaaaatttattgccatatcttggaccccacaaaatgagagattgtttctgtaccataaatttggaccaggaagaagtttatcgtacccaagttgtggaaaaatctttaagcccatttttcagtgaagaattttactttgagattccaagaactttccagtatttgtctttctatgtttatgataagaatgttttacaaagagatctccgtataggaaaagtagccatcaaaaaagaagacttgtgtaatcacagtggcaaagaaacttggttttcattacagcctgttgactccaattcagaggttcagggtaaagttcaccttgaattaaaactgaatgaactgataacggagaatggaactgtatgccagcagcttgttgtacacatcaaggcatgccatgggttgcctctcataaatggccaaagctgtgacccttatgcaacagtttctctagtgggcccttctaggaatgaccaaaagaagacaaaagtaaagaagaaaacaagcaatccgcagtttaatgaaatcttttattttgaggtaaccagatccagtagttacaccagaaagtcccagttccaggtagaagaggaggacattgaaaagctagaaatcaggatcgacttgtggaacaatggaaacctagtccaagatgttttcctaggtgagattaaggttcctgtgaacgtattaagaactgattcctctcatcaagcctggtacttgctacagccaagagacaatggaaacaagtcatccaaaactgatgacctggggtctcttcgattaaatatatgttatacagaagactacgtgcttccttcagagtactatggtcctttgaaaactttgctgctaaaatcaccagatgttcaaccaatatctgcctcagctgcttacattttgagtgaaatatgtcgagataaaaatgatgctgttttgccccttgtacgactgctgctgcaccatgataaacttgttccttttgccactgctgtggctgaattagacttgaaggatacacaagatgcaaacacaatttttagaggaaattccctggctacccgatgtctggatgagatgatgaaaatagtgggagggcactacctgaaagtaacattaaaacctattcttgatgagatatgtgactcctcaaaatcctgtgaaatcgatcctattaaattgaaagagggagataatgtagaaaataataaggagaatctgcgctactatgtagacaagttattcaatacaattgtaaaatcaagtatgagctgccccactgtaatgtgtgatatcttttattctctaaggcagatggctactcagagatttcctaatgaccctcatgttcagtattctgcagtgagcagctttgtatttcttcgtttctttgctgtagccgtagtatcacctcatacttttcatttgcgacctcatcatccagatgcacagacaattagaacattaactctcatctcaaaaactatacaaactttgggaagctgggggagtctgtccaaaagcaagtcaagtttcaaagagacattcatgtgtgaatttttcaaaatgtttcaagaagaaggatatattatagcagttaaaaagttcttggatgaaatttcatctactgaaactaaagagtccagtggtacgagtgagcctgtgcacctgaaagaaggtgagatgtataaaagagctcaaggaagaactcggattggaaaaaagaattttaagaaacgatggttctgcttaacaagcagagagctcacctaccacaaacagccaggcaaagatgcaatctacacaatcccagtaaaaaacattcttgctgtggaaaaactggaagagagctctttcaacaagaaaaatatgttccaagtaatacatacggagaaaccactctatgtccaggcaaataactgtgtagaagctaatgaatggatagacgtactctgcagggtgagccgatgcaatcaaaacaggctcagtttttatcatccctctgtgtatctgaacggaaattggctctgctgtcaggagactggtgaaaacactctcggctgcaagccatgtactgcaggtgtccctgcagacatccaaatagatattgatgaagacagagaaacagaaagaatttattccctttttaccctcagtttacttaagctgcagaagatggaagaggcttgtggaactattgcagtctatcaaggaccacagaaagagcctgatgattattctaactttgtaatcgaggattctgtaacaacctttaagacaattcagcaaataaaaagcataattgagaagctggatgaacctcatgaaaaatataggaagaaaagatccagtagtgcaaaatatgggagcaaggaaaatccaattgttgggaaagcatcttagagtttaacagattggttcagaagaactggaaaatattatttttcttggagcttttcaattcatcatgtattttgttcatggtatttaagaatgagcatccgcttcaatgtcatctgcctccacattgtatttaatatttaataattgaaattaattgtttgggaatcctggtattgatgtattactagagaatttaaagcccaagattcccttcatacctgtgtgaccaaatccatgtttctgcaacttctttttaatcgaaagaatcttcctagaaaagctttgtaacaaagggagaactcctccgtagcaagaaaccatctcttcttgtaacactctgttctgtggacttgttttcactaccatcagtgcctgctctatactgccaacattgtgttttactagaaaattccaattcatgacagttcagagcttttcatttagttcatgtagaccctcccactttaaaaaagaaaaaaaataagaagtgtttttcctttggtccatcagtcattacaggttccattcaagacagtgatagaaactttagaaaactgccagagcatacttgaaagttggtagatccttttgcctaaagatgtaaacaaaactcaagacagaaggaatcagggaatatgtgctattgtgtgcatcttgtttacatttgggatcagtgatggcaaaagaagtaatgagaccactgaaattgttttcattgttttaaataccaggtactcattttcttgatttgaaagtttaacatgacttctaaggacatctcttcaaaaagaaagtaaacagggaatgaaggtggtgggaaaatcacttcacttcacccactatttcatgttgtaataagggccaccataaggatgccctcctcatagtgttcggttctgatcttcctcgagaacagtcacttggcgcactttaataatctggactgctccagatttgactttagatactccatggtatctagtctttatgatcagttgaatgatcagtgtttaagtctaaaaataatgctttcctgaaaatgtttatatttcattgctgtttccttattgcctgctagccaaatggaatttgggcaagcaactctttgaagacttttttaccctagaaatttacttttgtcctaaaaaccctaactgtaaataagcagtcgaagcaagttgccaccttgaagttgagggatacactttgcttcatcagtattaaaaaccatggtactcttattttgtcttttttaattcaaaacattttctaaatgtggtactttgaaccttggagtatttacatgtttctgttcaaaactgtgacttattaatgtaagtctgctagtagtactttttttgtctgagcataagctatatttcaagatatactttgccaattttgttattggtgggtaatcatttttaaattatattgttattaggtaattatttttaaagactactggcatacaatcaaagttgttccataaaagaatataactgagcaatgtatttctctaaatgacttgtaaaaatcaatgaattatgtttaagtctgcattatggtaggttattactcccagctcattttaaagacaagtttgaaagagtcctttaaattttataagcttgtagattccataaactacactgatttatacatttgaaagaatttagccatttaataaatttcttattctcaaattgcatttagattaaaattccttttaagagtgtctgaaatgtctgcctgcgaagaacatgtaaacattgccagataccagtcattattctttagtggctttttagtcctctgcttttttttttaaggcaaaagaaatatgcatctagcatttctaataccaaatccccaattgtgattgttttaaagatcatggtatgatcacagggaccaaggctgtgtgcatatataactctggatttgaaaggaggagagttcagccatctagttcttttcttcacatgacacttttaaacagccagtttgactggaattaaccaacttggcacagcctaaaaaaggagtaatgtgaaattaaattatttttctttgaaagtcttttgaaataagagaccatgtaagtaggaccctaagacaaccaaggaatttgcttccagggccctcattcctctgctgttacttacaaatgttttaatttttactacctgatattctttctctaccttttccacatttgaaaatatacaaggcagctcacttcatcctaaaaacctaaaaactccaggaaggaaagaaaaggatgatatggggaaatttgccataaatgccggttctggttcttagtttagccatttccatcagttgaaattgtggtgtgatctgttgcttgtttcgttgttgttttgtttttgtgtagctttgttttttaatattcatttaataagatgatgggcaatagcaaacatttttactcccaggaatataatttatcaaattgaactattttatttgccaaagaaacttgtttttaatatcacgggtaatgggtaagtgtgaaaactaggcttttttttatgaaacaaaaaaaggtgacgaataatatggcttttgtttctgtttctgaagcctgatttcatttatgccaggttttgaaaaacagatctttttcttaagtgaaagcacctttaatttgctctaacggtacatcctgtaaagacagaattctgcatagccttttaggtgtttttacagtatgtgaaaaatacaagactcattctagagttaaattaccaatcttggttgatattatctgcttccatttttattaatttggaaattaatatgttgctagtaaatattggtttttacagtacccagtttgaaaatgtaagttatcaaaacttaatgtagtgaatttgtgtaaccatgttgtattgttgagaatgtatttttatttaaattttattttcttatcaagagtattataaaaattaacttttgtaactgtcgcttggaaataactcaaataaattacaagaagcctg

SEQ ID NO: 174333 - DNA, 2562 bp, Homo sapiens
  Payload ID: 14213
  Gene Symbol: RASA2
  Gene Name: RAS p21 protein activator 2
  ENST ID: ENST00000452898
  CDS Start-End: 1-2562
atggcggcggcggcgcctgctgctgcggcggcttcttccgaggcgccagcggcgagtgcgactgcagagcccgaggccggggaccaggacagtcgcgaggttcgagtgttgcagagcctgcggggcaagatctgtgaagcaaaaaatttattgccatatcttggaccccacaaaatgagagattgtttctgtaccataaatttggaccaggaagaagtttatcgtacccaagttgtggaaaaatctttaagcccatttttcagtgaagaattttactttgagattccaagaactttccagtatttgtctttctatgtttatgataagaatgttttacaaagagatctccgtataggaaaagtagccatcaaaaaagaagacttgtgtaatcacagtggcaaagaaacttggttttcattacagcctgttgactccaattcagaggttcagggtaaagttcaccttgaattaaaactgaatgaactgataacggagaatggaactgtatgccagcagcttgttgtacacatcaaggcatgccatgggttgcctctcataaatggccaaagctgtgacccttatgcaacagtttctctagtgggcccttctaggaatgaccaaaagaagacaaaagtaaagaagaaaacaagcaatccgcagtttaatgaaatcttttattttgaggtaaccagatccagtagttacaccagaaagtcccagttccaggtagaagaggaggacattgaaaagctagaaatcaggatcgacttgtggaacaatggaaacctagtccaagatgttttcctaggtgagattaaggttcctgtgaacgtattaagaactgattcctctcatcaagcctggtacttgctacagccaagagacaatggaaacaagtcatccaaaactgatgacctggggtctcttcgattaaatatatgttatacagaagactacgtgcttccttcagagtactatggtcctttgaaaactttgctgctaaaatcaccagatgttcaaccaatatctgcctcagctgcttacattttgagtgaaatatgtcgagataaaaatgatgctgttttgccccttgtacgactgctgctgcaccatgataaacttgttccttttgccactgctgtggctgaattagacttgaaggatacacaagatgcaaacacaatttttagaggaaattccctggctacccgatgtctggatgagatgatgaaaatagtgggagggcactacctgaaagtaacattaaaacctattcttgatgagatatgtgactcctcaaaatcctgtgaaatcgatcctattaaattgaaagagggagataatgtagaaaataataaggagaatctgcgctactatgtagacaagttattcaatacaattgtaaaatcaagtatgagctgccccactgtaatgtgtgatatcttttattctctaaggcagatggctactcagagatttcctaatgaccctcatgttcagtattctgcagtgagcagctttgtatttcttcgtttctttgctgtagccgtagtatcacctcatacttttcatttgcgacctcatcatccagatgcacagacaattagaacattaactctcatctcaaaaactatacaaactttgggaagctgggggagtctgtccaaaagcaagtcaagtttcaaagagacattcatgtgtgaatttttcaaaatgtttcaagaagaaggatatattatagcagttaaaaagttcttggatgaaatttcatctactgaaactaaagagtccagtggtacgagtgagcctgtgcacctgaaagaaggtgagatgtataaaagagctcaaggaagaactcggattggaaaaaagaattttaagaaacgatggttctgcttaacaagcagagagctcacctaccacaaacagccagtttttattttaggcaaagatgcaatctacacaatcccagtaaaaaacattcttgctgtggaaaaactggaagagagctctttcaacaagaaaaatatgttccaagtaatacatacggagaaaccactctatgtccaggcaaataactgtgtagaagctaatgaatggatagacgtactctgcagggtgagccgatgcaatcaaaacaggctcagtttttatcatccctctgtgtatctgaacggaaattggctctgctgtcaggagactggtgaaaacactctcggctgcaagccatgtactgcaggtgtccctgcagacatccaaatagatattgatgaagacagagaaacagaaagaatttattccctttttaccctcagtttacttaagctgcagaagatggaagaggcttgtggaactattgcagtctatcaaggaccacagaaagagcctgatgattattctaactttgtaatcgaggattctgtaacaacctttaagacaattcagcaaataaaaagcataattgagaagctggatgaacctcatgaaaaatataggaagaaaagatccagtagtgcaaaatatgggagcaaggaaaatccaattgttgggaaagcatcttag

SEQ ID NO: 174334 - DNA, 494 bp, Homo sapiens
  Payload ID: 14213
  Gene Symbol: RASA2
  Gene Name: RAS p21 protein activator 2
  ENST ID: ENST00000515549
  CDS Start-End: 38-181
gcaggcggcagggctgcggcacgggccgggcggcaccatggcggcggcggcgcctgctgctgcggcggcttcttccgaggcgccagcggcgagtgcgactgcagagcccgaggccggggaccaggacagtcgcgaggtgaagcaaaaaatttattgccatatcttggaccccacaaaatgagagattgtttctgtaccataaatttggaccaggaagaagtttatcgtacccaagttgtggaaaaatctttaagcccatttttcagtgaagaattttactttgagattccaagaactttccagtatttgtctttctatgtttatgataagaatgttttacaaagagatctccgtataggaaaagtagccatcaaaaaagaagacttgtgtaatcacagtggcaaagaaacttggttttcattacagcctgttgactccaattcagaggttcagggtaaagttcaccttgaattaaaactgaatgaactgataac

SEQ ID NO: 174335 - DNA, 4191 bp, Homo sapiens
  Payload ID: 14214
  Gene Symbol: RASA3
  Gene Name: RAS p21 protein activator 3
  Uniprot ID: Q14644
  ENST ID: ENST00000334062
  CDS Start-End: 123-2627
tgcaggcgggcggaccctcggccgcgctcggggctccggcgccgccgctcctcctgctcggcctgagctgcccgggctcggcgcgcgcttggggcgaggctcggcgggcgcggacgcgcagcatggcggtggaggacgaggggctccgggtcttccagagcgtgaagatcaagatcggtgaagccaaaaaccttccctcttacccggggccgagcaagatgagggattgctactgcacggtgaacctggaccaggaggaggttttcaggaccaaaattgtggaaaagtcactctgcccgttttacggagaagacttttactgtgaaattcctcggagctttcgtcacctgtccttctacattttcgatagagacgttttccggagggattccatcatagggaaggtggccatccagaaggaggacttgcagaagtaccacaacagggacacctggttccagctgcagcacgtggacgctgactcggaagtgcagggcaaagtgcacctggagctgcggctgagcgaggtcatcacagacactggggtcgtctgccacaagctcgccacacgcatcgtcgagtgccagggcctccccatcgtgaatgggcaatgtgacccctacgccaccgtgacgctggcaggacccttcagatcagaagcaaagaagacgaaagtgaagaggaagaccaacaatccccagttcgatgaagtgttttattttgaggtgacccggccctgtagctacagcaagaagtcccactttgactttgaggaggaagacgtggacaagctcgaaatcagagttgacctctggaatgccagtaacctgaagtttggagatgaattcctgggagaactaaggatcccgttgaaagtcctgcggcagtccagctcctacgaggcgtggtacttcctccagccccgggacaatggtagcaagagcctaaagccagacgacctgggctccctgcggctgaacgtggtatacacggaagaccacgtgttttcttctgactattacagccctctgcgggacctgctgttgaagtctgcggatgtggagcccgtgtcagcgtctgcggcccacatcctgggcgaggtttgccgggagaagcaggaggcggccgtcccgctggtgcggctcttcctacactatggcagggtggtgccattcatcagtgccatcgccagcgcggaggtgaagcggacccaggaccccaacaccatcttccgaggaaactcactggcgtccaagtgcatcgacgagaccatgaagctggcggggatgcattacctgcatgtcaccctgaagcccgccatcgaggagatatgccagagccacaaaccctgtgaaatcgaccctgtgaagttgaaagacggagaaaaccttgaaaacaacatggagaacctacggcagtatgtggaccgcgtcttccacgccatcactgagtctggggtgagctgcccgaccgtcatgtgtgacatcttcttctccctccgggaggcggcggccaagcgcttccaggatgacccggacgtcaggtacactgcagtgagcagcttcatcttcctgaggttctttgcgcccgccattctctcccccaacctcttccagctcacgccgcaccacacggacccccagacgtccaggacgctgacattgatctccaagaccgttcagaccctcggcagcctgtccaagtccaaatctgcgagttttaaggagtcctacatggctacattttatgaattcttcaatgagcagaaatatgctgatgcggtgaagaacttcttggatctgatttcgtcctcggggagaagagaccccaagagtgttgagcagcccatcgtgcttaaagaagggttcatgatcaagagggcccaaggacggaagcgctttgggatgaagaattttaagaagagatggtttcgcttgaccaaccatgaatttacctaccacaaaagcaaaggggaccagcctctctacagcattcccatcgagaacatcctggcagtggagaagctggaggaggagtctttcaaaatgaaaaacatgttccaggtcatccagccagagcgtgcgctgtacatccaggccaacaactgcgtggaggccaaggactggatcgacattctcaccaaagtgagccagtgcaaccagaagcgcctcaccgtctaccacccgtccgcctacctgagcggccactggctgtgctgtagggcgccatccgactcggctccgggctgctcgccctgcactggcggcctcccagccaacatccagctggacattgatggggaccgtgagacggagcgtatctactccctcttcaacttgtacatgagcaagctggagaagatgcaggaggcctgtgggagcaaatctgtgtatgacggcccggagcaggaggagtattcgacgttcgtcattgacgacccccaggagacctacaagacgctaaagcaagtcatcgctggggttggggctttggagcaggagcacgcccagtataagagggacaagttcaagaagacgaaatatggaagccaggagcaccccatcggagacaagagcttccagaactacatccggcagcagtccgagacctccactcattccatttaaagtctgcgggacgcgcccagtggcgccagcaagctgcccatgcaaagccgcagcctttgggagggagaagagaaggaagagcgcagagccggcaaagtgagatgcacgccgtcccggcccatagacaagtggcgctggggtttccctctcccagaaccgctgccaccaccgccacgccctccgcagaaagcccacctggccctgtggaacgtgtcgtcatttgattctgtgctttttgctccttgtttgtggggatctggggatcagctgaaggatcaggaagtgtgggctgtgccctagccacaccacagccagcctcagggagccacggcccgtctagtcgactgtgacatgcacctccggccgtgtgtgcgtcagtctcgtgcacgtctgtcttgcgtgcacggtgcgtgtgacgctgggctctgtggctctgtgcccgggaggcctgctggccccgcctcggctttcggcttcatcacattgggaggttcagagcattactctcccactgtgcctgccatccaggcagccatgggaggcggcctccctgttccactttcgaggttcgtttgattcctggctgaggggtcagttttatggctgggaggtgcagaattacacagaagtcccagtctgaggatgtccttggtgcttgggggatacgggttctgtccacagagtcccttggagggaaaggtgtgggctccagcttctccaggcgtctgcggagcccacagttgaagcccacatcgttttgctgttgaatggggtttaaaatcagaattaacatttgccaccccccgtggaagtttgaagattttaaaaatagaaatgtacatttttcaagctgtttttctttatgtttttgaaggaccatttttaattagctctttgatacaaagtaactcagaacgtcaaaacctatacccactaaagggaaggctgccgggaaggcaaatggaacaggaatggagcctgtctcaggaaggccagctgcaggtcctccagaaaatcaaagaagggaagaaactctgagtttgaggtacaggggcttcggggtgcagacgtccctccagggcccatggtcagtattgcacctgtgttatgaacccccagatgctgtgcagggcaggggcgggggctgctgttttattggggaggggagcatcctaaaaatggggtccaggcagacccctccagacctcacactgccgaggaggcctttcccaaagggcgtcctcccgggatgcagacggcaggtgtgtgggaagcgccgtttaaatacacagcacgacgtatccttgtaccgacttctcccggttcttgtttgaaaatactgtagttcaggctcttgatctagatggcagataggaactttcttgtcacaaaaatactggaggaaaatgttgtaaaaatagacttttggacacacagctgttggggctgcactgagctgcaatttttaacatggatttataacttaatgtttctgtttataaaatactaatgatttgcaatgtattttactggccaattaaaacagatgttttattctttctga

SEQ ID NO: 174336 - DNA, 4191 bp, Homo sapiens; identical to SEQ ID NO: 174335
  Payload ID: 14214
  Gene Symbol: RASA3
  Gene Name: RAS p21 protein activator 3
  ENST ID: ENST00000630618
  CDS Start-End: 123-2627

SEQ ID NO: 174337 - DNA, 5605 bp, Homo sapiens
  Payload ID: 14215
  Gene Symbol: RASA4
  Gene Name: RAS p21 protein activator 4
  Uniprot ID: O43374
  ENST ID: ENST00000262940
  CDS Start-End: 69-2480
cagtccagcgcccgccgcccgccaccccggaccccggtgtctggcttcccccgagccgggaccccgcgatggccaagcgcagctcgctgtacatccgcatcgtggaggggaagaaccttcccgccaaggacatcactggcagcagcgacccctactgcatcgtgaaggtggacaatgagcccatcatcaggacagccacagtgtggaagaccctgtgccccttctggggtgaggagtaccaagtgcacctgccgcccaccttccacgctgtggctttctatgtcatggatgaggatgccctcagccgggacgacgttatcggaaaggtctgccttacaagggacaccatagcctctcaccctaagggtttcagcgggtgggcccacctgacggaggtcgaccccgatgaggaggtgcagggcgagatccacctgcggctggaagtgtggccaggggcccgggcctgccggctacgctgctctgtgctggaggccagggatctggccccaaaggaccgcaatggcacatctgaccccttcgtccgagtgcgctacaagggccggacacgggagacctcgatcgtgaagaagtcatgctacccacgctggaatgagacgtttgaatttgagctgcaggagggggccatggaggcgctgtgcgtggaggcctgggactgggaccttgtcagccgaaacgacttcctgggcaaagtggtgattgatgtccagagactgcgggtggtgcagcaggaggagggctggttccggctgcagcccgaccagtccaagagccggcggcatgacgagggcaacctgggctccttgcagctggaggtgcggctgcgggacgagacggtgctgccctccagctactaccagccactggtgcacctgctgtgccacgaggtcaagctgggcatgcagggcccagggcagctgatcccactcatcgaggagacaaccagcaccgagtgtcgccaggacgtggccacgaacctgctcaagctcttcctggggcaggggctggccaaggacttcctggacctgctcttccagctggagctgagtcgcaccagtgagaccaacaccctgttccggagcaactctctggcctcaaagtccatggagtcttttctgaaggtggccgggatgcagtacctgcacggcgtcctgggccccatcatcaacaaggtgtttgaggagaagaagtacgtggagctggaccccagcaaagtggaagttaaggatgtagggtgctccgggctgcaccgcccgcagaccgaggccgaggtgctggagcagagcgcgcagacgctgcgcgcccacctgggggccctgctgagcgcgctcagccgctcggttcgcgcgtgccccgccgtggtgcgcgccaccttccgccagctcttccggcgcgtgcgcgagcgcttccccggcgcccagcacgagaatgtaccgttcatcgccgtcaccagcttcctgtgcctgcgcttcttctctcccgccatcatgtcgcccaagctcttccacctgcgggagcgccacgcggacgcccgcaccagccgcaccctgctcctgttggccaaggcagtccagaacgtgggcaacatggacacgccggcttccagggccaaggaggcttggatggagccgctgcagcccaccgtgcgccagggcgtggcgcagctgaaggacttcatcaccaagctcgtggacatcgaggagaaggacgagctggacctgcagcggacgctgagtttgcaggcgccacctgtgaaggaggggccactcttcatccacaggaccaagggcaagggccccctcatgtcctcctccttcaagaagctctacttctccctcactaccgaggccctcagcttcgcgaagacgcccagctccaagaaaagcgccctcatcaagttagccaacatccgggcagcggaaaaggttgaggaaaagagctttggcggctcgcacgtcatgcaggtcatctacacggacgacgccggcaggccccagactgcctacctgcagtgcaagtgtgtgaatgagcttaaccagtggctgtctgcgctgcggaaggtgagcatcaacaacaccggactgctgggctcctaccaccctggcgtcttccgtggggacaagtggagctgctgccaccaaaaagagaagacaggtcagggctgcgataagacccggtcacgggtgaccctgcaggagtggaatgaccctcttgaccatgaccttgaggcccagctcatctaccggcacctgctgggcgtggaggccatgctgtgggagaggcaccgggagctgagcgggggcgcagaggcaggcacggtgcccacgagccctggcaaagtccccgaggactcattggcccggctgctccgggtgctgcaggacctccgcgaggcccatagctccagcccggccggctccccaccctcagagcccaactgcctcctggagctgcagacgtgaggcccgccctacgctccccttgctgagtcccctgccaagcgctcggagcccccccaggacactctgcaccccctcaccccggtcctcctcattagggtgcagggcctaggtctcttccaggtgggggaggggggagagtcaggaataaggggatccccagaagtgcagagctgagcaggcttgggcctgtcatggctggccggaagtgtccccagctccctacagacgctgtagccatcactgcctctccagggaccctcctctcctgcccaggacagacccagccagaaccactgctaggatgggccgcacccaggggtctggcctccagggacctagagaatgggagggagaacggggccccaggagacccggccgccaccccacccgctacccttgggtgccacagggctgtgctgttgccaacagtaaacctgctcttactgtccaggctctggggtcttgtgatgagggtctggggagaaagtgggcccggggggaccccggaggctgtcggtggatgtgccgatgatggggctgacagtatgggctctgggcatccctgttcccccctctttcttccccccactcttctggggtcgggggttcctttcccttcccagttgctgtccctgggtcccctctttcatgtcccacaggccacagagcccagtgtgtccaaccagctgttctctcctcaaagcagcccccaagcaagtcccttctctagggtgtccctgaggacagcacagaggcgggactcagagaccccattcctcttcacgcagcccttaccccaagccctctagctgtgtggctggcagtgttggccacgtaggggctcccatccccccaccattgtgtcacatgggctgccaggctcagctcccagctgcgtccacagtgacctggatcagggtggggacaaggactggaccctccttctccagaaggccttcagctcttgccttgccatgcagtcacctccttccccctctgaccccagatcccaaaggtgcaccgttgccccagcccctttctggccccatggggtttctctgatgccttcatcatagaggcccggggctggtccgatggttggcaaaacttgactccggcccagtccccactcttggggacttagaacccctgctgtcctgggatctggcctgcctttctttggtcagtccctgtggtcccccaccagctccccctcccatagggctgcccaccaagccctgcccccagcccaagaggagcccccactgcctgcggggcagtgatgtctggccaccggctcacaccaatgacttggtcctggggtggcagaagcagcaggtgacaggagcagggcccctgtccctctcttctggccctgtggtacccaggccacacgttgtgcccgctcttggggctgaccggctgtagggaccaccagccgctgctactgtgggccgccccggggcagggtgggcagggcttttgtgggttatgaggacacagaagtccctgaggcccccagacctggctcagccaacctccttcctcccccggttgccccccactctaaagcctcctccctcccagcgtccactggctccaggctcctcacaacagcagctcatagacacggggcgtctccaggtggtcccagccctccagatgtttctagctctccaggtgggcgctgttttcacgtctgcctgcatccattcattccttcattcctcacctttatcctgttatctctatttttttaagctaccaggaaggaaagggaagaagagatcacgaaactgggacccccagaaaggaggagtgggctttgaacttagacatctacctcagagctcaaataggttgtttaaaatcacattcaattttcagatgaaggggaactttatagttttttttttttttttttttttgagacagagtctcactgtgttgcccaggctggagtgcaaatggcttgatcttggttcactgcaacctctgcctcccaggttcaagcaattctcttgcctcagcctcccgagtagctgggactaaaggcgtgtgccaccatgcccagctaattcttgtatttttagtagagacggagtttctccatgttggccagactggtctcgaactcctgacctcaggtgatctgaccgccttggcctccgaaagtgctgagattacagttgcgagccactgtgcgtggccagaactttataataagagacttgaagctgggtgtgacggtgcacacctctagtcccagctactcgggaggccaagacagaaggatcaccttgaggccaggagtttaaggccagcctgggcaacatagcaaaacctagtccctaaaattaaaaaaaaaaaaaaaaaaaaaaggaaaataaaggagacttgaaatttttgaactaaatagtggtgatggctacacattgtgaatgtaattaacaccactgagttaaacacttaaaatggttaaaatggcaaattgtatgttatacctattttactacaataaaaagtataaaaaagagaagatatttaggtgacttacagcaaccaattgcaacaaaacaaaatgttaagaaatgatctttttatgaggcaattggaaatttgaacactgatcaactataggatgattggaattattaatttttaaaggtgtgataagatactgcacttggctgggcacagtggcacatgcctgtaatcccagctacttggcaggctgaggtgggagaatcgcttgagctcaggagttcgagaccagcctgggcaacgtggcgaaatccccgtctttacaaaaacaaacaaacaaacaaaaaagatattgcagttgtgttgtaagcgtccttatctttcagagctacatagtggaatgtttatggaatatttaggataaatgatataggcatttgggatttgctgcaaaatgacccagaggcaggggtcagggggagaggtagagatgagacaagaggtagaggggagaggtagaggtagccacgagctgataattacagacaagagatgcggagtatgtgggggctcattatcctgcatagtctatctttgtatatctttgaacttttcaagaataaaaaagcttaaaaagtata

SEQ ID NO: 174338 - DNA, 2787 bp, Homo sapiens
  Payload ID: 14215
  Gene Symbol: RASA4
  Gene Name: RAS p21 protein activator 4
  Uniprot ID: O43374
  ENST ID: ENST00000449970
  CDS Start-End: 68-2341
agtccagcgcccgccgcccgccaccccggaccccggtgtctggcttcccccgagccgggaccccgcgatggccaagcgcagctcgctgtacatccgcatcgtggaggggaagaaccttcccgccaaggacatcactggcagcagcgacccctactgcatcgtgaaggtggacaatgagcccatcatcaggacagccacagtgtggaagaccctgtgccccttctggggtgaggagtaccaagtgcacctgccgcccaccttccacgctgtggctttctatgtcatggatgaggatgccctcagccgggacgacgttatcggaaaggtctgccttacaagggacaccatagcctctcaccctaagggtttcagcgggtgggcccacctgacggaggtcgaccccgatgaggaggtgcagggcgagatccacctgcggctggaagtgtggccaggggcccgggcctgccggctacgctgctctgtgctggaggccagggatctggccccaaaggaccgcaatggcacatctgaccccttcgtccgagtgcgctacaagggccggacacgggagacctcgatcgtgaagaagtcatgctacccacgctggaatgagacgtttgaatttgagctgcaggagggggccatggaggcgctgtgcgtggaggcctgggactgggaccttgtcagccgaaacgacttcctgggcaaagtggtgattgatgtccagagactgcgggtggtgcagcaggaggagggctggttccggctgcagcccgaccagtccaagagccggcggcatgacgagggcaacctgggctccttgcagctggaggtgcggctgcgggacgagacggtgctgccctccagctactaccagccactggtgcacctgctgtgccacgaggtcaagctgggcatgcagggcccagggcagctgatcccactcatcgaggagacaaccagcaccgagtgtcgccaggacgtggccacgaacctgctcaagctcttcctggggcaggggctggccaaggacttcctggacctgctcttccagctggagctgagtcgcaccagtgagaccaacaccctgttccggagcaactctctggcctcaaagtccatggagtcttttctgaaggtggccgggatgcagtacctgcacggcgtcctgggccccatcatcaacaaggtgtttgaggagaagaagtacgtggagctggaccccagcaaagtggaagttaaggatgtagggtgctccgggctgcaccgcccgcagaccgaggccgaggtgctggagcagagcgcgcagacgctgcgcgcccacctgggggccctgctgagcgcgctcagccgctcggttcgcgcgtgccccgccgtggtgcgcgccaccttccgccagctcttccggcgcgtgcgcgagcgcttccccggcgcccagcacgagaatgtaccgttcatcgccgtcaccagcttcctgtgcctgcgcttcttctctcccgccatcatgtcgcccaagctcttccacctgcgggagcgccacgcggacgcccgcaccagccgcaccctgctcctgttggccaaggcagtccagaacgtgggcaacatggacacgccggcttccagggccaaggaggcttggatggagccgctgcagcccaccgtgcgccagggcgtggcgcagctgaaggacttcatcaccaagctcgtggacatcgaggagaaggacgagctggacctgcagcggacgctgagtttgcaggcgccacctgtgaaggaggggccactcttcatccacaggaccaagggcaagggccccctcatgtcctcctccttcaagaagctctacttctccctcactaccgaggccctcagcttcgcgaagacgcccagctccaagtgtgtgaatgagcttaaccagtggctgtctgcgctgcggaaggtgagcatcaacaacaccggactgctgggctcctaccaccctggcgtcttccgtggggacaagtggagctgctgccaccaaaaagagaagacaggtcagggctgcgataagacccggtcacgggtgaccctgcaggagtggaatgaccctcttgaccatgaccttgaggcccagctcatctaccggcacctgctgggcgtggaggccatgctgtgggagaggcaccgggagctgagcgggggcgcagaggcaggcacggtgcccacgagccctggcaaagtccccgaggactcattggcccggctgctccgggtgctgcaggacctccgcgaggcccatagctccagcccggccggctccccaccctcagagcccaactgcctcctggagctgcagacgtgaggcccgccctacgctccccttgctgagtcccctgccaagcgctcggagcccccccaggacactctgcaccccctcaccccggtcctcctcattagggtgcagggcctaggtctcttccaggtgggggaggggggagagtcaggaataaggggatccccagaagtgcagagctgagcaggcttgggcctgtcatggctggccggaagtgtccccagctccctacagacgctgtagccatcactgcctctccagggaccctcctctcctgcccaggacagacccagccagaaccactgctaggatgggccgcacccaggggtctggcctccagggacctagagaatgggagggagaacggggccccaggagacccggccgccaccccacccgctacccttgggtgccacagggctgtgctgttgccaacagtaaacctgctcttactg

SEQ ID NO: 174339 - DNA, 2634 bp, Homo sapiens
  Payload ID: 14215
  Gene Symbol: RASA4
  Gene Name: RAS p21 protein activator 4
  ENST ID: ENST00000462172
  CDS Start-End: 359-2554
ggaccccggtgtctggcttcccccgagccgggaccccgcgatggccaagcgcagctcgctgtacatccgcatcgtggaggggaagaaccttcccgccaaggacatgtgagcgcggccgggggtgggagccccaactttccggggaggggcactgccccccaggacgcctgacctttccggggtccacccacaagagcagcggagaggcactggcagcagcgacccctactgcatcgtgaaggtggacaatgagcccatcatcaggacagccacagtgtggaagaccctgtgccccttctggggtgaggagtaccaagtgcacctgccgcccaccttccacgctgtggctttctatgtcatggatgaggatgccctcagccgggacgacgttatcggaaaggtctgccttacaagggacaccatagcctctcaccctaagggtttcagcgggtgggcccacctgacggaggtcgaccccgatgaggaggtgcagggcgagatccacctgcggctggaagtgtggccaggggcccgggcctgccggctacgctgctctgtgctggaggccagggatctggccccaaaggaccgcaatggcacatctgaccccttcgtccgagtgcgctacaagggccggacacgggagacctcgatcgtgaagaagtcatgctacccacgctggaatgagacgtttgaatttgagctgcaggagggggccatggaggcgctgtgcgtggaggcctgggactgggaccttgtcagccgaaacgacttcctgggcaaagtggtgattgatgtccagagactgcgggtggtgcagcaggaggagggctggttccggctgcagcccgaccagtccaagagccggcggcatgacgagggcaacctgggctccttgcagctggaggtgcggctgcgggacgagacggtgctgccctccagctactaccagccactggtgcacctgctgtgccacgaggtcaagctgggcatgcagggcccagggcagctgatcccactcatcgaggagacaaccagcaccgagtgtcgccaggacgtggccacgaacctgctcaagctcttcctggggcaggggctggccaaggacttcctggacctgctcttccagctggagctgagtcgcaccagtgagaccaacaccctgttccggagcaactctctggcctcaaagtccatggagtcttttctgaaggtggccgggatgcagtacctgcacggcgtcctgggccccatcatcaacaaggtgtttgaggagaagaagtacgtggagctggaccccagcaaagtggaagttaaggatgtagggtgctccgggctgcaccgcccgcagaccgaggccgaggtgctggagcagagcgcgcagacgctgcgcgcccacctgggggccctgctgagcgcgctcagccgctcggttcgcgcgtgccccgccgtggtgcgcgccaccttccgccagctcttccggcgcgtgcgcgagcgcttccccggcgcccagcacgagaatgtaccgttcatcgccgtcaccagcttcctgtgcctgcgcttcttctctcccgccatcatgtcgcccaagctcttccacctgcgggagcgccacgcggacgcccgcaccagccgcaccctgctcctgttggccaaggcagtccagaacgtgggcaacatggacacgccggcttccagggccaaggaggcttggatggagccgctgcagcccaccgtgcgccagggcgtggcgcagctgaaggacttcatcaccaagctcgtggacatcgaggagaaggacgagctggacctgcagcggacgctgagtttgcaggcgccacctgtgaaggaggggccactcttcatccacaggaccaagggcaagggccccctcatgtcctcctccttcaagaagctctacttctccctcactaccgaggccctcagcttcgcgaagacgcccagctccaagaaaagcgccctcatcaagttagccaacatccgggcagcggaaaaggttgaggaaaagagctttggcggctcgcacgtcatgcaggtcatctacacggacgacgccggcaggccccagactgcctacctgcagtgcaagtgtgtgaatgagcttaaccagtggctgtctgcgctgcggaaggtgagcatcaacaacaccggactgctgggctcctaccaccctggcgtcttccgtggggacaagtggagctgctgccaccaaaaagagaagacaggtcagggctgcgataagacccggtcacgggtgaccctgcaggagtggaatgaccctcttgaccatgaccttgaggcccagctcatctaccggcacctgctgggcgtggaggccatgctgtgggagaggcaccgggagctgagcgggggcgcagaggcaggcacggtgcccacgagccctggcaaagtccccgaggactcattggcccggctgctccgggtgctgcaggacctccgcgaggcccatagctccagcccggccggctccccaccctcagagcccaactgcctcctggagctgcagacgtgaggcccgccctacgctccccttgctgagtcccctgccaagcgctcggagcccccccaggacactctgcaccccctcacccc

SEQ ID NO: 174340 - DNA, 3244 bp, Homo sapiens
  Payload ID: 14215
  Gene Symbol: RASA4
  Gene Name: RAS p21 protein activator 4
  ENST ID: ENST00000461209
  CDS Start-End: 601-2796
ctctcagccccctccctctgtctcctcttccctctctctcccctccctgtccgtccccttccctttctgcccctccctctgtccctctcccagtctctccccttcctccttccccctcctttcttctcctttctctctctacccatccctgtctcctccccctccttctccctcccccacaactctccctccatctactcccacccctgcccgcgaaaggggagccctggtgcgggttcctgcccttccctcaccatccgctcccgggctgagggcggggacccgtgtttggccggaggagcctgcggtctccaaaccaggacgcggagactcagcctccgctctcttcccccgcactcctcccgaggggccaaaagagagaggagcctgccgcgagtccccgccccgatcccgccctccagccccgcccctgcctatttgtcttgcagcactggcagcagcgacccctactgcatcgtgaaggtggacaatgagcccatcatcaggacagccacagtgtggaagaccctgtgccccttctggggtgaggagtaccaagtgcacctgccgcccaccttccacgctgtggctttctatgtcatggatgaggatgccctcagccgggacgacgttatcggaaaggtctgccttacaagggacaccatagcctctcaccctaagggtttcagcgggtgggcccacctgacggaggtcgaccccgatgaggaggtgcagggcgagatccacctgcggctggaagtgtggccaggggcccgggcctgccggctacgctgctctgtgctggaggccagggatctggccccaaaggaccgcaatggcacatctgaccccttcgtccgagtgcgctacaagggccggacacgggagacctcgatcgtgaagaagtcatgctacccacgctggaatgagacgtttgaatttgagctgcaggagggggccatggaggcgctgtgcgtggaggcctgggactgggaccttgtcagccgaaacgacttcctgggcaaagtggtgattgatgtccagagactgcgggtggtgcagcaggaggagggctggttccggctgcagcccgaccagtccaagagccggcggcatgacgagggcaacctgggctccttgcagctggaggtgcggctgcgggacgagacggtgctgccctccagctactaccagccactggtgcacctgctgtgccacgaggtcaagctgggcatgcagggcccagggcagctgatcccactcatcgaggagacaaccagcaccgagtgtcgccaggacgtggccacgaacctgctcaagctcttcctggggcaggggctggccaaggacttcctggacctgctcttccagctggagctgagtcgcaccagtgagaccaacaccctgttccggagcaactctctggcctcaaagtccatggagtcttttctgaaggtggccgggatgcagtacctgcacggcgtcctgggccccatcatcaacaaggtgtttgaggagaagaagtacgtggagctggaccccagcaaagtggaagttaaggatgtagggtgctccgggctgcaccgcccgcagaccgaggccgaggtgctggagcagagcgcgcagacgctgcgcgcccacctgggggccctgctgagcgcgctcagccgctcggttcgcgcgtgccccgccgtggtgcgcgccaccttccgccagctcttccggcgcgtgcgcgagcgcttccccggcgcccagcacgagaatgtaccgttcatcgccgtcaccagcttcctgtgcctgcgcttcttctctcccgccatcatgtcgcccaagctcttccacctgcgggagcgccacgcggacgcccgcaccagccgcaccctgctcctgttggccaaggcagtccagaacgtgggcaacatggacacgccggcttccagggccaaggaggcttggatggagccgctgcagcccaccgtgcgccagggcgtggcgcagctgaaggacttcatcaccaagctcgtggacatcgaggagaaggacgagctggacctgcagcggacgctgagtttgcaggcgccacctgtgaaggaggggccactcttcatccacaggaccaagggcaagggccccctcatgtcctcctccttcaagaagctctacttctccctcactaccgaggccctcagcttcgcgaagacgcccagctccaagaaaagcgccctcatcaagttagccaacatccgggcagcggaaaaggttgaggaaaagagctttggcggctcgcacgtcatgcaggtcatctacacggacgacgccggcaggccccagactgcctacctgcagtgcaagtgtgtgaatgagcttaaccagtggctgtctgcgctgcggaaggtgagcatcaacaacaccggactgctgggctcctaccaccctggcgtcttccgtggggacaagtggagctgctgccaccaaaaagagaagacaggtcagggctgcgataagacccggtcacgggtgaccctgcaggagtggaatgaccctcttgaccatgaccttgaggcccagctcatctaccggcacctgctgggcgtggaggccatgctgtgggagaggcaccgggagctgagcgggggcgcagaggcaggcacggtgcccacgagccctggcaaagtccccgaggactcattggcccggctgctccgggtgctgcaggacctccgcgaggcccatagctccagcccggccggctccccaccctcagagcccaactgcctcctggagctgcagacgtgaggcccgccctacgctccccttgctgagtcccctgccaagcgctcggagcccccccaggacactctgcaccccctcaccccggtcctcctcattagggtgcagggcctaggtctcttccaggtgggggaggggggagagtcaggaataaggggatccccagaagtgcagagctgagcaggcttgggcctgtcatggctggccggaagtgtccccagctccctacagacgctgtagccatcactgcctctccagggaccctcctctcctgcccaggacagacccagccagaaccactgctaggatgggccgcacccaggggtctggcctccagggacctagagaatgggagggagaacggggccccaggagacccggccgccaccccacccgctacccttgggtgccacagggctgtgctgttgccaacagtaaacctgctcttactgtc

SEQ ID NO: 174341 - DNA, 485 bp, Homo sapiens
  Payload ID: 14215
  Gene Symbol: RASA4
  Gene Name: RAS p21 protein activator 4
  ENST ID: ENST00000521076
  CDS Start-End: 322-485
gcgatggccaagcgcagctcgctgtacatccgcatcgtggaggggaagaaccttcccgccaaggacatgtgagcgcggccgggggtgggagccccaactttccggggaggggcactgccccccaggacgcctgacctttccggggtccacccacaagagcagcggagaggcactggcagcagcgacccctactgcatcgtgaaggtggacaatgagcccatcatcaggacagccacagtgtggaagaccctgtgccccttctggggtgaggagtaccaagtgcacctgccgcccaccttccacgctgtggctttctatgtcatggatgaggatgccctcagccgggacgacgttatcggaaaggtctgccttacaagggacaccatagcctctcaccctaaggggatctggccccaaaggaccgcaatggcacatctgaccccttcgtccgagtgcgctacaagggccggacacgggagacctcg

SEQ ID NO: 174342 - DNA, 817 bp, Homo sapiens
  Payload ID: 14215
  Gene Symbol: RASA4
  Gene Name: RAS p21 protein activator 4
  ENST ID: ENST00000521397
  CDS Start-End: 1-817
gtgtcgccaggacgtggccacgaacctgctcaagctcttcctggggcaggggctggccaaggacttcctggacctgctcttccagctggagctgagtcgcaccagtgagaccaacaccctgttccggagcaactctctggcctcaaagtccatggagtcttttctgaaggtggccgggatgcagtacctgcacggcgtcctgggccccatcatcaacaaggtgtttgaggagaagaagtgctccgggctgcaccgcccgcagaccgaggccgaggtgctggagcagagcgcgcagacgctgcgcgcccacctgggggccctgctgagcgcgctcagccgctcggttcgcgcgtgccccgccgtggtgcgcgccaccttccgccagctcttccggcgcgtgcgcgagcgcttccccggcgcccagcacgagaatgtaccgttcatcgccgtcaccagcttcctgtgcctgcgcttcttctctcccgccatcatgtcgcccaagctcttccacctgcgggagcgccacgcggacgcccgcaccagccgcaccctgctcctgttggccaaggcagtccagaacgtgggcaacatggacacgccggcttccagggccaaggaggcttggatggagccgctgcagcccaccgtgcgccagggcgtggcgcagctgaaggacttcatcaccaagctcgtggacatcgaggagaaggacgagctggacctgcagcggacgctgagtttgcaggcgccacctgtgaaggaggggccactcttcatccacaggaccaagggcaagggccccctcatgtcctcctcc

SEQ ID NO: 174343 - DNA, 516 bp, Homo sapiens
  Payload ID: 14215
  Gene Symbol: RASA4
  Gene Name: RAS p21 protein activator 4
  ENST ID: ENST00000520042
  CDS Start-End: 223-516
tgaaggccgactgggcaggagggacagcggtgtcggtgttggggagagcaggagcaaaggctccagggagacactggcagcagcgacccctactgcatcgtgaaggtggacaatgagcccatcatcaggacagccacagtgtggaagaccctgtgccccttctggggtgaggagtaccaagtgcacctgccgcccaccttccacgctgtggctttctatgtcatggatgaggatgccctcagccgggacgacgttatcggaaaggtctgccttacaagggacaccatagcctctcaccctaagggtttcagcgggtgggcccacctgacggaggtcgaccccgatgaggaggtgcagggcgagatccacctgcggctggaagtgtggccaggggcccgggcctgccggctacgctgctctgtgctggaggccagggatctggccccaaaggaccgcaatggcacatctgaccccttcgtccgagtgcgctacaagggccggacacgggagacctcg

SEQ ID NO: 174344 - DNA, 615 bp, Homo sapiens
  Payload ID: 14215
  Gene Symbol: RASA4
  Gene Name: RAS p21 protein activator 4
  ENST ID: ENST00000519539
  CDS Start-End: 1-412
cccaaaggaccgcaatggcacatctgaccccttcgtccgagtgcgctacaagggccggacacgggagacctcgatcgtgaagaagtcatgctacccacgctggaatgagacgtttgaatttgagctgcaggagggggccatggaggcgctgtgcgtggaggcctgggactgggaccttgtcagccgaaacgacttcctgggcaaagtggtgattgatgtccagagactgcgggtggtgcagcaggaggagggctggttccggctgcagcccgaccagtccaagagccggcggcatgacgactggaggtgcggctgcgggacgagacggtgctgccctccagctactaccagccactggtgcacctgctgtgccacgaggtcaagctgggcatgcagggcccagggcagctgatcccactcatcgaggagacaaccagcaccgagtgtcgccaggacgtggccacgaacctgctcaagctcttcctggggcaggggctggccaaggacttcctggacctgctcttccagctggagctgagtcgcaccagtgagaccaacaccctgttccggagcaactctctggcctcaaagtccatggagtcttttctgaaggtg

SEQ ID NO: 174345 - DNA, 967 bp, Homo sapiens
  Payload ID: 14215
  Gene Symbol: RASA4
  Gene Name: RAS p21 protein activator 4
  ENST ID: ENST00000522801
  CDS Start-End: 50-967
cgccaccccggaccccggtgtctggcttcccccgagccgggaccccgcgatggccaagcgcagctcgctgtacatccgcatcgtggaggggaagaaccttcccgccaaggacatgacagccacagtgtggaagaccctgtgccccttctggggtgaggagtaccaagtgcacctgccgcccaccttccacgctgtggctttctatgtcatggatgaggatgccctcagccgggacgacgttatcggaaaggtctgccttacaagggacaccatagcctctcaccctaagggtttcagcgggtgggcccacctgacggaggtcgaccccgatgaggaggtgcagggcgagatccacctgcggctggaagtgtggccaggggcccgggcctgccggctacgctgctctgtgctggaggccagggatctggccccaaaggaccgcaatggcacatctgaccccttcgtccgagtgcgctacaagggccggacacgggagacctcgatcgtgaagaagtcatgctacccacgctggaatgagacgtttgaatttgagctgcaggagggggccatggaggcgctgtgcgtggaggcctgggactgggaccttgtcagccgaaacgacttcctgggcaaagtggtgattgatgtccagagactgcgggtggtgcagcaggaggagggctggttccggctgcagcccgaccagtccaagagccggcggcatgacgagggcaacctgggctccttgcagctggaggtgcggctgcgggacgagacggtgctgccctccagctactaccagccactggtgcacctgctgtgccacgaggtcaagctgggcatgcagggcccagggcagctgatcccactcatcgaggagacaaccagcaccgagtgtcgccaggacgtggccacgaacctgctcaagctcttcctggggcaggggctggccaaggacttcctggac

SEQ ID NO: 174346 - DNA, 483 bp, Homo sapiens
  Payload ID: 14215
  Gene Symbol: RASA4
  Gene Name: RAS p21 protein activator 4
  ENST ID: ENST00000538869
  CDS Start-End: 1-483
atgagacaagaggtagaggggagaggtagaggtagccacgagctgataattacagacaagagatgcggagtatgtgggggctcattatcctgcatagtctatctttgtatatctttgaacttttcaagaataaaaaagcttaaaaagtatacatggcctggtcctaccagagactcacccaatgccagcctccagccagggagagccaagtttgcattttcacacgcatctcacactcctctgcactctcaacttggagcgctccaaacagggaaaccccaagccttgctggcttctgccaaccccctgagcagaagcatgggtccccctgatcaccacctcaccaccctcatcctgatctcactgtacacaccctttcccggtctgctaagtagcgggtgtttttccttgacactaacgctacagctagaccacggtgggcttggcaacaggtgtcttcccagatgctggcgttaccgctag

SEQ ID NO: 174347 - DNA, 2589 bp, Homo sapiens
  Payload ID: 14216
  Gene Symbol: RASA4B
  Gene Name: RAS p21 protein activator 4B
  ENST ID: ENST00000306682
  CDS Start-End: 364-2559
accccggaccccggtgtctggcttcccccgagccggcaccccgcgatggccaagcgcagctcgctgtacatccgcatcgtggaggggaagaaccttcccgccaaggacatgtgagcgcggccgggggtgggagccccaactttccggggaggggcactgccccccaggacgcctgacctttccggggtccacccacaagagcagcggagaggcactggcagcagcgacccctactgcatcgtgaaggtggacaatgagcccatcatcaggacagccacagtgtggaagaccctgtgccccttctggggtgaggagtaccaagtgcacctgccgcccaccttccacgctgtggctttctatgtcatggatgaggatgccctcagccgggacgacgttatcggaaaggtctgccttacaagggacaccatagcctctcaccctaagggtttcagcgggtgggcccacctgacagaggtcgaccccgacgaggaggtgcagggcgagatccacctgcggctggaagtgtggccaggggcccgggcctgccggctacgctgctctgtgctggaggccagggatctggccccaaaggaccgcaatggcacatctgaccccttcgtccgagtgcgctacaagggccggacacgggagacctcgatcgtgaagaagtcatgctacccacgctggaatgagacgtttgaatttgagctgcaggagggggccatggaggcgctgtgcgtggaggcctgggactgggaccttgtcagccgaaacgacttcctgggcaaagtggtgattgatgtccagagactgcgggtggtgcagcaggaggagggctggttccggctgcagcccgaccagtccaagagccggcggcatgacgagggcaacctgggctccttgcagctggaggtgcggctgcgggacgagacggtgctgccctccagctactaccagccactggtgcacctgctgtgccacgaggtcaagctgggcatgcagggcccagggcagctgatcccactcatcgaggagacaaccagcaccgagtgtcgccaggacgtggccacgaacctgctcaagctcttcctggggcaggggctggccaaggacttcctggacctgctcttccagctggagctgagtcgcaccagtgagaccaacaccctgttccggagcaactctctggcctcaaagtccgtggagtcttttctgaaggtggccgggatgcagtacctgcacggcgtcctgggccccatcatcaacaaggtgtttgaggagaagaagtacgtggagctggaccccagcaaagtggaagttaaggatgtagggtgctccgggctgcaccgcccgcagaccgaggccgaggtgctggagcagagcgcgcagacgctgcgcgcccacctgggggccctgctgagcgcgctcagccgctcggttcgcgcgtgccccgccgtggtgcgcgccaccttccgccagctcttccggcgcgtgcgcgagcgcttccccggcgcccagcacgagaatgtaccgttcatcgccgtcaccagcttcctgtgcctgcgcttcttctctcccgccatcatgtcgcccaagctcttccacctgcgggagcgccacgcggacgcccgcaccagccgcaccctgctcctgttggccaaggcagtccagaacgtgggcaacatggacacgccggcttccagggccaaggaggcttggatggagccgctgcagcccaccgtgcaccagggcgtggcgcagctgaaggacttcatcaccaagctcgtggacatcgaggagaaggacgagctggacctgcagcggacgctgagtttgcaggcgccacctgtgaaggaggggccactcttcatccacaggaccaagggcaagggccccctcatgtcctcctccttcaagaagctctacttctccctcactaccgaggccctcagcttcgcgaagacgcccagctccaagaaaagcgccctcatcaagttagccaacatccgggcagcggaaaaggttgaggaaaagagctttggcggctcgcacgtcatgcaggtcatctacacggacgacgccggcaggccccagactgcctacctgcagtgcaagtgtgtgaatgagcttaaccagtggctgtctgcgctgcggaaggtgagcatcaacaacaccggactgctgggctcctaccaccctggcgtcttccgtggggacaagtggagctgctgccaccaaaaagagaagacaggtcagggctgcgataagacccggtcacgggtgaccctgcaggagtggaatgaccctcttgaccatgaccttgaggcccagctcatctaccggcacctgctgggcgtggaggccatgctgtgggagaggcaccgggagctgagcgggggcgcagaggcaggcacggtgcccacgagccctggcaaagtccccgaggactcattggcccggctgctccgggtgctgcaggacctccgcgaggcccatagctccagcccggccggctccccaccctcagagcccaactgcctcctggagctgcagacgtgaggcccgccctacgctccccttgctgagtcc

SEQ ID NO: 174348 - DNA, 2931 bp, Homo sapiens
  Payload ID: 14216
  Gene Symbol: RASA4B
  Gene Name: RAS p21 protein activator 4B
  Uniprot ID: C9J798
  ENST ID: ENST00000465829
  CDS Start-End: 72-2483
gcccagtccagcgcccgccgcccgccaccccggaccccggtgtctggcttcccccgagccggcaccccgcgatggccaagcgcagctcgctgtacatccgcatcgtggaggggaagaaccttcccgccaaggacatcactggcagcagcgacccctactgcatcgtgaaggtggacaatgagcccatcatcaggacagccacagtgtggaagaccctgtgccccttctggggtgaggagtaccaagtgcacctgccgcccaccttccacgctgtggctttctatgtcatggatgaggatgccctcagccgggacgacgttatcggaaaggtctgccttacaagggacaccatagcctctcaccctaagggtttcagcgggtgggcccacctgacagaggtcgaccccgacgaggaggtgcagggcgagatccacctgcggctggaagtgtggccaggggcccgggcctgccggctacgctgctctgtgctggaggccagggatctggccccaaaggaccgcaatggcacatctgaccccttcgtccgagtgcgctacaagggccggacacgggagacctcgatcgtgaagaagtcatgctacccacgctggaatgagacgtttgaatttgagctgcaggagggggccatggaggcgctgtgcgtggaggcctgggactgggaccttgtcagccgaaacgacttcctgggcaaagtggtgattgatgtccagagactgcgggtggtgcagcaggaggagggctggttccggctgcagcccgaccagtccaagagccggcggcatgacgagggcaacctgggctccttgcagctggaggtgcggctgcgggacgagacggtgctgccctccagctactaccagccactggtgcacctgctgtgccacgaggtcaagctgggcatgcagggcccagggcagctgatcccactcatcgaggagacaaccagcaccgagtgtcgccaggacgtggccacgaacctgctcaagctcttcctggggcaggggctggccaaggacttcctggacctgctcttccagctggagctgagtcgcaccagtgagaccaacaccctgttccggagcaactctctggcctcaaagtccgtggagtcttttctgaaggtggccgggatgcagtacctgcacggcgtcctgggccccatcatcaacaaggtgtttgaggagaagaagtacgtggagctggaccccagcaaagtggaagttaaggatgtagggtgctccgggctgcaccgcccgcagaccgaggccgaggtgctggagcagagcgcgcagacgctgcgcgcccacctgggggccctgctgagcgcgctcagccgctcggttcgcgcgtgccccgccgtggtgcgcgccaccttccgccagctcttccggcgcgtgcgcgagcgcttccccggcgcccagcacgagaatgtaccgttcatcgccgtcaccagcttcctgtgcctgcgcttcttctctcccgccatcatgtcgcccaagctcttccacctgcgggagcgccacgcggacgcccgcaccagccgcaccctgctcctgttggccaaggcagtccagaacgtgggcaacatggacacgccggcttccagggccaaggaggcttggatggagccgctgcagcccaccgtgcaccagggcgtggcgcagctgaaggacttcatcaccaagctcgtggacatcgaggagaaggacgagctggacctgcagcggacgctgagtttgcaggcgccacctgtgaaggaggggccactcttcatccacaggaccaagggcaagggccccctcatgtcctcctccttcaagaagctctacttctccctcactaccgaggccctcagcttcgcgaagacgcccagctccaagaaaagcgccctcatcaagttagccaacatccgggcagcggaaaaggttgaggaaaagagctttggcggctcgcacgtcatgcaggtcatctacacggacgacgccggcaggccccagactgcctacctgcagtgcaagtgtgtgaatgagcttaaccagtggctgtctgcgctgcggaaggtgagcatcaacaacaccggactgctgggctcctaccaccctggcgtcttccgtggggacaagtggagctgctgccaccaaaaagagaagacaggtcagggctgcgataagacccggtcacgggtgaccctgcaggagtggaatgaccctcttgaccatgaccttgaggcccagctcatctaccggcacctgctgggcgtggaggccatgctgtgggagaggcaccgggagctgagcgggggcgcagaggcaggcacggtgcccacgagccctggcaaagtccccgaggactcattggcccggctgctccgggtgctgcaggacctccgcgaggcccatagctccagcccggccggctccccaccctcagagcccaactgcctcctggagctgcagacgtgaggcccgccctacgctccccttgctgagtcccctgccaagcgctcggagcccccccaggacactctgcaccccctcaccccggtcctcctcattagggtgcagggcctaggtctcttccaggtgggggaggggggagagtcaggaataaggggatccccagaagtgcagagctgagcaggcttgggcctgtcatggctggccggaagtgtccccagctccctacagacgctgtagccatcactgcctctccagggaccctcctctcctgcccaggacagacccagccagaaccactgctaggatgggccgcacccaggggtctggcctccagggacctagagaatgggagggagaacggggccccaggagacccggccgccaccccacccgctacccttgggtgccacagggctgtgctgttgccaacagtaaacctgctcttactgtc

SEQ ID NO: 174349 - DNA, 2794 bp, Homo sapiens
  Payload ID: 14216
  Gene Symbol: RASA4B
  Gene Name: RAS p21 protein activator 4B
  ENST ID: ENST00000541662
  CDS Start-End: 68-2341
agtccagcgcccgccgcccgccaccccggaccccggtgtctggcttcccccgagccggcaccccgcgatggccaagcgcagctcgctgtacatccgcatcgtggaggggaagaaccttcccgccaaggacatcactggcagcagcgacccctactgcatcgtgaaggtggacaatgagcccatcatcaggacagccacagtgtggaagaccctgtgccccttctggggtgaggagtaccaagtgcacctgccgcccaccttccacgctgtggctttctatgtcatggatgaggatgccctcagccgggacgacgttatcggaaaggtctgccttacaagggacaccatagcctctcaccctaagggtttcagcgggtgggcccacctgacagaggtcgaccccgacgaggaggtgcagggcgagatccacctgcggctggaagtgtggccaggggcccgggcctgccggctacgctgctctgtgctggaggccagggatctggccccaaaggaccgcaatggcacatctgaccccttcgtccgagtgcgctacaagggccggacacgggagacctcgatcgtgaagaagtcatgctacccacgctggaatgagacgtttgaatttgagctgcaggagggggccatggaggcgctgtgcgtggaggcctgggactgggaccttgtcagccgaaacgacttcctgggcaaagtggtgattgatgtccagagactgcgggtggtgcagcaggaggagggctggttccggctgcagcccgaccagtccaagagccggcggcatgacgagggcaacctgggctccttgcagctggaggtgcggctgcgggacgagacggtgctgccctccagctactaccagccactggtgcacctgctgtgccacgaggtcaagctgggcatgcagggcccagggcagctgatcccactcatcgaggagacaaccagcaccgagtgtcgccaggacgtggccacgaacctgctcaagctcttcctggggcaggggctggccaaggacttcctggacctgctcttccagctggagctgagtcgcaccagtgagaccaacaccctgttccggagcaactctctggcctcaaagtccgtggagtcttttctgaaggtggccgggatgcagtacctgcacggcgtcctgggccccatcatcaacaaggtgtttgaggagaagaagtacgtggagctggaccccagcaaagtggaagttaaggatgtagggtgctccgggctgcaccgcccgcagaccgaggccgaggtgctggagcagagcgcgcagacgctgcgcgcccacctgggggccctgctgagcgcgctcagccgctcggttcgcgcgtgccccgccgtggtgcgcgccaccttccgccagctcttccggcgcgtgcgcgagcgcttccccggcgcccagcacgagaatgtaccgttcatcgccgtcaccagcttcctgtgcctgcgcttcttctctcccgccatcatgtcgcccaagctcttccacctgcgggagcgccacgcggacgcccgcaccagccgcaccctgctcctgttggccaaggcagtccagaacgtgggcaacatggacacgccggcttccagggccaaggaggcttggatggagccgctgcagcccaccgtgcaccagggcgtggcgcagctgaaggacttcatcaccaagctcgtggacatcgaggagaaggacgagctggacctgcagcggacgctgagtttgcaggcgccacctgtgaaggaggggccactcttcatccacaggaccaagggcaagggccccctcatgtcctcctccttcaagaagctctacttctccctcactaccgaggccctcagcttcgcgaagacgcccagctccaagtgtgtgaatgagcttaaccagtggctgtctgcgctgcggaaggtgagcatcaacaacaccggactgctgggctcctaccaccctggcgtcttccgtggggacaagtggagctgctgccaccaaaaagagaagacaggtcagggctgcgataagacccggtcacgggtgaccctgcaggagtggaatgaccctcttgaccatgaccttgaggcccagctcatctaccggcacctgctgggcgtggaggccatgctgtgggagaggcaccgggagctgagcgggggcgcagaggcaggcacggtgcccacgagccctggcaaagtccccgaggactcattggcccggctgctccgggtgctgcaggacctccgcgaggcccatagctccagcccggccggctccccaccctcagagcccaactgcctcctggagctgcagacgtgaggcccgccctacgctccccttgctgagtcccctgccaagcgctcggagcccccccaggacactctgcaccccctcaccccggtcctcctcattagggtgcagggcctaggtctcttccaggtgggggaggggggagagtcaggaataaggggatccccagaagtgcagagctgagcaggcttgggcctgtcatggctggccggaagtgtccccagctccctacagacgctgtagccatcactgcctctccagggaccctcctctcctgcccaggacagacccagccagaaccactgctaggatgggccgcacccaggggtctggcctccagggacctagagaatgggagggagaacggggccccaggagacccggccgccaccccacccgctacccttgggtgccacagggctgtgctgttgccaacagtaaacctgctcttactgtccaggc

SEQ ID NO: 174350 - DNA, 3382 bp, Homo sapiens
  Payload ID: 14217
  Gene Symbol: RASAL1
  Gene Name: RAS protein activator like 1 (GAP1 like)
  Uniprot ID: O95294
  ENST ID: ENST00000261729
  CDS Start-End: 317-2731
gtgtttaactggaaactagaacgagatggaaggggatgttcaaggcccctcccttgactctgaacggacccccagggaacatgcgaccctctctctggcgacgcctcccacccaccactaatacttgctcctggaccggggggcgcggaggttggagagaggaggcaggtgtctgcatgctacccgggtctcggacaggcggcactgggaccacgaggcagggagccaggcttgaagcaggtgacatgtagacgtcccctggtccagcctcggaacctgagcgcccttctgcctggaaagtttgtggctaggcgccatggccaagagcagctccctgaatgttcgcgtggtggagggccgcgcgctgcctgccaaggacgtgtctgggagcagcgacccctactgcctagtgaaagtggacgacgaggtggtggccaggacagctactgtctggaggagcctgggccccttctggggggaggagtacacggtgcacctgcctctggatttccaccagctggccttctacgtgctggatgaggacactgtcgggcacgacgacatcatcggcaagatctcgctgagcagggaggcgattacagccgacccccgagggattgacagctggattaacttgagccgagtggacccagatgcagaagtgcagggtgagatctgcctgtcagtgcagatgctggaggatgggcagggccgctgccttcgctgccatgtgcttcaggccagggacctggctcccagagacatctctggcacatctgacccatttgcacgtgtgttttggggcagccagagcttggagacctcaaccatcaagaagactcgcttcccgcactgggatgaagtgctggagctgcgggagatgccaggtgccccgtccccactgcgggtggagctctgggactgggacatggtgggcaagaatgacttcttgggcatggtggagttctctccaaagaccctccagcagaagccacctaaaggctggttccgcctcctgccctttcccagagccgaggaggattctggggggaacctgggtgccctgcgagtgaaggtacgcctgattgaggaccgcgtcctgccctcccagtgctaccagcctctcatggagctgctcatggagtctgtgcaggggccagcagaggaggacactgctagccccttggctttgctggaagagctgaccttgggggactgccgccaggaccttgccaccaagctggtgaaactctttcttggccggggactggctgggcgctttctggactatctcacccggcgtgaggtggctcggaccatggaccccaacaccctcttccgttctaactccctggcatccaagtcgatggaacagtttatgaagctcgtgggcatgccctacctgcacgaggtcctgaagcctgtgattagccgtgtctttgaggagaagaagtacatggagctggatccctgcaagatggacctgggccgcacccggaggatctccttcaaaggcgcactctcggaggagcagatgcgggagaccagcctggggctgctgacgggctacctggggcccatcgtggacgccatcgtgggctccgtggggcgctgcccgcccgccatgcgcctcgccttcaagcagctgcaccggcgagtggaggagcgcttcccccaggccgagcaccaggatgtgaagtacctggccatcagtggatttctcttcttgcgattcttcgcacctgccatccttaccccaaagctgtttgaccttcgggaccaacacgcggacccccagactagccgctcactgctgttgcttgccaaggctgtgcagagcattggaaacctgggccagcagctgggccaaggcaaggaactgtggatggcccccctgcaccccttcctgctgcagtgtgtctcacgtgtgagagacttcctggaccggctggtggatgtggatggggatgaagctggtgtcccagccagggccctgttcccgccctcggccattgttcgagaaggctatctgctgaagcgcaaggaggagcctgccggcctggccacgcgctttgccttcaagaagcgctacgtctggctcagcggggagaccctctccttctccaagagtcctgagtggcagatgtgtcactccatccccgtgtctcacatccgcgccgtggagcgcgtagacgagggcgccttccaactgccccacgtgatgcaggtggtgacgcaggacggcacgggggcgctgcacaccacctacctccagtgcaagaatgtgaatgagctcaaccagtggctctcggccttgcgcaaggccagcgcccccaacccgaacaagctggccgcctgccaccccggtgccttccgcagcgcgcgctggacctgctgcctccaggctgagcgctcagccgccggctgcagccgtacacactcagctgtcaccctgggggactggagtgacccactggatcctgatgctgaggcccagacagtgtatcggcagctgctcctggggcgggaccagctcaggctgaaattactggaggattctaacatggatacaactctggaggcagacacaggggcctgtcctgaggtcctggcccggcaaagagcagcaactgcccgcctgctggaggtgctcgcagacctggatcgtgcccacgaggagttccagcagcaggagcgagggaaggcggccctgggcccccttggcccctaaggaaatgccagagctagcccggaaggaggagcaagagccagggggccctcttcagcgcatcctgccccgggagtctcctgtctccttggacctctttgattctgtggtttggaggctcccagagacgtgcctagtcctgtgtgccttgagtccagaactcagggcatggaagccctttggcaggggccagccttgcactgagtgaaacttgccctctggcttgattcagactggagtggataggataaggaacctgacttatttgactgagactggggtctctacttcaccaaactggcctctatccataccaaggaggccagcctggccctgagctgctggatacagctggacctgaattcctgatgcccatgtgatgttgttgccccagatgggcactaaatggcctcactccttcctgttttcatgtctgctaatccctataacctcactgattcttctgtaccctgcccttggcctaggactccaaccacaagcttccagaatcaggtgccctcaggaagaaccaaggctgggtgggggtccagtgtgccaaactcagacccttggagcctgggagaccttgggccaggctgtttatctctctctgggtctcagattaccctgtataaaaagaggagggaaagtcta

SEQ ID NO: 174351 - DNA, 3040 bp, Homo sapiens
  Payload ID: 14217
  Gene Symbol: RASAL1
  Gene Name: RAS protein activator like 1 (GAP1 like)
  Uniprot ID: O95294
  ENST ID: ENST00000446861
  CDS Start-End: 289-2619
ttgtctggagctccagacgcctcggcaagagcccgctgcgccccctgcgcgctcctcctgctcggagcacggctcctacctgtagagtccggacgggcgctccctccccgggcacctacaccttctcctctttcggaaatctcccatccagctacccgggtctcggacaggcggcactgggaccacgaggcagggagccaggcttgaagcaggtgacatgtagacgtcccctggtccagcctcggaacctgagcgcccttctgcctggaaagtttgtggctaggcgccatggccaagagcagctccctgaatgttcgcgtggtggagggccgcgcgctgcctgccaaggacgtgtctgggagcagcgacccctactgcctagtgaaagtggacgacgaggtggtggccaggacagctactgtctggaggagcctgggccccttctggggggaggagtacacggtgcacctgcctctggatttccaccagctggccttctacgtgctggatgaggacactgtcgggcacgacgacatcatcggcaagatctcgctgagcagggaggcgattacagccgacccccgagggattgacagctggattaacttgagccgagtggacccagatgcagaagtgcagggtgagatctgcctgtcagtgcagatgctggaggatgggcagggccgctgccttcgctgccatgtgcttcaggccagggacctggctcccagagacatctctggcacatctgacccatttgcacgtgtgttttggggcagccagagcttggagacctcaaccatcaagaagactcgcttcccgcactgggatgaagtgctggagctgcgggagatgccaggtgccccgtccccactgcgggtggagctctgggactgggacatggtgggcaagaatgacttcttgggcatggtggagttctctccaaagaccctccagcagaagccacctaaaggctggttccgcctcctgccctttcccagagccgaggaggattctggggggaacctgggtgccctgcgagtgaaggtacgcctgattgaggaccgcgtcctgccctcccagtgctaccagcctctcatggagctgctcatggagtctgtgcaggggccagcagaggaggacactgctagccccttggctttgctggaagagctgaccttgggggactgccgccaggaccttgccaccaagctggtgaaactctttcttggccggggactggctgggcgctttctggactatctcacccggcgtgaggtggctcggaccatggaccccaacaccctcttccgttctaactccctggcatccaagtcgatggaacagtttatgaagctcgtgggcatgccctacctgcacgaggtcctgaagcctgtgattagccgtgtctttgaggagaagaagtacatggagctggatccctgcaagatggacctgggccgcacccggaggatctccttcaaaggcgcactctcggaggagcagatgcgggagaccagcctggggctgctgacgggctacctggggcccatcgtggacgccatcgtgggctccgtggggcgctgcccgcccgccatgcgcctcgccttcaagcagctgcaccggcgagtggaggagcgcttcccccaggccgagcaccaggatgtgaagtacctggccatcagtggatttctcttcttgcgattcttcgcacctgccatccttaccccaaagctgtttgaccttcgggaccaacacgcggacccccagactagccgctcactgctgttgcttgccaaggctgtgcagagcattggaaacctgggccagcagctgggccaaggcaaggaactgtggatggcccccctgcaccccttcctgctgcagtgtgtctcacgtgtgagagacttcctggaccggctggtggatgtggatggggatgaagctggtgtcccagccagggccctgttcccgccctcggccattgttcgagaaggctatctgctgaagcgcaaggaggagcctgccggcctggccacgcgctttgccttcaagaagcgctacgtctggctcagcggggagaccctctccttctccaagagtcctgagtggcaggtggtgacgcaggacggcacgggggcgctgcacaccacctacctccagtgcaagaatgtgaatgagctcaaccagtggctctcggccttgcgcaaggccagcgcccccaacccgaacaagctggccgcctgccaccccggtgccttccgcagcgcgcgctggacctgctgcctccaggctgagcgctcagccgccggctgcagccgtacacactcagctgtcaccctgggggactggagtgacccactggatcctgatgctgaggcccagacagtgtatcggcagctgctcctggggcgggaccagctcaggctgaaattactggaggattctaacatggatacaactctggaggcagacacaggggcctgtcctgaggtcctggcccggcaaagagcagcaactgcccgcctgctggaggtgctcgcagacctggatcgtgcccacgaggagttccagcagcaggagcgagggaaggcggccctgggcccccttggcccctaaggaaatgccagagctagcccggaaggaggagcaagagccagggggccctcttcagcgcatcctgccccgggagtctcctgtctccttggacctctttgattctgtggtttggaggctcccagagacgtgcctagtcctgtgtgccttgagtccagaactcagggcatggaagccctttggcaggggccagccttgcactgagtgaaacttgccctctggcttgattcagactggagtggataggataaggaacctgacttatttgactgagactggggtctctacttcaccaaactggcctctatccataccaaggaggccagcctggccctgagctgctggatacagctggacctgaattcctgatgcccatgtgatgttgttgccccagatgggcactaaatggcctcactccttcctg

SEQ ID NO: 174352 - DNA, 2502 bp, Homo sapiens
  Payload ID: 14217
  Gene Symbol: RASAL1
  Gene Name: RAS protein activator like 1 (GAP1 like)
  Uniprot ID: O95294
  ENST ID: ENST00000548055
  CDS Start-End: 43-2460
acctgagcgcccttctgcctggaaagtttgtggctaggcgccatggccaagagcagctccctgaatgttcgcgtggtggagggccgcgcgctgcctgccaaggacgtgtctgggagcagcgacccctactgcctagtgaaagtggacgacgaggtggtggccaggacagctactgtctggaggagcctgggccccttctggggggaggagtacacggtgcacctgcctctggatttccaccagctggccttctacgtgctggatgaggacactgtcgggcacgacgacatcatcggcaagatctcgctgagcagggaggcgattacagccgacccccgagggattgacagctggattaacttgagccgagtggacccagatgcagaagtgcagggtgagatctgcctgtcagtgcagatgctggaggatgggcagggccgctgccttcgctgccatgtgcttcaggccagggacctggctcccagagacatctctggcacatctgacccatttgcacgtgtgttttggggcagccagagcttggagacctcaaccatcaagaagactcgcttcccgcactgggatgaagtgctggagctgcgggagatgccaggtgccccgtccccactgcgggtggagctctgggactgggacatggtgggcaagaatgacttcttgggcatggtggagttctctccaaagaccctccagcagaagccacctaaaggctggttccgcctcctgccctttcccagagccgaggaggattctggggggaacctgggtgccctgcgagtgaaggtacgcctgattgaggaccgcgtcctgccctcccagtgctaccagcctctcatggagctgctcatggagtctgtgcaggggccagcagaggaggacactgctagccccttggctttgctggaagagctgaccttgggggactgccgccaggaccttgccaccaagctggtgaaactctttcttggccggggactggctgggcgctttctggactatctcacccggcgtgaggtggctcggaccatggaccccaacaccctcttccgttctaactccctggcatccaagtcgatggaacagtttatgaagctcgtgggcatgccctacctgcacgaggtcctgaagcctgtgattagccgtgtctttgaggagaagaagtacatggagctggatccctgcaagatggacctgggccgcacccggaggatctccttcaaaggcgcactctcggaggagcagatgcgggagaccagcctggggctgctgacgggctacctggggcccatcgtggacgccatcgtgggctccgtggggcgctgcccgcccgccatgcgcctcgccttcaagcagctgcaccggcgagtggaggagcgcttcccccaggccgagcaccaggatgtgaagtacctggccatcagtggatttctcttcttgcgattcttcgcacctgccatccttaccccaaagctgtttgaccttcgggaccaacacgcggacccccagactagccgctcactgctgttgcttgccaaggctgtgcagagcattggaaacctgggccagcagctgggccaaggcaaggaactgtggatggcccccctgcaccccttcctgctgcagtgtgtctcacgtgtgagagacttcctggaccggctggtggatgtggatggggatgaagaagctggtgtcccagccagggccctgttcccgccctcggccattgttcgagaaggctatctgctgaagcgcaaggaggagcctgccggcctggccacgcgctttgccttcaagaagcgctacgtctggctcagcggggagaccctctccttctccaagagtcctgagtggcagatgtgtcactccatccccgtgtctcacatccgcgccgtggagcgcgtagacgagggcgccttccaactgccccacgtgatgcaggtggtgacgcaggacggcacgggggcgctgcacaccacctacctccagtgcaagaatgtgaatgagctcaaccagtggctctcggccttgcgcaaggccagcgcccccaacccgaacaagctggccgcctgccaccccggtgccttccgcagcgcgcgctggacctgctgcctccaggctgagcgctcagccgccggctgcagccgtacacactcagctgtcaccctgggggactggagtgacccactggatcctgatgctgaggcccagacagtgtatcggcagctgctcctggggcgggaccagctcaggctgaaattactggaggattctaacatggatacaactctggaggcagacacaggggcctgtcctgaggtcctggcccggcaaagagcagcaactgcccgcctgctggaggtgctcgcagacctggatcgtgcccacgaggagttccagcagcaggagcgagggaaggcggccctgggcccccttggcccctaaggaaatgccagagctagcccggaaggaggagcaagagccagg

SEQ ID NO: 174353 - DNA, 3817 bp, Homo sapiens
  Payload ID: 14217
  Gene Symbol: RASAL1
  Gene Name: RAS protein activator like 1 (GAP1 like)
  Uniprot ID: O95294
  ENST ID: ENST00000546530
  CDS Start-End: 287-2707
ctagaacgagatggaaggggatgttcaaggcccctcccttgactctgaacggacccccagggaacatgcgaccctctctctggcgacgcctcccacccaccactaatacttgctcctggaccggggggcgcggaggttggagagaggagctacccgggtctcggacaggcggcactgggaccacgaggcagggagccaggcttgaagcaggtgacatgtagacgtcccctggtccagcctcggaacctgagcgcccttctgcctggaaagtttgtggctaggcgccatggccaagagcagctccctgaatgttcgcgtggtggagggccgcgcgctgcctgccaaggacgtgtctgggagcagcgacccctactgcctagtgaaagtggacgacgaggtggtggccaggacagctactgtctggaggagcctgggccccttctggggggaggagtacacggtgcacctgcctctggatttccaccagctggccttctacgtgctggatgaggacactgtcgggcacgacgacatcatcggcaagatctcgctgagcagggaggcgattacagccgacccccgagggattgacagctggattaacttgagccgagtggacccagatgcagaagtgcagggtgagatctgcctgtcagtgcagatgctggaggatgggcagggccgctgccttcgctgccatgtgcttcaggccagggacctggctcccagagacatctctggcacatctgacccatttgcacgtgtgttttggggcagccagagcttggagacctcaaccatcaagaagactcgcttcccgcactgggatgaagtgctggagctgcgggagatgccaggtgccccgtccccactgcgggtggagctctgggactgggacatggtgggcaagaatgacttcttgggcatggtggagttctctccaaagaccctccagcagaagccacctaaaggctggttccgcctcctgccctttcccagagccgaggaggattctggggggaacctgggtgccctgcgagtgaaggtacgcctgattgaggaccgcgtcctgccctcccagtgctaccagcctctcatggagctgctcatggagtctgtgcaggggccagcagaggaggacactgctagccccttggctttgctggaagagctgaccttgggggactgccgccaggaccttgccaccaagctggtgaaactctttcttggccggggactggctgggcgctttctggactatctcacccggcgtgaggtggctcggaccatggaccccaacaccctcttccgttctaactccctggcatccaagtcgatggaacagtttatgaagctcgtgggcatgccctacctgcacgaggtcctgaagcctgtgattagccgtgtctttgaggagaagaagtacatggagctggatccctgcaagatggacctgggccgcacccggaggatctccttcaaaggcgcactctcggaggagcagatgcgggagaccagcctggggctgctgacgggctacctggggcccatcgtggacgccatcgtgggctccgtggggcgctgcccgcccgccatgcgcctcgccttcaagcagctgcaccggcgagtggaggagcgcttcccccaggccgagcaccagcaggatgtgaagtacctggccatcagtggatttctcttcttgcgattcttcgcacctgccatccttaccccaaagctgtttgaccttcgggaccaacacgcggacccccagactagccgctcactgctgttgcttgccaaggctgtgcagagcattggaaacctgggccagcagctgggccaaggcaaggaactgtggatggcccccctgcaccccttcctgctgcagtgtgtctcacgtgtgagagacttcctggaccggctggtggatgtggatggggatgaagaagctggtgtcccagccagggccctgttcccgccctcggccattgttcgagaaggctatctgctgaagcgcaaggaggagcctgccggcctggccacgcgctttgccttcaagaagcgctacgtctggctcagcggggagaccctctccttctccaagagtcctgagtggcagatgtgtcactccatccccgtgtctcacatccgcgccgtggagcgcgtagacgagggcgccttccaactgccccacgtgatgcaggtggtgacgcaggacggcacgggggcgctgcacaccacctacctccagtgcaagaatgtgaatgagctcaaccagtggctctcggccttgcgcaaggccagcgcccccaacccgaacaagctggccgcctgccaccccggtgccttccgcagcgcgcgctggacctgctgcctccaggctgagcgctcagccgccggctgcagccgtacacactcagctgtcaccctgggggactggagtgacccactggatcctgatgctgaggcccagacagtgtatcggcagctgctcctggggcgggaccagctcaggctgaaattactggaggattctaacatggatacaactctggaggcagacacaggggcctgtcctgaggtcctggcccggcaaagagcagcaactgcccgcctgctggaggtgctcgcagacctggatcgtgcccacgaggagttccagcagcaggagcgagggaaggcggccctgggcccccttggcccctaaggaaatgccagagctagcccggaaggaggagcaagagccagggggccctcttcagcgcatcctgccccgggagtctcctgtctccttggacctctttgattctgtggtttggaggctcccagagacgtgcctagtcctgtgtgccttgagtccagaactcagggcatggaagccctttggcaggggccagccttgcactgagtgaaacttgccctctggcttgattcagactggagtggataggataaggaacctgacttatttgactgagactggggtctctacttcaccaaactggcctctatccataccaaggaggccagcctggccctgagctgctggatacagctggacctgaattcctgatgcccatgtgatgttgttgccccagatgggcactaaatggcctcactccttcctgttttcatgtctgctaatccctataacctcactgattcttctgtaccctgcccttggcctaggactccaaccacaagcttccagaatcaggtgccctcaggaagaaccaaggctgggtgggggtccagtgtgccaaactcagacccttggagcctgggagaccttgggccaggctgtttatctctctctgggtctcagattaccctgtataaaaagaggagggaaagtctagatgtgtggttttcaaactggattccaatgaggtagttcaagaacaagggaggagtttctctgactgtgggccaaagaccacccgctagaatgtctgctagaaatgcagatttctgaggcccagccagctactgactcagaatctgagggtatatgaaggcaagaatcagggttatttaacagattccgtaggtcatttggatgagtatcagctttgaggaccacaggcctggggaatgggcaattttattttattttgtttttagagttgggggtctcactctgttgcccaggctgcagtacagtggcatgatcataggtcagtgcaccctcaaacttctggacttcagtgatcctcccacgttagcctccagagcagctgcgactacaggtgcaagccatcacgcctggctaatttttaaatttttgtagagatggggggtctcactatgttgccca

SEQ ID NO: 174354 - DNA, 4378 bp, Homo sapiens
  Payload ID: 14218
  Gene Symbol: RASAL2
  Gene Name: RAS protein activator like 2
  Uniprot ID: Q9UJF2
  ENST ID: ENST00000367649
  CDS Start-End: 353-4195
gaagaaggcggctccgaggaggtgggagggcgagcctcccctcccgggttcttctgcgtcctctcccgggagggacccacacacacctgagcccggacccacccttggtcggggccacgctggatcctcctcccggcctgggtcccgcccgccgactgcaggtgggctgcatcgcccgagcctcgggcagtgggcgacggggaaggaggtgagaggtgtccgcgccggctgccgctcgggtccctgccctcgctgcgcgctctcctcctccccttaccgcaggcagggcgcggagccgcgcgccagcccgccccgaagccgccgcctcgtccccctcccgcctcggggcaccatggagctctctccgtcgtccggaggagccgcggaggcgctgtcctggccggagatgttcccggcgctggagtccgactcgccgctgcccccggaggacctggacgcggttgtcccagtcagtggagccgtcgccggtggcatgttggatcggatccttctggagtccgtgtgccagcaacagagctgggtccgggtgtacgatgtgaaaggaccacccacccaccgtctgtcttgtggtcagtcaccctacaccgagacaacaacgtgggagcggaagtattgcatcctcacagacagccagttggtattgctcaacaaggagaaggagatacctgtggaagggggacaggagcagcagacagattccaccaaagggcgatgcctgaggagaactgtcagtgtcccttccgagggtcagtttcccgagtacccaccagagggcgccactaaactggaggtaccagcagaaaggtcccctcgtagacggagtatctcagggaccagtacatcagagaaacccaactccatggacactgcaaatacctcacccttcaaagtaccaggattcttcagcaagcgcctgaaaggctccatcaagaggaccaaaagccagtcaaagcttgacagaaacacgagctttcggcttccatcccttcgcagtacagatgacaggtctcgtgggctgcctaaactaaaagagtcacgttcccatgaatccttgctgagcccatgcagcacagtggaatgtctggatcttggtagaggggaacctgtatcagtgaaaccacttcatagtagcatccttggacaagacttctgctttgaggttacctacttaagtggaagtaaatgcttcagctgtaattctgcttctgagagagacaagtggatggaaaaccttcgcaggacagttcaacctaataaggacaattgcaggcgagctgaaaatgttcttcgtttatggatcattgaagccaaggaccttgcccctaaaaagaaatatttctgcgaactgtgccttgatgataccctctttgctcgtacaaccagcaagaccaaagcagacaatattttctggggcgaacattttgaattcttcagccttccacctcttcatagtatcacagttcacatttacaaggatgtggaaaaaaagaaaaaaaaggacaagaataattatgtagggctagtcaacatccccactgccagtgtgactggtcgccaatttgtagaaaagtggtatccagtgagtacacctacacccaacaaaggaaagacaggaggaccttctattcggattaaatcacgtttccaaactatcaccattctgcctatggagcaatacaaagaatttgcagaatttgtcaccagcaactacaccatgctgtgttctgtccttgagccagtaattagtgtgagaaataaagaggagttggcttgtgccttagtgcacattcttcaaagtactggcagagccaaggattttctgactgacttggtgatgtctgaggtggatcgttgtggagagcatgatgtcttgatcttcagagagaacactattgccaccaaatccattgaggaatacctcaagttggtgggacaacagtatcttcatgacgcactgggggagtttatcaaagctttgtatgagtccgatgagaactgtgaagtggatcccagcaaatgttcatctagtgaactgatagaccatcagagcaacctgaaaatgtgctgtgagctggctttctgcaagatcatcaactcttactgtgttttccctcgtgagttgaaagaagtgtttgcatcatggaagcagcagtgcctgaaccgtggcaagcaagacatcagcgagaggctcatcagtgcctcattatttctccgttttctgtgtccagccattatgtctcccagtcttttcaaccttatgcaggagtatcctgatgaccgcacatctcggactctaactcttattgccaaggtcattcagaacctggccaactttgccaagtttggtaacaaagaggaatacatggcattcatgaatgattttttagaacatgaatggggtggaatgaagcgctttcttttggagatctctaatccagacaccatctcaaacaccccaggctttgatggttacattgatctgggccgagagctttcagttttgcattccttactgtgggaagtagtttcccaacttgataaggcgaccgtggcaaaattggggcctctccctcgtgttcttgctgatattaccaagtcattgactaatcctacgccaatacaacagcaactgagacgcttcactgaacataactccagtccaaatgtcagtggaagcctctcctctgggctgcagaaaatatttgaagaccccactgacagtgatttgcataaactaaaatctccaagccaggacaacacagacagctacttcagagggaaaacattattgctggttcagcaagcctcctctcagagcatgacttattctgaaaaggatgaaagggaaagtagccttcctaatggtcggagcgtctccctcatggacctccaggacactcatgctgctcaagtggagcatgcatctgtcatgcttgatgtgcctatacgcttgaccggaagccagctttccataacccaggtggccagcatcaaacagctgcgggaaacccagagcactccccaaagtgcaccccaagtgagaaggcccctgcacccagccttgaaccagccaggtggccttcagcccttgtcgttccagaaccctgtctatcacctcaataacccaattccagcaatgccaaaggcctctatagattccagtttggagaacctaagcactgccagttccagaagccaaagtaacagtgaagacttcaagctcagtggacccagcaatagcagcatggaagatttcactaaacgtagcactcagagtgaggacttctccaggcggcacacggtgccagatagacacatacctcttgctttgccacgacaaaatagtactgggcaggcccagatccgaaaagtggaccagggtgggttaggtgcccgagccaaagccccaccatccctgccacacagtgcttctttacgtagcaccgggagcatgtcagtggtgtccgcagccctggtggccgaacctgtgcagaatgggagccggtcccggcagcagtcctcttcctccagagagagccctgttcccaaagttagagcaatccagagacaacagacacagcaggttcagtcacctgtggactctgccacaatgtccccagtagagaggacagcagcctgggttctgaacaatgggcagtatgaagaggatgtggaagaaactgagcaaaatctagatgaagccaagcatgctgagaagtatgaacaagaaattactaaactgaaggagcgcctgagagtttccagccggcgactggaggaatatgaacgccgcttgctggtgcaggagcagcagatgcagaagctgctgctggaatacaaggcccgactggaggacagcgaggagcggctccgaagacagcaggaagaaaaagatagccagatgaaaagcatcatcagcaggctaatggctgtggaagaggaactgaagaaggatcatgctgagatgcaagcagttattgatgcaaagcagaaaataattgatgcacaggaaaaacggatcgtgtccctggattcagccaacaccagactgatgagcgcgctgacccaagtgaaggagcggtacagcatgcaggtccgcaatggcatctcccccaccaaccccaccaagctttccatcacggagaatggtgaattcaaaaacagcagctgctgacgggctttgtctgtggaaggagacagaaggaaattgacccactctcctatctccagacctttacctagcccctccaggtttacagaatgttgctacttcacaatggcgatgtggtgagaaactcctgaatgaagaaaggaaccttgtctttcagggcataaggcggcgacttccaaggtcaat

SEQ ID NO: 174355 - DNA, 2385 bp, Homo sapiens
  Payload ID: 14218
  Gene Symbol: RASAL2
  Gene Name: RAS protein activator like 2
  ENST ID: ENST00000433130
  CDS Start-End: 1-2080
agaagtgtttgcatcatggaagcagcagtgcctgaaccgtggcaagcaagacatcagcgagaggctcatcagtgcctcattatttctccgttttctgtgtccagccattatgtctcccagtcttttcaaccttatgcaggagtatcctgatgaccgcacatctcggactctaactcttattgccaaggtcattcagaacctggccaactttgccaagtttggtaacaaagaggaatacatggcattcatgaatgattttttagaacatgaatggggtggaatgaagcgctttcttttggagatctctaatccagacaccatctcaaacaccccaggctttgatggttacattgatctgggccgagagctttcagttttgcattccttactgtgggaagtagtttcccaacttgataagggtgaaaattccttcctacaggcgaccgtggcaaaattggggcctctccctcgtgttcttgctgatattaccaagtcattgactaatcctacgccaatacaacagcaactgagacgcttcactgaacataactccagtccaaatgtcagtggaagcctctcctctgggctgcagaaaatatttgaagaccccactgacagtgatttgcataaactaaaatctccaagccaggacaacacagacagctacttcagagggaaaacattattgctggttcagcaagcctcctctcagagcatgacttattctgaaaaggatgaaagggaaagtagccttcctaatggtcggagcgtctccctcatggacctccaggacactcatgctgctcaagtggagcatgcatctgtcatgcttgatgtgcctatacgcttgaccggaagccagctttccataacccaggtggccagcatcaaacagctgcgggaaacccagagcactccccaaagtgcaccccaagtgagaaggcccctgcacccagccttgaaccagccaggtggccttcagcccttgtcgttccagaaccctgtctatcacctcaataacccaattccagcaatgccaaaggcctctatagattccagtttggagaacctaagcactgccagttccagaagccaaagtaacagtgaagacttcaagctcagtggacccagcaatagcagcatggaagatttcactaaacgtagcactcagagtgaggacttctccaggcggcacacggtgccagatagacacatacctcttgctttgccacgacaaaatagtactgggcaggcccagatccgaaaagtggaccagggtgggttaggtgcccgagccaaagccccaccatccctgccacacagtgcttctttacgtagcaccgggagcatgtcagtggtgtccgcagccctggtggccgaacctgtgcagaatgggagccggtcccggcagcagtcctcttcctccagagagagccctgttcccaaagttagagcaatccagagacaacagacacagcaggttcagtcacctgtggactctgccacaatgtccccagtagagaggacagcagcctgggttctgaacaatgggcagtatgaagaggatgtggaagaaactgagcaaaatctagatgaagccaagcatgctgagaagtatgaacaagaaattactaaactgaaggagcgcctgagagtttccagccggcgactggaggaatatgaacgccgcttgctggtgcaggagcagcagatgcagaagctgctgctggaatacaaggcccgactggaggacagcgaggagcggctccgaagacagcaggaagaaaaagatagccagatgaaaagcatcatcagcaggctaatggctgtggaagaggaactgaagaaggatcatgctgagatgcaagcagttattgatgcaaagcagaaaataattgatgcacaggtcataaatggagatgagattattcaaacaggaaaaacggatcgtgtccctggattcagccaacaccagactgatgagcgcgctgacccaagtgaaggagcggtacagcatgcaggtccgcaatggcatctcccccaccaaccccaccaagctttccatcacggagaatggtgaattcaaaaacagcagctgctgacgggctttgtctgtggaaggagacagaaggaaattgacccactctcctatctccagacctttacctagcccctccaggtttacagaatgttgctacttcacaatggcgatgtggtgagaaactcctgaatgaagaaaggaaccttgtctttcagggcataaggcggcgacttccaaggtcaatgcttttcccccacatctctatgtacatagggaacttagttctgggccatgtacagaaaatatcactgtaatataccaaaaggaagttaataatgtagatt

SEQ ID NO: 174356 - DNA, 14453 bp, Homo sapiens
  Payload ID: 14218
  Gene Symbol: RASAL2
  Gene Name: RAS protein activator like 2
  Uniprot ID: Q9UJF2
  ENST ID: ENST00000462775
  CDS Start-End: 126-3545
cgaaatgagagcaaaaagggagagagcaggaaagcgagcacaggcgagtacagtatacaaagtgttttgagtttctgactggcgtgccggaaagatcatgttagcacacccagaaacttcacacgatgcagaccccagaggtaccagcagaaaggtcccctcgtagacggagtatctcagggaccagtacatcagagaaacccaactccatggacactgcaaatacctcacccttcaaagtaccaggattcttcagcaagcgcctgaaaggctccatcaagaggaccaaaagccagtcaaagcttgacagaaacacgagctttcggcttccatcccttcgcagtacagatgacaggtctcgtgggctgcctaaactaaaagagtcacgttcccatgaatccttgctgagcccatgcagcacagtggaatgtctggatcttggtagaggggaacctgtatcagtgaaaccacttcatagtagcatccttggacaagacttctgctttgaggttacctacttaagtggaagtaaatgcttcagctgtaattctgcttctgagagagacaagtggatggaaaaccttcgcaggacagttcaacctaataaggacaattgcaggcgagctgaaaatgttcttcgtttatggatcattgaagccaaggaccttgcccctaaaaagaaatatttctgcgaactgtgccttgatgataccctctttgctcgtacaaccagcaagaccaaagcagacaatattttctggggcgaacattttgaattcttcagccttccacctcttcatagtatcacagttcacatttacaaggatgtggaaaaaaagaaaaaaaaggacaagaataattatgtagggctagtcaacatccccactgccagtgtgactggtcgccaatttgtagaaaagtggtatccagtgagtacacctacacccaacaaaggaaagacaggaggaccttctattcggattaaatcacgtttccaaactatcaccattctgcctatggagcaatacaaagaatttgcagaatttgtcaccagcaactacaccatgctgtgttctgtccttgagccagtaattagtgtgagaaataaagaggagttggcttgtgccttagtgcacattcttcaaagtactggcagagccaaggattttctgactgacttggtgatgtctgaggtggatcgttgtggagagcatgatgtcttgatcttcagagagaacactattgccaccaaatccattgaggaatacctcaagttggtgggacaacagtatcttcatgacgcactgggggagtttatcaaagctttgtatgagtccgatgagaactgtgaagtggatcccagcaaatgttcatctagtgaactgatagaccatcagagcaacctgaaaatgtgctgtgagctggctttctgcaagatcatcaactcttactgtgttttccctcgtgagttgaaagaagtgtttgcatcatggaagcagcagtgcctgaaccgtggcaagcaagacatcagcgagaggctcatcagtgcctcattatttctccgttttctgtgtccagccattatgtctcccagtcttttcaaccttatgcaggagtatcctgatgaccgcacatctcggactctaactcttattgccaaggtcattcagaacctggccaactttgccaagtttggtaacaaagaggaatacatggcattcatgaatgattttttagaacatgaatggggtggaatgaagcgctttcttttggagatctctaatccagacaccatctcaaacaccccaggctttgatggttacattgatctgggccgagagctttcagttttgcattccttactgtgggaagtagtttcccaacttgataagggtgaaaattccttcctacaggcgaccgtggcaaaattggggcctctccctcgtgttcttgctgatattaccaagtcattgactaatcctacgccaatacaacagcaactgagacgcttcactgaacataactccagtccaaatgtcagtggaagcctctcctctgggctgcagaaaatatttgaagaccccactgacagtgatttgcataaactaaaatctccaagccaggacaacacagacagctacttcagagggaaaacattattgctggttcagcaagcctcctctcagagcatgacttattctgaaaaggatgaaagggaaagtagccttcctaatggtcggagcgtctccctcatggacctccaggacactcatgctgctcaagtggagcatgcatctgtcatgcttgatgtgcctatacgcttgaccggaagccagctttccataacccaggtggccagcatcaaacagctgcgggaaacccagagcactccccaaagtgcaccccaagtgagaaggcccctgcacccagccttgaaccagccaggtggccttcagcccttgtcgttccagaaccctgtctatcacctcaataacccaattccagcaatgccaaaggcctctatagattccagtttggagaacctaagcactgccagttccagaagccaaagtaacagtgaagacttcaagctcagtggacccagcaatagcagcatggaagatttcactaaacgtagcactcagagtgaggacttctccaggcggcacacggtgccagatagacacatacctcttgctttgccacgacaaaatagtactgggcaggcccagatccgaaaagtggaccagggtgggttaggtgcccgagccaaagccccaccatccctgccacacagtgcttctttacgtagcaccgggagcatgtcagtggtgtccgcagccctggtggccgaacctgtgcagaatgggagccggtcccggcagcagtcctcttcctccagagagagccctgttcccaaagttagagcaatccagagacaacagacacagcaggttcagtcacctgtggactctgccacaatgtccccagtagagaggacagcagcctgggttctgaacaatgggcagtatgaagaggatgtggaagaaactgagcaaaatctagatgaagccaagcatgctgagaagtatgaacaagaaattactaaactgaaggagcgcctgagagtttccagccggcgactggaggaatatgaacgccgcttgctggtgcaggagcagcagatgcagaagctgctgctggaatacaaggcccgactggaggacagcgaggagcggctccgaagacagcaggaagaaaaagatagccagatgaaaagcatcatcagcaggctaatggctgtggaagaggaactgaagaaggatcatgctgagatgcaagcagttattgatgcaaagcagaaaataattgatgcacaggaaaaacggatcgtgtccctggattcagccaacaccagactgatgagcgcgctgacccaagtgaaggagcggtacagcatgcaggtccgcaatggcatctcccccaccaaccccaccaagctttccatcacggagaatggtgaattcaaaaacagcagctgctgacgggctttgtctgtggaaggagacagaaggaaattgacccactctcctatctccagacctttacctagcccctccaggtttacagaatgttgctacttcacaatggcgatgtggtgagaaactcctgaatgaagaaaggaaccttgtctttcagggcataaggcggcgacttccaaggtcaatgcttttcccccacatctctatgtacatagggaacttagttctgggccatgtacagaaaatatcactgtaatataccaaaaggaagttaataatgtagattacctttttgattattgctatttttattattgttttcctcttgttgaaagcactgcagttgttacaggaagtaaagtaggaactgttgtgtgagcgagacatgagcctgtaggttcagtaggtagagaccaagcatctatctgatagaagcacatggagtgcaataggacattgtgagaaggaatttttcagggattcatctactagtttaaaaaccccactctggccctcttgtcctttcagaaaacatgcaaataccaagatccatacaaaacaataatttattccactgatcaaccaagactggttctggttggacagctaatctgatttggggattcactgtttcagaggacacagacaaaagctgttgcatcaaaactggactttaggagtaatttctattgaactcctgtcaatatgtttatttcctctgtctacagcagatgggagtcttctcttttagacaggggctttttgtttttaaccccaattgtaataaagggtgttctttttcctctttagagtttacaaaactataaatatttgtgtctccacataccatcttcatcttcacacattcactgtgctttcctccccatagtgggagctgtcatcaccaacagggtttactctcccctggagaggttatttaaatagctgtccataagccatccagatcaacaccctttcttccatacagaaaagggctaaccataccacagctggaatctctgaatatttcctattaaaaattttttctatgtgttgttataatttttgtttgggataaagactctatccattgtactagcaaatctatggggggtaattttatctccatctttaacttttaaagtacttcttccccttatcccctcaataaagaaaggaaatccaaatttgaagcatcactctcttaaaagaaaaagaaaataatggaaagtgtcaggatggcacattccagttattattccaatgctcgtagatctgacaataatgacccaatttcaacacttgtcatccatagccttattattatagaacagaaaaagtcatggaaacgaattcatttccttttttccagaggtgtgcaatgtcatcttgaatgcaaccttgattaccagaagtatggaaggttacatgttaaacagacattatatatacaaatatatatataatatatattcacacatatgtacatataactgcacaaataggaaaagttcatgccttctatgctgttcagatataatgttaaaagggtctcaaacctctttaagcaagatctaagtagttgttttatattgagaaagcaacaatgtttctcgaataagttgatgttgattttaaattataagctttaaagaattttttttctagaaaaaggggatggaaaaaaaaggacctgagggagccatatgcatcaagtgagtgtttctccataacagaatatttataagagaacatgtatagtgccctcttttgagtgatgccgacagacaccaagccctccttttcaccaagtcccaggcttgcattccagcctcttgagctctgccctctctcaggtggatctttgtgttggaccttacgtttcagcaacctcaccatggccacataacccacaaccttttaaaacagtttctttcatagcaatccctgtttctgccagacagatctaaaatgggagtttctcactgtgtttatctgatctgcacactttatatccagctgttttggcacttttacgttttcttcacctttggttttggtttgcaaattcttacaccttctctccaagcggagggcacactgtggtcaaaatcacttattttattaggaaaaagaggtaactgttccaaagtgtagtgtcctttgttgaaggaggagggatgtaagcatagatttgttcttgtttctggctattctcagctcaagccatgtttaattcattctttgtaaaagccttcaattgtgccacagaaaacctggtaagagaattgtcagtttcattggccataagtatgtaatgtgggtgatgtcttgccattgaggtttggaagctcttaagtgccgattatggattacagagggctgataaaattacttatattgggaattgagagaagccccaaaaaatcaaatgtgcttttgatggatagagtgtatcttattagcattatgggagctccttagagggctgtcttcactgaaagatttaatgcccaaaacatttggacagattatgcagccttctactaccaggttatcttgaatgaagaagaaatagtaaaaaataataataatagagcattaccaataagctaaaagttcagagttgctgatagatgttaaatgttaagttatcctgtgagcctactcctgtccaaccttttttctcagtatttctttagagaatgctgcaatctgtataagttactctgaaggattttttaagaagagaagccaccaacaggtgataatttttatggagatgtttcttaattggctttccctcagttcaagtaggtaaataactttgtttgctgggaggaggtacatggctgaagagaggcaaatagattaagatagcaatgtcttgcacttcctgtttccctcaaaacaacaccacattgtggggcgcaggatagatcagggttgagtggaatttggaattcaggtgaagtgcttgtaaagtgcatgtctagctgacaacagacttgaccattaatgaggacagtgttggtaggagtcagaaaagagcttcatattccccttttatattactgaagcaataagcaatctgagctgaagcagcaaaaagagtcacatttccatcaggtcatcatattccctgagtctctgcagcaaaagccatgtcagaggggagattataactaggtaactataacaagcacttgagcacttaccatgttccaagcactatcaccaaggtactgttggggtttatggcagtctaacggtaagaaaaatgtggtaaaatgaggtaatcatgctgctatagctttttgctttttttcatatagtatcaagttggtcagaattagctttctctgactggtctgcttccgtgtttctctgtgatggtgttaagattatgaaagaaaaagaagattacctaagactgctacaagtgttaactatatgcccttaagaatgagcttgactttggaagtaaagcttttcagatcttagtctacccggggcctttgttgatgggtctgtggttctgtagacccctggctttcactgtgttctcagaggtacaccagattgagagcagagttcttctttggaagtcccagagcaaaataactgccatcaagtgagtttgcattcgtatttgtttccccttccatagagggttagttttagttacctctagcttggagttcctgagaaggctggttataggactgagcgtgggaaaggaaccctcttcaggattacctcagtcccatcagtctaccccattgtgacattgagcccaacacacacgcttgacaccagactagacttgtcacagggccaaacccaacagccacatgccatagcttcactgcattttcagctacacctttggaggccaccttctcctatcaactgtggaaagccagaagggctcccttctccattctccttccctttttcaagtctaatagtgaaatctcctgcttaccccagcagtaaatagttgccttcctaccccttacctgggggccgataatttgagatactttgttttttcaatgcgtcagttgaaggatttagtttcttaaaagcaagaaatgttggagtgttgaatttttaaatagaatctcttttcatgtttgaatgattgttattagttctagaagcattctctttgtcatgacccgattatgtatactcttgggtttaggaaggacaaaagtgatgaaatttgcatgagatagaataaatatcttaggaggagtgaaagaacctgaggaagagacacgaccctaagggaatgaatgcataagcagtcttctcagtagcccagagtttccaggaaacaggaatatttatatcccttgcccactcttaaaatacatagatacataaaaaggcagtctctgtagacaacacatgcacacacccacacaaaacataattcctggggcttcctttttctgaatgttaatccattttatcgagcagtgattcccaaactttgagattttcagattttatgctctcgtctgttagattttatgacattctatcatcctaaaaaatgtactatatgtgttatatgtatatataagttaaagcaacttgaaattgacttggtttggcattgtctcaagaaccctagatatcattattgataccatggggaatcatagaaataaagttgaatatcattgatctgagagtaggatccagaaataagtagtttcagttcctgatcagttaagcctcaagtgtttgagtaaccaacacagcaagacttgggaaatgcagtgagcacccgaggaaaggaaagtggtagtctttgcctgcatttcagcatgcattttcctttcctactcagttgctatcttccacttaaataccctcatttgaccctaggaagttttttgtttttttttttagtttgagacttaaaaccagatttatttgttgttgtagagagatttccacagaagttgtgttttagggacctccatcatctttgtgggggtacagatatttatgtgtaaatatcattttatgtgatttccaaattttcgagggaaacatttcaattcccagttcaacaaaaggttaaatactaattgactcaatgaccaccttcaggaaagttaaatagtaaattaggttaaattttgactggtgcttagacatttcctagttatattaacttaagcagacagcagcacattaacctgagttacacctgtgaggaaatgaccttctaaatttgattttgtttttcatctccagggccttaataagagtgtgttaacacacgactattttacaatgatagctctaaataatttattttttatttcaagaaagagaaatacaccttagaaaaacaaaacccaagattttattttatttttaaagccatatttttgtgctagtagcatttagattattccgtatgtgagatccgtatcagcatttcattacctgggtttgttctaaagaagatttatttttgttctgtgaataatttttgacagttcttgtacatgtacagatatagatacgtttgaggtcttttattgatattcctacaaagaatacaaataaactttaactttaaacatttcagactaaagttgctactatatttgacatattgctgtcttctagcatgcacctgggtgactaggacacttgaagagaaacaagaaaggaaatgtatgccggaatattcttctaaaaatatattttaacattaagaacagtctgtcctagaatttcccaacttccatgtaataagatttcaatttaggaaaaataactagcattagcatgtattgtgataaaactgttactttcgaattctgcagaatttgaaatctctttaataacttgtgacaggtaaagaaagtttcatctggtttattaggaaatgtagccccacttagcttcctagaccactaccatcctcttgtaattttccagttagattaatggggtttgttttcaggatttttgatgtttggttcaggttttttattttaatttcttaatagaagttcatttgtcattcccaacatgattgttcccaaatacacccatcttctcctgcatccctgtttcattctgtaaaatccagggatgcaggtttcatgtgtagtcttgttttgtgttagttgtaggtctgtgctttttggcacatgtcgagttcttcctaatcttgttctactagggattaaaaaattaaaatttactcaaaatccagagaagattgcatgaaacagaaactgcatatccaagaattgtgctattttttgttcacttcgaagctgacccatttcagtctaaattgttcgtgacctaatgtaagctttaagacttcctggatctgaaacatcaaaaagagagaaagtgttgatgcggtctttttacttcatggtcctcttagccctaaactatccatccgtataccctttatgcatatccataccctgtaattgtttttagcctccctccagctgcctgactttttttattagcattttaccagtaggaaaatacataaattaattttgttagcaaaaaaaaaaatttaatgacaaagaacactaaaacagatgactaaatcagtggttttcaatcctgattgttcatcagaatcactggagagttgtttaaaaaaaaaaaaaaagaaaaaaaacagaggagtacctcttgagctccaccattgaacaattaaatagaatctctctaaggattgggcctggccaggcttttttttttttttttttctttttaaccttgccaggggattccgaagagccagggggtaagaaacactagtccaaatcaagctgtgagcactgtgcgtagctgtcttaaaatgttttctgtccccaatcctgaaactggggtaagttggttacaggtgtttccttcccttctatttggaatttaaaattctactaaaactgacaatatatactcagccttcccccacatacaccttgtccccaccaatctgtcctttaagtctgtgaggtagaaattctctccattaacatggtcatcccatttatggaatagatacattctgacaaagctgaccagaagatggaattccctatttcgacctcagtttccccactggcttcaatttaaagcagaaggtaggtggcttctggtttggagtcagaagcttcaatgagtacaccccttgaggagtgctgaagggcccaggccagaatcaaatatgctacatttgactttaaagagtaaacaacagtggctcacgcctgtaatcccagcactttgggaggccaaggcaggtggatcacaaggtcaggagatcgagaccatcctggctaacatggtgaaaccccatctctactgaaaatacaaaaaattagccaggcgtggtggcgggcacctgtagtcccagctactcgggaggctgaggcaggagcatggggtgaactcaggaggtggagcttgcagtgagccgcgatcacgccactgcactccagcctgggcgacagagcaagactccgtcttaaaaaaataaaaattaaaaaaaaaagtaaacaacatagagaactcaaaagttcctttgtctacctccaccaccccccaccaaaaaaaaaggcccttaactacatttgactttaaggaataaacataagagaactcagaattcctttgtctctccccacccaaaaaaaaagaaaaggttcttaacttttcttgacctaatattcagcactgaagtcttattacttgaaacttatcagatgctaaattacaccattcatacttattgttctttcaatagcaaaatgtactgaaagctctccagtcccccctccactcctggcaagcatgcagtcacgtgctcgtgtgaattttccaaaatcatgagcattttgtaagattcagttggttatatgaaattacaataaagagtattatatattttattataatttgtaaattgtgtgctatacattctttatatcagtaaaatttatagtaaacacatatacattatatactcacacacacatattactggtctttctagaaacttgattttgtgaaattctagaatgaattcccagggtgatatttgtttggcctatgaataaattgcaatgaactaacaggtaaatgccaatgtttccttgtctgtaaaattaagattgtggctaaatggtgtatagggtactctctagcactgacattctgtggttattatctgatataattgagaaatgtgtccttagactatgttcaaaaatcggcttgaagcttttctctcagtatttaggaacaattcttcctccacagtctcccatggcacagtagtttttaagaaccaaaaaaaataaagtctggaacaaatgtatattcagaacactacagtgataatgttgataataataatagctggccaggcgtagtggctcacgcttataatcccagccctttgggaggctgaggcaggagtattgcttgagcccaagaattggaggttgcagtgagctataatcacaccattgcactccagccaaggtggacaaagcaagaccctgactcaaaaataatagctaatgtttattgagcaccaactatgtgtcagattatttgctaagcactttatatggaatatatcatttaatcataacaccaaccatgtgagttaggcattattattatcattcttatttcaggaggaaactgaggctcagaaagactaagttacttgcccaaagctacacaatggataagggcaaaactaagacccacgctcagatccctctgaccgtgctgtcttgaccaaaaaaaaacaaaaaaacaaaaaaacaacaaaaaaaaaaacttaggaaagacattggagagggtaagaaaagatccaaaaagatcttgccacataaccaacttgtcaccatgagccaaagtgatggcagtggaacaagatgaggtcatattccacaggttttccaccttaatatattggtttttataagattgtcttgcaatgtccaatcatctgatcagaattagaagagtgtgcagaagtctcacctgtctcagaaattggtctttcatctcttctgggtccatcagagttgagatggtaaagtctgctttcaagattccaaaagggtgccctgaaaaagaaagtgctacctgttcagggggatattatcctatttccatttcaagttcttagcagtcaggagcacccggtggacaccatagatgctacatgttgatttgggatttcaagaagaagaaagaaactgctgagcagaagaatgctcagccacaattagggttaaccaattagtggctgaaaaaaagagtcccatgctttgggtaatgcgaagtcttccacagcctggctacccatcaggcaattattttcttttttgtttcttctgtatttttctccttacttttaatccagtaagtagatactccacaccatgccggaaatactcatctctccttgagctccccaccacagaaaattctaaagaagttctctgactttttaaataaatccagcctttgcccgtgagccatccataatcattacaggaactacaatctcataataagactatatttgcattgcattttattgtttataaagtttatagttatctcattgggtgctcacaacaacgctgtgatataggcagggtagtttttaccacatccccttcacagaagagaaatagaaattcagaaacttgtcccctaagttttcataatagtcatggagcataaactagaatccacctctttattactatccctattcccaacatttcatgctgtctttcatgaaaaggtctcaagggccctgtgccaaggagtgactgtccagatttaactgctccactggtaagagtaggaacttggtagacagaagcagttacctgatttttgtgctgatgttttttctttagattctgaactcagatgttgggcctccgtggcagcagctgtatctcttctatcagtgccactccctacactggccacagctacaggaggggaaaataaaagatttattgcaaatacaaccaggagtaaggtggcctgatattggtgactgcccctgagctaaaagacaggcaaggacagccactgctaggcacacagttgctgcagaagccagcgatgtgggaagctcaattcctgccaatccctgactcacccctacaggctcttttaacccagcacttgagttgctacaccatcatctttcagaaagcccccctggcagcaggacctgtggggcttgggcaatgttaggaggtttttcctcatcaaattttttttgttcagtagcctgtgctccaaagggcctaatgtccttattttgtctgccagctacacaaagcccccaccatggcacccagggaccctcaatatcgccatctccatcccaaaccaagttcaggctctcccccagcaccccctctcttcctgtatggctggccatgcccggaggcgctccagccagagaccctggtgtcctcagcggctcccttgctccatctcacctgctctcatgttcagtcaccaaagtcctgtcagtgccttgcagatgtcttattttttcaaatatggaaataatccttttatttggaatatattattgtaaaatatgtaagcaaatttgtcccctccccaacccagggacacccatgattaacactttgctgtagaaggtccttcacactctcgaatttgttaatttgaatgtgtaaagatctcccttgttctctttaaaggctgcatagtagtatttcactgaatgtaccataacttatttaaccgatctgctttcagtggacattacgttgtttccaccttttcactgtaataaacaatgccgcaacaaac

SEQ ID NO: 174357 - DNA, 3293 bp, Homo sapiens
  Payload ID: 14219
  Gene Symbol: RASAL3
  Gene Name: RAS protein activator like 3
  Uniprot ID: Q86YV0
  ENST ID: ENST00000343625
  CDS Start-End: 87-3122
gttccgagggaggaagccaggcggggtgcagacggctgctgattctggggctggtcaggaaaccaaggagacccccccccccaaccatggacccaccgtcgccaagccggacctcccaaacccagcccacagccacctctccgctgacttcctaccgctggcacacagggggcggtggggagaaggcggctggagggttccgctggggccgctttgctggctggggcagggccctgagccaccaggagcccatggtcagcacccagccagcccctcgctcgatattccgtcgggtcctatctgcgcctcccaaggagtcacggaccagtcgccttcgactctccaaggccctctgggggaggcataagaacccaccgccggagccagacccggagccggagcaggaggccccagagctggagccggagccagagctggagccccctaccccacagatccctgaggcccccacacccaacgtgcctgtctgggacattgggggcttcaccctgcttgatgggaagctggtgctgcttggaggagaggaggagggtcctcgaaggccccgggtgggaagtgctagctccgagggcagcatccacgtggccatggggaacttcagggatccagatcggatgcctggaaaaacagaaccggagactgctggtcccaaccaggtccacaacgttcgggggttgctcaagaggctgaaagagaagaaaaaggccaggttggagccccgggatggaccccccagtgctctgggctctagggagtcgctggccacactctctgaactggacctgggtgccgagcgggatgtgcggatctggccactgcaccccagcctcctgggggagccccactgctttcaggtaacctggacgggtggaagccgctgcttctcttgtcgctcggccgctgagagagaccgctggatcgaggaccttcgtcgccaattccagcccacccaggacaacgtggagcgggaagagacatggctgagcgtgtgggtgcacgaagcgaaggggcttccccgagcagcggcgggggcacccggcgtgcgcgccgagctgtggctggatggcgcgctgctggcacgcacggcgcctcgggccggcccaggccagctcttctgggccgagcgcttccacttcgaggcgctgccaccggcacgtcgcctgtcgctgcggctgcgcggcttgggcccgggaagcgcggtgctgggccgcgtggccctggcgctggaggagctggacgccccacgcgcgcctgccgccggtctggagcgctggttcccgctgctcggggcgccggcgggcgcagcgctgcgggcgcggattcgggcgcgtcgcctgcgcgtgctgccgtccgagcgctacaaggagctggcggagttcctcaccttccactatgcgcgcctctgcggggccctggagcccgcgctgcctgcgcaggccaaggaggagctggcggcagccatggtgcgcgtgctgcgggccaccggccgggcgcaggcgctggtgactgacctgggcactgcggagctggcgcgctgtggaggccgtgaggcgctgctgttccgggaaaacacattggccaccaaggctatcgatgagtacatgaagctcgtggcacaggattacctccaggagaccctgggacaggttgtgcggcgtctctgtgcttctactgaggactgtgaagtggaccccagcaaatgtccagcctcggagctgccagagcaccaggccagacttcggaacagctgcgaggaggtcttcgaaaccattatccattcctacgactggttccctgcggagctgggcatcgtgttctcaagctggcgagaagcatgtaaagaacgtggctctgaggtgctgggcccccgactggtgtgcgcctccctcttcctgcggctcctgtgccctgccatcctggcacccagcctctttggtttggcaccagaccatccagcacccggcccagcccgcaccctcacactgattgccaaggtcatccagaacctcgccaaccgtgccccgttcggtgagaaggaggcctacatgggcttcatgaatagcttcctggaggaacatggaccagccatgcaatgcttcctggaccaggtagccatggtggatgtggatgctgcccccagtggttaccagggcagtggtgatctggccctccagttagctgtcctgcatgcccagctctgtacaatttttgctgagcttgaccagacaacccgagacaccctggaaccactgcccaccatcctgcgagccattgaggagggccagcctgtgcttgtgtcagtgccaatgcgtctcccactgcccccggcccaggtccactccagcctctccgcaggggagaagcccggcttcctggccccccgggacctccccaagcacacccctctcatctccaagagccagtctctgcgcagcgttcgccgctcagagagttgggcccggccacggccggacgaagagcggcccctgcggcggccccggccggtgcagcgcacgcagagtgtcccggtccggcgtcctgcccgccgccgccaatctgcggggccctggccgcgacccaaaggctccctgagcatgggaccagcgccccgcgcccggccttggacccgggactccgcctcgctgcctcggaagccgtcggtaccctggcagcgccaaatggaccagccgcaagaccgaaaccaggcactgggcacgcaccgacctgtgaacaagttggcagagctgcagtgcgaggtggccgctctgcgtgaggagcagaaagtgctgtcccgcctcgtggagtcgctgagcacccaaatccgggccttgacggagcagcaggagcagctgcggggccagctgcaggatctggactccaggctccgtgctgggagctcagagtttgattcagagcacaacctaacaagcaatgaagggcacagtctgaaaaacctggagcaccgcctaaatgagatggagagaactcaggctcagctgagggatgctgtccagagcctgcagctttctccaaggacgcgggggtcttggagtcaaccccagcccctcaaagcaccctgcctcaatggagacaccacctgagctgcccatcctgcctcatcacacgtggtctgggagcagagagatagccatcttagggggggtgtctgactttgccttagccctacttggcctacagtggggagtggagctgctggtcccaaccactctggcagtatgaagttgcccagtaaaatcttgatttcagtgaaa

SEQ ID NO: 174358 - DNA, 1473 bp, Homo sapiens
  Payload ID: 14219
  Gene Symbol: RASAL3
  Gene Name: RAS protein activator like 3
  ENST ID: ENST00000599694
  CDS Start-End: 1-1336
ccgtgaggcgctgctgttccgggaaaacacattggccaccaaggctatcgatgagtacatgaagctcgtggcacaggattacctccaggagaccctgggacaggttgtgcggcgtctctgtgcttctactgaggactgtgaagtggaccccagcaaatgtccagcctcggagctgccagagcaccaggccagacttcggaacagctgcgaggaggtcttcgaaaccattatccattcctacgactggttccctgcggagctgggcatcgtgttctcaagctggcgagaagcatgtaaagaacgtggctctgaggtgctgggcccccgactggtgtgcgcctccctcttcctgcggctcctgtgccctgccatcctggcacccagcctctttggtttggcaccagaccatccagcacccggcccagcccgcaccctcacactgattgccaaggtcatccagaacctcgccaaccgtgccccgttcggtgagaaggaggcctacatgggcttcatgaatagcttcctggaggaacatggaccagccatgcaatgcttcctggaccaggtagccatggtggatgtggatgctgcccccagtggttaccagggcagtggtgatctggccctccagttagctgtcctgcatgcccagctctgtacaatttttgctgagcttgaccagacaacccgagacaccctggaaccactgcccaccatcctgcgagccattgaggagggccagcctgtgcttgtgtcagtgccaatgcgtctcccactgcccccggcccaggtccactccagcctctccgcaggggagaagcccggcttcctggccccccgggacctccccaagcacacccctctcatctccaagagccagtctctgcgcagcgttcgccgctcagagagttgggcccggccacggccggacgaagagcggcccctgcggcggccccggccggtgcagcgcacgcagagtgtcccggtccggcgtcctgcccgccgccgccaatctgcggggccctggccgcgacccaaaggctccctgagcatgggaccagcgccccgcgcccggccttggacccgggactccgcctcgctgcctcggaagccgtcggtaccctggcagcgccaaatggaccagccgcaagaccgaaaccaggcactgggcacgcaccgacctgtgaacaaggagcaccgcctaaatgagatggagagaactcaggctcagctgagggatgctgtccagagcctgcagctttctccaaggacgcgggggtcttggagtcaaccccagcccctcaaagcaccctgcctcaatggagacaccacctgagctgcccatcctgcctcatcacacgtggtctgggagcagagagatagccatcttagggggggtgtctgactttgccttagccctacttggcctacagtggggagtggagctgctggtcccaaccactctggcagtat

SEQ ID NO: 174359 - DNA, 1717 bp, Homo sapiens
  Payload ID: 14219
  Gene Symbol: RASAL3
  Gene Name: RAS protein activator like 3
  ENST ID: ENST00000609274
  CDS Start-End: 1-687
gctgagcttgaccagacaacccgagacaccctggaaccactgcccaccatcctgcgagccattgaggagggccagcctgtgcttgtgtcagtgccaatgcgtctcccactgcccccggcccaggtccactccagcctctccgcaggggagaagcccggcttcctggccccccgggacctccccaagcacacccctctcatctccaagagccagtctctgcgcagcgttcgccgctcagagagttgggcccggccacggccggacgaagagcggcccctgcggcggccccggccggtgcagcgcacgcagagtgtcccggtccggcgtcctgcccgccgccgccaatctgcggggccctggccgcgacccaaaggctccctgagcatgggaccagcgccccgcgcccggccttggacccgggactccgcctcgctgcctcggaagccgtcggtaccctggcagcgccaaatggaccagccgcaagaccgaaaccaggcactgggcacgcaccgacctgtgaacaagttggcagagctgcagtgcgaggtggccgctctgcgtgaggagcagaaagtgctgtcccgcctcgtggagtcgctgagcacccaaatccgggccttgacggagcagcaggagcagctgcggggccagctgcaggatctggactccaggctccgtgctgggtgagcccagccctctccattagctccgcccccaggtgggcccgatccaattagatctgaccaggccctcccccccccccccaaaccacgcctagcacggccaagccccaccctggccccgccccaataagtctgtccaggccctgcctcttggcaagccccgcccccaggtggacccacccaacgaaggtcggcctaggaccctggcagattctctcatccaggccccacccctccatcagcccctcccaacctggctgggccgggcactgagatatctcagcctgggcactccctccagctcagtcacgaccccacccaggactggccaaaccccacctccaagggatgattgataggtcctgtcattccaaccattcccgtctctggtccgacccttcttcaagcatatttaggccccgcccctcagtctggacaagctccgcctccactccaagctccgcccccggagtccctggcactcccaccaggagctggaagggacttccttagcctctgcccttcgccccaatcccccgacccccacaggagctcagagtttgattcagagcacaacctaacaagcaatgaagggcacagtctgaaaaacctggtgagattgccatctgagccctggggcaggtctgggcggtggaggagcaagggttgcggtgcagccctctcctggtttctgaaccccatcaccactgcctccccaggagcaccgcctaaatgagatggagagaactcaggctcagctgagggatgctgtccagagcctgcagctttctccaaggacgcgggggtcttggagtcaaccccagcccctcaaagcaccctgcctcaatggagacaccacctgagctgcccatcctgcctcatcacacgtggtctgggagcagagagatagccatcttagggggggtgtctgactttgccttagccctacttggcctacagtggggagtggagctgctggtcccaaccactctggcagtatgaagttgcccagtaaaatcttgatttcagtgaaa

SEQ ID NO: 174360 - DNA, 2850 bp, Homo sapiens
  Payload ID: 14220
  Gene Symbol: RASGRF1
  Gene Name: Ras protein-specific guanine nucleotide-releasing factor 1
  Uniprot ID: Q13972
  ENST ID: ENST00000394745
  CDS Start-End: 1179-2648
ggagccctttttggcctacttggggtgagtcaacataaggagtgcaggccaccttagcctttgcttctcaaaagtcatggggcaatgaaggacttggccaaggctgtccagcagtaggccaagttcagggattggctcaggcccctaatggacttcactgcatccaggaatggtaggtgattatcttttccgagaggccacctacccagatcccagttgtggacagcccatcccagccctcagaggctcagaggctctctgagtgccctgccccaaaacaccctaggcaagacattatgccagagcctcagctctagggctgcctggagcagagctcctgaatcacactggctccccagggctccccaggaacctcaccattcctcccccaatccacacctctgctgccagagcaacgcaacgacccagaatacacccgttccctcttctgttccctcctcctgcccccacctcaggcctcactggggcagggtacatcttgcctctctgccctgaacttctgaaacctcaatgatcagattcccagggctctgagaaaacagaagcaaacatcccatccaggatggatttaccccctaaaagtcactgagatcattcccaggggcccagcagacagtgtccttcctttcccagcagcagtgccctgcagaacaaagaggctggttcagagccagctctcagccctatggccttggctgagtcccttaacctttctgagactcagtttcctacctgtgacattcctgcagttatcctgtaggaataagagtgcctacgtcctggggcaacagtgagggttaaaagatcaatcctatcctgtgtgcaacgtggagcagacagcctcgatgagacaagctatggtttgcaatgttctggatgtataacctgtttccagcctggcctgaggtggaaccctgtcatgaggatggtcgctggagctcctgtttgccagtggccagaacaataagctcctgtacggtgaaccccccaagtccccgcgcgccacccgcaagttctcctcgccgccacctctgtccatcaccaagacatcgtcaccgagccgccggcggaagctctccctgaacatccccatcatcactggcggcaaggccctggacctggccgccctcagctgcaactccaatggctacaccagcatgtactcggccatgtcacccttcagcaaggccacgctggacaccagcaagctctatgtgtccagcagcttcaccaacaagattccagatgagggcgatacgacccctgagaagcccgaagacccttcagcgctcagcaagcagagctcagaagtctccatgagagaggagtcagatattgatcaaaaccagagtgatgatggtgatactgaaacatcaccaactaaatctccaacaacacccaaatcagtcaaaaacaaaaattcttcagagttcccactcttttcctataacaatggagtcgtcatgacctcctgtcgtgaactggacaataaccgcagtgccttgtcggccgcctctgcctttgccatagcaaccgccggggccaacgagggcaccccaaacaaggagaagtaccggaggatgtccttagccagtgcagggtttcccccagaccagaggaatggagacaaggagtttgtgatccgcagagcagccaccaatcgtgtcttgaacgtgctccgccactgggtgtccaagcactctcaggactttgagaccaacgatgagctcaaatgcaaggtgatcggcttcctggaagaagtcatgcacgacccggagctcctgacccaggagcggaaggctgcagccaacatcatcaggactctgacccaggaggacccaggtgacaaccagatcacgctggaggagatcacgcagatggctgaaggcgtgaaggctgagccctttgaaaaccactcagccctggagatcgcggagcagctgaccctgctagatcacctcgtcttcaagaagattccttatgaggagttcttcggacaaggatggatgaaactggaaaagaatgaaaggaccccttatatcatgaaaaccactaagcacttcaatgacatcagtaacttgattgcttcagaaatcatccgcaatgaggacatcaacgccagggtgagcgccatcgagaagtgggtggccgtagctgacatatgccgctgcctccacaactacaatgccgtactggagatcacctcgtccatgaaccgcagtgcaatcttccggctcaaaaagacgtggctcaaagtctctaagcagactaaagctttgattgataagctccaaaagcttgtgtcatctgagggcagatttaagaatctcagagaagctctgaaaaattgtgacccaccctgtgtcccttacctggggatgtacctcaccgacctggccttcatcgaggaggggacgcccaattacacggaagacggcctggtcaacttctccaagatgaggatgatatcccatattatccgagagattcgccagtttcaacaaactgcctacaaaatagagcaccaagcaaaggtaacgcaatatttactggaccaatcttttgtaatggatgaagaaagcctctacgagtcttctctccgaatagaaccaaaactccccacctgaagctgagcccagcccagacccagctgctcccggggacatgtgctagatgatactgtacatattcgtttggtttcactggattttcttcttcagtatgtgcttctccaagaatacaaatcgtccttgttcttagattcctgtagaaccggaatatgaatttctgcaccgtttcagacttcgcccacccatccctcccctcgtc

SEQ ID NO: 174361 - DNA, 6294 bp, Homo sapiens
  Payload ID: 14220
  Gene Symbol: RASGRF1
  Gene Name: Ras protein-specific guanine nucleotide-releasing factor 1
  Uniprot ID: Q13972
  ENST ID: ENST00000419573
  CDS Start-End: 276-4097
cagtttgcccggcaccggaggagggtcgggcggcatcttccgggtactggggctctgcggagcggagaagaggttccagcggggaatggtatatctggattcaagaagccgcggctcggcgccagatcctggagtgtagatatttggggggaggggagagctagagggagcgagcgagcgagcgccagagagaggcagcgcgcagcgcgcacggacggggggctgctgcgcggagaagatgtaagcgcgtggggtctcgctggcctctgagcaccatgcagaaggggatccggctgaatgatggccacgtcgcgtccctgggactgctggcgcgcaaggacggcacgcgcaaaggctacctgagcaagcggagttcggacaacacaaaatggcaaaccaagtggttcgcgctgctgcagaacctgctcttctacttcgagagcgactcgagctcgcggccctcggggctttacctgctggagggctgcgtctgcgaccgcgcgccctcccccaagccggcgctgtcggccaaggagccgctggagaaacagcattacttcacggtgaacttcagccatgagaaccagaaagccttggagctgaggacagaggacgcaaaagattgtgacgaatgggtggcagccattgcacatgccagctacaggaccctcgccacagagcatgaggcattaatgcagaaatacctgcacctgctgcagatcgtggagacagagaagaccgtggccaagcagcttcggcagcagatcgaggatggggagatcgagatcgagcggctgaaggcagagatcacatccctgctcaaggacaatgagcgcatccagtccacccagactgtcgcccccaacgatgaagacagcgacatcaagaaaattaagaaggtgcagagcttcctgcggggctggctgtgccggcggaagtggaagaccatcatccaggactacatccggtcaccccatgctgacagcatgcgcaagaggaaccaggtggtgttcagcatgctggaggctgaggctgagtacgtgcagcagctgcacatccttgtcaacaatttcctgcgcccgctgcggatggccgccagctccaagaagcctcccatcacacacgacgacgtcagcagcatcttcctgaacagcgaaaccatcatgtttttacatcagatcttttaccaaggcctgaaggcccgcatctccagctggcccacgctggtcctggctgacctatttgacatcctgctgcccatgctcaacatctaccaagagttcgtccgcaaccaccagtacagcctgcagatcctggcccactgcaagcagaaccgtgacttcgacaagctgctgaagcactacgaggccaagcctgactgcgaggagaggacgctggagaccttcctcacctaccccatgttccagatccccaggtacatcctgaccctccatgagctcctggcccacacgcctcatgagcacgttgagcgcaacagcctggactacgccaagtccaaactggaggagctgtccagaataatgcacgatgaagtaagtgagacggagaacatccggaaaaacctggccatcgagcgcatgatcatcgaaggctgtgagatcctcctggacaccagccagacctttgtgagacaaggttccctcattcaggtgcccatgtctgaaaagggcaagatcaccagggggcgcctggggtctctctccctaaagaaagagggcgagcgacagtgcttcctgttttctaagcatctgattatctgtaccagaggctctggagggaagcttcacttgaccaagaatggagtcatatccctcattgactgcactttattggaggagccagaaagcacggaggaggaagccaaaggatccggccaagacatagatcacttggattttaaaatcggggtggagccaaaggattccccgccctttacagtcatcctagtggcctcgtccagacaggagaaggcagcgtggaccagtgacatcagccagtgtgtggataacatccgatgcaatgggctcatgatgaacgcatttgaagaaaattccaaggtcactgtgccgcagatgatcaagaggaccagggaggggaccagggaagcagaaatgagcaggtccgacgcctccttatattgtgatgatgttgacattcgcttcagcaaaaccatgaactcctgcaaagtgctgcagatccgctacgccagtgtggagcggctgctggagaggctgacggacctgcgcttcctgagcatcgacttcctcaacaccttcctgcactcctaccgcgtcttcaccaccgccatcgtggtcctggacaagctcattaccatctacaagaagcctatcagtgccattcctgccaggtggctgaggtcgctggagctcctgtttgccagtggccagaacaataagctcctgtacggtgaaccccccaagtccccgcgcgccacccgcaagttctcctcgccgccacctctgtccatcaccaagacatcgtcaccgagccgccggcggaagctctccctgaacatccccatcatcactggcggcaaggccctggacctggccgccctcagctgcaactccaatggctacaccagcatgtactcggccatgtcacccttcagcaaggccacgctggacaccagcaagctctatgtgtccagcagcttcaccaacaagattccagatgagggcgatacgacccctgagaagcccgaagacccttcagcgctcagcaagcagagctcagaagtctccatgagagaggagtcagatattgatcaaaaccagagtgatgatggtgatactgaaacatcaccaactaaatctccaacaacacccaaatcagtcaaaaacaaaaattcttcagagttcccactcttttcctataacaatggagtcgtcatgacctcctgtcgtgaactggacaataaccgcagtgccttgtcggccgcctctgcctttgccatagcaaccgccggggccaacgagggcaccccaaacaaggagaagtaccggaggatgtccttagccagtgcagggtttcccccagaccagaggaatggagacaaggagtttgtgatccgcagagcagccaccaatcgtgtcttgaacgtgctccgccactgggtgtccaagcactctcaggactttgagaccaacgatgagctcaaatgcaaggtgatcggcttcctggaagaagtcatgcacgacccggagctcctgacccaggagcggaaggctgcagccaacatcatcaggactctgacccaggaggacccaggtgacaaccagatcacgctggaggagatcacgcagatggctgaaggcgtgaaggctgagccctttgaaaaccactcagccctggagatcgcggagcagctgaccctgctagatcacctcgtcttcaagaagattccttatgaggagttcttcggacaaggatggatgaaactggaaaagaatgaaaggaccccttatatcatgaaaaccactaagcacttcaatgacatcagtaacttgattgcttcagaaatcatccgcaatgaggacatcaacgccagggtgagcgccatcgagaagtgggtggccgtagctgacatatgccgctgcctccacaactacaatgccgtactggagatcacctcgtccatgaaccgcagtgcaatcttccggctcaaaaagacgtggctcaaagtctctaagcagactaaagctttgattgataagctccaaaagcttgtgtcatctgagggcagatttaagaatctcagagaagctctgaaaaattgtgacccaccctgtgtcccttacctggggatgtacctcaccgacctggccttcatcgaggaggggacgcccaattacacggaagacggcctggtcaacttctccaagatgaggatgatatcccatattatccgagagattcgccagtttcaacaaactgcctacaaaatagagcaccaagcaaaggtaacgcaatatttactggaccaatcttttgtaatggatgaagaaagcctctacgagtcttctctccgaatagaaccaaaactccccacctgaagctgagcccagcccagacccagctgctcccggggacatgtgctagatgatactgtacatattcgtttggtttcactggattttcttcttcagtatgtgcttctccaagaatacaaatcgtccttgttcttagattcctgtagaaccggaatatgaatttctgcaccgtttcagacttcgcccacccatccctcccctcgtctcctgcagtgcctgtttcttttaaacagctgtactcttggtccctcttccctagactcctcactcttctcagaggggaaacagcacccttgcatacaagaatcttagactccagtcctgcttccgtccctccccagcccaggctcctgggttgaggtggccacccaggcatcctcccagcatgttccatgtagttgttataactgggtggggggtggggggcggcgggagggggaaaccataccctgaagtccagtcattgacaaatcttcccgctgatggtgatgtcaatttccaaagcagcttctccagccaaaatcgcaggtctcaaaactccccatgtgtctcccagtaacctggacggaagggagtcctctctgctcagaaccacacccctcgtaccaatgctgccatctcgttcaggccccacgtcgctccttgctctaggattaacaccagatagcatgaatagcagtctcaatacaactggatgaggccctagacttcccgaggaaatggagtcacaaacaccaagccacgtcgactcttgccgaccactggcccagcatccactgaaagtcgggaacacaaaaatgtcacttttcctctttaagctgcctaacggtcactacaagcttacattgagatgctctaagtctgtataccttgtgataattagtaccacactgtagaattaggaaatcaataaccaagtgtttttattgcatatactgtagtcctgtctaaatgccttctagcaggaatatagtaatgtagtgcttattctgtgaatattaccatgtattttttacactgtacagtatagaaaacacaggttaactccgaagtggcaggcatgctccactacaacagacagacaacttttgctgtaagcaatacctagtggtatgagaattctatttcaagtcctaaaatatttcaacttacagcttgtttggaaaaaaatttccatttttgtaaaaatatatgtttcctgattacctcttgctaataaatctattctatctcagggtgaacagcgagttttgatgggtttcattcgttcagtcaaggaatatttgatgagcacttgctccttacccagcccagcctgggaccggagatccagagtgtcaaggacaccatacctgctttttaggcaccaacagtttggtggggaagactgtttcagttgcctattgcaccaagaacaagccactccaaaacataatggcttaaaaccatttttgttacctttcacagttctatgggttgactgggtccagctgtcagttcttatttggagtctctcatgaagtttcagtcactcagcaactgggactggagtcatctgaaggctcaactggaccgggtggtgctctagttggtgcaccaagatggcgctgtcacatggctggatgttgatgtctgctgggctgcactggggctgttcatgggagcatccacacgtggcctctctgtgtggcttgggctcctcacagtccggaagctgggttccaagagcgactgttccagcagcctcaggcagaagctacaaggctgcccagatgccatcctgcccagatgtgtcctcactgtcacccaggaagggaagccccggaacaccaccctcagtcacaggcatggggcccactgcaaggcacaacccactccagagctcccaaggccgcctcccctgggacctgcagccagctggctccataactgcttttccgtttcctccaggcattttcatcctagccctactttgtgctgggatctgagggggatagcaagcggagaaagaagggatctagagggagaagattctagatccttcttttgactgccagctgattttgattgccagctttacctgcttcatgagctcagccaagtcacttaacctctcagagcttcactgttctcatctgaaaaatggggatgaaaatggtatctcattacagagtagaattaaatgaattattataattaa

SEQ ID NO: 174362 - DNA, 6237 bp, Homo sapiens
  Payload ID: 14220
  Gene Symbol: RASGRF1
  Gene Name: Ras protein-specific guanine nucleotide-releasing factor 1
  Uniprot ID: Q13972
  ENST ID: ENST00000558480
  CDS Start-End: 267-4040
cggcaccggaggagggtcgggcggcatcttccgggtactggggctctgcggagcggagaagaggttccagcggggaatggtatatctggattcaagaagccgcggctcggcgccagatcctggagtgtagatatttggggggaggggagagctagagggagcgagcgagcgagcgccagagagaggcagcgcgcagcgcgcacggacggggggctgctgcgcggagaagatgtaagcgcgtggggtctcgctggcctctgagcaccatgcagaaggggatccggctgaatgatggccacgtcgcgtccctgggactgctggcgcgcaaggacggcacgcgcaaaggctacctgagcaagcggagttcggacaacacaaaatggcaaaccaagtggttcgcgctgctgcagaacctgctcttctacttcgagagcgactcgagctcgcggccctcggggctttacctgctggagggctgcgtctgcgaccgcgcgccctcccccaagccggcgctgtcggccaaggagccgctggagaaacagcattacttcacggtgaacttcagccatgagaaccagaaagccttggagctgaggacagaggacgcaaaagattgtgacgaatgggtggcagccattgcacatgccagctacaggaccctcgccacagagcatgaggcattaatgcagaaatacctgcacctgctgcagatcgtggagacagagaagaccgtggccaagcagcttcggcagcagatcgaggatggggagatcgagatcgagcggctgaaggcagagatcacatccctgctcaaggacaatgagcgcatccagtccacccagactgtcgcccccaacgatgaagacagcgacatcaagaaaattaagaaggtgcagagcttcctgcggggctggctgtgccggcggaagtggaagaccatcatccaggactacatccggtcaccccatgctgacagcatgcgcaagaggaaccaggtggtgttcagcatgctggaggctgaggctgagtacgtgcagcagctgcacatccttgtcaacaatttcctgcgcccgctgcggatggccgccagctccaagaagcctcccatcacacacgacgacgtcagcagcatcttcctgaacagcgaaaccatcatgtttttacatcagatcttttaccaaggcctgaaggcccgcatctccagctggcccacgctggtcctggctgacctatttgacatcctgctgcccatgctcaacatctaccaagagttcgtccgcaaccaccagtacagcctgcagatcctggcccactgcaagcagaaccgtgacttcgacaagctgctgaagcactacgaggccaagcctgactgcgaggagaggacgctggagaccttcctcacctaccccatgttccagatccccaggtacatcctgaccctccatgagctcctggcccacacgcctcatgagcacgttgagcgcaacagcctggactacgccaagtccaaactggaggagctgtccagaataatgcacgatgaagtaagtgagacggagaacatccggaaaaacctggccatcgagcgcatgatcatcgaaggctgtgagatcctcctggacaccagccagacctttgtgagacaaggttccctcattcaggtgcccatgtctgaaaagggcaagatcaccagggggcgcctggggtctctctccctaaagaaagagggcgagcgacagtgcttcctgttttctaagcatctgattatctgtaccagaggctctggagggaagcttcacttgaccaagaatggagtcatatccctcattgactgcactttattggaggagccagaaagcacggaggaggaagccaaaggatccggccaagacatagatcacttggattttaaaatcggggtggagccaaaggattccccgccctttacagtcatcctagtggcctcgtccagacaggagaaggcagcgtggaccagtgacatcagccagtgtgtggataacatccgatgcaatgggctcatgatgaacgcatttgaagaaaattccaaggtcactgtgccgcagatgatcaagtccgacgcctccttatattgtgatgatgttgacattcgcttcagcaaaaccatgaactcctgcaaagtgctgcagatccgctacgccagtgtggagcggctgctggagaggctgacggacctgcgcttcctgagcatcgacttcctcaacaccttcctgcactcctaccgcgtcttcaccaccgccatcgtggtcctggacaagctcattaccatctacaagaagcctatcagtgccattcctgccaggtcgctggagctcctgtttgccagtggccagaacaataagctcctgtacggtgaaccccccaagtccccgcgcgccacccgcaagttctcctcgccgccacctctgtccatcaccaagacatcgtcaccgagccgccggcggaagctctccctgaacatccccatcatcactggcggcaaggccctggacctggccgccctcagctgcaactccaatggctacaccagcatgtactcggccatgtcacccttcagcaaggccacgctggacaccagcaagctctatgtgtccagcagcttcaccaacaagattccagatgagggcgatacgacccctgagaagcccgaagacccttcagcgctcagcaagcagagctcagaagtctccatgagagaggagtcagatattgatcaaaaccagagtgatgatggtgatactgaaacatcaccaactaaatctccaacaacacccaaatcagtcaaaaacaaaaattcttcagagttcccactcttttcctataacaatggagtcgtcatgacctcctgtcgtgaactggacaataaccgcagtgccttgtcggccgcctctgcctttgccatagcaaccgccggggccaacgagggcaccccaaacaaggagaagtaccggaggatgtccttagccagtgcagggtttcccccagaccagaggaatggagacaaggagtttgtgatccgcagagcagccaccaatcgtgtcttgaacgtgctccgccactgggtgtccaagcactctcaggactttgagaccaacgatgagctcaaatgcaaggtgatcggcttcctggaagaagtcatgcacgacccggagctcctgacccaggagcggaaggctgcagccaacatcatcaggactctgacccaggaggacccaggtgacaaccagatcacgctggaggagatcacgcagatggctgaaggcgtgaaggctgagccctttgaaaaccactcagccctggagatcgcggagcagctgaccctgctagatcacctcgtcttcaagaagattccttatgaggagttcttcggacaaggatggatgaaactggaaaagaatgaaaggaccccttatatcatgaaaaccactaagcacttcaatgacatcagtaacttgattgcttcagaaatcatccgcaatgaggacatcaacgccagggtgagcgccatcgagaagtgggtggccgtagctgacatatgccgctgcctccacaactacaatgccgtactggagatcacctcgtccatgaaccgcagtgcaatcttccggctcaaaaagacgtggctcaaagtctctaagcagactaaagctttgattgataagctccaaaagcttgtgtcatctgagggcagatttaagaatctcagagaagctctgaaaaattgtgacccaccctgtgtcccttacctggggatgtacctcaccgacctggccttcatcgaggaggggacgcccaattacacggaagacggcctggtcaacttctccaagatgaggatgatatcccatattatccgagagattcgccagtttcaacaaactgcctacaaaatagagcaccaagcaaaggtaacgcaatatttactggaccaatcttttgtaatggatgaagaaagcctctacgagtcttctctccgaatagaaccaaaactccccacctgaagctgagcccagcccagacccagctgctcccggggacatgtgctagatgatactgtacatattcgtttggtttcactggattttcttcttcagtatgtgcttctccaagaatacaaatcgtccttgttcttagattcctgtagaaccggaatatgaatttctgcaccgtttcagacttcgcccacccatccctcccctcgtctcctgcagtgcctgtttcttttaaacagctgtactcttggtccctcttccctagactcctcactcttctcagaggggaaacagcacccttgcatacaagaatcttagactccagtcctgcttccgtccctccccagcccaggctcctgggttgaggtggccacccaggcatcctcccagcatgttccatgtagttgttataactgggtggggggtggggggcggcgggagggggaaaccataccctgaagtccagtcattgacaaatcttcccgctgatggtgatgtcaatttccaaagcagcttctccagccaaaatcgcaggtctcaaaactccccatgtgtctcccagtaacctggacggaagggagtcctctctgctcagaaccacacccctcgtaccaatgctgccatctcgttcaggccccacgtcgctccttgctctaggattaacaccagatagcatgaatagcagtctcaatacaactggatgaggccctagacttcccgaggaaatggagtcacaaacaccaagccacgtcgactcttgccgaccactggcccagcatccactgaaagtcgggaacacaaaaatgtcacttttcctctttaagctgcctaacggtcactacaagcttacattgagatgctctaagtctgtataccttgtgataattagtaccacactgtagaattaggaaatcaataaccaagtgtttttattgcatatactgtagtcctgtctaaatgccttctagcaggaatatagtaatgtagtgcttattctgtgaatattaccatgtattttttacactgtacagtatagaaaacacaggttaactccgaagtggcaggcatgctccactacaacagacagacaacttttgctgtaagcaatacctagtggtatgagaattctatttcaagtcctaaaatatttcaacttacagcttgtttggaaaaaaatttccatttttgtaaaaatatatgtttcctgattacctcttgctaataaatctattctatctcagggtgaacagcgagttttgatgggtttcattcgttcagtcaaggaatatttgatgagcacttgctccttacccagcccagcctgggaccggagatccagagtgtcaaggacaccatacctgctttttaggcaccaacagtttggtggggaagactgtttcagttgcctattgcaccaagaacaagccactccaaaacataatggcttaaaaccatttttgttacctttcacagttctatgggttgactgggtccagctgtcagttcttatttggagtctctcatgaagtttcagtcactcagcaactgggactggagtcatctgaaggctcaactggaccgggtggtgctctagttggtgcaccaagatggcgctgtcacatggctggatgttgatgtctgctgggctgcactggggctgttcatgggagcatccacacgtggcctctctgtgtggcttgggctcctcacagtccggaagctgggttccaagagcgactgttccagcagcctcaggcagaagctacaaggctgcccagatgccatcctgcccagatgtgtcctcactgtcacccaggaagggaagccccggaacaccaccctcagtcacaggcatggggcccactgcaaggcacaacccactccagagctcccaaggccgcctcccctgggacctgcagccagctggctccataactgcttttccgtttcctccaggcattttcatcctagccctactttgtgctgggatctgagggggatagcaagcggagaaagaagggatctagagggagaagattctagatccttcttttgactgccagctgattttgattgccagctttacctgcttcatgagctcagccaagtcacttaacctctcagagcttcactgttctcatctgaaaaatggggatgaaaatggtatctcattacagagtagaattaaatgaattattataattaa

SEQ ID NO: 174363 - DNA, 8167 bp, Homo sapiens
  Payload ID: 14221
  Gene Symbol: RASGRF2
  Gene Name: Ras protein-specific guanine nucleotide-releasing factor 2
  Uniprot ID: O14827
  ENST ID: ENST00000265080
  CDS Start-End: 68-3781
agctgggccatggccgcgaggcaggggtgagaccggcggccacccgtgagccctccgcacccgcaccatgcagaagagcgtgcgctacaacgaggggcacgccctgtacctggcctttctggcgcgcaaggagggcaccaagcgcggcttcctgagtaagaagacggccgaggcgagccgctggcacgagaagtggttcgccctctaccagaatgtgctcttctacttcgagggcgagcagagctgccgcccggcgggcatgtacctcctggagggctgcagctgcgaacgaacgcccgcgccacccagggccggcgccgggcagggaggcgtccgagacgcgctggacaagcagtattactttactgttctttttggccatgaaggtcagaagccactggagctgcgctgtgaggaggagcaggatggtaaagagtggatggaggccattcaccaagccagttatgcagacattttgattgagagggaagtattaatgcagaagtacattcatctagttcagatcgtagagacagaaaaaattgcagctaaccaactccgacatcaacttgaagatcaagacacagaaatcgaaaggcttaaatcagagattattgctcttaataaaaccaaagaacgaatgcgaccttaccaaagcaaccaagaagacgaagatccagacatcaagaagattaaaaaggttcagagcttcatgcgaggatggttgtgcagaaggaaatggaagaccatcgtgcaggattacatttgttctcctcatgctgaaagtatgaggaagagaaaccagattgtgttcaccatggtggaggcagagtcagagtacgttcaccagctctacatcctggtcaatggctttctccggcccctgcgtatggccgccagctccaagaagccccccatcagccacgacgacgtcagcagtatttttcttaacagtgaaacaatcatgtttcttcatgaaatatttcatcaaggactaaaggcaaggatagcaaactggcccactttaattttagctgatctgtttgatattttgctccccatgctgaacatttatcaagaatttgtgcgtaatcaccagtacagcctgcaagttctcgccaattgtaagcaaaacagagattttgacaaactcttaaaacagtatgaagccaatccagcctgtgaggggaggatgctggagacattcttgacctatcccatgtttcagatccccagatatatcatcacactccatgagctccttgctcacacaccccatgagcatgtggaaaggaaaagcctggagtttgccaaatcaaagctagaggaactatccagagtaatgcacgatgaagtcagcgacactgaaaacataaggaaaaaccttgccatcgaaagaatgatcgtggagggctgtgacatcttgctggacaccagccaaacgttcatccgccaaggttctcttattcaagtaccttccgttgagagggggaaacttagtaaagttcgcctgggttcgttgtctttgaaaaaggaaggagagagacaatgcttcttatttacaaaacactttttaatatgtacaagaagttcaggagggaagcttcatctgctcaagacaggtggggttctgtctctaatagactgcacattgattgaggagccagatgcaagcgatgatgactctaaaggttctgggcaagtgtttgggcacctggattttaaaatagtggtggagcctcctgacgctgccgccttcactgttgtcttgttagcaccctcacgccaggagaaagctgcctggatgagtgacatcagtcagtgtgtggacaatatacgatgtaatggtttaatgactatagtgtttgaagagaattccaaagtcactgtgccacatatgattaagtctgatgcccgtcttcataaagacgacactgacatttgcttcagtaaaacactcaactcctgcaaagtgccccagatccgttatgccagcgtggagcgcctcttggaacgactgacagacttgcggtttcttagtattgatttcctcaacacctttctgcacacctatcgtattttcactactgccgctgtggtgctggggaaactctccgacatatacaagaggcctttcacctccatccctgtcaggtcattggaattgttttttgctaccagccagaacaacagaggtgaacatttggtggatggcaaatccccacgtctgtgtcgcaaattctcttccccgccaccactggctgtgtccagaacatcttccccagtgagggccagaaagctgtctttgacttctcccttgaactcaaagataggagcattggacctgacaacttccagcagtcccaccaccaccacccagagtcccgctgcgtctccaccaccacacactggtcagataccactggatctcagcagaggcctctcttctccagagcaaagcccgggaacggtagaagagaatgtcgataacccacgcgtggatctgtgtaacaagctaaaacgaagtattcaaaaagcagtcctagagtctgcaccagcggaccgagcaggagtggaaagctcccctgcagcggacaccacagaactttcaccttgcagatccccctcaactcctcggcacctccgctatcgacagcctggaggacagacggcggacaatgcccactgctctgtttcaccggcttctgcttttgcaatagccacagctgcagcaggacatgggagtccaccaggctttaacaacaccgagagaacatgtgataaagagtttattatacggagaacggctaccaatcgagttctgaacgtcctccgtcactgggtctcaaagcacgcacaggatttcgaactcaacaatgaactaaagatgaatgtcctaaatttgctagaagaagttttgcgagacccagaccttcttccccaagaaaggaaagccgccgcgaatatcctcagggccctttcacaagatgaccaagatgacatccacctaaaattagaggatataattcaaatgactgactgcatgaaggccgaatgctttgagtccttgtcggccatggagctggcagaacagatcaccctcctggaccatgtcattttcagaagcattccctacgaggagtttcttgggcaggggtggatgaagctggataaaaacgaaagaactccttacattatgaaaaccagccaacacttcaatgacatgagtaacctggtggcctcccagataatgaactatgctgatgtcagctcccgtgccaacgccatcgagaaatgggtggcagtggcggacatctgccgatgcctgcacaactacaacggcgtgctggagatcacctcggccttaaacagaagtgccatctacaggctgaagaaaacctgggccaaggtctctaagcagacaaaagctctaatggacaaacttcaaaagactgtttcctctgaaggaagatttaaaaatcttagagaaacccttaaaaattgtaaccctcctgcagttccttatcttgggatgtacttgacagacctggcatttattgaagaaggaacaccaaactttactgaggaaggccttgtcaatttctccaaaatgagaatgatatcacacatcatcagagagatacgccagttccagcagacttcctacagaatagatcatcagccaaaggtcgcacagtacttgcttgacaaagaccttatcatagatgaagatacgctatatgagctgtcactaaaaattgaacctcgactccctgcttgaagatctggccttgcccctgagtccacgggatgttcatggaaagcaggacagacagaattgtgtatgccttgcctatcacggtacagcacgaagccaggctcctttctccaccaaagaagatggaaccagactggaattctgtctccagagagaaacccagctgtttgggtcaaagacagatgcttcagacttgggtgggaaggtgaaagatggctatttagaaagctggtggcacgttttacataagggaatgtcagatgggagatgctagttgccattttaacaaagcaggtaaatcggtaaattttaaactctgtccatgttctgttagaactcagggacaaggatccatgaaaaagacctgtgatgtttctctggcgctttactggcctgggcacacctaccaatcttctaggatttgactggttccattacatttccttttggtataagcttcacagaaaagctgacacttcctctacagagatggaccaaaacataagcaatttcagtctacagcatgtgcatggttgtcagtgcattctaaatatttctatgtgaggaatggtaccttctgaaactgcctttccagtctttaggcaatgggataggaaagaaagaatgaaacacaaatggatttgtatgtaacatttccttaattaaatgcagtaggctgtgccccagaggattccagacagtggctggctgaggtgggtggggagcttttccttgagactgttggtcctaagaagccagcccttttggagaggcagctgcaaaaaggtgcacgcccatctcaccgacaaaactgtggaacagaaggccaccaagtgctgtggggaatcatgggtttcagtgctgagtgaaaatctatacctaaaaatcatctctgcaccttgctttgtttgttttctttccccactcatagtactgcaggaatctattctcatttacacagacctttttttaggcttactatgaacattggctgtattttttttaaacagtttagtgaaattttcttttcaaaacccacacttccatatgctgttcgtagatctctttctttaaaaactgatgttgagagatctctgagaatattataagtgcatgggaaatgggcccaaccaccgaacagctcttacattacaaaaccaaatgcaagggttagtcctgctacctgaggctggggaagtgaccttccttttcccaagattgtcagttgttgaagaaatagggctatctcattgtttacctccctcttctcttctcagggagactgctgctttaaaagaaggaagagaaaaaatatagttctatttccctgaacctgttgcacctgacattttctcttagcagcatgaaacttattgatgctgacaatgaaaaatggatctgtctggctgctttccctctttccttgcactttaattatgttgctagagctaacagactaataaattccacctgctggctcttaagactcagtgaaagagctagcattggtaatgcaccatagaggtagagaatgtacactttctgcacggtaagtgccatctctgtatgtaactatatagtgaaatatcaactaagtaaaagaaaatataatatttgaagaccattcccaaaatattttcaatagttcatattagccaacagtgtagcactcaacccaaggagggttccttatggatgctttctttttcttttttaaagttgcttgtttgttctctttagtttcaaataagaggttgacgcatcttgatgcatgatgagaagcatgggctgtttggatcctaacaacgcataacttgtgatttatttctcagtgctccagaaactgagggtttgaaataatatgtatcagttgcaccaaacacctcaaggtcttgcagaagaaaagtaaaggttagctttcatggctcaaaagcatagtcctgaagggtgaactaaaaccgggacaaatctgtgagaggaccacacacatactagtttcgggccaaacaacacgtggaaaggtgcatgcattctactctgccttggagttgccagagtccttcagagggaaagggatggttctgtgtgcactttttctggaagttcggactcatttctttgacccaaatgttccagagacactgcagccattcttattaacaaaaaataagacaggagtttccaaatgctccttcccttttggatcgcagcttttcttcaactagtgacaaagcttttgcgcctatttcctgcaggatgttggaactgccccgcactggtcatattaggcactgtcaattgctatgctgacttttagggggtttttgtttgtttgaaaaacagggtctcaccatgttgcccaggctggtctcgaactcctggactcaagcaatcttcctgcctcagcctctcaagcagctgggactgcaggggtgtgccactcactagcctttcgcatttttgtttgagaattacaccactttctggagtctgcagccttcctggagctgcaagagggcaagagagagagctccacctctgagggagtgtctgttgatgacctgcactattcgtgtgccagctgggagaggaatgcacattttaaaatcccttcaatttggtcaaattaaaaatccccaagagcaatttgcagtgttttttctggtcgttaaagtacccatcctcttctgcctacacacaaagcatgcattcccagctgcatctgcctctagtccattatggagacccatttctaagaggagatgggaggtcaacctctaacagccaagtagcgaacatgtatactgtaaaattaacctagaaaatcagaagaaaaatccaatttcatgctttcgaatgaatgcccacattttgtactgtcaacgaaattatcttggagcttttaggggatgccttttcgttattaactgagacatctagttttgctacagggacaaatctcttacctaatccaatatattatttgacagattcaggcatgaagtaaaacgtcgtcacttttccttagtgcttttctgaaggaatttaaagacggaattttaaacggccattgcaatattttcaagtggctctcataccaagtcccattactgtttgttaaatttcagtacgtcttaaagtactacttataaacaaatgaaactcagagaaactgaatcacctggaagagaaaaatccattatggtcccatgtggagtgaataatgatggatcagcaccctttctctcatgttattgtataagacgagacttttgggccagcagcgattgggcagcttttaaattcttaactgaaaagagtaatgcaatacagggattattcccaataaaattaacttttatttaaaagcaagagattttacttagcttttttttttcaaagtttgattttatccccttgaaaaaaaatctcttcactttaaagtataaaggtttttaaaaatccaattgcaaaatgtattatttttacaactatcgaaaaggcataaaagagaacatactatttatggctgaagggtatagccaggctaatgtgcacagagggaatcaataaataaaactctttttcatttcagtaagaaatcagattgtaagtttaatggctccattatagataccaccgtgtaatagaagacttaagtcaatgaaatctaatcagtgtgtcatttctcagcggccattggtgacttaaaattaagatgaggcagagccaaaatggaaaacagtcattttgttgtaggtataaacacatgaacgattcagaaaattattcatctcagctgccatgcagcatgacattaacattaggattgatagcactagtctgatctgctcaaggaaaataatagttctattatacttaatgatgttggtttttacacagctcatttcatttttcactagaaagccagttatgaaagagagctggcctaggcatcccggccctgagtcctaggcccagtctccaactggaaaaccttaggctggtgtttacacatccctgagcctcagtttcctcatctgcaaaacggtgtgaatagtaatccctgtgctgcttatctcacagggctattgtgaggaccaaatggattagactgtaaactgcaaagtgctgtccgcacatgaggtcatctgattactgtcctcagatctcttttgtagaggatttcaatgtatttctttatcatttgagtgtgtgtgtgatggacgaatatgtgtgtgagtttgagaagcatatcgttcgtgtccagttactttgcaaatttgtggacatttgtgattggacagaggggtttgtgctgtggcctaacacttgccaagtgaggtgtaggttatgcctatatgcaaattaaacttcacctttcttgaa

SEQ ID NO: 174364 - DNA, 3837 bp, Homo sapiens
  Payload ID: 14221
  Gene Symbol: RASGRF2
  Gene Name: Ras protein-specific guanine nucleotide-releasing factor 2
  ENST ID: ENST00000503795
  CDS Start-End: 51-3506
gaggcaggggtgagaccggcggccacccgtgagccctccgcacccgcaccatgcagaagagcgtgcgctacaacgaggggcacgccctgtacctggcctttctggcgcgcaaggagggcaccaagcgcggcttcctgagtaagaagacggccgaggcgagccgctggcacgagaagtggttcgccctctaccagaatgtgctcttctacttcgagggcgagcagagctgccgcccggcgggcatgtacctcctggagggctgcagctgcgaacgaacgcccgcgccacccagggccggcgccgggcagggaggcgtccgagacgcgctggacaagcagtattactttactgttctttttggccatgaaggtcagaagccactggagctgcgctgtgaggaggagcaggatggtaaagagtggatggaggccattcaccaagccagttatgcagacattttgattgagagggaagtattaatgcagaagtacattcatctagttcagatcgtagagacagaaaaaattgcagctaaccaactccgacatcaacttgaagatcaagacacagaaatcgaaaggcttaaatcagagattattgctcttaataaaaccaaagaacgaatgcgaccttaccaaagcaaccaagaagacgaagatccagacatcaagaagattaaaaaggttcagagcttcatgcgaggatggttgtgcagaaggaaatggaagaccatcgtgcaggattacatttgttctcctcatgctgaaagtatgaggaagagaaaccagattgtgttcaccatggtggaggcagagtcagagtacgttcaccagctctacatcctggtcaatggctttctccggcccctgcgtatggccgccagctccaagaagccccccatcagccacgacgacgtcagcagtatttttcttaacagtgaaacaatcatgtttcttcatgaaatatttcatcaaggactaaaggcaaggatagcaaactggcccactttaattttagctgatctgtttgatattttgctccccatgctgaacatttatcaagaatttgtgcgtaatcaccagtacagcctgcaagttctcgccaattgtaagcaaaacagagattttgacaaactcttaaaacagtatgaagccaatccagcctgtgaggggaggatgctggagacattcttgacctatcccatgtttcagatccccagatatatcatcacactccatgagctccttgctcacacaccccatgagcatgtggaaaggaaaagcctggagtttgccaaatcaaagctagaggaactatccagagtaatgcacgatgaagtcagcgacactgaaaacataaggaaaaaccttgccatcgaaagaatgatcgtggagggctgtgacatcttgctggacaccagccaaacgttcatccgccaaggttctcttattcaagtaccttccgttgagagggggaaacttagtaaagttcgcctgggttcgttgtctttgaaaaaggaaggagagagacaatgcttcttatttacaaaacactttttaatatgtacaagaagttcaggagggaagcttcatctgctcaagacaggtggggttctgtctctaatagactgcacattgattgaggagccagatgcaagcgatgatgactctaaaggttctgggcaagtgtttgggcacctggattttaaaatagtggtggagcctcctgacgctgccgccttcactgttgtcttgttagcaccctcacgccaggagaaagctgcctggatgagtgacatcagtcagtgtgtggacaatatacgatgtaatggtttaatgactatagtgtttgaagagaattccaaagtcactgtgccacatatgattaagtctgatgcccgtcttcataaagacgacactgacatttgcttcagtaaaacactcaactcctgcaaagtgccccagatccgttatgccagcgtggagcgcctcttggaacgactgacagacttgcggtttcttagtattgatttcctcaacacctttctgcacacctatcgtattttcactactgccgctgtggtgctggggaaactctccgacatatacaagaggcctttcacctccatccctgtcaggtcattggaattgttttttgctaccagccagaacaacagaggtgaacatttggtggatggcaaatccccacgtctgtgtcgcaaattctcttccccgccaccactggctgtgtccagaacatcttccccagtgagggccagaaagctgtctttgacttctcccttgaactcaaagataggagcattggacctgacaacttccagcagtcccaccaccaccacccagagtcccgctgcgtctccaccaccacacactggtcagataccactggatctcagcagaggcctctcttctccagagcaaagcccgggaacggtagaagagaatgtcgataacccacgcgtggatctgtgtaacaagctaaaacgaagtattcaaaaagcagtcctagagtctgcaccagcggaccgagcaggagtggaaagctcccctgcagcggacaccacagaactttcaccttgcagatccccctcaactcctcggcacctccgctatcgacagcctggaggacagacggcggacaatgcccactgctctgtttcaccggcttctgcttttgcaatagccacagctgcagcaggacatgggagtccaccaggctttaacaacaccgagagaacatgtgataaagagtttattatacggagaacggctaccaatcgagttctgaacgtcctccgtcactgggtctcaaagcacgcacaggatttcgaactcaacaatgaactaaagatgaatgtcctaaatttgctagaagaagttttgcgagacccagaccttcttccccaagaaaggaaagccgccgcgaatatcctcagggccctttcacaagatgaccaagatgacatccacctaaaattagaggatataattcaaatgactgactgcatgaaggccgaatgctttgagtccttgtcggccatggagctggcagaacagatcaccctcctggaccatgtcattttcagaagcattccctacgaggagtttcttgggcaggggtggatgaagctggataaaaacgaaagaactccttacattatgaaaaccagccaacacttcaatgacatgagtaacctggtggcctcccagataatgaactatgctgatgtcagctcccgtgccaacgccatcgagaaatgggtggcagtggcggacatctgccgatgcctgcacaactacaacggcgtgctggagatcacctcggccttaaacagaagtgccatctacaggctgaagaaaacctgggccaaggtctctaagcagacaaaagctctaatggacaaacttcaaaagactgtttcctctgaaggaagatttaaaaatcttagagaaacccttaaaaattcatcaaggctgaatacttgatttaaagagttgtaaccctcctgcagttccttatcttgggatgtacttgacagacctggcatttattgaagaaggaacaccaaactttactgaggaaggccttgtcaatttctccaaaatgagaatgatatcacacatcatcagagagatacgccagttccagcagacttcctacagaatagatcatcagccaaaggtcgcacagtacttgcttgacaaagaccttatcatagatgaagatacgctatatgagctgtcactaaaaattgaacctcgactccctgcttgaagatctggccttgcccctgagtccacgggatgttcatggaaa

SEQ ID NO: 174365 - DNA, 7440 bp, Homo sapiens
  Payload ID: 14222
  Gene Symbol: RREB1
  Gene Name: ras responsive element binding protein 1
  Uniprot ID: Q92766
  ENST ID: ENST00000349384
  CDS Start-End: 315-5378
atgccagggagccaagcgtcctgcccggccgttgctccgactgtgtgttccaggagtggtggctctgaggtgtgaccctgcccacgtttgggcccagccaggttcagccccccaataaggagggcagcttgataacacaaagaaaacagtgtcaacgagtactaccaagagaagaagacaagaggtcaacacagactcattttctactccgtgtgaatgatagctacagcaggggaaagtttcatagtctatcagtgggtcagaaaatggagttttatagcagaggcttcttagaagcttaaacccctgtcccaatgacgtcaagttcgcccgctggcttggaaggttcagacctatcttccatcaacaccatgatgtcggcggtcatgagtgtagggaaggtcacagagaatggcgggagcccccaggggatcaagtccccctcgaagcctccaggaccaaatcggattggcagaaggaaccaggaaacgaaagaggagaagtcttcctataactgccccctgtgtgagaagatttgcactacccagcaccagctgaccatgcacattcgccagcacaacacagacactggaggagccgaccactcatgcagcatctgcggaaagtcactgagctcggccagctccctcgatcgccacatgctggtgcactctggcgagaggccttacaagtgcactgtgtgtggccagtcatttaccaccaatgggaacatgcacagacatatgaagatccatgagaaggaccctaacagtgccacagccacagcccctccatctcctctgaaacgtaggcgattgtcctccaagaggaaactgagtcacgatgccgagtcagagagagaagacccagcaccagctaaaaagatggtagaagacgggcagtcaggtgacttggagaagaaagctgatgaagtctttcactgcccagtatgtttcaaggagtttgtttgcaagtatggactggagacccacatggagacccattcagataacccactaagatgtgacatttgttgtgtcacctttcgaacacatcgaggactgctgcgtcacaacgcgcttgtccacaaacaacttcccagggatgcaatgggcagacctttcatacagaacaacccttcaattcctgctggcttccacgacttaggattcacggacttctcctgtaggaagtttcctcgcatttctcaggcctggtgcgaaacaaacctgcggaggtgcatcagcgagcaacaccgttttgtctgcgacacctgtgacaaggcgttccccatgctctgctcactggctctgcacaagcagacccatgtggcggcagaccagggtcaagaaaagccgcaggccacgcccctgcctggtgacgccctggaccagaagggcttcctggccttgcttggcctgcagcacaccaaagacgtcaggcctgcccccgccgaggagcccctgccggatgacaaccaggcaattcagctccagacactcaagtgtcagctacctcaggaccccggctgcaccaacctgctgagcctgtcacctttcgaagctgcttccctaggcggttctctcacagttctccccgcgaccaaggacagcataaagcacctgtccctgcagcccttccagaagggcttcatcatccagcctgacagcagcattgtggtcaagcccatctctggcgagtcggccatcgagctggcagacatccagcaaattctgaagatggcagcctcggctccccctcagatcagtcttccgcccttctccaaggcccctgccgccccactgcaggcgatcttcaagcacatgccccctctgaagccaaagcccctggtcacaccacggacggtggtggccacctccacgcccccgcctctcatcaacgcccagcaggcttccccgggctgtatcagccccagcctgccgccaccgcccctgaagctcctcaaaggctcagtggaggcggcctccaacgcccacctgctgcagtccaagtccgggacccagccccacgcggccacgcggctctccctgcagcagccgcgggcggagctgccgggccagcctgagatgaagacgcagctggagcaggacagcatcatcgaggccctgctgccgctgagcatggaggccaagatcaagcaggagatcacagagggggaactcaaggccttcatgacagcgcccggcggcaagaagacgcccgccatgcgcaaggtgctctacccctgccgcttctgcaaccaggtgtttgccttctcgggggtcttgcgtgcccacgtgcgctcccacctgggcatctcgccataccagtgcaacatctgcgactacatcgccgccgacaaggccgcgctcatccgccacctgcgcacgcacagtggggagcggccctacatttgcaagatctgccactaccccttcactgtcaaagccaactgcgagcggcacctgcgcaagaagcacctcaaggccacccgcaaggatatcgagaagaacatcgagtatgtgagtagcagcgcggccgagctggtggacgccttctgcgccccggacaccgtgtgccggctgtgcggcgaggacctcaagcactatcgtgccctgcgcatccacatgcgcacgcactgcggccgcggcctgggcgggggccacaagggccgcaagcccttcgagtgcaaggagtgcagcgccgcgttcgcggccaagcgcaactgcatccaccacatcctcaagcagcacctgcacgtgcccgagcaggacatcgagagctacgtgctggccgccgacggcctgggccccgcagaggcgccggccgctgaggcgtcggggcgcggggaggacagtggctgcgctgcccttggtgactgcaagcccctcactgccttcctggaaccccagaacggctttcttcacaggggccccacccagcctccacctccccatgtctcgatcaagttggagcccgccagtagctttgcggtggacttcaatgagcccctggacttctcgcagaagggcctggccctggtccaagtgaagcaggaaaacatctcctttctgagcccttcttccctggtcccctatgactgctccatggagcccatcgacctgtccatccccaagaacttcaggaaaggggacaaggatttggccactcccagcgaagccaagaagcctgaggaggaggcggggagcagcgagcagccctctccctgcccagcacccggcccttctcttcctgtaactttggggcccagcggaatcctggaaagccccatggcccctgctccggcggccaccccggaacccccagcacagcccctgcagggccctgttcagctggcggtcccaatctactcctcagccctggtcagcagccctccactcgtgggcagctcagccctcctgagtggcacagccttgctgcgtccactgcggcccaagcccccgctgcttttgccaaagccccccgtgacagaagagctgcccccgctggcctccattgcccagatcatctcatctgtatcctcggcccccaccctgctgaaaaccaaggtggcggacccagggcccgcaagcactggcagtaacaccacggcttcagacagcttaggaggttctgtccccaaagccgccaccaccgccacccccgctgccaccaccagcccaaaagagtctagtgagcctcccgctccagccagcagcccagaggctgcctctcccaccgagcagggcccagcgggcacgtcgaagaagaggggccggaaaagggggatgaggagccgaccccgcgccaacagcggcggggtggacctggactccagcggggagtttgccagcatcgagaagatgctggccaccacagacaccaacaagttcagtccgtttctgcagacagcggaggacaacactcaggatgaggtggccggagcccctgccgaccaccatgggcccagtgatgaagagcagggcagtcccccagaagacaagctgctgagggccaagcggaactcgtacaccaactgcctgcagaagatcacctgtccccactgtccccgggttttcccttgggccagctccctacagaggcacatgctcacacacactgacagtcagtcggatgcggagactgcagccgccgcgggcgaagtgctagacctcacctcacgggacagagagcagccgtcggagggcgccactgagctccgccaggtcgcaggggatgcgcctgtggagcaggccacggcggaaacggcctcgccggtgcaccgggaagagcacgggcgtggggagagccatgagccggaggaggagcatggcactgaggagagcactggggacgccgacggcgcggaagaggacgcgtcgagcaaccagagcctggacctggacttcgccaccaagctcatggacttcaagctggcggagggcgacggcgaggcaggcgccgggggcgcggcctcgcaggagcagaagctcgcctgcgacacctgtgggaagagcttcaagttcctgggcaccctgagccgccaccggaaggcgcacggccgccaggagcccaaggacgagaagggagatggcgccagcactgcagaggaggggccccagcccgcccctgaacaggaggagaagccccccgagaccccggcagaggtggtggagtcggccccgggtgccggggaggccccggcggaaaagctcgcggaggagacggagggcccctccgacggggagagcgcggccgagaaaaggtcctcagagaagagcgacgatgacaagaaaccaaagacagactcccccaaaagcgtggccagcaaggcagacaagaggaagaaggtctgcagcgtgtgcaacaagcggttctggtcgctgcaggacctgacccggcacatgcgctcccacacaggggaaaggccatacaaatgtcagacctgcgagcgaaccttcaccttgaagcacagcctggttcgccaccagcggatccaccagaaagccaggcatgccaaacaccacgggaaggacagcgacaaggaagagcggggtgaggaggacagcgagaatgagtccacccacagcggcaacaacgccgtctcagagaacgaggctgagctggctcccaatgccagcaaccacatggctgtcacccggagccggaaggagggcttggccagtgccaccaaggactgcagccacagggaggagaaggtcacggcagggtggccgtctgagcctggccagggtgaccttaacccagagagcccggcggccctggggcaggacctgctggagccgcgcagcaagaggcctgcccacccaatcctggccacagctgatggcgcctcccagctcgtggggatggagtgacagcctcagtccccctcagcacagacaaaagccagcagagcaaagcgtctatacttcatggggtttcctcagtgccctttggctgttgaggagtgagagagagagagagagagagagagagagagagagagagagacaagcaggagcgtggctgctcgctcagtgccatagccttaccgcagcctgcgcgggaggccacagcccgtgccgattccagtgccttaactacttaccggatccctccatattatcatgggtgttgtatttttccaaaatgacttcttaaacaaaacaaatattataatgaattgtctggagaggacctcttcatttgagcattagcgttattttgtattggtgtgtgtgagcttgttcttgtgaatctgtgatagcaccgtttgttctgtgagctggaaacagaaggaaaaaacatacccttgggtacccatagccaataactggaagaaaatgatgtgaatttcatgtaaatgaccagaggaaagatggataagatgataatttcttaaatagacattttccttttttctttgtgcttcatggtggagctgtcatctggtccttggtattacaggatgtggttgatgaaggtttccaatatggtttcaggccaaaaccagggaagattctagcttcagcctcatgtccatttccagtctgtcagcattagacatggtcactgttcaagtttcaagacatccattcttaactatagagaagagttactcccctggcgtcttaacctatggaaaacatgcacggataggatatatttgattgcctcctcttccctttcagtatatgtattattaatattattattattattattattattagttcatcagtttgctgttctctgcagtgagcagaatcaaatgggcaatatttgtcctgggagacctgtgccgcacccaggtccccgtgttaacgtgtgcctgcggttgtggttggcaccctcgggtggtagctcttctactgtaatgagacaagcctttcttctgtcactgcagaatttagaaggggccgtgagcagtcttcccaagcatggtccaggagcagctcagagagggtggagtgaggatgcatgcatccagggaacaggcatcaagaagccagggccgtgcctggagcactgcagagatgactttggagaaagcaaagcagtgacccagtgaccaggcacattactcgtgagcgaggtattcccagtcttcctgctaagcctaatccaagccttacccagctgtgctactgtcatttgcaaagcaaggaaatactactactggtaataaaactacacatgcaagatgtcagataagaaataggtttatatttaccttcctgcgatgtggggttggtgcttgaagataaatgtgctgtttctagtttcttaaatagcccacacccctggatgcaaaaaggcagggttatttttacccatgagcatcctgtgcaggcaatagacttccctcactgtctccgcctgcagggaggagaatgtaccccactgcacctgagctcctggtccctcagccaagacctcaggggtccccagccagcctgctgctggggacccctgtgcttgctgcagtgtatggagcctcttgccttcccctggggaggcacccctgtaccccagcttccttcccctggccttttctggccccagtgctcctcctttacatagacttgttcacacagaaacgtgcacgcccccttttctccgccacttcaccagtttctgaaatccaacctcccagacttcacaggaagatagatattcttgagataatgaaaagtgatatcttcgcatacgaaaggaaaaaaggttgaggtatatatgatttttaactgtattaggggtgtatgaaccagtttaaaaacgaggttttatttactgtagagatgaatgcaaatcagaaccaatgatcccttggcctacttagttaaaaccagttcatacatcccttagggtttttattattattattattattattacagttgttattgttgtttttgttgttattattatttgggg

SEQ ID NO: 174366 - DNA, 5789 bp, Homo sapiens
  Payload ID: 14222
  Gene Symbol: RREB1
  Gene Name: ras responsive element binding protein 1
  Uniprot ID: Q92766
  ENST ID: ENST00000334984
  CDS Start-End: 315-4745
atgccagggagccaagcgtcctgcccggccgttgctccgactgtgtgttccaggagtggtggctctgaggtgtgaccctgcccacgtttgggcccagccaggttcagccccccaataaggagggcagcttgataacacaaagaaaacagtgtcaacgagtactaccaagagaagaagacaagaggtcaacacagactcattttctactccgtgtgaatgatagctacagcaggggaaagtttcatagtctatcagtgggtcagaaaatggagttttatagcagaggcttcttagaagcttaaacccctgtcccaatgacgtcaagttcgcccgctggcttggaaggttcagacctatcttccatcaacaccatgatgtcggcggtcatgagtgtagggaaggtcacagagaatggcgggagcccccaggggatcaagtccccctcgaagcctccaggaccaaatcggattggcagaaggaaccaggaaacgaaagaggagaagtcttcctataactgccccctgtgtgagaagatttgcactacccagcaccagctgaccatgcacattcgccagcacaacacagacactggaggagccgaccactcatgcagcatctgcggaaagtcactgagctcggccagctccctcgatcgccacatgctggtgcactctggcgagaggccttacaagtgcactgtgtgtggccagtcatttaccaccaatgggaacatgcacagacatatgaagatccatgagaaggaccctaacagtgccacagccacagcccctccatctcctctgaaacgtaggcgattgtcctccaagaggaaactgagtcacgatgccgagtcagagagagaagacccagcaccagctaaaaagatggtagaagacgggcagtcaggtgacttggagaagaaagctgatgaagtctttcactgcccagtatgtttcaaggagtttgtttgcaagtatggactggagacccacatggagacccattcagataacccactaagatgtgacatttgttgtgtcacctttcgaacacatcgaggactgctgcgtcacaacgcgcttgtccacaaacaacttcccagggatgcaatgggcagacctttcatacagaacaacccttcaattcctgctggcttccacgacttaggattcacggacttctcctgtaggaagtttcctcgcatttctcaggcctggtgcgaaacaaacctgcggaggtgcatcagcgagcaacaccgttttgtctgcgacacctgtgacaaggcgttccccatgctctgctcactggctctgcacaagcagacccatgtggcggcagaccagggtcaagaaaagccgcaggccacgcccctgcctggtgacgccctggaccagaagggcttcctggccttgcttggcctgcagcacaccaaagacgtcaggcctgcccccgccgaggagcccctgccggatgacaaccaggcaattcagctccagacactcaagtgtcagctacctcaggaccccggctgcaccaacctgctgagcctgtcacctttcgaagctgcttccctaggcggttctctcacagttctccccgcgaccaaggacagcataaagcacctgtccctgcagcccttccagaagggcttcatcatccagcctgacagcagcattgtggtcaagcccatctctggcgagtcggccatcgagctggcagacatccagcaaattctgaagatggcagcctcggctccccctcagatcagtcttccgcccttctccaaggcccctgccgccccactgcaggcgatcttcaagcacatgccccctctgaagccaaagcccctggtcacaccacggacggtggtggccacctccacgcccccgcctctcatcaacgcccagcaggcttccccgggctgtatcagccccagcctgccgccaccgcccctgaagctcctcaaaggctcagtggaggcggcctccaacgcccacctgctgcagtccaagtccgggacccagccccacgcggccacgcggctctccctgcagcagccgcgggcggagctgccgggccagcctgagatgaagacgcagctggagcaggacagcatcatcgaggccctgctgccgctgagcatggaggccaagatcaagcaggagatcacagagggggaactcaaggccttcatgacagcgcccggcggcaagaagacgcccgccatgcgcaaggtgctctacccctgccgcttctgcaaccaggtgtttgccttctcgggggtcttgcgtgcccacgtgcgctcccacctgggcatctcgccataccagtgcaacatctgcgactacatcgccgccgacaaggccgcgctcatccgccacctgcgcacgcacagtggggagcggccctacatttgcaagatctgccactaccccttcactgtcaaagccaactgcgagcggcacctgcgcaagaagcacctcaaggccacccgcaaggatatcgagaagaacatcgagtatgtgagtagcagcgcggccgagctggtggacgccttctgcgccccggacaccgtgtgccggctgtgcggcgaggacctcaagcactatcgtgccctgcgcatccacatgcgcacgcactgcggccgcggcctgggcgggggccacaagggccgcaagcccttcgagtgcaaggagtgcagcgccgcgttcgcggccaagcgcaactgcatccaccacatcctcaagcagcacctgcacgtgcccgagcaggacatcgagagctacgtgctggccgccgacggcctgggccccgcagaggcgccggccgctgaggcgtcggggcgcggggaggacagtggctgcgctgcccttggtgactgcaagcccctcactgccttcctggaaccccagaacggctttcttcacaggggccccacccagcctccacctccccatgtctcgatcaagttggagcccgccagtagctttgcggtggacttcaatgagcccctggacttctcgcagaagggcctggccctggtccaagtgaagcaggaaaacatctcctttctgagcccttcttccctggtcccctatgactgctccatggagcccatcgacctgtccatccccaagaacttcaggaaaggggacaaggatttggccactcccagcgaagccaagaagcctgaggaggaggcggggagcagcgagcagccctctccctgcccagcacccggcccttctcttcctgtaactttggggcccagcggaatcctggaaagccccatggcccctgctccggcggccaccccggaacccccagcacagcccctgcagggccctgttcagctggcggtcccaatctactcctcagccctggtcagcagccctccactcgtgggcagctcagccctcctgagtggcacagccttgctgcgtccactgcggcccaagcccccgctgcttttgccaaagccccccgtgacagaagagctgcccccgctggcctccattgcccagatcatctcatctgtatcctcggcccccaccctgctgaaaaccaaggtggcggacccagggcccgcaagcactggcagtaacaccacggcttcagacagcttaggaggttctgtccccaaagccgccaccaccgccacccccgctgccaccaccagcccaaaagagtctagtgagcctcccgctccagccagcagcccagaggctgcctctcccaccgagcagggcccagcgggcacgtcgaagaagaggggccggaaaagggggatgaggagccgaccccgcgccaacagcggcggggtggacctggactccagcggggagtttgccagcatcgagaagatgctggccaccacagacaccaacaagttcagtccgtttctgcagacagcggaggacaacactcaggatgaggtggccggagcccctgccgaccaccatgggcccagtgatgaagagcagggcagtcccccagaagacaagctgctgagggccaagcggaactcgtacaccaactgcctgcagaagatcacctgtccccactgtccccgggttttcccttgggccagctccctacagaggcacatgctcacacacactggtcagaaacccttcccttgtcaaaaatgcgatgccttcttttctaccaaatctaactgtgaacgccaccagttgcgcaaacacggagttaccacctgttccctgagaagaaacgggcttatcccccagtcaaaagagagtgatgttggatcccatgatagcacaggggaaaggccatacaaatgtcagacctgcgagcgaaccttcaccttgaagcacagcctggttcgccaccagcggatccaccagaaagccaggcatgccaaacaccacgggaaggacagcgacaaggaagagcggggtgaggaggacagcgagaatgagtccacccacagcggcaacaacgccgtctcagagaacgaggctgagctggctcccaatgccagcaaccacatggctgtcacccggagccggaaggagggcttggccagtgccaccaaggactgcagccacagggaggagaaggtcacggcagggtggccgtctgagcctggccagggtgaccttaacccagagagcccggcggccctggggcaggacctgctggagccgcgcagcaagaggcctgcccacccaatcctggccacagctgatggcgcctcccagctcgtggggatggagtgacagcctcagtccccctcagcacagacaaaagccagcagagcaaagcgtctatacttcatggggtttcctcagtgccctttggctgttgaggagtgagagagagagagagagagagagagagagagagagagagagacaagcaggagcgtggctgctcgctcagtgccatagccttaccgcagcctgcgcgggaggccacagcccgtgccgattccagtgccttaactacttaccggatccctccatattatcatgggtgttgtatttttccaaaatgacttcttaaacaaaacaaatattataatgaattgtctggagaggacctcttcatttgagcattagcgttattttgtattggtgtgtgtgagcttgttcttgtgaatctgtgatagcaccgtttgttctgtgagctggaaacagaaggaaaaaacatacccttgggtacccatagccaataactggaagaaaatgatgtgaatttcatgtaaatgaccagaggaaagatggataagatgataatttcttaaatagacattttccttttttctttgtgcttcatggtggagctgtcatctggtccttggtattacaggatgtggttgatgaaggtttccaatatggtttcaggccaaaaccagggaagattctagcttcagcctcatgtccatttccagtctgtcagcattagacatggtcactgttcaagtttcaagacatccattcttaactatagagaagagttactcccctggcgtcttaacctatggaaaacatgcacggataggatatatttgattgcctcctcttccctttcagtatatgtattattaatattattattattattattattattagttcatcagtttgctgttctctgcagtgagcagaatcaaatgggcaatatttgtcctgggagacctgtgccgcacccaggtccccgtgttaacgtgtgcctgcggttgtggttggcaccctcgggtggtagctcttctactgtaatgagacaagcctttcttctgtcactgcagaatttagaagggg

SEQ ID NO: 174367 - DNA, 5826 bp, Homo sapiens
  Payload ID: 14222
  Gene Symbol: RREB1
  Gene Name: ras responsive element binding protein 1
  Uniprot ID: Q92766
  ENST ID: ENST00000379933
  CDS Start-End: 457-5520
cgggatggcaactgcggtcaccctgctaaagtcggggcgggggcggcggtcctccccctcaccccccccagtccgagcgccgccgccgccgccgccgccgccgccgcggccgctcagtaacacgtccccaggagactcgcaggagcaacacgtgatgtgtctacttatcagggttgctccgactgtgtgttccaggagtggtggctctgaggtgtgaccctgcccacgtttgggcccagccaggttcagccccccaataaggagggcagcttgataacacaaagaaaacagtgtcaacgagtactaccaagagaagaagacaagaggtcaacacagactcattttctactccgtgtgaatgatagctacagcaggggaaagtttcatagtctatcagtgggtcagaaaatggagttttatagcagaggcttcttagaagcttaaacccctgtcccaatgacgtcaagttcgcccgctggcttggaaggttcagacctatcttccatcaacaccatgatgtcggcggtcatgagtgtagggaaggtcacagagaatggcgggagcccccaggggatcaagtccccctcgaagcctccaggaccaaatcggattggcagaaggaaccaggaaacgaaagaggagaagtcttcctataactgccccctgtgtgagaagatttgcactacccagcaccagctgaccatgcacattcgccagcacaacacagacactggaggagccgaccactcatgcagcatctgcggaaagtcactgagctcggccagctccctcgatcgccacatgctggtgcactctggcgagaggccttacaagtgcactgtgtgtggccagtcatttaccaccaatgggaacatgcacagacatatgaagatccatgagaaggaccctaacagtgccacagccacagcccctccatctcctctgaaacgtaggcgattgtcctccaagaggaaactgagtcacgatgccgagtcagagagagaagacccagcaccagctaaaaagatggtagaagacgggcagtcaggtgacttggagaagaaagctgatgaagtctttcactgcccagtatgtttcaaggagtttgtttgcaagtatggactggagacccacatggagacccattcagataacccactaagatgtgacatttgttgtgtcacctttcgaacacatcgaggactgctgcgtcacaacgcgcttgtccacaaacaacttcccagggatgcaatgggcagacctttcatacagaacaacccttcaattcctgctggcttccacgacttaggattcacggacttctcctgtaggaagtttcctcgcatttctcaggcctggtgcgaaacaaacctgcggaggtgcatcagcgagcaacaccgttttgtctgcgacacctgtgacaaggcgttccccatgctctgctcactggctctgcacaagcagacccatgtggcggcagaccagggtcaagaaaagccgcaggccacgcccctgcctggtgacgccctggaccagaagggcttcctggccttgcttggcctgcagcacaccaaagacgtcaggcctgcccccgccgaggagcccctgccggatgacaaccaggcaattcagctccagacactcaagtgtcagctacctcaggaccccggctgcaccaacctgctgagcctgtcacctttcgaagctgcttccctaggcggttctctcacagttctccccgcgaccaaggacagcataaagcacctgtccctgcagcccttccagaagggcttcatcatccagcctgacagcagcattgtggtcaagcccatctctggcgagtcggccatcgagctggcagacatccagcaaattctgaagatggcagcctcggctccccctcagatcagtcttccgcccttctccaaggcccctgccgccccactgcaggcgatcttcaagcacatgccccctctgaagccaaagcccctggtcacaccacggacggtggtggccacctccacgcccccgcctctcatcaacgcccagcaggcttccccgggctgtatcagccccagcctgccgccaccgcccctgaagctcctcaaaggctcagtggaggcggcctccaacgcccacctgctgcagtccaagtccgggacccagccccacgcggccacgcggctctccctgcagcagccgcgggcggagctgccgggccagcctgagatgaagacgcagctggagcaggacagcatcatcgaggccctgctgccgctgagcatggaggccaagatcaagcaggagatcacagagggggaactcaaggccttcatgacagcgcccggcggcaagaagacgcccgccatgcgcaaggtgctctacccctgccgcttctgcaaccaggtgtttgccttctcgggggtcttgcgtgcccacgtgcgctcccacctgggcatctcgccataccagtgcaacatctgcgactacatcgccgccgacaaggccgcgctcatccgccacctgcgcacgcacagtggggagcggccctacatttgcaagatctgccactaccccttcactgtcaaagccaactgcgagcggcacctgcgcaagaagcacctcaaggccacccgcaaggatatcgagaagaacatcgagtatgtgagtagcagcgcggccgagctggtggacgccttctgcgccccggacaccgtgtgccggctgtgcggcgaggacctcaagcactatcgtgccctgcgcatccacatgcgcacgcactgcggccgcggcctgggcgggggccacaagggccgcaagcccttcgagtgcaaggagtgcagcgccgcgttcgcggccaagcgcaactgcatccaccacatcctcaagcagcacctgcacgtgcccgagcaggacatcgagagctacgtgctggccgccgacggcctgggccccgcagaggcgccggccgctgaggcgtcggggcgcggggaggacagtggctgcgctgcccttggtgactgcaagcccctcactgccttcctggaaccccagaacggctttcttcacaggggccccacccagcctccacctccccatgtctcgatcaagttggagcccgccagtagctttgcggtggacttcaatgagcccctggacttctcgcagaagggcctggccctggtccaagtgaagcaggaaaacatctcctttctgagcccttcttccctggtcccctatgactgctccatggagcccatcgacctgtccatccccaagaacttcaggaaaggggacaaggatttggccactcccagcgaagccaagaagcctgaggaggaggcggggagcagcgagcagccctctccctgcccagcacccggcccttctcttcctgtaactttggggcccagcggaatcctggaaagccccatggcccctgctccggcggccaccccggaacccccagcacagcccctgcagggccctgttcagctggcggtcccaatctactcctcagccctggtcagcagccctccactcgtgggcagctcagccctcctgagtggcacagccttgctgcgtccactgcggcccaagcccccgctgcttttgccaaagccccccgtgacagaagagctgcccccgctggcctccattgcccagatcatctcatctgtatcctcggcccccaccctgctgaaaaccaaggtggcggacccagggcccgcaagcactggcagtaacaccacggcttcagacagcttaggaggttctgtccccaaagccgccaccaccgccacccccgctgccaccaccagcccaaaagagtctagtgagcctcccgctccagccagcagcccagaggctgcctctcccaccgagcagggcccagcgggcacgtcgaagaagaggggccggaaaagggggatgaggagccgaccccgcgccaacagcggcggggtggacctggactccagcggggagtttgccagcatcgagaagatgctggccaccacagacaccaacaagttcagtccgtttctgcagacagcggaggacaacactcaggatgaggtggccggagcccctgccgaccaccatgggcccagtgatgaagagcagggcagtcccccagaagacaagctgctgagggccaagcggaactcgtacaccaactgcctgcagaagatcacctgtccccactgtccccgggttttcccttgggccagctccctacagaggcacatgctcacacacactgacagtcagtcggatgcggagactgcagccgccgcgggcgaagtgctagacctcacctcacgggacagagagcagccgtcggagggcgccactgagctccgccaggtcgcaggggatgcgcctgtggagcaggccacggcggaaacggcctcgccggtgcaccgggaagagcacgggcgtggggagagccatgagccggaggaggagcatggcactgaggagagcactggggacgccgacggcgcggaagaggacgcgtcgagcaaccagagcctggacctggacttcgccaccaagctcatggacttcaagctggcggagggcgacggcgaggcaggcgccgggggcgcggcctcgcaggagcagaagctcgcctgcgacacctgtgggaagagcttcaagttcctgggcaccctgagccgccaccggaaggcgcacggccgccaggagcccaaggacgagaagggagatggcgccagcactgcagaggaggggccccagcccgcccctgaacaggaggagaagccccccgagaccccggcagaggtggtggagtcggccccgggtgccggggaggccccggcggaaaagctcgcggaggagacggagggcccctccgacggggagagcgcggccgagaaaaggtcctcagagaagagcgacgatgacaagaaaccaaagacagactcccccaaaagcgtggccagcaaggcagacaagaggaagaaggtctgcagcgtgtgcaacaagcggttctggtcgctgcaggacctgacccggcacatgcgctcccacacaggggaaaggccatacaaatgtcagacctgcgagcgaaccttcaccttgaagcacagcctggttcgccaccagcggatccaccagaaagccaggcatgccaaacaccacgggaaggacagcgacaaggaagagcggggtgaggaggacagcgagaatgagtccacccacagcggcaacaacgccgtctcagagaacgaggctgagctggctcccaatgccagcaaccacatggctgtcacccggagccggaaggagggcttggccagtgccaccaaggactgcagccacagggaggagaaggtcacggcagggtggccgtctgagcctggccagggtgaccttaacccagagagcccggcggccctggggcaggacctgctggagccgcgcagcaagaggcctgcccacccaatcctggccacagctgatggcgcctcccagctcgtggggatggagtgacagcctcagtccccctcagcacagacaaaagccagcagagcaaagcgtctatacttcatggggtttcctcagtgccctttggctgttgaggagtgagagagagagagagagagagagagagagagagagagagagacaagcaggagcgtggctgctcgctcagtgccatagccttaccgcagcctgcgcgggaggccacagcccgtgccgattccagtgccttaactacttaccggatccctccatattatcatgggtgttgtatttttccaaaatgacttcttaaacaaaacaaatattataatg

SEQ ID NO: 174368 - DNA, 8778 bp, Homo sapiens
  Payload ID: 14222
  Gene Symbol: RREB1
  Gene Name: ras responsive element binding protein 1
  Uniprot ID: Q92766
  ENST ID: ENST00000379938
  CDS Start-End: 538-5766
gaagctgggcggggggccgagacgggggccgggacgacggctggggcgccggggtcgccagctcctcgcccacctccctccctgtgggagaagaggaggaggggaagtgactgcggagttgatgaactttgcacatccagaaacgccattttgattccttttccggaacaagtttgcatctctcctcggtctctccctgaagcccaccggtccccaacgcatcatgccagggagccaagcgtcctgcccggccgttgctccgactgtgtgttccaggagtggtggctctgaggtgtgaccctgcccacgtttgggcccagccaggttcagccccccaataaggagggcagcttgataacacaaagaaaacagtgtcaacgagtactaccaagagaagaagacaagaggtcaacacagactcattttctactccgtgtgaatgatagctacagcaggggaaagtttcatagtctatcagtgggtcagaaaatggagttttatagcagaggcttcttagaagcttaaacccctgtcccaatgacgtcaagttcgcccgctggcttggaaggttcagacctatcttccatcaacaccatgatgtcggcggtcatgagtgtagggaaggtcacagagaatggcgggagcccccaggggatcaagtccccctcgaagcctccaggaccaaatcggattggcagaaggaaccaggaaacgaaagaggagaagtcttcctataactgccccctgtgtgagaagatttgcactacccagcaccagctgaccatgcacattcgccagcacaacacagacactggaggagccgaccactcatgcagcatctgcggaaagtcactgagctcggccagctccctcgatcgccacatgctggtgcactctggcgagaggccttacaagtgcactgtgtgtggccagtcatttaccaccaatgggaacatgcacagacatatgaagatccatgagaaggaccctaacagtgccacagccacagcccctccatctcctctgaaacgtaggcgattgtcctccaagaggaaactgagtcacgatgccgagtcagagagagaagacccagcaccagctaaaaagatggtagaagacgggcagtcaggtgacttggagaagaaagctgatgaagtctttcactgcccagtatgtttcaaggagtttgtttgcaagtatggactggagacccacatggagacccattcagataacccactaagatgtgacatttgttgtgtcacctttcgaacacatcgaggactgctgcgtcacaacgcgcttgtccacaaacaacttcccagggatgcaatgggcagacctttcatacagaacaacccttcaattcctgctggcttccacgacttaggattcacggacttctcctgtaggaagtttcctcgcatttctcaggcctggtgcgaaacaaacctgcggaggtgcatcagcgagcaacaccgttttgtctgcgacacctgtgacaaggcgttccccatgctctgctcactggctctgcacaagcagacccatgtggcggcagaccagggtcaagaaaagccgcaggccacgcccctgcctggtgacgccctggaccagaagggcttcctggccttgcttggcctgcagcacaccaaagacgtcaggcctgcccccgccgaggagcccctgccggatgacaaccaggcaattcagctccagacactcaagtgtcagctacctcaggaccccggctgcaccaacctgctgagcctgtcacctttcgaagctgcttccctaggcggttctctcacagttctccccgcgaccaaggacagcataaagcacctgtccctgcagcccttccagaagggcttcatcatccagcctgacagcagcattgtggtcaagcccatctctggcgagtcggccatcgagctggcagacatccagcaaattctgaagatggcagcctcggctccccctcagatcagtcttccgcccttctccaaggcccctgccgccccactgcaggcgatcttcaagcacatgccccctctgaagccaaagcccctggtcacaccacggacggtggtggccacctccacgcccccgcctctcatcaacgcccagcaggcttccccgggctgtatcagccccagcctgccgccaccgcccctgaagctcctcaaaggctcagtggaggcggcctccaacgcccacctgctgcagtccaagtccgggacccagccccacgcggccacgcggctctccctgcagcagccgcgggcggagctgccgggccagcctgagatgaagacgcagctggagcaggacagcatcatcgaggccctgctgccgctgagcatggaggccaagatcaagcaggagatcacagagggggaactcaaggccttcatgacagcgcccggcggcaagaagacgcccgccatgcgcaaggtgctctacccctgccgcttctgcaaccaggtgtttgccttctcgggggtcttgcgtgcccacgtgcgctcccacctgggcatctcgccataccagtgcaacatctgcgactacatcgccgccgacaaggccgcgctcatccgccacctgcgcacgcacagtggggagcggccctacatttgcaagatctgccactaccccttcactgtcaaagccaactgcgagcggcacctgcgcaagaagcacctcaaggccacccgcaaggatatcgagaagaacatcgagtatgtgagtagcagcgcggccgagctggtggacgccttctgcgccccggacaccgtgtgccggctgtgcggcgaggacctcaagcactatcgtgccctgcgcatccacatgcgcacgcactgcggccgcggcctgggcgggggccacaagggccgcaagcccttcgagtgcaaggagtgcagcgccgcgttcgcggccaagcgcaactgcatccaccacatcctcaagcagcacctgcacgtgcccgagcaggacatcgagagctacgtgctggccgccgacggcctgggccccgcagaggcgccggccgctgaggcgtcggggcgcggggaggacagtggctgcgctgcccttggtgactgcaagcccctcactgccttcctggaaccccagaacggctttcttcacaggggccccacccagcctccacctccccatgtctcgatcaagttggagcccgccagtagctttgcggtggacttcaatgagcccctggacttctcgcagaagggcctggccctggtccaagtgaagcaggaaaacatctcctttctgagcccttcttccctggtcccctatgactgctccatggagcccatcgacctgtccatccccaagaacttcaggaaaggggacaaggatttggccactcccagcgaagccaagaagcctgaggaggaggcggggagcagcgagcagccctctccctgcccagcacccggcccttctcttcctgtaactttggggcccagcggaatcctggaaagccccatggcccctgctccggcggccaccccggaacccccagcacagcccctgcagggccctgttcagctggcggtcccaatctactcctcagccctggtcagcagccctccactcgtgggcagctcagccctcctgagtggcacagccttgctgcgtccactgcggcccaagcccccgctgcttttgccaaagccccccgtgacagaagagctgcccccgctggcctccattgcccagatcatctcatctgtatcctcggcccccaccctgctgaaaaccaaggtggcggacccagggcccgcaagcactggcagtaacaccacggcttcagacagcttaggaggttctgtccccaaagccgccaccaccgccacccccgctgccaccaccagcccaaaagagtctagtgagcctcccgctccagccagcagcccagaggctgcctctcccaccgagcagggcccagcgggcacgtcgaagaagaggggccggaaaagggggatgaggagccgaccccgcgccaacagcggcggggtggacctggactccagcggggagtttgccagcatcgagaagatgctggccaccacagacaccaacaagttcagtccgtttctgcagacagcggaggacaacactcaggatgaggtggccggagcccctgccgaccaccatgggcccagtgatgaagagcagggcagtcccccagaagacaagctgctgagggccaagcggaactcgtacaccaactgcctgcagaagatcacctgtccccactgtccccgggttttcccttgggccagctccctacagaggcacatgctcacacacactggtcagaaacccttcccttgtcaaaaatgcgatgccttcttttctaccaaatctaactgtgaacgccaccagttgcgcaaacacggagttaccacctgttccctgagaagaaacgggcttatcccccagtcaaaagagagtgatgttggatcccatgatagcacagacagtcagtcggatgcggagactgcagccgccgcgggcgaagtgctagacctcacctcacgggacagagagcagccgtcggagggcgccactgagctccgccaggtcgcaggggatgcgcctgtggagcaggccacggcggaaacggcctcgccggtgcaccgggaagagcacgggcgtggggagagccatgagccggaggaggagcatggcactgaggagagcactggggacgccgacggcgcggaagaggacgcgtcgagcaaccagagcctggacctggacttcgccaccaagctcatggacttcaagctggcggagggcgacggcgaggcaggcgccgggggcgcggcctcgcaggagcagaagctcgcctgcgacacctgtgggaagagcttcaagttcctgggcaccctgagccgccaccggaaggcgcacggccgccaggagcccaaggacgagaagggagatggcgccagcactgcagaggaggggccccagcccgcccctgaacaggaggagaagccccccgagaccccggcagaggtggtggagtcggccccgggtgccggggaggccccggcggaaaagctcgcggaggagacggagggcccctccgacggggagagcgcggccgagaaaaggtcctcagagaagagcgacgatgacaagaaaccaaagacagactcccccaaaagcgtggccagcaaggcagacaagaggaagaaggtctgcagcgtgtgcaacaagcggttctggtcgctgcaggacctgacccggcacatgcgctcccacacaggggaaaggccatacaaatgtcagacctgcgagcgaaccttcaccttgaagcacagcctggttcgccaccagcggatccaccagaaagccaggcatgccaaacaccacgggaaggacagcgacaaggaagagcggggtgaggaggacagcgagaatgagtccacccacagcggcaacaacgccgtctcagagaacgaggctgagctggctcccaatgccagcaaccacatggctgtcacccggagccggaaggagggcttggccagtgccaccaaggactgcagccacagggaggagaaggtcacggcagggtggccgtctgagcctggccagggtgaccttaacccagagagcccggcggccctggggcaggacctgctggagccgcgcagcaagaggcctgcccacccaatcctggccacagctgatggcgcctcccagctcgtggggatggagtgacagcctcagtccccctcagcacagacaaaagccagcagagcaaagcgtctatacttcatggggtttcctcagtgccctttggctgttgaggagtgagagagagagagagagagagagagagagagagagagagagacaagcaggagcgtggctgctcgctcagtgccatagccttaccgcagcctgcgcgggaggccacagcccgtgccgattccagtgccttaactacttaccggatccctccatattatcatgggtgttgtatttttccaaaatgacttcttaaacaaaacaaatattataatgaattgtctggagaggacctcttcatttgagcattagcgttattttgtattggtgtgtgtgagcttgttcttgtgaatctgtgatagcaccgtttgttctgtgagctggaaacagaaggaaaaaacatacccttgggtacccatagccaataactggaagaaaatgatgtgaatttcatgtaaatgaccagaggaaagatggataagatgataatttcttaaatagacattttccttttttctttgtgcttcatggtggagctgtcatctggtccttggtattacaggatgtggttgatgaaggtttccaatatggtttcaggccaaaaccagggaagattctagcttcagcctcatgtccatttccagtctgtcagcattagacatggtcactgttcaagtttcaagacatccattcttaactatagagaagagttactcccctggcgtcttaacctatggaaaacatgcacggataggatatatttgattgcctcctcttccctttcagtatatgtattattaatattattattattattattattattagttcatcagtttgctgttctctgcagtgagcagaatcaaatgggcaatatttgtcctgggagacctgtgccgcacccaggtccccgtgttaacgtgtgcctgcggttgtggttggcaccctcgggtggtagctcttctactgtaatgagacaagcctttcttctgtcactgcagaatttagaaggggccgtgagcagtcttcccaagcatggtccaggagcagctcagagagggtggagtgaggatgcatgcatccagggaacaggcatcaagaagccagggccgtgcctggagcactgcagagatgactttggagaaagcaaagcagtgacccagtgaccaggcacattactcgtgagcgaggtattcccagtcttcctgctaagcctaatccaagccttacccagctgtgctactgtcatttgcaaagcaaggaaatactactactggtaataaaactacacatgcaagatgtcagataagaaataggtttatatttaccttcctgcgatgtggggttggtgcttgaagataaatgtgctgtttctagtttcttaaatagcccacacccctggatgcaaaaaggcagggttatttttacccatgagcatcctgtgcaggcaatagacttccctcactgtctccgcctgcagggaggagaatgtaccccactgcacctgagctcctggtccctcagccaagacctcaggggtccccagccagcctgctgctggggacccctgtgcttgctgcagtgtatggagcctcttgccttcccctggggaggcacccctgtaccccagcttccttcccctggccttttctggccccagtgctcctcctttacatagacttgttcacacagaaacgtgcacgcccccttttctccgccacttcaccagtttctgaaatccaacctcccagacttcacaggaagatagatattcttgagataatgaaaagtgatatcttcgcatacgaaaggaaaaaaggttgaggtatatatgatttttaactgtattaggggtgtatgaaccagtttaaaaacgaggttttatttactgtagagatgaatgcaaatcagaaccaatgatcccttggcctacttagttaaaaccagttcatacatcccttagggtttttattattattattattattattacagttgttattgttgtttttgttgttattattatttggggtttcttgtgttttttctttgcgactctccacactaaacttgcaatattgtggggagaagctgtgactaaactctacgctgcggtgagatgtagcagtaatcagctcccagcgacgtgtgtagctggggctgccgctcgcaataatcactattgatttaaagctttacttagccttgatctgtaccctcgtagtcaataaggtcttgccacattttattagtgaggtggagaaacgtattatttgtttgttgtttttgcccttcccccaccccccaatattaaactgtgaaatttgtgatttgtttaaactctgggtgaatcatagcttagtttgcatgtccagctaatttgtttctatacattttgtttgattctctttctccttctctcagggcttttacaaaaaaatatatatatatggatcttctgaaaagttttttgaggtgcaagttttttctcttttttttttttttttttttttctcattgattaatggacatgatgctgagattcaatcactacatgaaacacctggctgtgaaaacaaaacaacccagagggctgtgttccaagcagcgctggggaagctacgtaacagtcggatgccagttttggaagattcaccatgcgttctgaccctctgttcgtctctttcctctcctctttcttcaagaaggaaattgatcctagtgatttcagcccatgcattaaacaggaaacaataataaatttgtagaattcatatttttctaaagggaacttaaaaactgctgctacatgttatgtacaaaactggtttatgccacatgaacagagaatcacaagtttggttttggtactttttgttcctctttgtattcagttgtatagaacttccaaattcagaatgagaagaaagctgttctgtatcaaaccatttaagcaataaatgttatattttaaaagctgca

SEQ ID NO: 174369 - DNA, 2833 bp, Homo sapiens
  Payload ID: 14222
  Gene Symbol: RREB1
  Gene Name: ras responsive element binding protein 1
  ENST ID: ENST00000483150
  CDS Start-End: 500-2833
ttcagacacctgagagcatcctgttctgggtacagtgtgtgtatgtatatgtttgtttgaagccgctggtcctcgccttttactccttagctggacagcgggttcgggatctgccccatgactaaggctgaagtggaaagttgcgaagatagaacaagagttgttccttagggtggtgtccctaaacttgaaagtggacttggtcctgctcgcaggttgctccgactgtgtgttccaggagtggtggctctgaggtgtgaccctgcccacgtttgggcccagccaggttcagccccccaataaggagggcagcttgataacacaaagaaaacagtgtcaacgagtactaccaagagaagaagacaagaggtcaacacagactcattttctactccgtgtgaatgatagctacagcaggggaaagtttcatagtctatcagtgggtcagaaaatggagttttatagcagaggcttcttagaagcttaaacccctgtcccaatgacgtcaagttcgcccgctggcttggaaggttcagacctatcttccatcaacaccatgatgtcggcggtcatgagtgtagggaaggtcacagagaatggcgggagcccccaggggatcaagtccccctcgaagcctccaggaccaaatcggattggcagaaggaaccaggaaacgaaagaggagaagtcttcctataactgccccctgtgtgagaagatttgcactacccagcaccagctgaccatgcacattcgccagcacaacacagacactggaggagccgaccactcatgcagcatctgcggaaagtcactgagctcggccagctccctcgatcgccacatgctggtgcactctggcgagaggccttacaagtgcactgtgtgtggccagtcatttaccaccaatgggaacatgcacagacatatgaagatccatgagaaggaccctaacagtgccacagccacagcccctccatctcctctgaaacgtaggcgattgtcctccaagaggaaactgagtcacgatgccgagtcagagagagaagacccagcaccagctaaaaagatggtagaagacgggcagtcaggtgacttggagaagaaagctgatgaagtctttcactgcccagtatgtttcaaggagtttgtttgcaagtatggactggagacccacatggagacccattcagataacccactaagatgtgacatttgttgtgtcacctttcgaacacatcgaggactgctgcgtcacaacgcgcttgtccacaaacaacttcccagggatgcaatgggcagacctttcatacagaacaacccttcaattcctgctggcttccacgacttaggattcacggacttctcctgtaggaagtttcctcgcatttctcaggcctggtgcgaaacaaacctgcggaggtgcatcagcgagcaacaccgttttgtctgcgacacctgtgacaaggcgttccccatgctctgctcactggctctgcacaagcagacccatgtggcggcagaccagggtcaagaaaagccgcaggccacgcccctgcctggtgacgccctggaccagaagggcttcctggccttgcttggcctgcagcacaccaaagacgtcaggcctgcccccgccgaggagcccctgccggatgacaaccaggcaattcagctccagacactcaagtgtcagctacctcaggaccccggctgcaccaacctgctgagcctgtcacctttcgaagctgcttccctaggcggttctctcacagttctccccgcgaccaaggacagcataaagcacctgtccctgcagcccttccagaagggcttcatcatccagcctgacagcagcattgtggtcaagcccatctctggcgagtcggccatcgagctggcagacatccagcaaattctgaagatggcagcctcggctccccctcagatcagtcttccgcccttctccaaggcccctgccgccccactgcaggcgatcttcaagcacatgccccctctgaagccaaagcccctggtcacaccacggacggtggtggccacctccacgcccccgcctctcatcaacgcccagcaggcttccccgggctgtatcagccccagcctgccgccaccgcccctgaagctcctcaaaggctcagtggaggcggcctccaacgcccacctgctgcagtccaagtccgggacccagccccacgcggccacgcggctctccctgcagcagccgcgggcggagctgccgggccagcctgagatgaagacgcagctggagcaggacagcatcatcgaggccctgctgccgctgagcatggaggccaagatcaagcaggagatcacagagggggaactcaaggccttcatgacagcgcccggcggcaagaagacgcccgccatgcgcaaggtgctctacccctgccgcttctgcaaccaggtgtttgccttctcgggggtcttgcgtgcccacgtgcgctcccacctgggcatctcgccataccagtgcaacatctgcgactacatcgccgccgacaaggccgcgctcatccgccacctgcgcacgcacagtggggagcggccctacatttgcaagatctgccactaccccttcactgtcaaagccaactgcgagcggcacctgcgcaagaagcacctcaaggccacccgcaaggatatcgagaagaacatcgagtatgtgagtagcagcgcggccgagctggtggacgccttctgcgccccggacaccgtgtgccggctgtgcggcgaggacctcaagcactatcgtgccctgcgcatccacatgcgcacgcactgcggccgc

SEQ ID NO: 174370 - DNA, 1021 bp, Homo sapiens
  Payload ID: 14222
  Gene Symbol: RREB1
  Gene Name: ras responsive element binding protein 1
  ENST ID: ENST00000471433
  CDS Start-End: 529-1021
gggccgagacgggggccgggacgacggctggggcgccggggtcgccagctcctcgcccacctccctccctgtgggagaagaggaggaggggaagtgactgcggagttgatgaactttgcacatccagaaacgccattttgattccttttccggaacaagtttgcatctctcctcggtctctccctgaagcccaccggtccccaacgcatcatgccagggagccaagcgtcctgcccggccgtaagttgctccgactgtgtgttccaggagtggtggctctgaggtgtgaccctgcccacgtttgggcccagccaggttcagccccccaataaggagggcagcttgataacacaaagaaaacagtgtcaacgagtactaccaagagaagaagacaagaggtcaacacagactcattttctactccgtgtgaatgatagctacagcaggggaaagtttcatagtctatcagtgggtcagaaaatggagttttatagcagaggcttcttagaagcttaaacccctgtcccaatgacgtcaagttcgcccgctggcttggaaggttcagacctatcttccatcaacaccatgatgtcggcggtcatgagtgtagggaaggtcacagagaatggcgggagcccccaggggatcaagtccccctcgaagcctccaggaccaaatcggattggcagaaggaaccaggaaacgaaagaggagaagtcttcctataactgccccctgtgtgagaagatttgcactacccagcaccagctgaccatgcacattcgccagcacaacacagacactggaggagccgaccactcatgcagcatctgcggaaagtcactgagctcggccagctccctcgatcgccacatgctggtgcactctggcgagaggccttacaagtgcactgtgtgtggccagtcatttaccaccaatgggaacatgcacagacatatgaagatccatgagaaggaccctaacagtgccacagccacagcccctccatctcctctgaaac

SEQ ID NO: 174371 - DNA, 998 bp, Homo sapiens
  Payload ID: 14222
  Gene Symbol: RREB1
  Gene Name: ras responsive element binding protein 1
  ENST ID: ENST00000491191
  CDS Start-End: 590-998
gcgggcgaggaagctgggcggggggccgagacgggggccgggacgacggctggggcgccggggtcgccagctcctcgcccacctccctccctgtgggagaagaggaggaggggaagtgactgcggagttgatgaactttgcacatccagaaacgccattttgattccttttccggaacaagtttgcatctctcctcggtctctccctgaagcccaccggtccccaacgcatcatgccagggagccaagcgtcctgcccggccgttgctccgactgtgtgttccaggagtggtggctctgaggtgtgaccctgcccacgtttgggcccagccaggttcagccccccaataaggagggcagcttgataacacaaagaaaacagtgtcaacgagtactaccaagagaagaagacaagaggtcaacacagactcattttctactccgtgtgaatgatagctacagcaggggaaagtttcatagtctatcagtgggtcagaaaatggaggtaatcagcagtgtggcgggagggttcttctttccctcctaggttttatagcagaggcttcttagaagcttaaacccctgtcccaatgacgtcaagttcgcccgctggcttggaaggttcagacctatcttccatcaacaccatgatgtcggcggtcatgagtgtagggaaggtcacagagaatggcgggagcccccaggggatcaagtccccctcgaagcctccaggaccaaatcggattggcagaaggaaccaggaaacgaaagaggagaagtcttcctataactgccccctgtgtgagaagatttgcactacccagcaccagctgaccatgcacattcgccagcacaacacagacactggaggagccgaccactcatgcagcatctgcggaaagtcactgagctcggccagctccctcgatcgccacatgctggtgcactctggcgagaggccttacaagtgcactgtgtgtggccagtcatttaccacca

SEQ ID NO: 174372 - DNA, 243 bp, Homo sapiens
  Payload ID: 14222
  Gene Symbol: RREB1
  Gene Name: ras responsive element binding protein 1
  ENST ID: ENST00000467782
  CDS Start-End: 232-243
gcatcatgccagggagccaagcgtcctgcccggccgttgctccgactgtgtgttccaggagtggtggctctgaggtgtgaccctgcccacgtttgggcccagccaggttcagccccccaataaggagggcagcttgataacacaaagaaaacagtgtcaacgagtactaccaagagaagaagacaagagttttatagcagaggcttcttagaagcttaaacccctgtcccaatgacgtcaagt

SEQ ID NO: 174373 - DNA, 3563 bp, Homo sapiens
  Payload ID: 14222
  Gene Symbol: RREB1
  Gene Name: ras responsive element binding protein 1
  ENST ID: ENST00000611109
  CDS Start-End: 252-2519
gtggctgcgctgcccttggtgactgcaagcccctcactgccttcctggaaccccagaacggctttcttcacaggggccccacccagcctccacctccccatgtctcgatcaagttggagcccgccagtagctttgcggtggacttcaatgagcccctggacttctcgcagaagggcctggccctggtccaagtgaagcaggaaaacatctcctttctgagcccttcttccctggtcccctatgactgctccatggagcccatcgacctgtccatccccaagaacttcaggaaaggggacaaggatttggccactcccagcgaagccaagaagcctgaggaggaggcggggagcagcgagcagccctctccctgcccagcacccggcccttctcttcctgtaactttggggcccagcggaatcctggaaagccccatggcccctgctccggcggccaccccggaacccccagcacagcccctgcagggccctgttcagctggcggtcccaatctactcctcagccctggtcagcagccctccactcgtgggcagctcagccctcctgagtggcacagccttgctgcgtccactgcggcccaagcccccgctgcttttgccaaagccccccgtgacagaagagctgcccccgctggcctccattgcccagatcatctcatctgtatcctcggcccccaccctgctgaaaaccaaggtggcggacccagggcccgcaagcactggcagtaacaccacggcttcagacagcttaggaggttctgtccccaaagccgccaccaccgccacccccgctgccaccaccagcccaaaagagtctagtgagcctcccgctccagccagcagcccagaggctgcctctcccaccgagcagggcccagcgggcacgtcgaagaagaggggccggaaaagggggatgaggagccgaccccgcgccaacagcggcggggtggacctggactccagcggggagtttgccagcatcgagaagatgctggccaccacagacaccaacaagttcagtccgtttctgcagacagcggaggacaacactcaggatgaggtggccggagcccctgccgaccaccatgggcccagtgatgaagagcagggcagtcccccagaagacaagctgctgagggccaagcggaactcgtacaccaactgcctgcagaagatcacctgtccccactgtccccgggttttcccttgggccagctccctacagaggcacatgctcacacacactgacagtcagtcggatgcggagactgcagccgccgcgggcgaagtgctagacctcacctcacgggacagagagcagccgtcggagggcgccactgagctccgccaggtcgcaggggatgcgcctgtggagcaggccacggcggaaacggcctcgccggtgcaccgggaagagcacgggcgtggggagagccatgagccggaggaggagcatggcactgaggagagcactggggacgccgacggcggaagaggacgcgtcgagcaaccagagcctggacctggacttcgccaccaagctcatggacttcaagctggcggagggcgacggcgaggcagggccgggggcgcggcctcgcaggagcagaagctcgcctgcgacacctgtgggaagagcttcaagttcctgggcaccctgagccgccaccggaaggcgcacggccgccaggagcccaaggacgagaagggagatggcgccagcactgcagaggaggggccccagcccgcccctgaacaggaggagaagccccccgagaccccggcagaggtggtggagtcggccccgggtgccggggaggccccggcggaaaagctcgcggaggagacggagggcccctccgacggggagagcgcggccgagaaaaggtcctcagagaagagcgacgatgacaagaaaccaaagacagactcccccaaaagcgtggccagcaaggcagacaagaggaagaaggtctgcagcgtgtgcaacaagcggttctggtcgctgcaggacctgacccggcacatgcgctcccacacaggggaaaggccatacaaatgtcagacctgcgagcgaaccttcaccttgaagcacagcctggttcgccaccagcggatccaccagaaagccaggcatgccaaacaccacgggaaggacagcgacaaggaagagcggggtgaggaggacagcgagaatgagtccacccacagcggcaacaacgccgtctcagagaacgaggctgagctggctcccaatgccagcaaccacatggctgtcacccggagccggaaggagggcttggccagtgccaccaaggactgcagccacagggaggagaaggtcacggcagggtggccgtctgagcctggccagggtgaccttaacccagagagcccggcggccctggggcaggacctgctggagccgcgcagcaagaggcctgcccacccaatcctggccacagctgatggcgcctcccagctcgtggggatggagtgacagcctcagtccccctcagcacagacaaaagccagcagagcaaagcgtctatacttcatggggtttcctcagtgccctttggctgttgaggagtgagagagagagagagagagagagagagagagagagagagagacaagcaggagcgtggctgctcgctcagtgccatagccttaccgcagcctgcgcgggaggccacagcccgtgccgattccagtgccttaactacttaccggatccctccatattatcatgggtgttgtatttttccaaaatgacttcttaaacaaaacaaatattataatgaattgtctggagaggacctcttcatttgagcattagcgttattttgtattggtgtgtgtgagcttgttcttgtgaatctgtgatagcaccgtttgttctgtgagctggaaacagaaggaaaaaacatacccttgggtacccatagccaataactggaagaaaatgatgtgaatttcatgtaaatgaccagaggaaagatggataagatgataatttcttaaatagacattttccttttttctttgtgcttcatggtggagctgtcatctggtccttggtattacaggatgtggttgatgaaggtttccaatatggtttcaggccaaaaccagggaagattctagcttcagcctcatgtccatttccagtctgtcagcattagacatggtcactgttcaagtttcaagacatccattcttaactatagagaagagttactcccctggcgtcttaacctatggaaaacatgcacggataggatatatttgattgcctcctcttccctttcagtatatgtattattaatattattattattattattattattagttcatcagtttgctgttctctgcagtgagcagaatcaaatgggcaatatttgtcctgggagacctgtgccgcacccaggtccccgtgttaacgtgtgcctgcggttgtggttggcaccctcgggtggtagctcttctactgtaatgagacaagcctttcttctgtcactgcagaatttagaagggg

SEQ ID NO: 174374 - DNA, 3834 bp, Homo sapiens
  Payload ID: 14223
  Gene Symbol: RSU1
  Gene Name: Ras suppressor protein 1
  Uniprot ID: Q15404
  ENST ID: ENST00000345264
  CDS Start-End: 218-1051
gcctggccctggagacacgtctggagagctgttctcctaatatgggtagggtcgggcgtggagctggcagcggcgctgtgtgcgcctgcgcggggcgccgagacagggcgtgttcgctgttcagtgccggtgttgcagggagtgagggcagctggagtgcgttctgccgaagcttgtggttgcacgcccatcgtcttaggggctaccttccgtgaccatgtccaagtctctgaagaagttggtggaggagagccgggagaagaaccagcccgaggtggacatgagtgaccggggcatctccaacatgctggatgtcaacggcctctttaccttatcccatatcacacaactggtcctcagccataacaagctaacaatggtgccaccgaacatcgcagaactgaagaatttggaggtgctcaacttttttaataaccaaatcgaggagctgcccacacagatcagtagccttcagaaactcaaacacctgaaccttggcatgaacaggctgaacactttgccacgaggcttcggctccctgccagctcttgaggttctggacttgacgtacaacaacttgagcgaaaattctcttcctggaaacttcttctacctgaccaccctgcgtgcactctatctaagtgacaacgattttgaaatcctgccgccagatattgggaagctcacaaagttgcagatactcagccttagggataacgacctgatctcgctgcctaaggaaatcggggagcttacccagcttaaagagctccacattcaggggaaccgcctcaccgttctgcccccagaactaggaaacttggatttaactggccagaagcaggtattcaaagcagagaacaatccctgggtgacccccattgcagaccagttccagcttggcgtgtcccatgtttttgagtatatccgttctgagacatacaaatacctctacggcagacacatgcaggccaacccagaaccaccgaagaagaataatgacaaatcgaaaaagatcagccggaaacccctggcagccaagaacagataaggaagggattggcatcggctggccttccagcaccttctctctccaacacttcattctctcttgccctgtctctcaaataaacccaatgctgcgtgtgaggccttttttatttttcttttcactctctttctaatgcttcccaccttaccttttagattcttttgctaggtgggagattgttataaggtctttaaaccatttccatttgtttctttaacattaccaaaagcagggaacaaagctcttattcaactgcgaattccatagtgggctctggcttttcttgaatagatatcacaaggttgcttattatcaaaagaataattaaaatcatgtaaccatttaaatgtcactgttaacacttttcactctttctgttgattcacctaactcattattttgctttattaaaagtcttccttcaccaccgagatatgctaatttaacttacaaatgattttaataaaatcttgagtttgtatcacatgttacttattgactcagaataaaagaacagtctgatcttggggtataacacattttcatttacttttctcccccaaaatcatcttatccaattttattggttatacatgataaacttttcatgaaagaaatgcaaaattaaatcacagttcgtttcttctcacattaatttgtcaagttttttttttctttgaagactttctaaattaggaagcagaaaaacaaatctctaggagattctgccaaaggattttggaaagtagcattccttcgccgaagaaatggtgatttctgccaggggctggtagacaagaactgtgaaagagagagagaaaaaacctcaactgtgtattttgtcacggcggaaaatctgctcgcatcgaagcattcttctaagcgacttcgatgccaaggaagttgtgtaaatgtgcacgcgctacaccacacccagggtggaaaccacagttgcagagtcattaaacaatcaattgtttgtttaacatctgtgataggcagctttccttcttttcaacagtgatacctacgaaaatcaaaataaatgcaagctgaggttttgtgctcactgaaagggctgtcaaccccagaaggccgacacaaaaaaaatggtatgtgaagatgcaccgtcttttcaaatggcctgggagagtcaaatggcctgggagagggggcctgcccttctctgctgtgtcctttcggcttcccagttgagctcccaagaccaggacccactggggcatataaaatctctgctgtatcctttcggcttcccagttgagctcccaagaccaggacccactggggcatataaaaaagtcaaaaatcaaaatcaaacaacaagttctgagttacttaggaaacagacttcgcatttcaatcagagaggccacagagcaaggtctaaacttctggcttctagacaaattcctgatagaacatttaaatgtgggaagtggcttccccaggtcccatcccctgtttagggatagagttgatatcatttttataggtgccatgtatgcctctgcctgaatttttttaattgacttttgagcttttgagattgcacgagggagaacaaggcctttgctgttgtggataggaaagacttaacctaaaattaaaccagcaagaaagcattagtaaaaatctaacaatatgaagggctcttatgagtcatttttttcaaaagatgaaaactccagaaacgcacaggaacgaaatacctcccagaaacatgaagcaatcatcgaagactcactggtaatatttttaaaaagtatacagatcaaagcaaaaagaagccatgtgtaacaaagagaaatgtgcaaatattttttaaggcagtattaagtgcaagaggagtaacatgaaataaacattctttcacatggctactgggaatataaatttcgctccagaaaggccgtagcagtttgacgataggtggcaaaaccttaagattgtgtactggggcccagaatttttatttctaggaatgtatcctgaggaaattatccgagatccccacaaactgcaatgtttaggaattgtccttatagcattgcatacacaagaaaaacagagaaaagcctgatccctgtcagtggaaaaggggttcaatgaattacggtgtgtctgcatgaggcttttatgacattaaaaattgttgaacaacggccaggcacagtggctcatgcctgtaatcctaacactttgggaggccaaggtgggaagattgcctgagctcaggagtttgagaccagcctgggcaacacggtgaaaccccgtctctactaaaatacaaaaaattagccgggcgtcgcagcatgcgcctgtagtcccagctgctcaggaggctgaggcaggagaattgattgaacccgggaggcagaggttgcactgagctgagattaagccaccgcactccagcctgggcgacagagcaagattccgttcccaagaaaaaaaaattgttcaacaataagggcaaagggagagaatcataacatctgattaaacagaaaaagcaagatttttaaaactaactatataaggatggtcccagctgtgtcaaaaggaagcttgtttgtaatacgtgtgcataaaaattaaatagaggtgaacacaattattttaaggcagttaaattatctctgtattgtgaactaagactttctagaattttacttattcattctgtacttaaattttttctaatgaacacatatacttttgtaatcagaaaatattaaatgcatgtatttttcaaaatcaaa

SEQ ID NO: 174375 - DNA, 3919 bp, Homo sapiens
  Payload ID: 14223
  Gene Symbol: RSU1
  Gene Name: Ras suppressor protein 1
  Uniprot ID: Q15404
  ENST ID: ENST00000377921
  CDS Start-End: 303-1136
gggcagctggagtgcgttctgccgaagcttgtggttgcacgcccatcgtcttaggggctaccttccgtggtgagtgtgtgcggtgttgcacttggggttgcttctcgctgcgtggccgcagcggggctgaacccttcccactccatcccctccccgcacccggaccagcccctgggacgccctcggacgcccacccgctccaaccctggggaagcctcagagtggcagcgaaggcctcttgcctttccgcctctgcgcttgctgtcatcgcccacgtgctttgttgttgttcggtgcagaccatgtccaagtctctgaagaagttggtggaggagagccgggagaagaaccagcccgaggtggacatgagtgaccggggcatctccaacatgctggatgtcaacggcctctttaccttatcccatatcacacaactggtcctcagccataacaagctaacaatggtgccaccgaacatcgcagaactgaagaatttggaggtgctcaacttttttaataaccaaatcgaggagctgcccacacagatcagtagccttcagaaactcaaacacctgaaccttggcatgaacaggctgaacactttgccacgaggcttcggctccctgccagctcttgaggttctggacttgacgtacaacaacttgagcgaaaattctcttcctggaaacttcttctacctgaccaccctgcgtgcactctatctaagtgacaacgattttgaaatcctgccgccagatattgggaagctcacaaagttgcagatactcagccttagggataacgacctgatctcgctgcctaaggaaatcggggagcttacccagcttaaagagctccacattcaggggaaccgcctcaccgttctgcccccagaactaggaaacttggatttaactggccagaagcaggtattcaaagcagagaacaatccctgggtgacccccattgcagaccagttccagcttggcgtgtcccatgtttttgagtatatccgttctgagacatacaaatacctctacggcagacacatgcaggccaacccagaaccaccgaagaagaataatgacaaatcgaaaaagatcagccggaaacccctggcagccaagaacagataaggaagggattggcatcggctggccttccagcaccttctctctccaacacttcattctctcttgccctgtctctcaaataaacccaatgctgcgtgtgaggccttttttatttttcttttcactctctttctaatgcttcccaccttaccttttagattcttttgctaggtgggagattgttataaggtctttaaaccatttccatttgtttctttaacattaccaaaagcagggaacaaagctcttattcaactgcgaattccatagtgggctctggcttttcttgaatagatatcacaaggttgcttattatcaaaagaataattaaaatcatgtaaccatttaaatgtcactgttaacacttttcactctttctgttgattcacctaactcattattttgctttattaaaagtcttccttcaccaccgagatatgctaatttaacttacaaatgattttaataaaatcttgagtttgtatcacatgttacttattgactcagaataaaagaacagtctgatcttggggtataacacattttcatttacttttctcccccaaaatcatcttatccaattttattggttatacatgataaacttttcatgaaagaaatgcaaaattaaatcacagttcgtttcttctcacattaatttgtcaagttttttttttctttgaagactttctaaattaggaagcagaaaaacaaatctctaggagattctgccaaaggattttggaaagtagcattccttcgccgaagaaatggtgatttctgccaggggctggtagacaagaactgtgaaagagagagagaaaaaacctcaactgtgtattttgtcacggcggaaaatctgctcgcatcgaagcattcttctaagcgacttcgatgccaaggaagttgtgtaaatgtgcacgcgctacaccacacccagggtggaaaccacagttgcagagtcattaaacaatcaattgtttgtttaacatctgtgataggcagctttccttcttttcaacagtgatacctacgaaaatcaaaataaatgcaagctgaggttttgtgctcactgaaagggctgtcaaccccagaaggccgacacaaaaaaaatggtatgtgaagatgcaccgtcttttcaaatggcctgggagagtcaaatggcctgggagagggggcctgcccttctctgctgtgtcctttcggcttcccagttgagctcccaagaccaggacccactggggcatataaaatctctgctgtatcctttcggcttcccagttgagctcccaagaccaggacccactggggcatataaaaaagtcaaaaatcaaaatcaaacaacaagttctgagttacttaggaaacagacttcgcatttcaatcagagaggccacagagcaaggtctaaacttctggcttctagacaaattcctgatagaacatttaaatgtgggaagtggcttccccaggtcccatcccctgtttagggatagagttgatatcatttttataggtgccatgtatgcctctgcctgaatttttttaattgacttttgagcttttgagattgcacgagggagaacaaggcctttgctgttgtggataggaaagacttaacctaaaattaaaccagcaagaaagcattagtaaaaatctaacaatatgaagggctcttatgagtcatttttttcaaaagatgaaaactccagaaacgcacaggaacgaaatacctcccagaaacatgaagcaatcatcgaagactcactggtaatatttttaaaaagtatacagatcaaagcaaaaagaagccatgtgtaacaaagagaaatgtgcaaatattttttaaggcagtattaagtgcaagaggagtaacatgaaataaacattctttcacatggctactgggaatataaatttcgctccagaaaggccgtagcagtttgacgataggtggcaaaaccttaagattgtgtactggggcccagaatttttatttctaggaatgtatcctgaggaaattatccgagatccccacaaactgcaatgtttaggaattgtccttatagcattgcatacacaagaaaaacagagaaaagcctgatccctgtcagtggaaaaggggttcaatgaattacggtgtgtctgcatgaggcttttatgacattaaaaattgttgaacaacggccaggcacagtggctcatgcctgtaatcctaacactttgggaggccaaggtgggaagattgcctgagctcaggagtttgagaccagcctgggcaacacggtgaaaccccgtctctactaaaatacaaaaaattagccgggcgtcgcagcatgcgcctgtagtcccagctgctcaggaggctgaggcaggagaattgattgaacccgggaggcagaggttgcactgagctgagattaagccaccgcactccagcctgggcgacagagcaagattccgttcccaagaaaaaaaaattgttcaacaataagggcaaagggagagaatcataacatctgattaaacagaaaaagcaagatttttaaaactaactatataaggatggtcccagctgtgtcaaaaggaagcttgtttgtaatacgtgtgcataaaaattaaatagaggtgaacacaattattttaaggcagttaaattatctctgtattgtgaactaagactttctagaattttacttattcattctgtacttaaattttttctaatgaacacatatacttttgtaatcagaaaatattaaatgcatgtatttttcaaaatcaaa

SEQ ID NO: 174376 - DNA, 3639 bp, Homo sapiens
  Payload ID: 14223
  Gene Symbol: RSU1
  Gene Name: Ras suppressor protein 1
  Uniprot ID: Q15404
  ENST ID: ENST00000602389
  CDS Start-End: 191-865
gctgtgtgcgcctgcgcggggcgccgagacagggcgtgttcgctgttcagtgccggtgttgcagggagtgagggcagctggagtgcgttctgccgaagcttgtggttgcacgcccatcgtcttaggggctaccttccgtgttaccttatcccatatcacacaactggtcctcagccataacaagctaacaatggtgccaccgaacatcgcagaactgaagaatttggaggtgctcaacttttttaataaccaaatcgaggagctgcccacacagatcagtagccttcagaaactcaaacacctgaaccttggcatgaacaggctgaacactttgccacgaggcttcggctccctgccagctcttgaggttctggacttgacgtacaacaacttgagcgaaaattctcttcctggaaacttcttctacctgaccaccctgcgtgcactctatctaagtgacaacgattttgaaatcctgccgccagatattgggaagctcacaaagttgcagatactcagccttagggataacgacctgatctcgctgcctaaggaaatcggggagcttacccagcttaaagagctccacattcaggggaaccgcctcaccgttctgcccccagaactaggaaacttggatttaactggccagaagcaggtattcaaagcagagaacaatccctgggtgacccccattgcagaccagttccagcttggcgtgtcccatgtttttgagtatatccgttctgagacatacaaatacctctacggcagacacatgcaggccaacccagaaccaccgaagaagaataatgacaaatcgaaaaagatcagccggaaacccctggcagccaagaacagataaggaagggattggcatcggctggccttccagcaccttctctctccaacacttcattctctcttgccctgtctctcaaataaacccaatgctgcgtgtgaggccttttttatttttcttttcactctctttctaatgcttcccaccttaccttttagattcttttgctaggtgggagattgttataaggtctttaaaccatttccatttgtttctttaacattaccaaaagcagggaacaaagctcttattcaactgcgaattccatagtgggctctggcttttcttgaatagatatcacaaggttgcttattatcaaaagaataattaaaatcatgtaaccatttaaatgtcactgttaacacttttcactctttctgttgattcacctaactcattattttgctttattaaaagtcttccttcaccaccgagatatgctaatttaacttacaaatgattttaataaaatcttgagtttgtatcacatgttacttattgactcagaataaaagaacagtctgatcttggggtataacacattttcatttacttttctcccccaaaatcatcttatccaattttattggttatacatgataaacttttcatgaaagaaatgcaaaattaaatcacagttcgtttcttctcacattaatttgtcaagttttttttttctttgaagactttctaaattaggaagcagaaaaacaaatctctaggagattctgccaaaggattttggaaagtagcattccttcgccgaagaaatggtgatttctgccaggggctggtagacaagaactgtgaaagagagagagaaaaaacctcaactgtgtattttgtcacggcggaaaatctgctcgcatcgaagcattcttctaagcgacttcgatgccaaggaagttgtgtaaatgtgcacgcgctacaccacacccagggtggaaaccacagttgcagagtcattaaacaatcaattgtttgtttaacatctgtgataggcagctttccttcttttcaacagtgatacctacgaaaatcaaaataaatgcaagctgaggttttgtgctcactgaaagggctgtcaaccccagaaggccgacacaaaaaaaatggtatgtgaagatgcaccgtcttttcaaatggcctgggagagtcaaatggcctgggagagggggcctgcccttctctgctgtgtcctttcggcttcccagttgagctcccaagaccaggacccactggggcatataaaatctctgctgtatcctttcggcttcccagttgagctcccaagaccaggacccactggggcatataaaaaagtcaaaaatcaaaatcaaacaacaagttctgagttacttaggaaacagacttcgcatttcaatcagagaggccacagagcaaggtctaaacttctggcttctagacaaattcctgatagaacatttaaatgtgggaagtggcttccccaggtcccatcccctgtttagggatagagttgatatcatttttataggtgccatgtatgcctctgcctgaatttttttaattgacttttgagcttttgagattgcacgagggagaacaaggcctttgctgttgtggataggaaagacttaacctaaaattaaaccagcaagaaagcattagtaaaaatctaacaatatgaagggctcttatgagtcatttttttcaaaagatgaaaactccagaaacgcacaggaacgaaatacctcccagaaacatgaagcaatcatcgaagactcactggtaatatttttaaaaagtatacagatcaaagcaaaaagaagccatgtgtaacaaagagaaatgtgcaaatattttttaaggcagtattaagtgcaagaggagtaacatgaaataaacattctttcacatggctactgggaatataaatttcgctccagaaaggccgtagcagtttgacgataggtggcaaaaccttaagattgtgtactggggcccagaatttttatttctaggaatgtatcctgaggaaattatccgagatccccacaaactgcaatgtttaggaattgtccttatagcattgcatacacaagaaaaacagagaaaagcctgatccctgtcagtggaaaaggggttcaatgaattacggtgtgtctgcatgaggcttttatgacattaaaaattgttgaacaacggccaggcacagtggctcatgcctgtaatcctaacactttgggaggccaaggtgggaagattgcctgagctcaggagtttgagaccagcctgggcaacacggtgaaaccccgtctctactaaaatacaaaaaattagccgggcgtcgcagcatgcgcctgtagtcccagctgctcaggaggctgaggcaggagaattgattgaacccgggaggcagaggttgcactgagctgagattaagccaccgcactccagcctgggcgacagagcaagattccgttcccaagaaaaaaaaattgttcaacaataagggcaaagggagagaatcataacatctgattaaacagaaaaagcaagatttttaaaactaactatataaggatggtcccagctgtgtcaaaaggaagcttgtttgtaatacgtgtgcataaaaattaaatagaggtgaacacaattattttaaggcagttaaattatctctgtattgtgaactaagactttctagaattttacttattcattctgtacttaaattttttctaatgaacacatatacttttgtaatcagaaaatattaaatgcatgtatttttc

SEQ ID NO: 174377 - DNA, 1746 bp, Homo sapiens
  Payload ID: 14224
  Gene Symbol: RASD1
  Gene Name: RAS, dexamethasone-induced 1
  Uniprot ID: Q9Y272
  ENST ID: ENST00000225688
  CDS Start-End: 213-1058
agcaagcggcctgtgcccagatcctgggagaaccccagccgagcccagcctagcccgagcccagcccgagcggagccggagccccaagcccgagccgcgcccagcccgagcagagccctccagccgctcaccccgcgtgccaccccagcgaccctcagccgctctctgcccttctctcggccccgcgcccgccctcgcggcccctctgcccaatgaaactggccgcgatgatcaagaagatgtgcccgagcgactcggagctgagtatcccggccaagaactgctatcgcatggtcatcctcggctcgtccaaggtgggcaagacggccatcgtgtcgcgcttcctcaccggccgcttcgaggacgcctacacgcctaccatcgaggacttccaccgcaagttctactccatccgcggcgaggtctaccagctcgacatcctcgacacgtccggcaaccacccgttccccgccatgcggcgcctctccatcctcacaggagacgttttcatcctggtgttcagtctggacaaccgcgactccttcgaggaggtgcagcggctcaggcagcagatcctcgacaccaagtcttgcctcaagaacaaaaccaaggagaacgtggacgtgcccctggtcatctgcggcaacaagggtgaccgcgacttctaccgcgaggtggaccagcgcgagatcgagcagctggtgggcgacgacccccagcgctgcgcctacttcgagatctcggccaagaagaacagcagcctggaccagatgttccgcgcgctcttcgccatggccaagctgcccagcgagatgagcccagacctgcaccgcaaggtctcggtgcagtactgcgacgtgctgcacaagaaggcgctgcggaacaagaagctgctgcgggccggcagcggcggcggcggcggcgacccgggcgacgcctttggcatcgtggcacccttcgcgcgccggcccagcgtacacagcgacctcatgtacatccgcgagaaggccagcgccggcagccaggccaaggacaaggagcgctgcgtcatcagctaggagccccgccgcgctggcgacacaacctaaggaggacctttttgttaagtcaaatccaacggcccggtgcgccccaggccgggagcgcgcgcggactggcgtctcccctcccggcgatccgcccccagcactggggaggcgccactgaaccgagaagggacggtcatctgctccggaaggaaagagaacgggccaagactgggactattccccacccccggtcccccattgaggcccgccacccccataactttgggagcgagggcccagccgagggtggatttatcttctcaaagacctaagagtgagcgcggggtgggggagggatgtgaagttatccagcctctgctaggcttcaagaaaccgtcatgcccgcttgagggtcaggacccacggggcattatcttgtctgtgattccgggttgctgtgacagccggtagagcctctgccctcccaaaactaagcgggggggcgtgggtcaaatcatagccaagtgacttgtttacatgtgagtgaaactgcacaaaggaacacaaaacaaaacttgcactttaacggtagttccggtgtcaacatggacacgaacaaaaccttacccaggtgtttatactgtgtgtgtctgaggtctttaaagttattgctttatttggttttttaatatacaataaaataatttaaaatggaaaa

SEQ ID NO: 174378 - DNA, 1404 bp, Homo sapiens
  Payload ID: 14224
  Gene Symbol: RASD1
  Gene Name: RAS, dexamethasone-induced 1
  Uniprot ID: Q9Y272
  ENST ID: ENST00000579152
  CDS Start-End: 215-583
agagcaagcggcctgtgcccagatcctgggagaaccccagccgagcccagcctagcccgagcccagcccgagcggagccggagccccaagcccgagccgcgcccagcccgagcagagccctccagccgctcaccccgcgtgccaccccagcgaccctcagccgctctctgcccttctctcggccccgcgcccgccctcgcggcccctctgcccaatgaaactggccgcgatgatcaagaagatgtgcccgagcgactcggagctgagtatcccggccaagaactgctatcgcatggtcatcctcggctcgtccaaggtgggcaagacggccatcgtgtcgcgcttcctcaccggccgcttcgaggacgcctacacgcctaccatcgaggacttccaccgcaagttctactccatccgcggcgaggtctaccagctcgacatcctcgacacgtccggcaaccacccgttccccgccatgcggcgcctctccatcctcacagatcctcgacaccaagtcttgcctcaagaacaaaaccaaggagaacgtggacgtgcccctggtcatctgcggcaacaagggtgaccgcgacttctaccgcgaggtggaccagcgcgagatcgagcagctggtgggcgacgacccccagcgctgcgcctacttcgagatctcggccaagaagaacagcagcctggaccagatgttccgcgcgctcttcgccatggccaagctgcccagcgagatgagcccagacctgcaccgcaaggtctcggtgcagtactgcgacgtgctgcacaagaaggcgctgcggaacaagaagctgctgcgggccggcagcggcggcggcggcggcgacccgggcgacgcctttggcatcgtggcacccttcgcgcgccggcccagcgtacacagcgacctcatgtacatccgcgagaaggccagcgccggcagccaggccaaggacaaggagcgctgcgtcatcagctaggagccccgccgcgctggcgacacaacctaaggaggacctttttgttaagtcaaatccaacggcccggtgcgccccaggccgggagcgcgcgcggactggcgtctcccctcccggcgatccgcccccagcactggggaggcgccactgaaccgagaagggacggtcatctgctccggaaggaaagagaacgggccaagactgggactattccccacccccggtcccccattgaggcccgccacccccataactttgggagcgagggcccagccgagggtggatttatcttctcaaagacctaagagtgagcgcggggtgggggagggatgtgaagttatccagcctctgctaggcttcaagaaaccgtcatgcccgcttgagggtcaggacccacggggcattatcttgtctgtgattc

SEQ ID NO: 174379 - DNA, 3412 bp, Homo sapiens
  Payload ID: 14225
  Gene Symbol: RASD2
  Gene Name: RASD family, member 2
  Uniprot ID: Q96D21
  ENST ID: ENST00000216127
  CDS Start-End: 643-1443
gcgcggggagaaagaagccgtccctccggcgctgggagagctgcagagccgcgggcagagaaggaggccgcggccgagcccggcagcccgataccccccatccgagcgaccccctttggggcaggcggagaaggtggcataggcgaccaggagggttcgcccacctgggacacgcacccacagtcacctccaaaggaccccccctccccaagtctctaggagctgctccttcatcactggagtcgcccctacctctctgcccccagcccgagagccccaggcggggacccccggatcggacgtccccaagcctccgggcacctggctcagcaggaggcccccggctcggggcagggcagggccggcggcggcgagccggagcccgccccctgcccgggccccgccgagccctcggagcccacccatggggcacctgccccttgcgcctccttgcccggccgcgcccagcccggcgtcccgagcagcgcaggggaggatccccgcgcagtgacccgggagccaccacagactctgggaggctcggcggctggagcagcaggcagctccccgcagctcccggcgcttccaggcagctctctgagccgtgccagaggcccggcccgccattcccagccccgagccatgatgaagactttgtccagcgggaactgcacgctcagtgtgcccgccaaaaactcataccgcatggtggtgctgggtgcctctcgggtgggcaagagctccatcgtgtctcgcttcctcaatggccgctttgaggaccagtacacacccaccatcgaggacttccaccgtaaggtatacaacatccgcggcgacatgtaccagctcgacatcctggatacctctggcaaccaccccttccccgccatgcgcaggctgtccatcctcacaggggatgtcttcatcctggtgttcagcctggataaccgggagtccttcgatgaggtcaagcgccttcagaagcagatcctggaggtcaagtcctgcctgaagaacaagaccaaggaggcggcggagctgcccatggtcatctgtggcaacaagaacgaccacggcgagctgtgccgccaggtgcccaccaccgaggccgagctgctggtgtcgggcgacgagaactgcgcctacttcgaggtgtcggccaagaagaacaccaacgtggacgagatgttctacgtgctcttcagcatggccaagctgccacacgagatgagccccgccctgcatcgcaagatctccgtgcagtacggtgacgccttccaccccaggcccttctgcatgcgccgcgtcaaggagatggacgcctatggcatggtctcgcccttcgcccgccgccccagcgtcaacagtgacctcaagtacatcaaggccaaggtccttcgggaaggccaggcccgtgagagggacaagtgcaccatccagtgagcgagggatgctggggcggggcttggccagtgccttcagggaggtggccccagatgcccactgtgcgcatctccccaccgaggccccggcagcagtcttgttcacagaccttaggcaccagactggaggcccccgggcgctggcctccgcacattcgtctgccttctcacagctttcctgagtccgcttgtccacagctccttggtggtttcatctcctctgtgggaggacacatctctgcagcctcaagagttaggcagagactcaagttacaccttcctctcctggggttggaagaaatgttgatgccagaggggtgaggattgctgcgtcatatggagcctcctgggacaagcctcaggatgaaaaggacacagaaggccagatgagaaaggtctcctctctcctggcataacacccagcttggtttgggtggcagctgggagaacttctctcccagccctgcaactcttacgctctggttcagctgcctctgcaccccctcccacccccagcacacacacaagttggcccccagctgcgcctgacattgagccagtggactctgtgtctgaagggggcgtggccacacctcctagaccacgcccaccacttagaccacgcccacctcctgaccgcgttcctcagcctcctctcctaggtccctccgcccgacagttgtgctttgttgtggttgcagctgttttcgtgtcatgtatagtagtagaaatggaaatcattgtactgtaaaagcctagtgactccctccttggccaggccctcacccagttcagatccacggcctccacccgggacgccttcctcctctgctcccaaacagggtttccgtggcctgtttgcagctagacattgacctccgccattgagctccacggtttacagacaattgcacaagcgtggggtgggcaggccaggactgcttttttttaatgctcccatttcacagaggataccaccgagactcggaggggacacgatgagcaccaggccccacctttgtcccctagcaaattcagggtacagctccacctagaaccaggctgccctctactgtgctcgttcctcaagcatttattaagcacctactgggtgctgggttcactgtgtcctaggaaaccaagagggtccccagtcctggcctctgcccgcccctgctgccccaccaccttctgcacacacagcggtggggaggcggggaggagcagctgggacccagaactgagcctgggagggatccgacagaaaagctcagggcgggtcttctccttgtgcccgggattgggctatgctgggtaccaccatgtactcaggcatggtgggttttgaacccataaaccaaaggcccttgtcatcagctcttaacaagtatattttgtattttaatctctctaaacatattgaagttttagggccctaaggaaccttagtgatcttctattgggtctttctgaggttcagagagggtaagtaacttcctccaggtcacacagcaagtctgtgggtggcagaagcaagctagcgctgggcattcagtacataccacgatgtgctccctctcttgatgcttggcccctggggccttcagggctttgggacatcttgtcctcaaccctctccctagatcagtctgtgagggtccctgtagatattgtgtacaccatgcccatgtatatacaagtacacacagatgtacacacagatgtacacatgctccagccccagctctgcatacctgcacctgcaccccagccttggcccctgcctgcgtctgtgctcaaagcagcagctccaaccctgcctctgtccccttccccacccactgcctgagccttctgagcagaccaggtaccttggctgcaccggtgtgtggcccgctctcacccaggcacagccccgccaccatggatctccgtgtacactatcaataaaagtgggtttgttacaaagc

SEQ ID NO: 174380 - DNA, 632 bp, Homo sapiens
  Payload ID: 14226
  Gene Symbol: RASGEF1A
  Gene Name: RasGEF domain family, member 1A
  ENST ID: ENST00000374455
  CDS Start-End: 1-632
aagctgcagagttgcgggctgggtggccaagctgaagtctttctcagccaagatcgtgcagctcctgaaggagtggaccgaggccttcccctatgacttccaggatgagaaggccatggccgagctgaaagccatcacacaccgtgtcacccagtgtgatgaggagaatggcacagtgaagaaggccattgcccagatgacacagagcctgttgctgtccttggctgcccggagccagctccaggaactgcgagagaagctccggccaccggctgtagacaaggggcccatcctcaagaccaagccaccagccgcccagaaggacatcctgggcgtgtgctgcgaccccctggtgctggcccagcagctgactcacattgagctggacagggtcagcagcatttaccctgaggacttgatgcagatcgtcagccacatggactccttggacaaccacaggtgccgaggggacctgaccaagacctacagcctggaggcctatgacaactggttcaactgcctgagcatgctggtggccactgaggtgtgccgggtggtgaagaagaaacaccggacccgcatgttggagttcttcattgatgtggcccgggagtgcttcaacatcgggaact

SEQ ID NO: 174381 - DNA, 3264 bp, Homo sapiens
  Payload ID: 14226
  Gene Symbol: RASGEF1A
  Gene Name: RasGEF domain family, member 1A
  Uniprot ID: Q8N9B8
  ENST ID: ENST00000374459
  CDS Start-End: 86-1555
ggtgcttgcttggctcgcgggcagaggagccgccgctcgctggacgccggaccgggcaggacggcgcggggagccggcggccagaatgttcctggagccccaggaaactatgccccagacgtccgttgtcttctccagcatccttgggcccagctgtagcggacaggtgcagcctggcatgggggagcgtggaggcggggccggtggcggctccggggacctcatcttccaagatggacacctcatctctgggtccctggaggccctgatggagcaccttgttcccacggtggactattaccccgataggacgtacatcttcacctttctcctgagctcccgggtctttatgccccctcatgacctgctggcccgcgtggggcagatctgcgtggagcagaagcagcagctggaagccgggcctgaaaaggccaagctgaagtctttctcagccaagatcgtgcagctcctgaaggagtggaccgaggccttcccctatgacttccaggatgagaaggccatggccgagctgaaagccatcacacaccgtgtcacccagtgtgatgaggagaatggcacagtgaagaaggccattgcccagatgacacagagcctgttgctgtccttggctgcccggagccagctccaggaactgcgagagaagctccggccaccggctgtagacaaggggcccatcctcaagaccaagccaccagccgcccagaaggacatcctgggcgtgtgctgcgaccccctggtgctggcccagcagctgactcacattgagctggacagggtcagcagcatttaccctgaggacttgatgcagatcgtcagccacatggactccttggacaaccacaggtgccgaggggacctgaccaagacctacagcctggaggcctatgacaactggttcaactgcctgagcatgctggtggccactgaggtgtgccgggtggtgaagaagaaacaccggacccgcatgttggagttcttcattgatgtggcccgggagtgcttcaacatcgggaacttcaactccatgatggccatcatctctggcatgaacctcagtcctgtggcaaggctgaagaaaacttggtccaaggtcaagacagccaagtttgatgtcttggagcatcacatggacccgtccagcaacttctgcaactaccgtacagccctgcagggggccacgcagaggtcccagatggccaacagcagccgtgaaaagatcgtcatccctgtgttcaacctcttcgttaaggacatctacttcctgcacaaaatccataccaaccacctgcccaacgggcacattaactttaagaaattctgggagatctccagacagatccatgagttcatgacatggacacaggtagagtgtcctttcgagaaggacaagaagattcagagttacctgctcacggcgcccatctacagcgaggaagctctcttcgtcgcctcctttgaaagtgagggtcccgagaaccacatggaaaaagacagctggaagaccctcaggaccacccttctgaacagagcctgaggcggatgcagcccgcgacgccagaggaagcacgtgcactaactgggtttaaattttgactgatgtgggttgagatgaggaggcctcactggttggggtccattttgtatataacttttatgagaaaaaaatggtaattatttcacgcatcaacctttggcacttacaaagttttttttgtttattttaaataacagggcagggccctgctttggggagggggaggggagagtatcatgggagatggtatccatgataacatcttattctaatgaaatgtagatttttattttctacttttgattattaacatcttatgaaaaaaatattttaaaaaacccagccaaaaccaacgtgagccctgcctgctcggacgcctttccagccagtgtctctgacgtcggggttagtgccttagagggtactggggtctggtcttcctgctctgtggtttgggctgcggtgagtcccactccacctgggcgcctgccctcaggagcctgggctgcgaggctccataggagggctggtggctgggaggtcgcgtccgcacacttctggaagtgagcctttgagtacgggctgtccaaagtttacattttcattttcctttcagggatttgtggggtcagggaggggcagggggcacctggcagcatattttctgtgacaatgtgtccagcaaatcattcttcaactacattttagaaaggaggaaatctaaaataaggtaagggagggaagcatggagttgtcagttttctgggctgtgactgaaagacacactgagctgtgatgaagaaaaatacatggccgactccagggtggtgacatttagagctagtcttgaaacctatcatctacagaggggagggcagccaacagccctcttcccacctgggtaggcagcgccctaattggaattggaaacagaaaattcgccaggccatactgctggagcccattcagataaaactgcccaatactgagaggtgttttctacacccagctagaggagcacactccattttcccatgtctgacttcgtggtgtgagccctgggccctactgaccatggcgcaggacagctgtccttcagaaagcacacggtcaatccacgtggaccgtctccctcgcaggaactccgcatccttgtccctctgcattcccagtttccgcaggagccttgatcaatggggaagcctgggtgaggatgggccaggtcccaattcccaaagctcctggaagagcctgaagacattgggaaaggctgggcctggggaggaggcagccctgggcccgctgcccatgcctctggtcctgggtggagcaggaatagttccactgtattgtcacagtgtgtttgcactttctgaggttctagctagtacagattgtatattgatagtacatattgctttgtttatgtctttgagatgagaaaggcttaaaacttgagaatatatatttggaatacagccttagaacggtttctgtacacacccacgtgcacttcacgggtgatcagttctagtacctacttgaaacagtgtctgtctgctactttattttcccaatttgatacataccctgatttgatgttttggtatttgagatgaactctgagtatgaagctgtaccataatgcaggacgtcagttttggtgtgactggacatacttgcttcaataaaagaatacatcactcccc

SEQ ID NO: 174382 - DNA, 4104 bp, Homo sapiens
  Payload ID: 14226
  Gene Symbol: RASGEF1A
  Gene Name: RasGEF domain family, member 1A
  Uniprot ID: Q8N9B8
  ENST ID: ENST00000395809
  CDS Start-End: 2508-3953
tcatgatggctattgctgtgactggagccaagagcccagtgtgcaattcttccttgggaaggggctgcctggtggtggacacagctgttcagatacacaggtttgcagctgcctgtcgaagtgcctgcccctgctgttggggcaaggaggaagcaggtgcaagaacaagcgacctcagggctgggtgggggtggccggcaggggaccccgcagtggaagtgctgtcatcatcaccatttcacagctgggaaggtggagggctggccagatgcacccaggaacaaggagtgggcctgctgcagggccggcattcctgcccgggaaaagccatgtagggaacctgcctctccacttggcactgagccctggagaccctcctcgaagtgctccgtggctgggcagggtgggccctgctaggtttgagctttcgggggtaggggctcatggggcatcccccagacctgcagggtcttggtttgttggatgcaggagacctagccctgggccgtgtccccaggtgggtctccaggtaggcaggacagaaggaacccagagcaccccacctctcaggtcagtgcggctccacacggtccccctcaggctctgctgactccccaaagggattctgagcatgtgcagaacctctgcttgcctgggacacccctgcatgctcctcctccaggcccccaccctcgaaggcgtggccttcccagcccctctctggctgctgaccagtgggctgggtccccaggatggctcctcaactcctaggcaggcctcctagcactgaggcaggtctctctgcaggctggacatggagtggccttgccctgtgggggatcggctggggctgagtttgtggggtgtcagagtgcatcccccacatactacctcctgaccagagcagcctgcagtgggagaggccagtggctcggcaaatgccctctctgatgaccccaagagcttggggtgaggaggcccaactgaccaaggttaccacctgctggtcgccttttgaacccagaactgtgtgatcttggggaggttgtcccacagtgcattggcctcagatgcctgagacagtgctgagcagctgtgggcaacaaggggtttgtgagcccgccttcgtgacttcattgcacaaatggtcactgagtgccaccctgggccagcgataggatacacaggtgaatgatacagccacttctggctttgtgggtcaacagtctaggttaaacccagggaggcttcctggaggtggtgacacctaggctggacttggaactcctggggtttccttagttgagttccttcccactgggcctcagtttcaccatctgaaaaatgaaggattggctcacatcagtggttcctgggctggagtggagagcgcgttggggtacagaagcagtccaccccagagtttctgaccagcaggtctggggctaggcctgagaatgtgcattctaacttgtgtgaggcaccgctgctggcctgagtttgaagggagcattgtatgagtctgagccatgacctccctgtcctggagtgggggcagcactgagcctgggggcctggacattccacccagcgtcatcgtggggcctttggttgcgttcttgctctccttgccaaagactttctaagaattccaaggaaacctttaggtgtttggtgggaaaaccagtgacgtctgggccagatgctcttttttccctggtgggagggacagggacgtgctgtgtgtgtgtgtgtgtgtgtgtgtgtgtgtgtgtgtgtgtgtgtgtgtgtgttgacgtggggggtgtgggcaggtggtccgctctctccttgtaaggcccctacagggcagaggcccacggtcctgtcatggcactgaagtaatcatggcaacaatttgctctgtgcagtggggaaactaaggccaaaatggcaggagggtctcgcttctccacctgacctcagccgctggcacctgtgctgccttcccttgagggccaggaggttgaggctggctctgtgtgcaggcaaggccacaggcaggccacctctggccctcaggctggcagttgctgcatcgtccagtccccacttggctcctcccaggcatggctggctgtctggggcactggggaaacaggcccagagggcttcagactcccctaggcttcacaagaactcccagctgcagggtgtggtgagaccctgagccccatcacagcgggccatgctgtggaggacagtcccagtgtgggcaccgaggcctccaggaggcccagctgctcagacatctgcagctcaggggcactcagactcacaggccccaaagccagttccagatctctctctagccctgcccacagccctgcctcatactggtcagccacttggcccaagaccttcaccatgtggagtggccctgctcgccactcctgctaccgcctgcctgagcaagctctccttgggctgtggcaagacccaccatccacgtggcagccaccgaaactatgccccagacgtccgttgtcttctccagcatccttgggcccagctgtagcggacaggtgcagcctggcatgggggagcgtggaggcggggccggtggcggctccggggacctcatcttccaagatggacacctcatctctgggtccctggaggccctgatggagcaccttgttcccacggtggactattaccccgataggacgtacatcttcacctttctcctgagctcccgggtctttatgccccctcatgacctgctggcccgcgtggggcagatctgcgtggagcagaagcagcagctggaagccgggcctgaaaaggccaagctgaagtctttctcagccaagatcgtgcagctcctgaaggagtggaccgaggccttcccctatgacttccaggatgagaaggccatggccgagctgaaagccatcacacaccgtgtcacccagtgtgatgaggagaatggcacagtgaagaaggccattgcccagatgacacagagcctgttgctgtccttggctgcccggagccagctccaggaactgcgagagaagctccggccaccggctgtagacaaggggcccatcctcaagaccaagccaccagccgcccagaaggacatcctgggcgtgtgctgcgaccccctggtgctggcccagcagctgactcacattgagctggacagggtcagcagcatttaccctgaggacttgatgcagatcgtcagccacatggactccttggacaaccacaggtgccgaggggacctgaccaagacctacagcctggaggcctatgacaactggttcaactgcctgagcatgctggtggccactgaggtgtgccgggtggtgaagaagaaacaccggacccgcatgttggagttcttcattgatgtggcccgggagtgcttcaacatcgggaacttcaactccatgatggccatcatctctggcatgaacctcagtcctgtggcaaggctgaagaaaacttggtccaaggtcaagacagccaagtttgatgtcttggagcatcacatggacccgtccagcaacttctgcaactaccgtacagccctgcagggggccacgcagaggtcccagatggccaacagcagccgtgaaaagatcgtcatccctgtgttcaacctcttcgttaaggacatctacttcctgcacaaaatccataccaaccacctgcccaacgggcacattaactttaagaaattctgggagatctccagacagatccatgagttcatgacatggacacaggtagagtgtcctttcgagaaggacaagaagattcagagttacctgctcacggcgcccatctacagcgaggaagctctcttcgtcgcctcctttgaaagtgagggtcccgagaaccacatggaaaaagacagctggaagaccctcaggaccacccttctgaacagagcctgaggcggatgcagcccgcgacgccagaggaagcacgtgcactaactgggtttaaattttgactgatgtgggttgagatgaggaggcctcactggttggggtccattttgtatataacttttatgagaaaaaaatggtaattatttcacgcatc

SEQ ID NO: 174383 - DNA, 3235 bp, Homo sapiens
  Payload ID: 14226
  Gene Symbol: RASGEF1A
  Gene Name: RasGEF domain family, member 1A
  Uniprot ID: Q8N9B8
  ENST ID: ENST00000395810
  CDS Start-End: 82-1527
ggcgccggccgcgcgctgctcggggcccgactgcggcgcgagggcggcgcgggagcgacgctggcccggaccgaggaaactatgccccagacgtccgttgtcttctccagcatccttgggcccagctgtagcggacaggtgcagcctggcatgggggagcgtggaggcggggccggtggcggctccggggacctcatcttccaagatggacacctcatctctgggtccctggaggccctgatggagcaccttgttcccacggtggactattaccccgataggacgtacatcttcacctttctcctgagctcccgggtctttatgccccctcatgacctgctggcccgcgtggggcagatctgcgtggagcagaagcagcagctggaagccgggcctgaaaaggccaagctgaagtctttctcagccaagatcgtgcagctcctgaaggagtggaccgaggccttcccctatgacttccaggatgagaaggccatggccgagctgaaagccatcacacaccgtgtcacccagtgtgatgaggagaatggcacagtgaagaaggccattgcccagatgacacagagcctgttgctgtccttggctgcccggagccagctccaggaactgcgagagaagctccggccaccggctgtagacaaggggcccatcctcaagaccaagccaccagccgcccagaaggacatcctgggcgtgtgctgcgaccccctggtgctggcccagcagctgactcacattgagctggacagggtcagcagcatttaccctgaggacttgatgcagatcgtcagccacatggactccttggacaaccacaggtgccgaggggacctgaccaagacctacagcctggaggcctatgacaactggttcaactgcctgagcatgctggtggccactgaggtgtgccgggtggtgaagaagaaacaccggacccgcatgttggagttcttcattgatgtggcccgggagtgcttcaacatcgggaacttcaactccatgatggccatcatctctggcatgaacctcagtcctgtggcaaggctgaagaaaacttggtccaaggtcaagacagccaagtttgatgtcttggagcatcacatggacccgtccagcaacttctgcaactaccgtacagccctgcagggggccacgcagaggtcccagatggccaacagcagccgtgaaaagatcgtcatccctgtgttcaacctcttcgttaaggacatctacttcctgcacaaaatccataccaaccacctgcccaacgggcacattaactttaagaaattctgggagatctccagacagatccatgagttcatgacatggacacaggtagagtgtcctttcgagaaggacaagaagattcagagttacctgctcacggcgcccatctacagcgaggaagctctcttcgtcgcctcctttgaaagtgagggtcccgagaaccacatggaaaaagacagctggaagaccctcaggaccacccttctgaacagagcctgaggcggatgcagcccgcgacgccagaggaagcacgtgcactaactgggtttaaattttgactgatgtgggttgagatgaggaggcctcactggttggggtccattttgtatataacttttatgagaaaaaaatggtaattatttcacgcatcaacctttggcacttacaaagttttttttgtttattttaaataacagggcagggccctgctttggggagggggaggggagagtatcatgggagatggtatccatgataacatcttattctaatgaaatgtagatttttattttctacttttgattattaacatcttatgaaaaaaatattttaaaaaacccagccaaaaccaacgtgagccctgcctgctcggacgcctttccagccagtgtctctgacgtcggggttagtgccttagagggtactggggtctggtcttcctgctctgtggtttgggctgcggtgagtcccactccacctgggcgcctgccctcaggagcctgggctgcgaggctccataggagggctggtggctgggaggtcgcgtccgcacacttctggaagtgagcctttgagtacgggctgtccaaagtttacattttcattttcctttcagggatttgtggggtcagggaggggcagggggcacctggcagcatattttctgtgacaatgtgtccagcaaatcattcttcaactacattttagaaaggaggaaatctaaaataaggtaagggagggaagcatggagttgtcagttttctgggctgtgactgaaagacacactgagctgtgatgaagaaaaatacatggccgactccagggtggtgacatttagagctagtcttgaaacctatcatctacagaggggagggcagccaacagccctcttcccacctgggtaggcagcgccctaattggaattggaaacagaaaattcgccaggccatactgctggagcccattcagataaaactgcccaatactgagaggtgttttctacacccagctagaggagcacactccattttcccatgtctgacttcgtggtgtgagccctgggccctactgaccatggcgcaggacagctgtccttcagaaagcacacggtcaatccacgtggaccgtctccctcgcaggaactccgcatccttgtccctctgcattcccagtttccgcaggagccttgatcaatggggaagcctgggtgaggatgggccaggtcccaattcccaaagctcctggaagagcctgaagacattgggaaaggctgggcctggggaggaggcagccctgggcccgctgcccatgcctctggtcctgggtggagcaggaatagttccactgtattgtcacagtgtgtttgcactttctgaggttctagctagtacagattgtatattgatagtacatattgctttgtttatgtctttgagatgagaaaggcttaaaacttgagaatatatatttggaatacagccttagaacggtttctgtacacacccacgtgcacttcacgggtgatcagttctagtacctacttgaaacagtgtctgtctgctactttattttcccaatttgatacataccctgatttgatgttttggtatttgagatgaactctgagtatgaagctgtaccataatgcaggacgtcagttttggtgtgactggacatacttgcttcaataaaagaatacatcactccc

SEQ ID NO: 174384 - DNA, 2277 bp, Homo sapiens
  Payload ID: 14227
  Gene Symbol: RASGEF1B
  Gene Name: RasGEF domain family, member 1B
  Uniprot ID: Q0VAM2
  ENST ID: ENST00000264400
  CDS Start-End: 153-1574
gtagtttcagtataaacaaggaacccgactggttagacagattttgtttttcttcttcccgcgcgctttagctccctgtcctttggtcgcatttgtgggcgcgcggcacgcagccgggaggccgaggactcggagttcacctgcaggaaagtatgcctcagactcctcccttttcagcaatgtttgacagcagtggttacaatcgaaacctctatcagtctgcagaggacagctgtggagggttgtattaccatgacaacaacctcctctctggatccctggaagcactcatccagcacttagtacctaatgtggattactatccagatagaacatacatatttaccttcctactcagttctcggttatttatgcatccgtatgagctaatggccaaagtttgccacttatgtgttgagcaccagagactaagtgatcctgatagtgataagaaccagatgagaaaaattgcacccaaaatccttcaactcctcacggaatggacggaaacatttccctatgattttcgggatgaaagaatgatgagaaacttaaaagatctggctcaccgaatagccagtggcgaagagcagacatacagaaagaatgtccagcaaatgatgcagtgtctgatccgcaagcttgctgcgctcagccagtacgaagaagtcctggcaaaaatcagctccacatccacagatcggctcacagttctcaagaccaagccacagtctatacaaagggatatcattactgtctgcaacgacccttacacgttggcccagcagctgactcatatagagctggagaggctcaattatattgggccagaagaatttgttcaggcgttcgtgcagaaggaccctttggataatgacaagagttgctacagtgaacggaagaaaacacgaaacttagaagcttacgtggaatggtttaatcgcctcagctacttggttgctacagaaatctgtatgcctgttaagaaaaaacaccgagcaagaatgattgagtatttcattgacgtagctcgggagtgttttaacattggcaacttcaactccttgatggcgataatctctggtatgaatatgagcccagtctctcgactaaaaaaaacttgggccaaagtgaagactgcaaaatttgacattcttgagcatcagatggacccttcaagcaatttctataattatcgaacagctcttcgtggggcagcacaaaggtctttaactgctcatagtagtagagaaaagattgtgataccattcttcagtctcttaatcaaagatatttatttcctcaatgagggttgtgccaaccgccttcccaatggccatgtcaattttgagaaattttgggaactggccaaacaagtgagtgaatttatgacatggaaacaagtggagtgtccatttgagagggaccggaagatcttgcagtatctgctcacagtaccagtcttcagtgaagatgctctctacttggcttcttatgagagtgaaggacctgaaaatcatatagagaaagacagatggaagtctttaaggtcgagcctcttaggcagagtttaacacatgggagctgcctgcctgctgctgctgctgcttcctgcagatcatggaggggctggcctttgttttctggcatctcgtaccacgaacactcatgaagaccctgcagtcattggagcacccgggtcagcaaagcacacaagctcactcaagaccagatggagaacttatttcctgcagctgacagatagactcagattttgtgagactgaaatgttcactgaagacacttgagaaagaatcctctaaaaatcccggctctgcacattattcatctcctggaatttccatgtgaatcacagctctgcacctggatggagttttcttttgtgtgtgtgtgttttttttaatttggttgaacatttgctgctaatgggacttgcccagctgagtgctggctctgaggaagcccacgtttcttttgttaacttaaatgaagaaaggagtggagggaggggatctaaaacccccccgtttagatcccaaaccttagctcaatcagtattgccagagaggggtaagactggttggaagctgactgcagactttgtttccccttagtatgtgctgtgttgtaaatttttctcctccctcctcctacaaggttttgagttggctgctggttagcaaactcctttttacccatataagttatttaatataataatgaagctcaacactgtggtaggaaaatagccactag

SEQ ID NO: 174385 - DNA, 1756 bp, Homo sapiens
  Payload ID: 14227
  Gene Symbol: RASGEF1B
  Gene Name: RasGEF domain family, member 1B
  Uniprot ID: Q0VAM2
  ENST ID: ENST00000335927
  CDS Start-End: 142-1437
ataaacaaggaacccgactggttagacagattttgtttttcttcttcccgcgcgctttagctccctgtcctttggtcgcatttgtgggcgcgcggcacgcagccgggaggccgaggactcggagttcacctgcaggaaagtatgcctcagactcctcccttttcagcaatgtttgacagcagtggttacaatcgaaacctctatcagtctgcagaggacagctgtggagggttgtattaccatgacaacaacctcctctctggatccctggaagcactcatccagcacttagtacctaatgtggattactatccagataaccagatgagaaaaattgcacccaaaatccttcaactcctcacggaatggacggaaacatttccctatgattttcgggatgaaagaatgatgagaaacttaaaagatctggctcaccgaatagccagtggcgaagagacatacagaaagaatgtccagcaaatgatgcagtgtctgatccgcaagcttgctgcgctcagccagtacgaagaagtcctggcaaaaatcagctccacatccacagatcggctcacagttctcaagaccaagccacagtctatacaaagggatatcattactgtctgcaacgacccttacacgttggcccagcagctgactcatatagagctggagaggctcaattatattgggccagaagaatttgttcaggcgttcgtgcagaaggaccctttggataatgacaagagttgctacagtgaacggaagaaaacacgaaacttagaagcttacgtggaatggtttaatcgcctcagctacttggttgctacagaaatctgtatgcctgttaagaaaaaacaccgagcaagaatgattgagtatttcattgacgtagctcgggagtgttttaacattggcaacttcaactccttgatggcgataatctctggtatgaatatgagcccagtctctcgactaaaaaaaacttgggccaaagtgaagactgcaaaatttgacattcttgagcatcagatggacccttcaagcaatttctataattatcgaacagctcttcgtggggcagcacaaaggtctttaactgctcatagtagtagagaaaagattgtgataccattcttcagtctcttaatcaaagatatttatttcctcaatgagggttgtgccaaccgccttcccaatggccatgtcaattttgagaaattttgggaactggccaaacaagtgagtgaatttatgacatggaaacaagtggagtgtccatttgagagggaccggaagatcttgcagtatctgctcacagtaccagtcttcagtgaagatgctctctacttggcttcttatgagagtgaaggacctgaaaatcatatagagaaagacagatggaagtctttaaggtcgagcctcttaggcagagtttaacacatgggagctgcctgcctgctgctgctgctgcttcctgcagatcatggaggggctggcctttgttttctggcatctcgtaccacgaacactcatgaagaccctgcagtcattggagcacccgggtcagcaaagcacacaagctcactcaagaccagatggagaacttatttcctgcagctgacagatagactcagattttgtgagactgaaatgttcactgaagacacttgagaaagaatcctctaaaaatcccggctctgcacattattcatctcctggaatttccatgtgaatcacagctctgcacctggatgga

SEQ ID NO: 174386 - DNA, 6323 bp, Homo sapiens
  Payload ID: 14227
  Gene Symbol: RASGEF1B
  Gene Name: RasGEF domain family, member 1B
  ENST ID: ENST00000436139
  CDS Start-End: 128-760
cgactggttagacagattttgtttttcttcttcccgcgcgctttagctccctgtcctttggtcgcatttgtgggcgcgcggcacgcagccgggaggccgaggactcggagttcacctgcaggaaagtatgcctcagactcctcccttttcagcaatgtttgacagcagtggttacaatcgaaacctctatcagtctgcagaggacagctgtggagggttgtattaccatgacaacaacctcctctctggatccctggaagcactcatccagcacttagtacctaatgtggattactatccagatagaacatacatatttaccttcctactcagttctcggttatttatgcatccgtatgagctaatggccaaagtttgccacttatgtgttgagcaccagagactaagtgatcctgatagtgataagaaccagatgagaaaaattgcacccaaaatccttcaactcctcacggaatggacggaaacatttccctatgattttcgggatgaaagaatgatgagaaacttaaaagatctggctcaccgaatagccagtggcgaagaggttggtaacctgaatttagcgcggctgctggaattcccaggcagagcctgggtgggaaatggtgccgaattatgcatcctaatctccactgcttcctctctgttttgcctttgggcaagccctccacatcacatattggtctatttagtatgtcaagtgagaatgattataccatcccacttcaaagggatatgatctagagttttatgtgattaatttggggctatgttcatgtcaactcatgcacaggatttatgttgcaagtatgttttaattttactttacttttaccttttttcctcccaaaaaggtttgacacagctagttagatgataaatggcatgttagtagacataaacactagtggatacaaagtaaataacattattctattaaccgaggataaatagtagattaataaatcataaatagaaatagacattctgggccatggcagaaagaaaataaatacgctcctgttgagaatgagtagaggaggacaggactgctgtggtatgagtttaagttccaggtaaaagggaaatacagctggtcatgtaatattcactgtcagaaaaggggaagtatagtaattattgagggacttaaatgaaaaatttagaaactttcttctgaagaactttgtatagggtcatagaatgagatcctacaaactgctctttatggtgtttacaacataccttcctggatagaagctgagttcatagattcatgtgtaaattagcaaagataattcttgggggaggagaagactgagaaaatgaggcaagtcttccagtgctcagaagttgatttaaggatagactctagtataggtagagattaaaagtaagtctcttagataggctttcataaatatcacttccctcagttgagcctttgataagcactaactactagctgtgacaaattcaaggttatcctttttgaagcaggaccagagggctggtattctgtgttgagacttgctgggcaaggatgcccttgtagtttccatgttgcaggtcaacttctgggaacaagtcattcaggcacagatacactttcacctggaaaaagtagatgaagcatttggcaatgatgttgcattttattcgtcttaaaatgcattttccattatgaataaccttccttgagaactctttcagtggtgtgctgcaacgtataacttgataccctatcctttttttctgagacagagccttgctctgttcctcaggctagagtgtagagttgcgatcatggctcactgcatccttgacttctctggcttaatcaatcctcccacctcagcttccctagtagctgggactacaggtgcatgcaactgtgcctggctcgttttttctattttttgtagagacaaagcctcactatgttgcccaggctggtctccaacttttgggctcaagcaatccactggccttggcctcccaaagtgctggaattacaggtgtgagtcactgcacccagccgcaattttttgtgagaaaaggggaagtatattaattgttgagggaattaagtgaaaaatttaaaaaccttcatctgaagaactttggggctatgttcatgtcagctcatgcacaggatttatgttgcaagtgtgttttaattttactttacttatacctttttacttccaaaaaggtttgacacagctagttagatgataataagtggcatcttaatagatataaacattttaatgccatttatcccaattttacaaaatcagactaaaattatgtaaggctagcttttgaaaaatttgtatgggctttcctgtattatgttctcatgaaaatgggattaaccattttactgttactttttgacattatattatgatgaacccaagtgctcgagacagccattatttctgccgggccgaatgagtcatttcctgagtcactgtgcaagttatgacggttataatcattttgccagtttgcctcttacaggttctagccaggtatgaattgataggtcccttgcttacaaaggcaaaagttaagcatcatggtgcagttttgtagtaaatcttatgttagaggggttagccgtggagttccttggcagggtcagtgctggctcagtgaccttggtttatgtatctgaagctgctcaaaagatcagtgacatcataagggctttttcttgtatgaaggctgagacctaagtcaaacagttttcatttcagtttggttgtctttagctacttaacattatatgtcagtcatcttatcttccctctattgcctttataacttagttctttccaaaagaaacaccttaaaaatctttttcttttaagataaaatgttggcattttgaaaataccaaatggatggtccttgttgttgcggcagtcaaaggggagatcatttttatttgtgtttacctgatgagaattggtctttttgtttaacagaatcaagccattcgagagctgggtagaacagagagaagggccaaacagccttgtgaccctggcttcttttcaacactcctgggttaataacatattcttgatagaaaccttgcgaagttcagatggttttgagcatgaaaagaggagataagaagacaagccagttctaactgaggaattgattaaactaagggttgagtggagagatgtcacctgccttgatcgggttgggtttcacagggagatgttgtttctttagctgcttctattcagtattcagaattcaaatccacacttgccagctggtttatctgagtgtgttttggctagtcctctaaatccttgctcctttctcatctctataaatcacagaagtaactgccttgtgttaatgccctttcagctctgaaactgtgtgatcgatgtccttcctccagttctttggcttcaggctccttatcagtcacgtgcttaggtggctctcctcagagagaccttcccttggcacccaactatgatcataccccctcccattatgggctttcactgctcttcccttcatagtcattcttagcactctgtgatgagtaatgatagctggccctctctctgtatttgtgggatctgcatccatgggttcaaccaacctcagattgaaaatattcaaaaaatattaagtctgtactgaacacatatagactttttttccttgtcattattccctaaacaatacagtatcacagtgatttacatagcatttacgttgcgttagctattataagtaatgtagagatgatttaaagtatacaggaggatgtgcggatgttgtatgaaaatactgtaccatcttagagcggagacttgaccatctgcagattttagaatcccagggaagtcctggaaccaatctcccgaggatactgagggatgactgtacttgcatttttattgcttgttttcccctctagaccccatgctgtgccctctttgttcaccacggcatccttaactcctagctcagtacctggcacctagtattctctcagtagtgtttgaatgaatgagtcaatcaatgaatgaatgaacaaatgaattactggaatagggaaaaattatttccctctattggaaggaatatgggtctgggttgggatttgttgcttcttgcctgggacttttttttttttttttctccttttggcagtcagtgaatccaggtgtgccgtatatataatttagtcaggttcttctgaatctaccaggacagttctacataatttggcataatatgtttctcccctggggatttgcccaaaatgaagtggtttattaggacttgcctgcaagaaacatgaaatgaaactaatgattgaattacatgacaaatgactgtagtgagtagaatgcaattttctcttccttaaggggctggtctttataataagagcttctatctttatttgccaggtaattactgtcactggcatttgaagttataaaaaagaataagtacatatttagtaattcatgactcagtgaggaaccatgcttaacaacacaaagcttgatttctcaaatggaatcaactggcagcaggaaacttttaaaagaggtcatatacatacactctctcacatgctcacacactagttgttgttgaatagctttcccccatactctattgcatacatttttcccttatattttgatgcagttttttgctaacaacctgattatacattcctctgcctcttcccccagtaaatttttctaaaattgcggaataggctgggtgcggtggctcatgcctgtaatcccagcactttgggaggctgaagcaggcagatcacctgaagtcgggagttcaagaccagcctgaccaccatggagaaaccccatttctaccaaagatacacaattagccaggtgtggtggtgcatgcctataatcccagctacttgggaggctgaggcaggagaattgcttgaacccgggaggcagaaattgtggtgagccaagatcgtgccattgcactccagcctgggcaacaagagtgaaactccgcctcaagaaaaaagaattgcaaaataaaaatctttcagcagatatgctggtaaagcattgcttctcacacttggcttatacaaggatcagctgaggagcatccagagcatgtgacacaagtgcactgcagaccaagtcgatcagaatctctggggtggaacccaggctgcccccattcagcggttctgctcattgcttcccagcaggtacccttgtgtggtaccctgaatagaagtggtaatttcttactaaagtattttctgcagggatcccgggaaggggtgaggagaaggtgcatgatgtaggaatgataacatgcatggaatagcagctgaggcatagaataataaatatttttaaatgagttgttggcttttttaagtgaaaagaactttcttgtgcatgtctcatgcctgtgttatccaaaaaatcccattctgtgggaaaattttaaaacattttatttttaatatatcaagtaatataggaatatattcacttagattttgtttaaaaagaattcatacaaagcaaaagaggccaaaaaactccattcaatccagcttctctcttaaaggtaacaagtgttgtcaattttgtgtgtatccttccggcgctgctcctatgtatacaggtgttcacagaaagtagtgtgtatggcttttgtttccatgtatgtttacctagtattcatcaccctgcttgttttctctgtgttatgtcttggaaacccttccatgtcaatgtaggtagctgtatcttctttcagctgctatacagtagtccagtatgtgattgggccatgtttctttttctttttaaaaactattctattggacacaaacaagttaaatttgtttatactgaaaactcaggcgttttctgagaaagacttagcaaagaagattaagtcccttcttcatatcaaactctgtttagtaaagtagtaacatatagttgtgggttgctcttgtaaacaggctttactgactgtgaaacttcaactttgtaacatgtattttctactctgcacttgatcttagccaaaagggtgagaagcgattctaccctggatagtatatgctgtaattaagtatctccaagaaggtgtttattagccattctgagtaatacactgggaaatatttgcataattattagaagtagtatctaactctcatgtagtcatttgttatgacattttggacaaaggactgaataaaacattttaagttggta

SEQ ID NO: 174387 - DNA, 3016 bp, Homo sapiens
  Payload ID: 14227
  Gene Symbol: RASGEF1B
  Gene Name: RasGEF domain family, member 1B
  Uniprot ID: Q0VAM2
  ENST ID: ENST00000509081
  CDS Start-End: 223-1641
gtttatttttgttgtcagtgccatgtaatctaaagtctgactcgtaggaagggacaagggaacagaagtcacatactcgccaccgacaaggtgatgtgctgtcatccttcggtgttcacctggcaaacttgggagacactgagtcgccttgcttttgccagagctcagttgagtcgcctcgggtcacctgcctggggaatctcagatgagctagaggaaagtatgcctcagactcctcccttttcagcaatgtttgacagcagtggttacaatcgaaacctctatcagtctgcagaggacagctgtggagggttgtattaccatgacaacaacctcctctctggatccctggaagcactcatccagcacttagtacctaatgtggattactatccagatagaacatacatatttaccttcctactcagttctcggttatttatgcatccgtatgagctaatggccaaagtttgccacttatgtgttgagcaccagagactaagtgatcctgatagtgataagaaccagatgagaaaaattgcacccaaaatccttcaactcctcacggaatggacggaaacatttccctatgattttcgggatgaaagaatgatgagaaacttaaaagatctggctcaccgaatagccagtggcgaagagacatacagaaagaatgtccagcaaatgatgcagtgtctgatccgcaagcttgctgcgctcagccagtacgaagaagtcctggcaaaaatcagctccacatccacagatcggctcacagttctcaagaccaagccacagtctatacaaagggatatcattactgtctgcaacgacccttacacgttggcccagcagctgactcatatagagctggagaggctcaattatattgggccagaagaatttgttcaggcgttcgtgcagaaggaccctttggataatgacaagagttgctacagtgaacggaagaaaacacgaaacttagaagcttacgtggaatggtttaatcgcctcagctacttggttgctacagaaatctgtatgcctgttaagaaaaaacaccgagcaagaatgattgagtatttcattgacgtagctcgggagtgttttaacattggcaacttcaactccttgatggcgataatctctggtatgaatatgagcccagtctctcgactaaaaaaaacttgggccaaagtgaagactgcaaaatttgacattcttgagcatcagatggacccttcaagcaatttctataattatcgaacagctcttcgtggggcagcacaaaggtctttaactgctcatagtagtagagaaaagattgtgataccattcttcagtctcttaatcaaagatatttatttcctcaatgagggttgtgccaaccgccttcccaatggccatgtcaattttgagaaattttgggaactggccaaacaagtgagtgaatttatgacatggaaacaagtggagtgtccatttgagagggaccggaagatcttgcagtatctgctcacagtaccagtcttcagtgaagatgctctctacttggcttcttatgagagtgaaggacctgaaaatcatatagagaaagacagatggaagtctttaaggtcgagcctcttaggcagagtttaacacatgggagctgcctgcctgctgctgctgctgcttcctgcagatcatggaggggctggcctttgttttctggcatctcgtaccacgaacactcatgaagaccctgcagtcattggagcacccgggtcagcaaagcacacaagctcactcaagaccagatggagaacttatttcctgcagctgacagatagactcagattttgtgagactgaaatgttcactgaagacacttgagaaagaatcctctaaaaatcccggctctgcacattattcatctcctggaatttccatgtgaatcacagctctgcacctggatggagttttcttttgtgtgtgtgtgttttttttaatttggttgaacatttgctgctaatgggacttgcccagctgagtgctggctctgaggaagcccacgtttcttttgttaacttaaatgaagaaaggagtggagggaggggatctaaaacccccccgtttagatcccaaaccttagctcaatcagtattgccagagaggggtaagactggttggaagctgactgcagactttgtttccccttagtatgtgctgtgttgtaaatttttctcctccctcctcctacaaggttttgagttggctgctggttagcaaactcctttttacccatataagttatttaatataataatgaagctcaacactgtggtaggaaaatagccactagaaagaaaataaaaagcagagtttgtcattggactgcttaacatgctagaaggactttttttttttttttttttttttttttttgctcttctgagctgtttacaactgaccactgtgttccacagatgtatttttcaatagctttttgttacttagttttccatgatgcctgttatttttctcttgtaaatttaaatgagctgactttaaggatcttgggaaaacccatggcataattacaattttctttttaatcgacttttcattacttttgggagtctgttggtaactaaagatgtcaacaaagaataaattggagaagttacctgtccccactatagcagtaaacaaaacagatgaaaaacaccttgctgttaactcaatggttgatctaattgtgaaatcgttcaccttgttaaacatctaagtaagtctgtagtcgctctgcaaacagccattatatttatttactctagaagaaactgtagagtagtaattcgtgctaatgagaaaaacaaaataccatgttcaaaacagatgtatttgaaaacttaatgacatggttccaaaaactagagcatgtatgtatgctgtgcatcatctcagcagacctaaaatatccccaagttgtccctttacagccatcaatatattttacactctgcggccagga

SEQ ID NO: 174388 - DNA, 860 bp, Homo sapiens
  Payload ID: 14227
  Gene Symbol: RASGEF1B
  Gene Name: RasGEF domain family, member 1B
  ENST ID: ENST00000504863
  CDS Start-End: 163-860
agtataaacaaggaacccgactggttagacagattttgtttttcttcttcccgcgcgctttagctccctgtcctttggtcgcatttgtgggcgcgcggcacgcagccgggaggccgaggactcggagttcacctgcagacatacagaaagaatgtccagcaaatgatgcagtgtctgatccgcaagcttgctgcgctcagccagtacgaagaagtcctggcaaaaatcagctccacatccacagatcggctcacagttctcaagaccaagccacagtctatacaaagggatatcattactgtctgcaacgacccttacacgttggcccagcagctgactcatatagagctggagaggctcaattatattgggccagaagaatttgttcaggcgttcgtgcagaaggaccctttggataatgacaagagttgctacagtgaacggaagaaaacacgaaacttagaagcttacgtggaatggtttaatcgcctcagctacttggttgctacagaaatctgtatgcctgttaagaaaaaacaccgagcaagaatgattgagtatttcattgacgtagctcgggagtgttttaacattggcaacttcaactccttgatggcgataatctctggtatgaatatgagcccagtctctcgactaaaaaaaacttgggccaaagtgaagactgcaaaatttgacattcttgagcatcagatggacccttcaagcaatttctataattatcgaacagctcttcgtggggcagcacaaaggtctttaactgctcatagtagtagagaaaagattgtgataccattcttcagtctcttaatcaaagatatttatttcctcaatgagggttg

SEQ ID NO: 174389 - DNA, 516 bp, Homo sapiens
  Payload ID: 14227
  Gene Symbol: RASGEF1B
  Gene Name: RasGEF domain family, member 1B
  ENST ID: ENST00000512716
  CDS Start-End: 487-516
gcggccgccgagctctccccgcccggcccagcccctccgccgcagccgcggggcagccccgagccacggccccggctggcgggcgggctgcgggcaggatcctggcgctcgggctctggcaaggggaaaggacagaaacggcgcatcgggagggaccctgcctcaccgcttgtatatggcaaagtttctcgccgagctcctgggctgcacgttgccgagcaagggcgcctctcccatgtttgagtctaaaagtcattcccgagttggcctgaaatcaagcaccaagcaaaagaccaccattttcagcacattggccagtgagaagtccttatctgactgcaaaaagataattgaaccagggcacaaggagacttttgtacttgttcaggtcacacagtaagtgatggagccaggattacaacctgcccttccttacaacctgctcttccttacaacctctgacaccatattctgaaagaggaaagtatgcctcagactcctcccttttcagcaatg

SEQ ID NO: 174390 - DNA, 3485 bp, Homo sapiens
  Payload ID: 14227
  Gene Symbol: RASGEF1B
  Gene Name: RasGEF domain family, member 1B
  ENST ID: ENST00000613784
  CDS Start-End: 128-760
cgactggttagacagattttgtttttcttcttcccgcgcgctttagctccctgtcctttggtcgcatttgtgggcgcgcggcacgcagccgggaggccgaggactcggagttcacctgcaggaaagtatgcctcagactcctcccttttcagcaatgtttgacagcagtggttacaatcgaaacctctatcagtctgcagaggacagctgtggagggttgtattaccatgacaacaacctcctctctggatccctggaagcactcatccagcacttagtacctaatgtggattactatccagatagaacatacatatttaccttcctactcagttctcggttatttatgcatccgtatgagctaatggccaaagtttgccacttatgtgttgagcaccagagactaagtgatcctgatagtgataagaaccagatgagaaaaattgcacccaaaatccttcaactcctcacggaatggacggaaacatttccctatgattttcgggatgaaagaatgatgagaaacttaaaagatctggctcaccgaatagccagtggcgaagaggttggtaacctgaatttagcgcggctgctggaattcccaggcagagcctgggtgggaaatggtgccgaattatgcatcctaatctccactgcttcctctctgttttgcctttgggcaagccctccacatcacatattggtctatttagtatgtcaagtgagaatgattataccatcccacttcaaagggatatgatctagagttttatgtgattaatttggggctatgttcatgtcaactcatgcacaggatttatgttgcaagtatgttttaattttactttacttttaccttttttcctcccaaaaaggtttgacacagctagttagatgataaatggcatgttagtagacataaacactagtggatacaaagtaaataacattattctattaaccgaggataaatagtagattaataaatcataaatagaaatagacattctgggccatggcagaaagaaaataaatacgctcctgttgagaatgagtagaggaggacaggactgctgtggtatgagtttaagttccaggtaaaagggaaatacagctggtcatgtaatattcactgtcagaaaaggggaagtatagtaattattgagggacttaaatgaaaaatttagaaactttcttctgaagaactttgtatagggtcatagaatgagatcctacaaactgctctttatggtgtttacaacataccttcctggatagaagctgagttcatagattcatgtgtaaattagcaaagataattcttgggggaggagaagactgagaaaatgaggcaagtcttccagtgctcagaagttgatttaaggatagactctagtataggtagagattaaaagtaagtctcttagataggctttcataaatatcacttccctcagttgagcctttgataagcactaactactagctgtgacaaattcaaggttatcctttttgaagcaggaccagagggctggtattctgtgttgagacttgctgggcaaggatgcccttgtagtttccatgttgcaggtcaacttctgggaacaagtcattcaggcacagatacactttcacctggaaaaagtagatgaagcatttggcaatgatgttgcattttattcgtcttaaaatgcattttccattatgaataaccttccttgagaactctttcagtggtgtgctgcaacgtataacttgataccctatcctttttttctgagacagagccttgctctgttcctcaggctagagtgtagagttgcgatcatggctcactgcatccttgacttctctggcttaatcaatcctcccacctcagcttccctagtagctgggactacaggtgcatgcaactgtgcctggctcgttttttctattttttgtagagacaaagcctcactatgttgcccaggctggtctccaacttttgggctcaagcaatccactttgggaggctgaagcaggcagatcacctgaagtcgggagttcaagaccagcctgaccaccatggagaaaccccatttctaccaaagatacacaattagccaggtgtggtggtgcatgcctataatcccagctacttgggaggctgaggcaggagaattgcttgaacccgggaggcagaaattgtggtgagccaagatcgtgccattgcactccagcctgggcaacaagagtgaaactccgcctcaagaaaaaagaattgcaaaataaaaatctttcagcagatatgctggtaaagcattgcttctcacacttggcttatacaaggatcagctgaggagcatccagagcatgtgacacaagtgcactgcagaccaagtcgatcagaatctctggggtggaacccaggctgcccccattcagcggttctgctcattgcttcccagcaggtacccttgtgtggtaccctgaatagaagtggtaatttcttactaaagtattttctgcagggatcccgggaaggggtgaggagaaggtgcatgatgtaggaatgataacatgcatggaatagcagctgaggcatagaataataaatatttttaaatgagttgttggcttttttaagtgaaaagaactttcttgtgcatgtctcatgcctgtgttatccaaaaaatcccattctgtgggaaaattttaaaacattttatttttaatatatcaagtaatataggaatatattcacttagattttgtttaaaaagaattcatacaaagcaaaagaggccaaaaaactccattcaatccagcttctctcttaaaggtaacaagtgttgtcaattttgtgtgtatccttccggcgctgctcctatgtatacaggtgttcacagaaagtagtgtgtatggcttttgtttccatgtatgtttacctagtattcatcaccctgcttgttttctctgtgttatgtcttggaaacccttccatgtcaatgtaggtagctgtatcttctttcagctgctatacagtagtccagtatgtgattgggccatgtttctttttctttttaaaaactattctattggacacaaacaagttaaatttgtttatactgaaaactcaggcgttttctgagaaagacttagcaaagaagattaagtcccttcttcatatcaaactctgtttagtaaagtagtaacatatagttgtgggttgctcttgtaaacaggctttactgactgtgaaacttcaactttgtaacatgtattttctactctgcacttgatcttagccaaaagggtgagaagcgattctaccctggatagtatatgctgtaattaagtatctccaagaaggtgtttattagccattctgagtaatacactgggaaatatttgcataattattagaagtagtatctaactctcatgtagtcatttgttatgacattttggacaaaggactgaataaaacattttaagttggt

SEQ ID NO: 174391 - DNA, 2243 bp, Homo sapiens
  Payload ID: 14228
  Gene Symbol: RASGEF1C
  Gene Name: RasGEF domain family, member 1C
  Uniprot ID: Q8N431
  ENST ID: ENST00000361132
  CDS Start-End: 133-1533
cgggcggcggcggcggcggcggcggcggcggcggcggcggcgggcggcgccccggtccgcggcgccgaggctcgcaccgggagctgcccatgggccgggcccggagttccggcgcgccgggagccggcagacatgccacagacgctgagtgcctccgacatggtcaccccaggcagcctcagcccaccccccaccgagcccacagatggcgaacaggctgggcagcccctcctggatggagcgccatcctcagcctccctggaaacactgatccagcacctggtgcccacagccgactactaccccgagaaagcctacatcttcaccttcctgctgagctctcgcctcttcatcgagccccgggagctcctggcccgggtctgccacctgtgcatcgagcagcagcagctggacaagccggtgctggacaaggcccgggtccggaagttcggccccaaactgctgcagctgttggccgagtggaccgagaccttcccaagggacttccaggaagagtcgactatcgggcaccttaaggacgtcgtgggccgcatcgccccctgtgacgaggcataccggaagaggatgcatcagctcctacaggctctgcaccagaagctggcggctctgcgccaggggccagaaggtctggtgggtgccgacaagcccatctcctacaggaccaagccaccagcctccatccacagggagctccttggtgtctgcagcgacccctacacactggcccagcagctgacccacgtggaactggagcggctgcggcacatcgggcctgaggagtttgtccaggcctttgtgaacaaggaccctctggccagcacaaagccctgcttcagtgacaagaccagcaacctggaggcttatgtgaaatggttcaacaggctgtgctacctggtggcaactgagatctgcatgccagccaagaagaagcagagggcccaggtgattgagttcttcatcgacgtggcccgcgagtgcttcaacatcggcaacttcaactccctcatggccatcatctccggcatgaacatgagccctgtctccaggctgaagaagacctgggccaaagtgaggacggccaagtttttcatcctcgagcaccagatggacccaacggggaatttctgcaactacaggacagccctgcgcggggcggcccaccgctccctgacggcccacagcagccgagagaagattgtcattcctttcttcagcctgctcatcaaagacatctacttcctgaatgagggctgcgccaaccgccttcccaatggacacgtcaactttgagaaattcctggagctggccaagcaggtgggggagttcatcacctggaaacaagtggagtgtcccttcgagcaagacgccagcatcacccactacctgtacaccgcccccatcttcagtgaggatggtctttatttggcttcttacgaaagtgagagcccagagaaccaaacagaaaaagaaagatggaaagctctaagatcttctattttggggaagacatgaaagcgctgagctgagggacgaggaagagctggagcccgcagaagccgtccacagccctgcctcagtggcccagtgggcagaggccagggagtgcctcactattttgcaaatgccgaccctgtggcctgctgcccgccccccccccccccacagtggccatacgggcacaggagaccttttatgggactttggccctggcaggacccagggcctccagacgtgcgggcggcacatgccttggggacatcctgccttcaggaccgtggggcctggtcagtctgtccatcctcggcaaggacacaacactgccccagagggtgggaccactgcaagctcgagaccttgcttggtgacatgtgccactttggccaccacccacagtctgtcaccacgtggcttgggaacttctggagccacagcaggcatcacggtgcgacgtgagatgcctgcgccagccccgagcccactggcagccactgccattccacccatggtccctcaccctgccctgccgacgagcttgtctctgcagccccaggtacccccttcctggatgctgctggccccaggagatagctttccggtgacagctgtggaacgcgtcaacaggacaaactggacacatggagttacagtgtgtacacggcagtcccgccacccagcccccttgtaaactctagtcactataaacacacccgtacgcctatcca

SEQ ID NO: 174392 - DNA, 2395 bp, Homo sapiens
  Payload ID: 14228
  Gene Symbol: RASGEF1C
  Gene Name: RasGEF domain family, member 1C
  Uniprot ID: Q8N431
  ENST ID: ENST00000393371
  CDS Start-End: 298-1698
ggggggaagaatctagaagaggcctgcccctgagtggggcaagaggagtagacaagagatgggtcctgcaggagagttgagaggccatgagaagacggagaatgaaggctgtgctgtgaggaaggggccctgacaatactcccaggaagtgaccactggactcaagctggcacaaagtggctgtggggggagcctgcccagccaggagccccgggaccagcagctcccactcaggtgcacccaactcaggtgtgcccccactcaggtcctcactgctccttgccattgcaggcagacatgccacagacgctgagtgcctccgacatggtcaccccaggcagcctcagcccaccccccaccgagcccacagatggcgaacaggctgggcagcccctcctggatggagcgccatcctcagcctccctggaaacactgatccagcacctggtgcccacagccgactactaccccgagaaagcctacatcttcaccttcctgctgagctctcgcctcttcatcgagccccgggagctcctggcccgggtctgccacctgtgcatcgagcagcagcagctggacaagccggtgctggacaaggcccgggtccggaagttcggccccaaactgctgcagctgttggccgagtggaccgagaccttcccaagggacttccaggaagagtcgactatcgggcaccttaaggacgtcgtgggccgcatcgccccctgtgacgaggcataccggaagaggatgcatcagctcctacaggctctgcaccagaagctggcggctctgcgccaggggccagaaggtctggtgggtgccgacaagcccatctcctacaggaccaagccaccagcctccatccacagggagctccttggtgtctgcagcgacccctacacactggcccagcagctgacccacgtggaactggagcggctgcggcacatcgggcctgaggagtttgtccaggcctttgtgaacaaggaccctctggccagcacaaagccctgcttcagtgacaagaccagcaacctggaggcttatgtgaaatggttcaacaggctgtgctacctggtggcaactgagatctgcatgccagccaagaagaagcagagggcccaggtgattgagttcttcatcgacgtggcccgcgagtgcttcaacatcggcaacttcaactccctcatggccatcatctccggcatgaacatgagccctgtctccaggctgaagaagacctgggccaaagtgaggacggccaagtttttcatcctcgagcaccagatggacccaacggggaatttctgcaactacaggacagccctgcgcggggcggcccaccgctccctgacggcccacagcagccgagagaagattgtcattcctttcttcagcctgctcatcaaagacatctacttcctgaatgagggctgcgccaaccgccttcccaatggacacgtcaactttgagaaattcctggagctggccaagcaggtgggggagttcatcacctggaaacaagtggagtgtcccttcgagcaagacgccagcatcacccactacctgtacaccgcccccatcttcagtgaggatggtctttatttggcttcttacgaaagtgagagcccagagaaccaaacagaaaaagaaagatggaaagctctaagatcttctattttggggaagacatgaaagcgctgagctgagggacgaggaagagctggagcccgcagaagccgtccacagccctgcctcagtggcccagtgggcagaggccagggagtgcctcactattttgcaaatgccgaccctgtggcctgctgcccgccccccccccccccacagtggccatacgggcacaggagaccttttatgggactttggccctggcaggacccagggcctccagacgtgcgggcggcacatgccttggggacatcctgccttcaggaccgtggggcctggtcagtctgtccatcctcggcaaggacacaacactgccccagagggtgggaccactgcaagctcgagaccttgcttggtgacatgtgccactttggccaccacccacagtctgtcaccacgtggcttgggaacttctggagccacagcaggcatcacggtgcgacgtgagatgcctgcgccagccccgagcccactggcagccactgccattccacccatggtccctcaccctgccctgccgacgagcttgtctctgcagccccaggtacccccttcctggatgctgctggccccaggagatagctttccggtgacagctgtggaacgcgtcaacaggacaaactggacacatggagttacagtgtgtacacggcagtcccgccacccagcccccttgtaaactctagtcactataaacacaccc

SEQ ID NO: 174393 - DNA, 2055 bp, Homo sapiens
  Payload ID: 14228
  Gene Symbol: RASGEF1C
  Gene Name: RasGEF domain family, member 1C
  Uniprot ID: Q8N431
  ENST ID: ENST00000522500
  CDS Start-End: 415-1362
agcgcgaagactcaccagggaggatggagccgtcaaccgcagaaaggccagagcaagagatggccctgcccagaaatgtgtccgtcccccctcctctccccgtgggcgcagagcaggatcgcacccccctcctcctccctggcacagagagggcacgaggccctgcctgccccgggcggccagacccgcaaggacgcgcagtgaggctcacgtgcccacccggcgcccctcacgagcgcggtgcccctcgcttgcccgtaggcccgggtccggaagttcggccccaaactgctgcagctgttggccgagtggaccgagaccttcccaagggacttccaggaagagtcgactatcgggcaccttaaggacgtcgtgggccgcatcgccccctgtgacgaggcataccggaagaggatgcatcagctcctacaggctctgcaccagaagctggcggctctgcgccaggggccagaaggtctggtgggtgccgacaagcccatctcctacaggaccaagccaccagcctccatccacagggagctccttggtgtctgcagcgacccctacacactggcccagcagctgacccacgtggaactggagcggctgcggcacatcgggcctgaggagtttgtccaggcctttgtgaacaaggaccctctggccagcacaaagccctgcttcagtgacaagaccagcaacctggaggcttatgtgaaatggttcaacaggctgtgctacctggtggcaactgagatctgcatgccagccaagaagaagcagagggcccaggtgattgagttcttcatcgacgtggcccgcgagtgcttcaacatcggcaacttcaactccctcatggccatcatctccggcatgaacatgagccctgtctccaggctgaagaagacctgggccaaagtgaggacggccaagtttttcatcctcgagcaccagatggacccaacggggaatttctgcaactacaggacagccctgcgcggggcggcccaccgctccctgacggcccacagcagccgagagaagattgtcattcctttcttcagcctgctcatcaaagacatctacttcctgaatgagggctgcgccaaccgccttcccaatggacacgtcaactttgagaaattcctggagctggccaagcaggtgggggagttcatcacctggaaacaagtggagtgtcccttcgagcaagacgccagcatcacccactacctgtacaccgcccccatcttcagtgaggatggtctttatttggcttcttacgaaagtgagagcccagagaaccaaacagaaaaagaaagatggaaagctctaagatcttctattttggggaagacatgaaagcgctgagctgagggacgaggaagagctggagcccgcagaagccgtccacagccctgcctcagtggcccagtgggcagaggccagggagtgcctcactattttgcaaatgccgaccctgtggcctgctgcccgccccccccccccccacagtggccatacgggcacaggagaccttttatgggactttggccctggcaggacccagggcctccagacgtgcgggcggcacatgccttggggacatcctgccttcaggaccgtggggcctggtcagtctgtccatcctcggcaaggacacaacactgccccagagggtgggaccactgcaagctcgagaccttgcttggtgacatgtgccactttggccaccacccacagtctgtcaccacgtggcttgggaacttctggagccacagcaggcatcacggtgcgacgtgagatgcctgcgccagccccgagcccactggcagccactgccattccacccatggtccctcaccctgccctgccgacgagcttgtctctgcagccccaggtacccccttcctggatgctgctggccccaggagatagctttccggtgacagctgtggaacgcgtcaacaggacaaactggacacatggagttacagtgtgtacacggcagtcccgccacccagcccccttgtaaactctagtcactataaacac

SEQ ID NO: 174394 - DNA, 1892 bp, Homo sapiens
  Payload ID: 14228
  Gene Symbol: RASGEF1C
  Gene Name: RasGEF domain family, member 1C
  ENST ID: ENST00000520209
  CDS Start-End: 217-933
cagtgaggctcacgtgcccacccggcgcccctcacgagcgcggtgcccctcgcttgcccgtaggcccgggtccggaagttcggccccaaactgctgcagctgttggccgagtggaccgagaccttcccaagggacttccaggaagagtcgactatcgggcaccttaaggacgtcgtgggccgcatcgccccctgtgacgaggcataccggaagaggatgcatcagctcctacaggctctgcaccagaagctggcggctctgcgccaggggccagaaggtctggtgggtgccgacaagcccatctcctacaggaccaagccaccagcctccatccacagggagctccttggtgtctgcagcgacccctacacactggcccagcagctgacccacgtggaactggagcggctgcggcacatcgggcctgaggagtttgtccaggcctttgtgaacaaggaccctctggccagcacaaagccctgcttcagtgacaagaccagcaacctggaggcttatgtgaaatggttcaacaggctgtgctacctggtggcaactgagatctgcatgccagccaagaagaagcagagggcccaggtgattgagttcttcatcgacgtggcccgcgagtgcttcaacatcggcaacttcaactccctcatggccatcatctccggcatgaacatgagccctgtctccaggctgaagaagacctgggccaaagtgaggacggccaagtttttcatcctcgagcaccagatggacccaacggggaatttctgcaactacaggacagccctgcgcggggcggcccaccgctccctgacggcccacagcagccgagagaaggaggccaccttgggaggccgaggcgagcagatcacaagattgtcattcctttcttcagcctgctcatcaaagacatctacttcctgaatgagggctgcgccaaccgccttcccaatggacacgtcaactttgagaaattcctggagctggccaagcaggtgggggagttcatcacctggaaacaagtggagtgtcccttcgagcaagacgccagcatcacccactacctgtacaccgcccccatcttcagtgaggatggtctttatttggcttcttacgaaagtgagagcccagagaaccaaacagaaaaagaaagatggaaagctctaagatcttctattttggggaagacatgaaagcgctgagctgagggacgaggaagagctggagcccgcagaagccgtccacagccctgcctcagtggcccagtgggcagaggccagggagtgcctcactattttgcaaatgccgaccctgtggcctgctgcccgccccccccccccccacagtggccatacgggcacaggagaccttttatgggactttggccctggcaggacccagggcctccagacgtgcgggcggcacatgccttggggacatcctgccttcaggaccgtggggcctggtcagtctgtccatcctcggcaaggacacaacactgccccagagggtgggaccactgcaagctcgagaccttgcttggtgacatgtgccactttggccaccacccacagtctgtcaccacgtggcttgggaacttctggagccacagcaggcatcacggtgcgacgtgagatgcctgcgccagccccgagcccactggcagccactgccattccacccatggtccctcaccctgccctgccgacgagcttgtctctgcagccccaggtacccccttcctggatgctgctggccccaggagatagctttccggtgacagctgtggaacgcgtcaacaggacaaactggacacatggagttacagtgtgtacacggcagtcccgccacccagcccccttgtaaactctagtcactataaa

SEQ ID NO: 174395 - DNA, 2268 bp, Homo sapiens
  Payload ID: 14228
  Gene Symbol: RASGEF1C
  Gene Name: RasGEF domain family, member 1C
  ENST ID: ENST00000615330
  CDS Start-End: 578-1294
ggcggcggcggcggcggcggcggcggcggcggcgggcggcgccccggtccgcggcgccgaggctcgcaccgggagctgcccatgggccgggcccggagttccggcgcgccgggagccggcagacatgccacagacgctgagtgcctccgacatggtcaccccaggcagcctcagcccaccccccaccgagcccacagatggcgaacaggctgggcagcccctcctggatggagcgccatcctcagcctccctggaaacactgatccagcacctggtgcccacagccgactactaccccgagaaagcctacatcttcaccttcctgctgagctctcgcctcttcatcgagccccgggagctcctggcccgggtctgccacctgtgcatcgagcagcagcagctggacaagccggtgctggacaaggcccgggtccggaagttcggccccaaactgctgcagctgttggccgagtggaccgagaccttcccaagggacttccaggaagagtcgactatcgggcaccttaaggacgtcgtgggccgcatcgccccctgtgacgaggcataccggaagaggatgcatcagctcctacaggctctgcaccagaagctggcggctctgcgccaggggccagaaggtctggtgggtgccgacaagcccatctcctacaggaccaagccaccagcctccatccacagggagctccttggtgtctgcagcgacccctacacactggcccagcagctgacccacgtggaactggagcggctgcggcacatcgggcctgaggagtttgtccaggcctttgtgaacaaggaccctctggccagcacaaagccctgcttcagtgacaagaccagcaacctggaggcttatgtgaaatggttcaacaggctgtgctacctggtggcaactgagatctgcatgccagccaagaagaagcagagggcccaggtgattgagttcttcatcgacgtggcccgcgagtgcttcaacatcggcaacttcaactccctcatggccatcatctccggcatgaacatgagccctgtctccaggctgaagaagacctgggccaaagtgaggacggccaagtttttcatcctcgagcaccagatggacccaacggggaatttctgcaactacaggacagccctgcgcggggcggcccaccgctccctgacggcccacagcagccgagagaaggaggccaccttgggaggccgaggcgagcagatcacaagattgtcattcctttcttcagcctgctcatcaaagacatctacttcctgaatgagggctgcgccaaccgccttcccaatggacacgtcaactttgagaaattcctggagctggccaagcaggtgggggagttcatcacctggaaacaagtggagtgtcccttcgagcaagacgccagcatcacccactacctgtacaccgcccccatcttcagtgaggatggtctttatttggcttcttacgaaagtgagagcccagagaaccaaacagaaaaagaaagatggaaagctctaagatcttctattttggggaagacatgaaagcgctgagctgagggacgaggaagagctggagcccgcagaagccgtccacagccctgcctcagtggcccagtgggcagaggccagggagtgcctcactattttgcaaatgccgaccctgtggcctgctgcccgccccccccccccccacagtggccatacgggcacaggagaccttttatgggactttggccctggcaggacccagggcctccagacgtgcgggcggcacatgccttggggacatcctgccttcaggaccgtggggcctggtcagtctgtccatcctcggcaaggacacaacactgccccagagggtgggaccactgcaagctcgagaccttgcttggtgacatgtgccactttggccaccacccacagtctgtcaccacgtggcttgggaacttctggagccacagcaggcatcacggtgcgacgtgagatgcctgcgccagccccgagcccactggcagccactgccattccacccatggtccctcaccctgccctgccgacgagcttgtctctgcagccccaggtacccccttcctggatgctgctggccccaggagatagctttccggtgacagctgtggaacgcgtcaacaggacaaactggacacatggagttacagtgtgtacacggcagtcccgccacccagcccccttgtaaactctagtcactataaacacacccgtacgcct

SEQ ID NO: 174396 - DNA, 855 bp, Homo sapiens
  Payload ID: 14229
  Gene Symbol: RIT1
  Gene Name: Ras-like without CAAX 1
  Uniprot ID: Q92963
  ENST ID: ENST00000368322
  CDS Start-End: 31-741
ccagagtaagagggacaggccagaatatgtatggaaaggtggcttttcctcggggcaaccgaggaaggccccaagaggacaatggattctggaactcgcccagttggtagctgctgtagcagccccgctgggctctcacgggagtacaaactagtgatgctgggtgctggtggtgtagggaagagtgccatgaccatgcagttcatcagccaccgattcccagaagatcatgatcccaccattgaagatgcttataagatcaggatccgtattgatgatgagcctgccaatctggacattttggatacagctggacaggcagagtttacagccatgcgggaccagtatatgagggcaggagaagggtttatcatctgttactctatcacggatcgtcgaagtttccatgaagttcgtgagtttaaacagcttatttatcgagtccgacgtactgacgatacacctgtggttcttgtgggaaacaagtcagacctcaaacagctaagacaggtcaccaaggaagaaggattggccttggcccgagaattcagctgtcccttttttgagacatctgctgcataccgctactatattgatgatgttttccatgcccttgtacgggagatacgtaggaaagaaaaggaggcagtactggccatggagaaaaaatctaagcccaaaaacagtgtatggaagaggctaaaatcaccattccggaagaagaaagattcagtaacttgaagagaagatgtgaagtgtttatctgtgaactgcagtgctgtatcaaagcagtccagtaacctgcagtactgagtatggtgcttgctctttcacttaactgataagagggacatg

SEQ ID NO: 174397 - DNA, 3445 bp, Homo sapiens
  Payload ID: 14229
  Gene Symbol: RIT1
  Gene Name: Ras-like without CAAX 1
  Uniprot ID: Q92963
  ENST ID: ENST00000368323
  CDS Start-End: 206-865
gcgactcgggcgccggtggcgccatcttactcggttgcgggaggggtcacaggtcagtgccggagcctccgcgagtgaaggaagacgaagtgcgtgacccgaccggctgtggtgttccagtccccactgaccagtaggagcagcagggcgtcggcttgtgaggtggcttttcctcggggcaaccgaggaaggccccaagaggacaatggattctggaactcgcccagttggtagctgctgtagcagccccgctgggctctcacgggagtacaaactagtgatgctgggtgctggtggtgtagggaagagtgccatgaccatgcagttcatcagccaccgattcccagaagatcatgatcccaccattgaagatgcttataagatcaggatccgtattgatgatgagcctgccaatctggacattttggatacagctggacaggcagagtttacagccatgcgggaccagtatatgagggcaggagaagggtttatcatctgttactctatcacggatcgtcgaagtttccatgaagttcgtgagtttaaacagcttatttatcgagtccgacgtactgacgatacacctgtggttcttgtgggaaacaagtcagacctcaaacagctaagacaggtcaccaaggaagaaggattggccttggcccgagaattcagctgtcccttttttgagacatctgctgcataccgctactatattgatgatgttttccatgcccttgtacgggagatacgtaggaaagaaaaggaggcagtactggccatggagaaaaaatctaagcccaaaaacagtgtatggaagaggctaaaatcaccattccggaagaagaaagattcagtaacttgaagagaagatgtgaagtgtttatctgtgaactgcagtgctgtatcaaagcagtccagtaacctgcagtactgagtatggtgcttgctctttcacttaactgataagagggacatgcctactaggagtttttaatgatgtggtatttaaagtattgtctcttagttaagtatgatttattaacccagtggagcactgtctgcttttaaattgtcacattagaatttgttctaccaatgttttgggttctgttgcgctattaattaatgtaaatttgtttatacccaggagaatatgtataccatgtgtgtttgactaagttcacaagggaagtttttggctctgcactccacattatcctttaatttcaatttcctgggactatcccagagaaagacctcagtctcttctattcacactatgcttcctagagacagaacaaaaatcatgtagggaaattggggctaatgagatcagtgccaaatttcagcagatacctgtgaggctgacacctgttgcagactatggagtggtgagatttgggaaagttgggctatatgtttgcagggacttaaaaaggtaggttcagaacagtattctcagtacaagcttcgcttttctaagaagtacacatttggcccaaattcaccgggataagtgagaacagccagaagcataaaatgtgatgaaggtttctcctgggaaccttattttactcttcatttcagggttttctttttttttttaccttcaaaggtagacattttgggaatcataactgtattactaaacgtgtttaatcaaaattcatagttggatcagccattgccttgtacaggtttattttttccccacagacgcacacaccaacacatttatattcattgcttcctcccactttgtgctctgtaaaagagctacagctggcaagatgttttttcggcccttcatcactgattgcattttccatacagaagagacatcaggggtgtgggtaaaattgtgtgtgtgcctccttgacgtggacaatcactagactcagtgctctgagaaaatctgctatttctgttgaatgggtcagtcttaaagctttaaaattcacataggtggagtttcccatctgaagatttctttacaaggactttgctaagttcatctcagggttatctgagccttgaccaagtttatcctaagggaataccactttgctccctgtgcatagtttaggaactgtagtcctaggaggaaacagctttaaatattggtagtgagttgtctaagatcaggactgttttgatatctgaccttgttatatgcggagagtaaatgcaaaaatgctaagagtaatgcatcatgtattgaatattaagtgtcactgaagcaatgtttgtgttgactagaaacgtaagatgacttgtgtagcacctctttataagcacacagctcatcttaatattttccatttttattagaggaagtaggacagagttgtgtttttctttataaacaaatgataaactagcttttttaaaaagtgactgttagaacttttttagctctgagtagtggtccctttttaaactcctggaaacatttttgttaccaaataaatcatgttttatggtactcagccatccaaaagtgaaagacctagcatttgattctgtgcaggacacaaatctcacaggaactatagcactttggaaaagcatcaaagtagaaaagaaatacagtgcaattctattatgagaatgttttacatttaaactggtttagcaccttttaagtttaaagcccatagcttcttattactagtgacctagggaattgttattaacattaagagatatatatatatatatatatatatatttttttttttttttttttttttttttaaatagagatgaggtttcactatgttgcccaggctgatctcgaactcctaggctcaagcaatcctcccaatatgctgggattacaggcatgagccaccacctggcccaagcaagaaattgacactatatagttatttaaggtagtcaggcagtagaaacattgccagaaggatagaaaggaatttggattatatataaggaaaataacaaatcggtgtttttaagactatcactgtcatatattagatccttgtattagtccatccattaatattagttctattcgtggtgctaggtagcttgacaggtatgatatgcataagtcatagctctattcttagtgtcataaagtgtagctaatttataagctctaagtaatcagctttatctaatttgagggcattaaaattactgcctagaactttgagaagagaaaaattcagggataagttgaaaggcactggaactgttcatgtccataccagaccggtaaattataagatccagatgttagtgtctagaattagctgtttagaattcagaggggacatatgttttaactttgtcatatattagcaagaattggtctactgtgatgtttggggaggaggagggggggataatttttttaatgcacttgtatgtgaagacagtttgtatgacataatacaaaacttttaaacaa

SEQ ID NO: 174398 - DNA, 919 bp, Homo sapiens
  Payload ID: 14229
  Gene Symbol: RIT1
  Gene Name: Ras-like without CAAX 1
  Uniprot ID: Q92963
  ENST ID: ENST00000539040
  CDS Start-End: 163-714
gactcgggcgccggtggcgccatcttactcggttgcgggaggggtcacaggtcagtgccggagcctccgcgagtgaaggaagacgaagtgcgtgacccgaccggctgtggtgttccagtccccactgaccagtaggagcagcagggcgtcggcttgtgagccatgaccatgcagttcatcagccaccgattcccagaagatcatgatcccaccattgaagatgcttataagatcaggatccgtattgatgatgagcctgccaatctggacattttggatacagctggacaggcagagtttacagccatgcgggaccagtatatgagggcaggagaagggtttatcatctgttactctatcacggatcgtcgaagtttccatgaagttcgtgagtttaaacagcttatttatcgagtccgacgtactgacgatacacctgtggttcttgtgggaaacaagtcagacctcaaacagctaagacaggtcaccaaggaagaaggattggccttggcccgagaattcagctgtcccttttttgagacatctgctgcataccgctactatattgatgatgttttccatgcccttgtacgggagatacgtaggaaagaaaaggaggcagtactggccatggagaaaaaatctaagcccaaaaacagtgtatggaagaggctaaaatcaccattccggaagaagaaagattcagtaacttgaagagaagatgtgaagtgtttatctgtgaactgcagtgctgtatcaaagcagtccagtaacctgcagtactgagtatggtgcttgctctttcacttaactgataagagggacatgcctactaggagtttttaatgatgtggtatttaaagtattgtctcttagttaagtatgatttattaacccagtggagcactgtctgctttta

SEQ ID NO: 174399 - DNA, 803 bp, Homo sapiens
  Payload ID: 14229
  Gene Symbol: RIT1
  Gene Name: Ras-like without CAAX 1
  ENST ID: ENST00000461050
  CDS Start-End: 146-424
cggagcctccgcgagtgaaggaagacgaagtgcgtgacccgaccggctgtggtgttccagtccccactgaccagtaggagcagcagggcgtcggcttgtgaggtggcttttcctcggggcaaccgaggaaggccccaagaggacaatggattctggaactcgcccagttggtagctgctgtagcagccccgctgggctctcacgggagtacaaactagtgatgctgggtgctggtggtgtagggaagagtgccatgaccatgcagttcatcagccaccgattcccagaagatcatgatcccaccattgaagatgcttataagatcaggatccgtattgatgatgagcctgccaatctggacattttggatacagctggacaggatagcaggcagagtttacagccatgcgggaccagtatatgagggcaggagaagggtttatcatctgttactctatcacggatcgtcgaagtttccatgaagttcgtgagtttaaacagcttatttatcgagtccgacgtactgacgatacacctgtggttcttgtgggaaacaagtcagacctcaaacagctaagacaggtcaccaaggaagaaggattggccttggcccgagaattcagctgtcccttttttgagacatctgctgcataccgctactatattgatgatgttttccatgcccttgtacgggagatacgtaggaaagaaaaggaggcagtactggccatggagaaaaaatctaagcccaaaaacagtgtatggaagaggctaaaatcaccattccggaagaagaaagattc

SEQ ID NO: 174400 - DNA, 574 bp, Homo sapiens
  Payload ID: 14229
  Gene Symbol: RIT1
  Gene Name: Ras-like without CAAX 1
  ENST ID: ENST00000609492
  CDS Start-End: 121-574
aaaggtaaggcactggcttgagggctgtcgccgtggtgtctccatcctggattaagcatttcctcctccttttctaggtggcttttcctcggggcaaccgaggaaggccccaagaggacaatggattctggaactcgcccagttggtagctgctgtagcagccccgctgggctctcacgggagtacaaactagtgatgctgggtgctggtggtgtagggaagagtgccatgaccatgcagttcatcagccaccgattcccagaagatcatgatcccaccattgaagatgcttataagatcaggatccgtattgatgatgagcctgccaatctggacattttggatacagctggacaggcagagtttacagccatgcgggaccagtatatgagggcaggagaagggtttatcatctgttactctatcacggatcgtcgaagtttccatgaagttcgtgagtttaaacagcttatttatcgagtccgacgtactgacgatacacctgtggttcttgtgggaaacaagtcagacctcaaacagctaagacaggtcaccaaggaagaaggattggcct

SEQ ID NO: 174401 - DNA, 1092 bp, Homo sapiens
  Payload ID: 14230
  Gene Symbol: RIT2
  Gene Name: Ras-like without CAAX 2
  Uniprot ID: Q99578
  ENST ID: ENST00000326695
  CDS Start-End: 173-826
gttgctatgagacccgctcgagcggaggaccagcagccagcccgacgctgatggttcttacctcgtactaaaacctttgctttgacacagttttagagttgcttaatattcgagcaagcacctgacacgggtgactttctccttctttttttcctccggtccctcgggtaagatggaggtagaaaatgaagccagctgctccccgggcagcgcatcaggcgggtccagagagtacaaggtggtaatgctgggagcagggggagttggtaaaagcgcaatgacaatgcagtttattagtcatcagttccctgattatcatgaccctactatagaagatgcttataagacccaggtcaggattgacaatgagccagcttacttggacatcttggacactgctggccaggcagaattcacagccatgcgggagcagtacatgcgaggtggggaaggcttcatcatctgctactccgtcactgaccgtcaatcatttcaggaggctgccaagtttaaagagctcatttttcaggtccgccacacctatgaaattcccctggtgctggtgggtaacaaaattgatctggaacagttccgccaggtttctacagaagaaggcttgagtcttgcccaagaatataattgtggtttttttgagacctctgcagccctcagattctgtattgatgatgcttttcatggcttagtgagggaaattcgcaagaaggagtccatgccatccttgatggaaaagaaactgaagagaaaagacagcctgtggaagaagctcaaaggttctttgaagaagaagagagaaaatatgacatgatatctttgcttttgagttcctcacgctctctgaattttattagttggacaattccatatgtagcattctgcttcaatattatctctctatgtgtctctctctctttaaatatctgcctgtaggtaaaagcaagctctgcatatctgtacctcttgagatagttttgttttgcctttaacagttggatggattttgtcaatcagctggatatgctgtttagtttttacaacatagtactaaataaaattgacattccaattgcctca

SEQ ID NO: 174402 - DNA, 870 bp, Homo sapiens
  Payload ID: 14230
  Gene Symbol: RIT2
  Gene Name: Ras-like without CAAX 2
  ENST ID: ENST00000590910
  CDS Start-End: 131-640
cgacgctgatggttcttacctcgtactaaaacctttgctttgacacagttttagagttgcttaatattcgagcaagcacctgacacgggtgactttctccttctttttttcctccggtccctcgggtaagatggaggtagaaaatgaagccagctgctccccgggcagcgcatcaggcgggtccagagagtacaaggtggtaatgctgggagcagggggagttggtaaaagcgcaatgacaatgcagtttattagtcatcagttccctgattatcatgaccctactatagaagatgcttataagacccaggtcaggattgacaatgagccagcttacttggacatcttggacactgctggccagctgtgtgactggctgaaacacagatgggaagtagagctgtgggaaatcagaagaactgaaaagcagaattcacagccatgcgggagcagtacatgcgaggtggggaaggcttcatcatctgctactccgtcactgaccgtcaatcatttcaggaggctgccaagtttaaagagctcatttttcaggtccgccacacctatgaaattcccctggtgctggtgggtaacaaaattgatctggaacagttccgccaggtttctacagaagaaggcttgagtcttgcccaagaatataattgtggtttttttgagacctctgcagccctcagattctgtattgatgatgcttttcatggcttagtgagggaaattcgcaagaaggagtccatgccatccttgatggaaaagaaactgaagagaaaagacagcctgtggaagaagctcaaaggttctttgaagaagaagagagaaaatatgacatgatatctttgcttttgagttcctcac

SEQ ID NO: 174403 - DNA, 1156 bp, Homo sapiens
  Payload ID: 14230
  Gene Symbol: RIT2
  Gene Name: Ras-like without CAAX 2
  Uniprot ID: Q99578
  ENST ID: ENST00000589109
  CDS Start-End: 173-634
gttgctatgagacccgctcgagcggaggaccagcagccagcccgacgctgatggttcttacctcgtactaaaacctttgctttgacacagttttagagttgcttaatattcgagcaagcacctgacacgggtgactttctccttctttttttcctccggtccctcgggtaagatggaggtagaaaatgaagccagctgctccccgggcagcgcatcaggcgggtccagagagtacaaggtggtaatgctgggagcagggggagttggtaaaagcgcaatgacaatgcagtttattagtcatcagttccctgattatcatgaccctactatagaagatgcttataagacccaggtcaggattgacaatgagccagcttacttggacatcttggacactgctggccaggcagaattcacagccatgcgggagcagtacatgcgaggtggggaaggcttcatcatctgctactccgtcactgaccgtcaatcatttcaggaggctgccaagtttaaagagctcatttttcaggtccgccacacctatgaaattcccctggtgctggtgggtaacaaaattgatctggaacagttccgccagcctacactgaaagagtttggaagggaagaattctgatggttgaagctgcttcttttcatatttggtttctacagaagaaggcttgagtcttgcccaagaatataattgtggtttttttgagacctctgcagccctcagattctgtattgatgatgcttttcatggcttagtgagggaaattcgcaagaaggagtccatgccatccttgatggaaaagaaactgaagagaaaagacagcctgtggaagaagctcaaaggttctttgaagaagaagagagaaaatatgacatgatatctttgcttttgagttcctcacgctctctgaattttattagttggacaattccatatgtagcattctgcttcaatattatctctctatgtgtctctctctctttaaatatctgcctgtaggtaaaagcaagctctgcatatctgtacctcttgagatagttttgttttgcctttaacagttggatggattttgtcaatcagctggatatgctgtttagtttttacaacatagtactaaataaaattgacattccaattgcctca

SEQ ID NO: 174404 - DNA, 2264 bp, Homo sapiens
  Payload ID: 14231
  Gene Symbol: RERG
  Gene Name: RAS-like, estrogen-regulated, growth inhibitor
  Uniprot ID: Q96A58
  ENST ID: ENST00000256953
  CDS Start-End: 338-937
gcagtccctccgccgctagtcggagcgagcgcgagtgaggagacccccgccgggccactggcacttgcttctgcggcgagtcccacccacgaccgcagcccagcaactcgcaaacgcaacctgaagcctgggctgcgcagtgtgggagggcttcgcgatcttgggggacccattccgaacttgcagaggaccgtagctctcctggcctggagagtgtgaacaggattgtggactcttccaagattcacaatgatatggtgaatccaaagactggaaccaaaaagatttactcagtgctttagttttaacaacagtaaattgtctaccaacacccatcatggctaaaagtgcggaggtcaaactggcaatatttgggagagcaggcgtgggcaagtcagctcttgtagtgagatttctgaccaaacggttcatctgggaatatgatcccaccctcgaatcaacctaccgacaccaagcaaccatcgatgatgaagttgtttccatggagatactagacactgctggtcaggaagataccattcagagggaggggcacatgcgatggggggaaggctttgtgctggtctacgacattactgaccgaggaagttttgaggaagtgctgccacttaagaacatcctagatgagatcaaaaagcccaagaatgtgactctcatcttggttggaaacaaagctgacttggaccactccaggcaggttagcacagaagaaggagagaagctggccacagaattggcttgtgctttttacgagtgctctgcctgcactggagaagggaacatcacagagatattctatgaattgtgtcgagaggtgcgtcgccggaggatggtgcagggcaagacgaggcgacgcagctccaccacgcatgtcaagcaagccattaacaagatgctcaccaaaatcagtagttaggcagcccagctgaggtggaccaactaattggaaacactcttccccttctgttcccctttcaaaaataaaacaaaatattgcattctttgtttggattctgagaaatgtctgggcttcccattgtttctggcctctaataggttgggaagttttagcgtgttttatgcaatttcagtgctaacaatttcttcctttcctgcttgaataagatacactctaatggcatttgaacatgtaatcaccagagattctgaaatgactggtttatgttaagctatttttaggcatcttcaccttgctttaagtaggttgaagtttttgcaaaggcatttaaaaattcaatttcttgtcagatactacaaataattttcttaaaagtctaagatagcagaaaatacagtaaaaacacaggagaagaagctgagctattggaacaggaaatagaaggaactctagtttctgtttgaagtgaggattttctgaattatctaatatcatctaggttttctttaaaattttattttgttcttcagttcaagcatcttctcactaatgtttttcactataacagagaattcatttcaatttgagttggttctctcaatgatctattgatcattacaccctaactctccttccttggctcaaacaatattttccctataacaaaggcaataggacacaaaattcacatcctgctgggccttttttcatcaagtcagggtgatataaaaacattggaagtcttttcaccaaaccctgactttattgaatgctagtagaagatgtagaattagagacatctgatttgtttatcaccttagcagaaaaaccacagtccaaaagacaagcaaattaagaatggagcttaaccatgcctccattgggaagtctagactttgagccaggtacagtaagaaaaattagcctctgattcattaagtttgccacatgacttattttgatattttggatacattaactcacttaggagaattcagaaaagaatgggtgattaaagttcattacagctgaataaatgtgtctaaaacagactcttgtattctgaaagtacagtctacaactgataaaaccttatgattcttttctcccccattatgcccctatatatatcaagatttgggtactttattttagtagaaaatatatatcttttacatatgtatgtatttataaatgcatagatatatgtataaaaatttgtaagcgttagcggcattaattcaccaatgcatttggacaacttgatgtaactgactttattttatgtgactataataaaaagcataattttctcattctgtca

SEQ ID NO: 174405 - DNA, 2134 bp, Homo sapiens
  Payload ID: 14231
  Gene Symbol: RERG
  Gene Name: RAS-like, estrogen-regulated, growth inhibitor
  Uniprot ID: Q96A58
  ENST ID: ENST00000536465
  CDS Start-End: 242-841
attggagttgactaatatgaatgtatgttattcaacccaaagagacatgaagaggcccaaaagtgactctctccattgccccactgcatgtgtttgtacactgaatgcttacagatagatggtaaatgattgtggactcttccaagattcacaatgatatggtgaatccaaagactggaaccaaaaagatttactcagtgctttagttttaacaacagtaaattgtctaccaacacccatcatggctaaaagtgcggaggtcaaactggcaatatttgggagagcaggcgtgggcaagtcagctcttgtagtgagatttctgaccaaacggttcatctgggaatatgatcccaccctcgaatcaacctaccgacaccaagcaaccatcgatgatgaagttgtttccatggagatactagacactgctggtcaggaagataccattcagagggaggggcacatgcgatggggggaaggctttgtgctggtctacgacattactgaccgaggaagttttgaggaagtgctgccacttaagaacatcctagatgagatcaaaaagcccaagaatgtgactctcatcttggttggaaacaaagctgacttggaccactccaggcaggttagcacagaagaaggagagaagctggccacagaattggcttgtgctttttacgagtgctctgcctgcactggagaagggaacatcacagagatattctatgaattgtgtcgagaggtgcgtcgccggaggatggtgcagggcaagacgaggcgacgcagctccaccacgcatgtcaagcaagccattaacaagatgctcaccaaaatcagtagttaggcagcccagctgaggtggaccaactaattggaaacactcttccccttctgttcccctttcaaaaataaaacaaaatattgcattctttgtttggattctgagaaatgtctgggcttcccattgtttctggcctctaataggttgggaagttttagcgtgttttatgcaatttcagtgctaacaatttcttcctttcctgcttgaataagatacactctaatggcatttgaacatgtaatcaccagagattctgaaatgactggtttatgttaagctatttttaggcatcttcaccttgctttaagtaggttgaagtttttgcaaaggcatttaaaaattcaatttcttgtcagatactacaaataattttcttaaaagtctaagatagcagaaaatacagtaaaaacacaggagaagaagctgagctattggaacaggaaatagaaggaactctagtttctgtttgaagtgaggattttctgaattatctaatatcatctaggttttctttaaaattttattttgttcttcagttcaagcatcttctcactaatgtttttcactataacagagaattcatttcaatttgagttggttctctcaatgatctattgatcattacaccctaactctccttccttggctcaaacaatattttccctataacaaaggcaataggacacaaaattcacatcctgctgggccttttttcatcaagtcagggtgatataaaaacattggaagtcttttcaccaaaccctgactttattgaatgctagtagaagatgtagaattagagacatctgatttgtttatcaccttagcagaaaaaccacagtccaaaagacaagcaaattaagaatggagcttaaccatgcctccattgggaagtctagactttgagccaggtacagtaagaaaaattagcctctgattcattaagtttgccacatgacttattttgatattttggatacattaactcacttaggagaattcagaaaagaatgggtgattaaagttcattacagctgaataaatgtgtctaaaacagactcttgtattctgaaagtacagtctacaactgataaaaccttatgattcttttctcccccattatgcccctatatatatcaagatttgggtactttattttagtagaaaatatatatcttttacatatgtatgtatttataaatgcatagatatatgtataaaaatttgtaagcgttagcggcattaattcaccaatgcatttggacaacttgatgtaactgactttattttatgtga

SEQ ID NO: 174406 - DNA, 574 bp, Homo sapiens
  Payload ID: 14231
  Gene Symbol: RERG
  Gene Name: RAS-like, estrogen-regulated, growth inhibitor
  ENST ID: ENST00000545567
  CDS Start-End: 235-574
aaatgcgaaagaatgacagccaggtatatcatattcaaacttctcctcagaaattatgcaagcaagaaaagagtgaaatgaaatatctgaagcattttgacaaaaagaaaatccaccgacctagaattctataccctgaaaaattactcttcaaaagtgaaggataaattaagactttcttgggcaacaaaaattgaaggaatttgctgccaataaacctgccttgaaaaaaaaatgatacgatacattcttcagagaaggagaatgatacatctcagaaactggattgtacttaaagaaaggaagagcattacagaaaaaggtaattttaaagctcttgtagtgagatttctgaccaaacggttcatctgggaatatgatcccaccctcgaatcaacctaccgacaccaagcaaccatcgatgatgaagttgtttccatggagatactagacactgctggtcaggaagataccattcagagggaggggcacatgcgatggggggaaggctttgtgctggtctacgacattactgaccgaggaagttttgaggaagtgctgccacttaagaaca

SEQ ID NO: 174407 - DNA, 655 bp, Homo sapiens
  Payload ID: 14231
  Gene Symbol: RERG
  Gene Name: RAS-like, estrogen-regulated, growth inhibitor
  ENST ID: ENST00000393736
  CDS Start-End: 540-655
ttttagtagagacggggtttcactgtgttagccaggatggtctcgatctcctgacctcgtgatccgcccgcctcggcctcccaaagtgctgggattacaggcgtcagccaccgcgcccggcctataatttttttttttaactccttcactgttgttggcagaatttagtttcttcctgttacaaggattgaggtcgccatttccttgctggtagtcacctgaggactgttcccagattctagagactgcctgcataccttggcttatcaccttccactgcctgcataccttggcttatgccctttctcctgcatcttccaagccagcaatggaagaggtaaccatccatcacggttttcccagaacaggctgatttgcgtcttctgtcctggcataaggatcccttcactctcggaagtgttccggattgtggactcttccaagattcacaatgatatggtgaatccaaagactggaaccaaaaagatttactcagtgctttagttttaacaacagtaaattgtctaccaacacccatcatggctaaaagtgcggaggtcaaactggcaatatttgggagagcaggcgtgggcaagtcagctcttgtagtgagatttctgaccaaacggttcatctgggaatatgatcccaccct

SEQ ID NO: 174408 - DNA, 2060 bp, Homo sapiens
  Payload ID: 14231
  Gene Symbol: RERG
  Gene Name: RAS-like, estrogen-regulated, growth inhibitor
  Uniprot ID: Q96A58
  ENST ID: ENST00000538313
  CDS Start-End: 141-740
gaattcccaaatttcttttgtttaaggattgtggactcttccaagattcacaatgatatggtgaatccaaagactggaaccaaaaagatttactcagtgctttagttttaacaacagtaaattgtctaccaacacccatcatggctaaaagtgcggaggtcaaactggcaatatttgggagagcaggcgtgggcaagtcagctcttgtagtgagatttctgaccaaacggttcatctgggaatatgatcccaccctcgaatcaacctaccgacaccaagcaaccatcgatgatgaagttgtttccatggagatactagacactgctggtcaggaagataccattcagagggaggggcacatgcgatggggggaaggctttgtgctggtctacgacattactgaccgaggaagttttgaggaagtgctgccacttaagaacatcctagatgagatcaaaaagcccaagaatgtgactctcatcttggttggaaacaaagctgacttggaccactccaggcaggttagcacagaagaaggagagaagctggccacagaattggcttgtgctttttacgagtgctctgcctgcactggagaagggaacatcacagagatattctatgaattgtgtcgagaggtgcgtcgccggaggatggtgcagggcaagacgaggcgacgcagctccaccacgcatgtcaagcaagccattaacaagatgctcaccaaaatcagtagttaggcagcccagctgaggtggaccaactaattggaaacactcttccccttctgttcccctttcaaaaataaaacaaaatattgcattctttgtttggattctgagaaatgtctgggcttcccattgtttctggcctctaataggttgggaagttttagcgtgttttatgcaatttcagtgctaacaatttcttcctttcctgcttgaataagatacactctaatggcatttgaacatgtaatcaccagagattctgaaatgactggtttatgttaagctatttttaggcatcttcaccttgctttaagtaggttgaagtttttgcaaaggcatttaaaaattcaatttcttgtcagatactacaaataattttcttaaaagtctaagatagcagaaaatacagtaaaaacacaggagaagaagctgagctattggaacaggaaatagaaggaactctagtttctgtttgaagtgaggattttctgaattatctaatatcatctaggttttctttaaaattttattttgttcttcagttcaagcatcttctcactaatgtttttcactataacagagaattcatttcaatttgagttggttctctcaatgatctattgatcattacaccctaactctccttccttggctcaaacaatattttccctataacaaaggcaataggacacaaaattcacatcctgctgggccttttttcatcaagtcagggtgatataaaaacattggaagtcttttcaccaaaccctgactttattgaatgctagtagaagatgtagaattagagacatctgatttgtttatcaccttagcagaaaaaccacagtccaaaagacaagcaaattaagaatggagcttaaccatgcctccattgggaagtctagactttgagccaggtacagtaagaaaaattagcctctgattcattaagtttgccacatgacttattttgatattttggatacattaactcacttaggagaattcagaaaagaatgggtgattaaagttcattacagctgaataaatgtgtctaaaacagactcttgtattctgaaagtacagtctacaactgataaaaccttatgattcttttctcccccattatgcccctatatatatcaagatttgggtactttattttagtagaaaatatatatcttttacatatgtatgtatttataaatgcatagatatatgtataaaaatttgtaagcgttagcggcattaattcaccaatgcatttggacaacttgatgtaactgactttattttatgtgactataataaaaagcataattttctcat

SEQ ID NO: 174409 - DNA, 935 bp, Homo sapiens
  Payload ID: 14231
  Gene Symbol: RERG
  Gene Name: RAS-like, estrogen-regulated, growth inhibitor
  ENST ID: ENST00000537647
  CDS Start-End: 327-539
gccgctagtcggagcgagcgcgagtgaggagacccccgccgggccactggcacttgcttctgcggcgagtcccacccacgaccgcagcccagcaactcgcaaacgcaacctgaagcctgggctgcgcagtgtgggagggcttcgcgatcttgggggacccattccgaacttgcagaggaccgtagctctcctggcctggagagtgtgaacaggattgtggactcttccaagattcacaatgatatggtgaatccaaagactggaaccaaaaagatttactcagtgctttagttttaacaacagtaaattgtctaccaacacccatcatggctaaaagtgcggaggtcaaactggcaatatttgggagagcaggcgtgggcaagtcagctcttgtagtgagatttctgaccaaacggttcatctgggaatatgatcccaccctcgaatcaacctaccgacaccaagcaaccatcgatgatgaagttgtttccatggagatactagacactgctggtcaggtgaataaagagttcagctaaaatatttttctggatcaaataaaactgagaaatctatgctatgaacaaaaataaggcacttttcttcaactaacttttgcatgcctaaaacctttttctctaattaactagccattttatatattaacatatttgtaaatatctgtatattcatccttatataaactgcccagtgtttcaagggggttttgaaaatactataatattcacatatcatctaggttagactctctcacctatattttgtggcatagcaagatattaataagttttcatggtcaaatgtgttttgaaatgctcaaatgaagttaaacaggtgtctttactgaaagaattctcagagcctctaacaggcttgtgtgtgagtctttaagaaagagatttagtatatattgt

SEQ ID NO: 174410 - DNA, 1383 bp, Homo sapiens
  Payload ID: 14231
  Gene Symbol: RERG
  Gene Name: RAS-like, estrogen-regulated, growth inhibitor
  Uniprot ID: Q96A58
  ENST ID: ENST00000546331
  CDS Start-End: 338-880
gcagtccctccgccgctagtcggagcgagcgcgagtgaggagacccccgccgggccactggcacttgcttctgcggcgagtcccacccacgaccgcagcccagcaactcgcaaacgcaacctgaagcctgggctgcgcagtgtgggagggcttcgcgatcttgggggacccattccgaacttgcagaggaccgtagctctcctggcctggagagtgtgaacaggattgtggactcttccaagattcacaatgatatggtgaatccaaagactggaaccaaaaagatttactcagtgctttagttttaacaacagtaaattgtctaccaacacccatcatggctaaaagtgcggaggtcaaactggcaatatttgggagagcaggcgtgggcaagtcagaatcaacctaccgacaccaagcaaccatcgatgatgaagttgtttccatggagatactagacactgctggtcaggaagataccattcagagggaggggcacatgcgatggggggaaggctttgtgctggtctacgacattactgaccgaggaagttttgaggaagtgctgccacttaagaacatcctagatgagatcaaaaagcccaagaatgtgactctcatcttggttggaaacaaagctgacttggaccactccaggcaggttagcacagaagaaggagagaagctggccacagaattggcttgtgctttttacgagtgctctgcctgcactggagaagggaacatcacagagatattctatgaattgtgtcgagaggtgcgtcgccggaggatggtgcagggcaagacgaggcgacgcagctccaccacgcatgtcaagcaagccattaacaagatgctcaccaaaatcagtagttaggcagcccagctgaggtggaccaactaattggaaacactcttccccttctgttcccctttcaaaaataaaacaaaatattgcattctttgtttggattctgagaaatgtctgggcttcccattgtttctggcctctaataggttgggaagttttagcgtgttttatgcaatttcagtgctaacaatttcttcctttcctgcttgaataagatacactctaatggcatttgaacatgtaatcaccagagattctgaaatgactggtttatgttaagctatttttaggcatcttcaccttgctttaagtaggttgaagtttttgcaaaggcatttaaaaattcaatttcttgtcagatactacaaataattttcttaaaagtctaagatagcagaaaatacagtaaaaacacaggagaagaagctgagctattggaacaggaaatagaaggaactctagtttctgtttgaagtgaggattttctgaattatctaatatcatctagg

SEQ ID NO: 174411 - DNA, 1490 bp, Homo sapiens
  Payload ID: 14232
  Gene Symbol: RASL10A
  Gene Name: RAS-like, family 10, member A
  Uniprot ID: Q92737
  ENST ID: ENST00000216101
  CDS Start-End: 511-1122
ggttacctcatcgccgcctccgggaggccccgctcgctcgcgccggcggctggggcggcgactccaggcgcggaagcgagagaaggatagaggcacagaggctccgggaggcagcgctgccccccgcgccccgcaccgctgcgggacccgcgccgcgagaggggcggacttcggcgcctcgcgcgtccgccggcgcctgggttggcgctgcggggcggaggcggtgtctgagcgccgctccggctctgctctctctcgagcttcggcacccgcccgagccgctcgcgcgcccgccacctgtctgcccactcggctgtctgtctgccctcccgccgccagctcctgcctcgggcctgccctctccggtctcggtgctccgaggggcgacgagaagcgcgacggggccgtggcgcaccgggcagggcgcgcggggcgcacggcctgggggcgcacggtgcggcgccggcccatgaggctttccagcgcggggagcgacagcgccggccggccatggggggtagcctgcgggtggccgttctaggcgccccgggcgtgggcaagacggccatcatccgccagttcctgttcggtgactaccccgagcgccaccggcccacggacgggccgcgcctctaccgacccgcggtgctgctcgacggcgccgtctacgacttgagcatccgcgacggcgacgtcgctggccccggctcgagccccgggggtccggaggagtggccagacgctaaggactggagcttgcaggacacggacgccttcgtgctcgtctacgacatctgcagcccggacagtttcgactacgtgaaggccctgcggcagcgcatcgcggagaccaggccggcgggcgcgcccgaagcgcccatcctcgtggtaggcaacaagcgggacaggcagcggctgcgcttcggaccgcggcgcgcgctggccgccctagtgcgcaggggctggcgctgcggctacctcgagtgctccgccaagtacaactggcacgtgctgcgtctcttccgcgagctgctgcgctgcgctctggtgcgcgcgcgccctgcacacccggccctgcgcctgcagggggcgctgcatcccgcgcgctgcagcctcatgtgacccgatcggacagtgccatccatgggccccaccttgtgactgggacaatcagggacctggattggacgggatcgcccaacttcactgggactggacagggaagtctccgccctgattggatgaggaaagctccaacccagtctcctaagcgactggcccccttttgaacctcattggacccaaccaggtcccaagctccattggagatgaccagtcctttctgggacctcaatgggtcacaatcccattggatggaaaggacttggctatgaacttgactggaaacacgcagcctgctcctggagcttcactggacatattctttatgccacacctaccacgggataataaaagggaaaataatttga

SEQ ID NO: 174412 - DNA, 1720 bp, Homo sapiens
  Payload ID: 14232
  Gene Symbol: RASL10A
  Gene Name: RAS-like, family 10, member A
  Uniprot ID: Q92737
  ENST ID: ENST00000401450
  CDS Start-End: 447-794
caggcgcggaagcgagagaaggatagaggcacagaggctccgggaggcagcgctgccccccgcgccccgcaccgctgcgggacccgcgccgcgagaggggcggacttcggcgcctcgcgcgtccgccggcgcctgggttggcgctgcggggcggaggcggtgtctgagcgccgctccggctctgctctctctcgagcttcggcacccgcccgagccgctcgcgcgcccgccacctgtctgcccactcggctgtctgtctgccctcccgccgccagctcctgcctcgggcctgccctctccggtctcggtgctccgaggggcgacgagaagcgcgacggggccgtggcgcaccgggcagggcgcgcggggcgcacggcctgggggcgcacggtgcggcgccggcccatgaggctttccagcgcggggagcgacagcgccggccggccatggggggtagcctgcgggtggccgttctaggcgccccgggcgtgggcaagacggccatcatccgccagttcctgttcggtgactaccccgagcgccaccggcccacggacgggccgcgcctctaccgacccgcggtgctgctcgacggcgccgtctacgacttgagcatccgcgacggcgacgtcgctggccccggctcgagccccgggggtccggaggagtggccagacgctaaggactggagcttgcaggacacggacgccttcgtgctcgtctacgacatctgcagcccggacagtttcgactacgtgaaggccctgcggcagcgcatcgcggagaccaggtaggggcccggcagttctggcggtggggagctaggacaggtctggcagggcctttgcctgaggagagtgtgtagggtctcccaacgtcgtgggccgggtcttaggccttcgcccgtgggaaggtcttaagctgtatgtgctctttggcccacatgggcctggggtttcgttggggcggcggggggggcggtgtctctggccgtaggaagggaatgcgcctgcgtgtgtatacccactgggggaattctccggccgtggggtccccgcgtctctcatctccattcggcccccaggccggcgggcgcgcccgaagcgcccatcctcgtggtaggcaacaagcgggacaggcagcggctgcgcttcggaccgcggcgcgcgctggccgccctagtgcgcaggggctggcgctgcggctacctcgagtgctccgccaagtacaactggcacgtgctgcgtctcttccgcgagctgctgcgctgcgctctggtgcgcgcgcgccctgcacacccggccctgcgcctgcagggggcgctgcatcccgcgcgctgcagcctcatgtgacccgatcggacagtgccatccatgggccccaccttgtgactgggacaatcagggacctggattggacgggatcgcccaacttcactgggactggacagggaagtctccgccctgattggatgaggaaagctccaacccagtctcctaagcgactggcccccttttgaacctcattggacccaaccaggtcccaagctccattggagatgaccagtcctttctgggacctcaatgggtcacaatcccattggatggaaaggacttggctatgaacttgactggaaacacgcagcctgctcctggagcttcactggacatattctttatgccacacctaccacgggataataaaagggaaaataatttga

SEQ ID NO: 174413 - DNA, 3205 bp, Homo sapiens
  Payload ID: 14233
  Gene Symbol: RASL10B
  Gene Name: RAS-like, family 10, member B
  Uniprot ID: Q96S79
  ENST ID: ENST00000603017
  CDS Start-End: 378-989
gagcaggcggcgcgctccggagggagagctggggctggaggttcctaccccctcggcggcccgcatctgcccccgcgcgcccgccctgagcccgccccgactgggcaggcgggggagcccctacttctctccccccgggcgggggagccggggggcagcgccggagcccggggggagctcagccccgccgaccggccggccagggcagggggcagctaggacggccccggtccaggtggaggccgcagagggcccagggcaagcagaggcagcaatggttggtcctgacggtggctgagcccccagcccctggaatatgcagcccgggggagccccagacagcggcaaggacgaggtggcggagtggggcgggaggcatggtctccacctaccgggtggccgtgctgggggcgcgaggtgtgggcaagagtgccatcgtgcgccagttcttgtacaacgagttcagcgaggtctgcgtccccaccaccgcccgccgcctttacctgcctgctgtcgtcatgaacggccacgtgcacgacctccagatcctcgactttccacccatcagcgccttccctgtcaatacgctccaggagtgggcagacacctgctgcaggggactccggagtgtccacgcctacatcctggtctacgacatctgctgctttgacagctttgagtacgtcaagaccatccgccagcagatcctggagacgagggtgatcggaacctcagagacgcccatcatcatcgtgggcaacaagcgggacctgcagcgcggacgcgtgatcccgcgctggaacgtgtcgcacctggtacgcaagacctggaagtgcggctacgtggaatgctcggccaagtacaactggcacatcctgctgctcttcagcgagctgctcaagagcgtcggctgcgcccgttgcaagcacgtgcacgctgccctgcgcttccagggcgcgctgcgccgcaaccgctgcgccatcatgtgacgcctgcgcgcccctcgggctgcaccggcactggccgagcggagggcggggccgtactgcggggctggggcggggagcgggcgggaaatggaactgtgacggtcccggcctgaggcccctgcagccacgcacctcccggtgagaagcagagcgcgagagggagccctccgtaactgcccagccctgccccttgcccccgtggcttcctgggacagccgccttcagtgctgtatttagtgcagtgcccggcccgacccgcgggggtgccacagccttttgggatgggggtgagcgtgcaatggaggctgggggtggcgaggtgccgccttggccgggcccccacgtgtcttctccagaatgtgtctgtctttgcctggtgtcttcctttcccgtgtccgcccaccccagcgtctgttggtacttacctgtctcacctaccctccagtcccctcccagctccgctcacagggctctcatttcgtccatccccttgtcgcagatcctggcagcttctttgtgaggccaggccttctgactgtcagcaccaccggcacagggcagagatgcgggtggcccaaggaccacgatcaaggggtccgggggaccgaggtcccagatcagtgaggggagaaggttgagctctccggcttccagggagacctccccgcccagcagcccccagagacacaacaacctaccttccagccttaactcgatggtccgtccctgccaggtgcccctcactcttcctgaccccaaagccagatcaccccctgggttaaaactttttttcttttttttttttggacagagtgtggaaagggagccccccaaaggatagcttctttttcatgatgccaggctccagtcctttattcccttctgcatactgcaatctgatctgtcagactggggaatgttgggttctggggtctggtcgtgggcaggatggtgcccagaagggggttaggttgtcccagtgaaaattctgttgccccgtctcaaccccatctgactaccccagactctgcctgcctcagatctcagactatcctgattaatctggggaagaacagagccagggaaagaatggtggggacccctgtacttgggggagacacacctgcatcttcctcctgccacagatggaggccctcaggatctgacaccctcttgtcccaacaccagtcagccctataccctaactcactccaccccattttctccggctgcctggccgggtttctacctctcgtcaccggagctgatcactgtcagttttgtaccgatttagaaataacaataataatgaagattctaggaatggcatgagggattgatgggggacttggagggagggacaagtggtgccctgtcccctgctcccctggccaaagaaagctgtccttgaggctgagccctcagccctggcctggtggggggacagcaaggtcccttgttataagaggggcagagaggacaactccgctttggccaacctagccaaggctgcagcatatagaccaggaaatcaggtagcccagactggtgatggagcagagtctgggggaagggtcgtgggtggggaatttatcaccaacatccattgtagggggaatctatgattctgcttccccagcggattcccactctgtccaccaagtggggggtagcacagcctcacagcaaccgccctgaccttgggcagtctagtgttcctgcattctagtccctgctgtgctgcaggactttgggcaagtgacctgccctctgtgagcctccctctgacacagaggaggtggctccccttccccacaccttagagtggctgggagggtaacaaagagggcctgcccctttagtctcctgcacccctgccccctggttcaccagagggagcggatgaaggatggcagcatctcacatgccccatcaccaactctgaggcacctggggtgggggggcggagcccaggcctctggctgctcccctgtgggagccattggaatgtatcccctgacaggcccccttccgcctccacctcaacccaggtcttggatttcaggtccctccacccccattctgagtctctgtccttctccttccacccgctcccagggtttcccaccacagggtctggaagtgtgtgtgacgcccattgagctgttacccgaagtcagattaaaaatcagggagtgttttccctcgtttctgta

SEQ ID NO: 174414 - DNA, 1543 bp, Homo sapiens
  Payload ID: 14234
  Gene Symbol: RASL11A
  Gene Name: RAS-like, family 11, member A
  Uniprot ID: Q6T310
  ENST ID: ENST00000241463
  CDS Start-End: 619-1347
gggcctcccaaagtgctgggattacaggcgtaagccaccgcgcccagccccttagcaccttttaaaaataaaaagggcagcgttttacagcaatctgtcccattgttgcagaaacatccaactgattgcactttttcttcttctctcgtcaactcgtaactcctatctcaagttcacccacaggtctagtgactccggctggctgctgcggggcgaggagactcgcagaatgcctgactagaggccactcgcgcgctctggacggtggccgtatctccagggtctgagccccggagccgcagtcctgccgcagagcgcctggagccgcgagcagctagcagcccggcgaagcgcacagcctcggcgatagtcagctccgcggcctctgctcccgcccctcccggccgctccgggaaggggcggagacgaggaggagctgggacggccgccgcgctcccgggcgcaccaagccctttaaaagccgcgggccttgacagttctgcaggcagccgccgcggtcccggacctctagtcccgcactcccagctggcgagccggctccgggtgcggcgaggcccagccctctcggattgcgcgccggaccccgggacgcgctccatgcggccgctcagcatgtccgggcactttctgctcgcacccatccccgagtcctcctcggactacctactgcccaaggacatcaaactggcggtgctgggcgccggccgcgtgggcaagagcgcaatgatcgtgcgcttcctgaccaagagattcattggagactatgaaccgaatacaggcaagctgtattcacggctggtctatgtcgagggggaccagctctccctgcagatccaggatactcccgggggcgtccagatccaagacagcctcccccaggtcgtcgattccctgtccaaatgcgtgcagtgggccgagggttttctgctggtctattccatcacagactatgacagctacttgtccatccgacccctttatcagcacatccggaaggtccaccctgactctaaagcccctgtcatcatcgtgggcaacaagggggaccttttgcatgcccggcaggtgcagacacaggacggtattcagctagccaatgagctgggcagcctgttccttgaaatttccactagcgaaaactacgaagatgtctgtgatgtgtttcagcatctctgcaaagaagtgagcaagatgcacggcctcagtggggaaagaagaagagcctccatcatccctcggccccgctctcccaacatgcaggacctgaagagacgcttcaagcaggctctgtctcccaaagtcaaagccccctctgcactggggtgaactatctcagacagatgcctctcctttttaatacgcatttgtgcagctaaaagactgggcttctcgctttttaatcacacattcagagtttatttttataaaaaaattgattttcaagtacatgtgtatttctgaaaattcaaacagtgattgcctagaagctggataaaattttgttttgttttattaaaagaac

SEQ ID NO: 174415 - DNA, 1995 bp, Homo sapiens
  Payload ID: 14235
  Gene Symbol: RASL11B
  Gene Name: RAS-like, family 11, member B
  Uniprot ID: Q9BPW5
  ENST ID: ENST00000248706
  CDS Start-End: 219-965
aaaacagccggcgcgccgcgcgagtgcagtctgggtctggagcctgagccctgcggaacctcggcgctcggccccaccccgcccgtacctgcacttatttattgttgttatttcttaccgcggagccccgcagtcgggtcctcccgcccgctcccgcgcagcgctagcattctccagtccctcagtcccttcccgcgcggtgcgccgcagccgaggcgatgcgcctcattcagaacatgtgcaccatcgccgagtaccccgcgccgggcaacgccgcggcctccgactgctgtgtgggcgccgccggccgccgcctggtcaagatcgccgtggtgggcgccagcggcgtgggcaagaccgcactggtggtccggttcctcaccaaacgattcatcggtgactatgaaagaaatgcaggtaatctctatactagacaagttcagatagaaggtgaaaccctggctcttcaggttcaagacactccaggtattcaggtccatgagaacagcctgagctgcagtgaacagctgaataggtgcattcgctgggcagatgctgtggtgatcgttttctccatcactgactacaagagctatgaactcatcagccagctccaccagcacgtgcagcagctacacctgggcacccggctgcctgtggtggtcgtggccaacaaagctgacctgttgcacatcaaacaggttgaccctcagcttggactgcagctagccagcatgctaggctgctcattctatgaagtgtctgtcagtgaaaattataatgatgtctacagcgccttccacgtcctctgtaaagaggtcagtcacaaacagcagcctagcagtacacccgagaagcgaagaacctccctcattcccaggcccaagtcacccaacatgcaggacctgaagaggaggtttaagcaagccctctctgccaaagtgaggactgtcacctccgtctgaagcaggaggagcactcaagggggtttggtcttcccaggaagagggcctgaggttctcctagtgcaggaacgttgaatattggcaatgattcctggttccagaaagggctggagcagaagggccaagagggcctgtggaactgctacagaaaaggaagtgttgttctgagcagggggacaggattgatgaggcttgaaagagcccactgagccactctctgaatatgtgaaatgtactctgtgtcttttcctttagagtggggagggggcataatcgtttcggtttctgcattcaactaccttgtaaatggtggtccgttgcagtttcaccaaatgtattgatgtgatttacagtgggaatgaaagaacagattaagcattgataggctttcttttttcccccttttttcttttttctcttttcttctttcttttcctctttttccccaagaggaagaattgcttttctcttaccagtatgatttgtaactctggaacactattcttacagaatgcctttctaacctgaaggatacccagatttctttctttatgtacaagatggaaaatcccctacccctcaaaaacaggttgagtttatgggccagaatattttgtataccagacattggtaagctctcatggtttacaggaaggctctggttccccctcacaggatgagcatgctcagttgggcgtgtgtggaggagctgtgaacttcacgctcttcaaccccagactttgactgtatagttttttgtttttttaactgttccatcaggaaaaaaatgtgtcagttgattttggtgtgacttgtgtaaatggttcatggcaatgacgttgggttgcttcctaggcctggctgagttgtgcctaagggtggctgaaatactaaaacacttatcttacagcaagtgaacaggggctacctgccacatcccctccacagatgcactttaaaaagccactcatgctttggcttaaactgtaattaatttattttatgtacaataaatcgcatttgaaaaaga

SEQ ID NO: 174416 - DNA, 2640 bp, Homo sapiens
  Payload ID: 14236
  Gene Symbol: RASL12
  Gene Name: RAS-like, family 12
  Uniprot ID: Q9NYN1
  ENST ID: ENST00000220062
  CDS Start-End: 278-1078
gctccaggagccggctgagcgcgccccgcggggggctccgcagcccttacaaggaatttggtggcgcttggggtggccccgcccgccaggctccaccggcccctcctccccgcggggtggcagcccgctggacgcggggccgagggcgcggacgccgacgggtccggggccgcgcgctccagggaagcctgcatcccgctcccctgggccccgacgggcgggcgcactgcgcggggcccaccggccgcagacctgcgtggccgtccagggcgtcgccatgtcctcggtgtttggaaaaccccgcgcgggcagcgggcctcagagcgcgcccctcgaggtcaacctggccatcctggggcgccgcggggctggcaagtctgccctgaccgtgaagtttctgaccaagaggtttatcagtgaatatgaccccaacttggaggacacctacagctccgaggagactgtggaccaccagcctgtccacctgagggtcatggacactgcagacctggacacccccaggaactgcgagcgctacctgaactgggcccatgccttcctggtggtgtacagcgtcgacagccgccagagctttgatagcagcagcagctacctggagctgcttgccttgcacgcgaaggagacacagcgcagcatccctgccctgctgctgggcaacaagctggacatggctcagtacaggcaagtcaccaaggcagagggtgtggctttggcaggcaggtttgggtgcctgtttttcgaggtctctgcctgtctggactttgagcacgtgcagcatgtcttccacgaggcagtgcgagaggcacggcgggagctggagaagagccccctgacccggcccctcttcatctccgaggagagggccctgccccaccaggccccgctcaccgcgcggcatgggctggccagctgcaccttcaacacgctctccaccatcaacctgaaggagatgcccactgtggcccaggccaagctggtcaccgtgaagtcatcccgggcccagagcaagcgcaaggcgcctaccctgactctcctgaagggcttcaagatcttctgaggccccctccccaggaagcctaggctcggtggctggacaggactgcagcaggacagggactggcttctcaccaccagcctttccgtctgatggacagcagaccccgcctccagcaccaagcagtgtccctacactcaattcactgtgtgagctggagtggcaggcagggatgctgcttctgttccctccaggccttggtcttcatggtaaccaccgcgtctgtggccgtagagggaaacagccactgtgacaacccagagacctggggtcagccttaagtaggaagaaattgcagtgtctatcctgctgccatcagcccttcctgctccagctacagttgggccagctgtggccttagtggatggtctgggtggatggctctgtcaatgtcaggcccgagaacagcctgcggaatgacagcctggggtccttgtgccacctggtggacgggaaaggcagggcggctgcagtttcagaggccagagcctggccctcctgtcatctgctgacttcacagaaggcccaggctacaaaccccacagtttatccaaggaaaatctagttaaaataatccaatggacagaagccccaggaaggggtatttccaacacttggcgtctcaatgaggataaaagggagggactgtaggttgtccagcataaggagccccagagttctttcaccagcagacagattctccatgtgttttcccactgttaaggactctgtccaaagaacctcagcatcagctccctcaagcttaatgatccaggctgcagaagaaagttgtcactccagtgagttacccagggctccagggagcccacagcagcatcagacccatccaggggctacagggcctgcccccctgcaggtagaaacacagtatacccgtttgtcatctggtttggcaggacccaggaccctcagcaatgagtctgagtgttcaaagcccactttagaacctaaagcattttgggttaataaagcaaaattttgcttatgttatttggtggtgtcaccgcagcttataccaagacaccatggctcagacatgggatcaggacacacctttgagatcccactgttagcaagaaaaggctgtccaaggcaggcagtgtggtagttgtctgattttgtttaccacacgccaggtcccagggaagtcttgcacagactcttagcagacaagcagggaaaagagagggtcctggtgggtggaaggattgggaaggggattctgggcctggaagcctgctccttcccctctcagccgtctcaggactactgttggattgcaaacagcatctctgacccagtcttcggactcattctgtaaatggaggagctgaggtcagaggggggctgtgaactactcaagaccacatgcttgcagtcctacaggcttcccgacccacaggccagctacggattttgcacttttgctccaggccacttgtgtgtgtatgtgtgtgtgtaccactgccatctgaacaaactatgcaataccacctgctcccttccaggagcattttaataaaagattttttttaataacagaa

SEQ ID NO: 174417 - DNA, 1523 bp, Homo sapiens
  Payload ID: 14236
  Gene Symbol: RASL12
  Gene Name: RAS-like, family 12
  Uniprot ID: Q9NYN1
  ENST ID: ENST00000421977
  CDS Start-End: 109-852
ccgcgcgctccagggaagcctgcatcccgctcccctgggccccgacgggcgggcgcactgcgcggggcccaccggccgcagacctgcgtggccgtccagggcgtcgccatgtcctcggtgtttggaaaaccccgcgcgggcagcgggcctcagagcgcgcccctcgaggtcaacctggccatcctggggcgccgcggggctggcaagtctgaggacacctacagctccgaggagactgtggaccaccagcctgtccacctgagggtcatggacactgcagacctggacacccccaggaactgcgagcgctacctgaactgggcccatgccttcctggtggtgtacagcgtcgacagccgccagagctttgatagcagcagcagctacctggagctgcttgccttgcacgcgaaggagacacagcgcagcatccctgccctgctgctgggcaacaagctggacatggctcagtacaggcaagtcaccaaggcagagggtgtggctttggcaggcaggtttgggtgcctgtttttcgaggtctctgcctgtctggactttgagcacgtgcagcatgtcttccacgaggcagtgcgagaggcacggcgggagctggagaagagccccctgacccggcccctcttcatctccgaggagagggccctgccccaccaggccccgctcaccgcgcggcatgggctggccagctgcaccttcaacacgctctccaccatcaacctgaaggagatgcccactgtggcccaggccaagctggtcaccgtgaagtcatcccgggcccagagcaagcgcaaggcgcctaccctgactctcctgaagggcttcaagatcttctgaggccccctccccaggaagcctaggctcggtggctggacaggactgcagcaggacagggactggcttctcaccaccagcctttccgtctgatggacagcagaccccgcctccagcaccaagcagtgtccctacactcaattcactgtgtgagctggagtggcaggcagggatgctgcttctgttccctccaggccttggtcttcatggtaaccaccgcgtctgtggccgtagagggaaacagccactgtgacaacccagagacctggggtcagccttaagtaggaagaaattgcagtgtctatcctgctgccatcagcccttcctgctccagctacagttgggccagctgtggccttagtggatggtctgggtggatggctctgtcaatgtcaggcccgagaacagcctgcggaatgacagcctggggtccttgtgccacctggtggacgggaaaggcagggcggctgcagtttcagaggccagagcctggccctcctgtcatctgctgacttcacagaaggcccaggctacaaaccccacagtttatccaaggaaaatctagttaaaataatccaatggacagaagccccaggaaggggtatttccaacacttggcgtctcaatgaggataaaagggagggactgtaggttgtccagcataaggagcccca

SEQ ID NO: 174418 - DNA, 982 bp, Homo sapiens
  Payload ID: 14236
  Gene Symbol: RASL12
  Gene Name: RAS-like, family 12
  Uniprot ID: Q9NYN1
  ENST ID: ENST00000434605
  CDS Start-End: 93-860
tggctcatgtgatgtggtggcccgcaggctgtatggctgcaggcccggagggcatctggagacctgtgtgatcactcatatccttagaagaaatggtaataatgggtccagaattggtgggttcttggtctgacttcaagaatgaagccgcggaccctcgagccctgaccgtgaagtttctgaccaagaggtttatcagtgaatatgaccccaacttggaggacacctacagctccgaggagactgtggaccaccagcctgtccacctgagggtcatggacactgcagacctggacacccccaggaactgcgagcgctacctgaactgggcccatgccttcctggtggtgtacagcgtcgacagccgccagagctttgatagcagcagcagctacctggagctgcttgccttgcacgcgaaggagacacagcgcagcatccctgccctgctgctgggcaacaagctggacatggctcagtacaggcaagtcaccaaggcagagggtgtggctttggcaggcaggtttgggtgcctgtttttcgaggtctctgcctgtctggactttgagcacgtgcagcatgtcttccacgaggcagtgcgagaggcacggcgggagctggagaagagccccctgacccggcccctcttcatctccgaggagagggccctgccccaccaggccccgctcaccgcgcggcatgggctggccagctgcaccttcaacacgctctccaccatcaacctgaaggagatgcccactgtggcccaggccaagctggtcaccgtgaagtcatcccgggcccagagcaagcgcaaggcgcctaccctgactctcctgaagggcttcaagatcttctgaggccccctccccaggaagcctaggctcggtggctggacaggactgcagcaggacagggactggcttctcaccaccagcctttccgtctgatggacagcagaccccgcctccagcaccaagca

SEQ ID NO: 174419 - DNA, 1569 bp, Homo sapiens
  Payload ID: 14237
  Gene Symbol: RRAD
  Gene Name: Ras-related associated with diabetes
  Uniprot ID: P55042
  ENST ID: ENST00000299759
  CDS Start-End: 252-1178
attcccctggtgggggtggacagacacgtcagcccccgcagcagcgtggaccgggggcgggagcgggggcgggtggaggcttaaataggcggctctggagccagagcccagtgcgggctgagaaggcggtggctgcagcagcagcggcggcggaaaccctaaagtccgagtccggactacgagtgcgtggcctcctaatccggatcctagtcctgagcgtgtctgtgtgcgagtggacggtcccggacgcgatgaccctgaacggcggcggcagcggagcgggcgggagccgcggtgggggccaggagcgcgagcgccgtcggggcagcacaccctggggccccgccccgccgctgcaccgccgcagcatgccggtggacgagcgcgacctgcaggcggcgctgaccccgggtgccctgacggcggccgcggccgggacggggacccagggtcccaggctggactggcccgaggactccgaggactcgctcagctcagggggcagcgactcagacgagagcgtttacaaggtgctgctgctgggggcgcccggcgtgggcaagagcgccctggcgcgcatcttcggcggtgtggaggacgggcctgaagcagaggcagcagggcacacctatgatcgctccattgtagtggacggagaagaggcatcactcatggtctacgacatttgggagcaggacgggggccgctggttgcccggccactgcatggccatgggggatgcctatgtcattgtgtactcagtgacggacaagggcagcttcgagaaggcctcagaactgcgggtccagctgcggcgtgcacggcaaacagatgatgtgcccatcatcctcgtgggcaacaagagcgacctggtgcgctctcgtgaggtctcggtggatgagggccgggcctgcgcggtggtctttgactgcaagttcattgagacatcagcggcattgcaccacaatgtccaggcgctgtttgaaggtgtcgtgcgccagatacgcctgcgcagggacagcaaagaagccaacgcacgacggcaagcaggcacccggaggcgagagagccttggcaaaaaggcgaagcgcttcttgggccgcatcgtagctcgtaacagccgcaagatggcctttcgcgccaaatccaagtcctgccacgacctctcggttctctaggtcccacccgctcccactatggtgggagacgaacggaagggttggtgggctggcccagccaactgccccgggtgcctcagagcaggctcagactctgggtccctcggagctgccagccgggcacccccaacctcatggtcatggacagatagacagtgctgccctgcgaagtggctctcaggggccagtgagggctgggcccacagagatgcatgcgcaggctcatatgcgtcccaagcagccgcagcgcagccgccgggcaggcctgcgtgccgggagaggactctgccttttttcacagcccgggtgtgcctgccctggagggaggctcttcagtgcggtagctatttgtttacatgcagatttttgtaataaaggctatttcctgata

SEQ ID NO: 174420 - DNA, 1476 bp, Homo sapiens
  Payload ID: 14237
  Gene Symbol: RRAD
  Gene Name: Ras-related associated with diabetes
  Uniprot ID: P55042
  ENST ID: ENST00000420652
  CDS Start-End: 153-1079
cagtgcgggctgagaaggcggtggctgcagcagcagcggcggcggaaaccctaaagtccgagtccggactacgagtgcgtggcctcctaatccggatcctagtcctgagcgtgtctgtgtgcgagtggatcccctagacggtcccggacgcgatgaccctgaacggcggcggcagcggagcgggcgggagccgcggtgggggccaggagcgcgagcgccgtcggggcagcacaccctggggccccgccccgccgctgcaccgccgcagcatgccggtggacgagcgcgacctgcaggcggcgctgaccccgggtgccctgacggcggccgcggccgggacggggacccagggtcccaggctggactggcccgaggactccgaggactcgctcagctcagggggcagcgactcagacgagagcgtttacaaggtgctgctgctgggggcgcccggcgtgggcaagagcgccctggcgcgcatcttcggcggtgtggaggacgggcctgaagcagaggcagcagggcacacctatgatcgctccattgtagtggacggagaagaggcatcactcatggtctacgacatttgggagcaggacgggggccgctggttgcccggccactgcatggccatgggggatgcctatgtcattgtgtactcagtgacggacaagggcagcttcgagaaggcctcagaactgcgggtccagctgcggcgtgcacggcaaacagatgatgtgcccatcatcctcgtgggcaacaagagcgacctggtgcgctctcgtgaggtctcggtggatgagggccgggcctgcgcggtggtctttgactgcaagttcattgagacatcagcggcattgcaccacaatgtccaggcgctgtttgaaggtgtcgtgcgccagatacgcctgcgcagggacagcaaagaagccaacgcacgacggcaagcaggcacccggaggcgagagagccttggcaaaaaggcgaagcgcttcttgggccgcatcgtagctcgtaacagccgcaagatggcctttcgcgccaaatccaagtcctgccacgacctctcggttctctaggtcccacccgctcccactatggtgggagacgaacggaagggttggtgggctggcccagccaactgccccgggtgcctcagagcaggctcagactctgggtccctcggagctgccagccgggcacccccaacctcatggtcatggacagatagacagtgctgccctgcgaagtggctctcaggggccagtgagggctgggcccacagagatgcatgcgcaggctcatatgcgtcccaagcagccgcagcgcagccgccgggcaggcctgcgtgccgggagaggactctgccttttttcacagcccgggtgtgcctgccctggagggaggctcttcagtgcggtagctatttgtttacatgcagatttttgtaataaaggctatttcctgatagtcatg

SEQ ID NO: 174421 - DNA, 409 bp, Homo sapiens
  Payload ID: 14237
  Gene Symbol: RRAD
  Gene Name: Ras-related associated with diabetes
  ENST ID: ENST00000568915
  CDS Start-End: 1-409
ggctggactggcccgaggactccgaggactcgctcagctcagggggcagcgactcagacgagagcgtttacaaggtgctgctgctgggggcgcccggcgtgggcaagagcgccctggcgcgcatcttcggcggtgtggaggacgggcctgaagcagaggcagcagggcacacctatgatcgctccattgtagtggacggagaagaggcatcactcatggtctacgacatttgggagcagtgctgccctgcgaagtggctctcaggggccagtgagggctgggcccacagagatgcatgcgcaggctcatatgcgtcccaagcagccgcagcgcagccgccgggcaggcctgcgtgccgggagaggactctgccttttttcacagcccgggtgtgcctgccctggaggga

SEQ ID NO: 174422 - DNA, 484 bp, Homo sapiens
  Payload ID: 14237
  Gene Symbol: RRAD
  Gene Name: Ras-related associated with diabetes
  ENST ID: ENST00000566577
  CDS Start-End: 1-484
cgaggactcgctcagctcagggggcagcgactcagacgagagcgtttacaaggtgctgctgctgggggcgcccggcgtgggcaagagcgccctggcgcgcatcttcggcggtgtggaggacgggcctgaagcagaggcagcagggcacacctatgatcgctccattgtagtggacggagaagaggcatcactcatggtctacgacatttgggagcaggacgggggccgctggttgcccggccactgcatggccatgggggatgcctatgtcattgtgtactcagtgacggacaagggcagcttcgagaaggcctcagaactgcgggctcagactctgggtccctcggagctgccagccgggcacccccaacctcatggtcatggacagatagacagtgctgccctgcgaagtggctctcaggggccagtgagggctgggcccacagagatgcatgcgcaggctcatatgcgtcccaagcagccg

SEQ ID NO: 174423 - DNA, 2323 bp, Homo sapiens
  Payload ID: 14238
  Gene Symbol: RAC1
  Gene Name: ras-related C3 botulinum toxin substrate 1 (rho family, small GTP binding protein Rac1)
  Uniprot ID: P63000
  ENST ID: ENST00000348035
  CDS Start-End: 214-792
tttcctgtttctctgcagttttcctcagctttgggtggtggccgctgccgggcatcggcttccagtccgcggagggcgaggcggcgtggacagcggccccggcacccagcgccccgccgcccgcaagccgcgcgcccgtccgccgcgccccgagcccgccgcttcctatctcagcgccctgccgccgccgccgcggcccagcgagcggccctgatgcaggccatcaagtgtgtggtggtgggagacggagctgtaggtaaaacttgcctactgatcagttacacaaccaatgcatttcctggagaatatatccctactgtctttgacaattattctgccaatgttatggtagatggaaaaccggtgaatctgggcttatgggatacagctggacaagaagattatgacagattacgccccctatcctatccgcaaacagatgtgttcttaatttgcttttcccttgtgagtcctgcatcatttgaaaatgtccgtgcaaagtggtatcctgaggtgcggcaccactgtcccaacactcccatcatcctagtgggaactaaacttgatcttagggatgataaagacacgatcgagaaactgaaggagaagaagctgactcccatcacctatccgcagggtctagccatggctaaggagattggtgctgtaaaatacctggagtgctcggcgctcacacagcgaggcctcaagacagtgtttgacgaagcgatccgagcagtcctctgcccgcctcccgtgaagaagaggaagagaaaatgcctgctgttgtaaatgtctcagcccctcgttcttggtcctgtcccttggaacctttgtacgctttgctcaaaaaaaaacaaaaaaaaaaaacaaaaaaaaaaaacaacggtggagccttcgcactcaatgccaactttttgttacagattaatttttccataaaaccattttttgaaccaatcagtaattttaaggttttgtttgttctaaatgtaagagttcagactcacattctattaaaatttagccctaaaatgacaagccttcttaaagccttatttttcaaaagcgccccccccattcttgttcagattaagagttgccaaaataccttctgaactacactgcattgttgtgccgagaacaccgagcactgaactttgcaaagaccttcgtctttgagaagacggtagcttctgcagttaggaggtgcagacacttgctctcctatgtagttctcagatgcgtaaagcagaacagcctcccgaatgaagcgttgccattgaactcaccagtgagttagcagcacgtgttcccgacataacattgtactgtaatggagtgagcgtagcagctcagctctttggatcagtctttgtgatttcatagcgagttttctgaccagcttttgcggagattttgaacagaactgctatttcctctaatgaagaattctgtttagctgtgggtgtgccgggtggggtgtgtgtgatcaaaggacaaagacagtattttgacaaaatacgaagtggagatttacactacattgtacaaggaatgaaagtgtcacgggtaaaaactctaaaaggttaatttctgtcaaatgcagtagatgatgaaagaaaggttggtattatcaggaaatgttttcttaagcttttcctttctcttacacctgccatgcctccccaaattgggcatttaattcatctttaaactggttgttctgttagtcgctaacttagtaagtgcttttcttatagaaccccttctgactgagcaatatgcctccttgtattataaaatctttctgataatgcattagaaggtttttttgtcgattagtaaaagtgctttccatgttactttattcagagctaataagtgctttccttagttttctagtaactaggtgtaaaaatcatgtgttgcagctttatagtttttaaaatattttagataattcttaaactatgaaccttcttaacatcactgtcttgccagattaccgacactgtcacttgaccaatactgaccctctttacctcgcccacgcggacacacgcctcctgtagtcgctttgcctattgatgttcctttgggtctgtgaggttctgtaaactgtgctagtgctgacgatgttctgtacaacttaactcactggcgagaatacagcgtgggacccttcagccactacaacagaattttttaaattgacagttgcagaattgtggagtgtttttacattgatcttttgctaatgcaattagcattatgttttgcatgtatgacttaataaatccttgaatcatacgactggtaa

SEQ ID NO: 174424 - DNA, 907 bp, Homo sapiens
  Payload ID: 14238
  Gene Symbol: RAC1
  Gene Name: ras-related C3 botulinum toxin substrate 1 (rho family, small GTP binding protein Rac1)
  Uniprot ID: P63000
  ENST ID: ENST00000356142
  CDS Start-End: 198-833
agttttcctcagctttgggtggtggccgctgccgggcatcggcttccagtccgcggagggcgaggcggcgtggacagcggccccggcacccagcgccccgccgcccgcaagccgcgcgcccgtccgccgcgccccgagcccgccgcttcctatctcagcgccctgccgccgccgccgcggcccagcgagcggccctgatgcaggccatcaagtgtgtggtggtgggagacggagctgtaggtaaaacttgcctactgatcagttacacaaccaatgcatttcctggagaatatatccctactgtctttgacaattattctgccaatgttatggtagatggaaaaccggtgaatctgggcttatgggatacagctggacaagaagattatgacagattacgccccctatcctatccgcaaacagttggagaaacgtacggtaaggatataacctcccggggcaaagacaagccgattgccgatgtgttcttaatttgcttttcccttgtgagtcctgcatcatttgaaaatgtccgtgcaaagtggtatcctgaggtgcggcaccactgtcccaacactcccatcatcctagtgggaactaaacttgatcttagggatgataaagacacgatcgagaaactgaaggagaagaagctgactcccatcacctatccgcagggtctagccatggctaaggagattggtgctgtaaaatacctggagtgctcggcgctcacacagcgaggcctcaagacagtgtttgacgaagcgatccgagcagtcctctgcccgcctcccgtgaagaagaggaagagaaaatgcctgctgttgtaaatgtctcagcccctcgttcttggtcctgtcccttggaacctttgtacgctttgctcaaaaaaaaacaaaaaaaa

SEQ ID NO: 174425 - DNA, 1482 bp, Homo sapiens
  Payload ID: 14239
  Gene Symbol: RAC2
  Gene Name: ras-related C3 botulinum toxin substrate 2 (rho family, small GTP binding protein Rac2)
  Uniprot ID: P15153
  ENST ID: ENST00000249071
  CDS Start-End: 123-701
cctcctgccccaccaccgctgctcctcagcaggcgcctcaccagcctccacaccccttgcgcccgcagaaacgcgcctggccctgagctgtcaccaccgacactctccaggctccggacacgatgcaggccatcaagtgtgtggtggtgggagatggggccgtgggcaagacctgccttctcatcagctacaccaccaacgcctttcccggagagtacatccccaccgtgtttgacaactattcagccaatgtgatggtggacagcaagccagtgaacctggggctgtgggacactgctgggcaggaggactacgaccgtctccggccgctctcctatccacagacggacgtcttcctcatctgcttctccctcgtcagcccagcctcttatgagaacgtccgcgccaagtggttcccagaagtgcggcaccactgccccagcacacccatcatcctggtgggcaccaagctggacctgcgggacgacaaggacaccatcgagaaactgaaggagaagaagctggctcccatcacctacccgcagggcctggcactggccaaggagattgactcggtgaaatacctggagtgctcagctctcacccagagaggcctgaaaaccgtgttcgacgaggccatccgggccgtgctgtgccctcagcccacgcggcagcagaagcgcgcctgcagcctcctctaggggttgcaccccagcgctcccacctagatgggtctgatcctccaggatccccacccaaagcctgatggcaccccggctggccatgctgtcccctccctgtggcgtttcttagcagatggctgcagagcttcgttgatggtcttttctgtactggaggcctcctgaggccaggaacgtgcaaatttgcaggtgctgcatcccaagcccctcatgctcctgccttcctgagggccagaggggagccccaggacccattaagccacccccgtgttcctgccgtcagtgccaactgccgcatgtggaagcatctacccgttcactccagtcccaccccacgcctgactcccctctggaaactgcaggccagatggttgctgccacaacttgtgtaccttcagggatggggctcttactccctcctgaggccagctgctctaatatcgatggtcctgcttgccagagagttcctctacccagcaaaaatgagtgtctcagaagtgtgctcctctggcctcagttctcctcttttggaacaacataaaacaaatttaattttctacgcctctggggatatctgctcagccaatggaaaatctgggttcaaccagcccctgccatttcttaagactttctgctgcactcacaggatcctgagctgcacttacctgtgagagtcttcaaacttttaaaccttgccagtcaggacttttgctattgcaaatagaaaacccaactcaacctgcttaagcagaaaataaatttattgattcaagtttggaga

SEQ ID NO: 174426 - DNA, 893 bp, Homo sapiens
  Payload ID: 14239
  Gene Symbol: RAC2
  Gene Name: ras-related C3 botulinum toxin substrate 2 (rho family, small GTP binding protein Rac2)
  ENST ID: ENST00000406508
  CDS Start-End: 257-703
cagcacagagggcccccaggtctcctgctggagcctccacgcagggggcctgtggggatggccagggctcagcccagcacctgagcgcccctcccaccagctgctctgccagaccgcatgctccgccccctgcaaacgaccgtggggagagcagcttgaggccgtgggcaagacctgccttctcatcagctacaccaccaacgcctttcccggagagtacatccccaccgtgtttgacaactattcagccaatgtgatggtggacagcaagccagtgaacctggggctgtgggacactgctgggcaggaggactacgaccgtctccggccgctctcctatccacagacggacgtcttcctcatctgcttctccctcgtcagcccagcctcttatgagaacgtccgcgccaagtggttcccagaagtgcggcaccactgccccagcacacccatcatcctggtgggcaccaagctggacctgcgggacgacaaggacaccatcgagaaactgaaggagaagaagctggctcccatcacctacccgcagggcctggcactggccaaggagattgactcggtgaaatacctggagtgctcagctctcacccagagaggcctgaaaaccgtgttcgacgaggccatccgggccgtgctgtgccctcagcccacgcggcagcagaagcgcgcctgcagcctcctctaggggttgcaccccagcgctcccacctagatgggtctgatcctccaggatccccacccaaagcctgatggcaccccggctggccatgctgtcccctccctgtggcgtttcttagcagatggctgcagagcttcgttgatggtcttttctgtactggaggcctcctgaggccaggaacgtgcaaatttgcagg

SEQ ID NO: 174427 - DNA, 842 bp, Homo sapiens
  Payload ID: 14239
  Gene Symbol: RAC2
  Gene Name: ras-related C3 botulinum toxin substrate 2 (rho family, small GTP binding protein Rac2)
  ENST ID: ENST00000405484
  CDS Start-End: 285-842
caggtctcctgctggagcctccacgcagggggcctgtggggatggccagggctcagcccagcacctgagcgcccctcccaccagctgctctgccagaccgcatgctccgccccctgcaaacgaccgtggggagagcagcttgagtaagttccccttccgtttcctcctgccccaccaccgctgctcctcagcaggcgcctcaccagcctccacaccccttgcgcccgcagaaacgcgcctggccctgagctgtcaccaccgacactctccaggctccggacacgatgcaggccatcaaggccgtgggcaagacctgccttctcatcagctacaccaccaacgcctttcccggagagtacatccccaccgtgtttgacaactattcagccaatgtgatggtggacagcaagccagtgaacctggggctgtgggacactgctgggcaggaggactacgaccgtctccggccgctctcctatccacagacggacgtcttcctcatctgcttctccctcgtcagcccagcctcttatgagaacgtccgcgccaagtggttcccagaagtgcggcaccactgccccagcacacccatcatcctggtgggcaccaagctggacctgcgggacgacaaggacaccatcgagaaactgaaggagaagaagctggctcccatcacctacccgcagggcctggcactggccaaggagattgactcggtgaaatacctggagtgctcagctctcacccagagaggcctgaaaaccgtgttcgacgaggccatccgggccgtgctgtgccctcagcccacgcggcagcagaagcgcgcctgcagcctcctctag

SEQ ID NO: 174428 - DNA, 569 bp, Homo sapiens
  Payload ID: 14239
  Gene Symbol: RAC2
  Gene Name: ras-related C3 botulinum toxin substrate 2 (rho family, small GTP binding protein Rac2)
  ENST ID: ENST00000401529
  CDS Start-End: 101-361
tcctcagcaggcgcctcaccagcctccacaccccttgcgcccgcagaaacgcgcctggccctgagctgtcaccaccgacactctccaggctccggacacgatgcaggccatcaagtgtgtggtggtgggagatggggccgtgggcaagacctgccttctcatcagctacaccaccaacgcctttcccggagagtacatccccaccgtgcctgggaggccctgcgctctattgcaggatgcggaggcagggctgtcatcggacgtggagggagcgtgttggtgtcagactcaggagggaaggatgactggggaggcaccagcccctccctggccagccctcaggggtccccatcactcctaggacatttccccgactccctagcatggcactcaaggctcctgatggccttcactcaacctcccacctggccttattacccattactttgcttcacactctgcctcctccggaccctactgttcgccacaagctccctgcacatttctaccccagggcctttgctcaagctgttctctctccccatagtgctttttctccccacatccac

SEQ ID NO: 174429 - DNA, 705 bp, Homo sapiens
  Payload ID: 14239
  Gene Symbol: RAC2
  Gene Name: ras-related C3 botulinum toxin substrate 2 (rho family, small GTP binding protein Rac2)
  ENST ID: ENST00000441619
  CDS Start-End: 207-705
gagggcccccaggtctcctgctggagcctccacgcagggggcctgtggggatggccagggctcagcccagcacctgagcgcccctcccaccagctgctctgccagaccgcatgctccgccccctgcaaacgaccgtggggagagcagcttgaaaacgcgcctggccctgagctgtcaccaccgacactctccaggctccggacacgatgcaggccatcaagtgtgtggtggtgggagatggggccgtgggcaagacctgccttctcatcagctacaccaccaacgcctttcccggagagtacatccccaccgtgtttgacaactattcagccaatgtgatggtggacagcaagccagtgaacctggggctgtgggacactgctgggcaggaggactacgaccgtctccggccgctctcctatccacagacggacgtcttcctcatctgcttctccctcgtcagcccagcctcttatgagaacgtccgcgccaagtggttcccagaagtgcggcaccactgccccagcacacccatcatcctggtgggcaccaagctggacctgcgggacgacaaggacaccatcgagaaactgaaggagaagaagctggctcccatcacctacccgcagggcctggcactggccaaggagattgactcggtgaaatacctggagtgctcagctctcacccagagaggcctgaaaa

SEQ ID NO: 174430 - DNA, 1090 bp, Homo sapiens
  Payload ID: 14240
  Gene Symbol: RAC3
  Gene Name: ras-related C3 botulinum toxin substrate 3 (rho family, small GTP binding protein Rac3)
  Uniprot ID: P60763
  ENST ID: ENST00000306897
  CDS Start-End: 139-717
gtctccgcgcccggcgctcggcggcgctcggctgtctccggccgatcgctcggcgctcgggtccgcggccgctgcggcgccgggcatttctccgcagctcggctcgcggccgcgcccgccgccgcccggcccgcgcccatgcaggccatcaagtgcgtggtggtcggcgacggcgccgtggggaagacatgcttgctgatcagctacacgaccaacgccttccccggagagtacatccccaccgtttttgacaactactctgccaacgtgatggtggacgggaaaccagtcaacttggggctgtgggacacagcgggtcaggaggactacgatcggctgcggccactctcctacccccaaactgacgtctttctgatctgcttctctctggtgagcccggcctccttcgagaatgttcgtgccaagtggtacccggaggtgcggcaccactgcccccacacgcccatcctcctggtgggcaccaagctggacctccgcgacgacaaggacaccattgagcggctgcgggacaagaagctggcacccatcacctacccacagggcctggccatggcccgggagattggctctgtgaaatacctggagtgctcagccctgacccagcggggcctgaagacagtgtttgacgaggcgatccgcgcggtgctctgcccgcccccagtgaagaagccggggaagaagtgcaccgtcttctagagccctggcccacccgagcctgagggctggcggggagcagccctggacgtgtccgctgttgtgttgagacgtgtggtgtccctgagtcggctgtggggagcggtgggggtgggccggggggaagcatggggatgaggctgggtggcaggatcctgtcctctctgccgcctcattctggggtgtggctccagccttccctggcccccgccggaggccgggagggagcagggtctccctcagggctgcaggggcaggtgcagggaagccccaggatgggcttccctggagggggagggtgggggggagttctgttccttgtgccccgaggtggggcagccccttctcattttatacaataaacattctccaccta

SEQ ID NO: 174431 - DNA, 730 bp, Homo sapiens
  Payload ID: 14240
  Gene Symbol: RAC3
  Gene Name: ras-related C3 botulinum toxin substrate 3 (rho family, small GTP binding protein Rac3)
  ENST ID: ENST00000584341
  CDS Start-End: 341-730
ccttattcaccaccccagcccccggagcccggcctgcccaggtcgtcctccagccttaggtcgccacggatctggtgggctgggtccccctctcgaccccagacgcccctaactcgcctctggctccgggagagggggctgcccttgctgggcagagggtccgaggccgggcccgggagccacgtggcttgccctgtccgcagcgccgtggggaagacatgcttgctgatcagctacacgaccaacgccttccccggagagtacatccccaccgtgtgagtgtgggggcttcccgggagagcacaggccctccgtttttgacaactactctgccaacgtgatggtggacgggaaaccagtcaacttggggctgtgggacacagcgggtcaggaggactacgatcggctgcggccactctcctacccccaaactgacgtctttctgatctgcttctctctggtgagcccggcctccttcgagaatgttcgtgccaagtggtacccggaggtgcggcaccactgcccccacacgcccatcctcctggtgggcaccaagctggacctccgcgacgacaaggacaccattgagcggctgcgggacaagaagctggcacccatcacctacccacagggcctggccatggcccgggagattggctctgtgaaatacctggagtgctcagccctgacccagcggggcctgaagacagtgtttgacgaggcgatccgc

SEQ ID NO: 174432 - DNA, 831 bp, Homo sapiens
  Payload ID: 14240
  Gene Symbol: RAC3
  Gene Name: ras-related C3 botulinum toxin substrate 3 (rho family, small GTP binding protein Rac3)
  ENST ID: ENST00000580965
  CDS Start-End: 424-831
cctcccagtgggtggggccaggcctctcacctgggctgaaccctcagccggccccaccctctcctgccgccaccctcggagtcggggcctctgcctggggccccagtgtggggcgccctgcgcccttattcaccaccccagcccccggagcccggcctgcccaggtcgtcctccagccttaggtcgccacggatctggtgggctgggtccccctctcgaccccagacgcccctaactcgcctctggctccgggagagggggctgcccttgctgggcagagggtccgaggccgggcccgggagccacgtggcttgccctgtccgcagcgccgtggggaagacatgcttgctgatcagctacacgaccaacgccttccccggagagtacatccccaccgtttttgacaactactctgccaacgtgatggtggacgggaaaccagtcaacttggggctgtgggacacagcgggtcaggaggactacgatcggctgcggccactctcctacccccaaactgacgtctttctgatctgcttctctctggtgagcccggcctccttcgagaatgttcgtgccaagtggtacccggaggtgcggcaccactgcccccacacgcccatcctcctggtgggcaccaagctggacctccgcgacgacaaggacaccattgagcggctgcgggacaagaagctggcacccatcacctacccacagggcctggccatggcccgggagattggctctgtgaaatacctggagtgctcagccctgacccagcggggcctgaagacagtgtttgacgaggcgatccgcgcggtgctctgcccgccc

SEQ ID NO: 174433 - DNA, 1589 bp, Homo sapiens
  Payload ID: 14241
  Gene Symbol: RRAGA
  Gene Name: Ras-related GTP binding A
  Uniprot ID: Q7L523
  ENST ID: ENST00000380527
  CDS Start-End: 266-1207
gggacgcagcggctccctcccggaaagcgagcgtatctcccgagccgttgccactgacagccgcgggcgctcccatctgagtaagagccagcccgtccgcggcctctccagccccgggttcgcgctctcgactctcctgcctgcccagctgcgcggcggagcggagcgaggcgcggcctgcgagtccccggcagcccccgacccctccctcggcgctgcgtgtaggccgcgccctcaggcccagtccgcggtgccccggcgggtgatgccaaatacagccatgaagaaaaaggtgctgctgatggggaagagcgggtcggggaagaccagcatgaggtcgataatcttcgccaattacattgctcgcgacacccggcgcctgggggccaccattgacgtggaacactcccacgtccgattcctagggaacctggtgctgaacctgtgggactgtggcggtcaggacaccttcatggaaaattacttcaccagccagcgagacaatatcttccgtaacgtggaagttttgatttacgtgtttgacgtggagagccgcgaactggaaaaggacatgcattattaccagtcgtgtctggaggccatcctccagaactctcctgacgccaaaatcttctgcctggtgcacaaaatggatctggttcaggaggatcagcgtgacctgatttttaaagagcgagaggaagacctgaggcgtctgtctcgcccgctggagtgtgcttgttttcgaacgtccatctgggatgagacgctctacaaagcctggtccagcatcgtctaccagctgattcccaacgttcagcagctggagatgaacctcaggaattttgcccaaatcattgaggccgatgaagttctgctgttcgaaagagctacattcttggttatttcccactaccagtgcaaagagcagcgcgacgtccaccggtttgagaagatcagcaacatcatcaaacagttcaagctgagctgcagtaaattggccgcttccttccagagcatggaagttaggaattccaacttcgctgctttcatcgacatcttcacctcaaatacgtacgtgatggtggtcatgtcagatccgtcgatcccttctgcggccactctgatcaacattcgcaatgcccggaaacactttgagaagctggagagagtggatggccccaagcacagtctccttatgcgttgaatattgccaaatgctctttctgaaaatgctgaattgccttttttgtttgcatcctttatttttaatattcataatgtcgtgtgcttaaaagtgggctttgaagtgtgtgctgcttactcctttcatctttctccccgcttccccagtctttaaacattggacgctatttactcagctacccagtagagcttgaagctgacctttctgagaagttggtatggtgtaacactaaagtaggtggttcgtgtgtgttctcattacctggttatgatagatatgcacatcaaagcctttaccagtatcttcctgtattccgtatcagattgcaaagacggaatgttactattttatcagcaaggtattaaaatgcatttataaattc

SEQ ID NO: 174434 - DNA, 1573 bp, Homo sapiens
  Payload ID: 14242
  Gene Symbol: RRAGB
  Gene Name: Ras-related GTP binding B
  Uniprot ID: Q5VZM2
  ENST ID: ENST00000262850
  CDS Start-End: 444-1568
cagctgaggcgttctccgcttagtgcctacggcatgggtcagctctttctgccacctccgccttcgcggtcctcacctctttgcgggtgaagttacctttgggtttccagaccttgggggcctgaggcccaaactcgggacgaacccctaacccacctctcttttcctgtcattctccaactcttactttgtaccacggaatcacttggccttaaagctagccagctcggccgtgccttgaggccaggttcgagagataaaggtaaccgtggggaaagcggccccccagtggacaaaggcggaggcaagaatagagcaggcctgagggccataggcgatgagaataggcagttgaggggtgaaaaagaaaacaaacaaacaacaacaacaaaccctgaagagtactgaagatttagaagggactggaaaggacttgttgcgcaatggaagaatctgactctgagaaaacgacggagaaagaaaatctggggccgagaatggatccaccactaggggaaccggaaggatcgcttgggtgggtgctaccaaatacagccatgaagaaaaaggtgctgttgatgggtaaaagtgggtctggtaagaccagcatgaggtctattatctttgcaaattatattgccagagacacacgtcgccttggcgcaacaatactagaccgtatacatagtcttcaaattaatagcagtttgagcacctactctctcgtagactctgttggaaatacaaagacatttgatgtagaacattctcatgttcgatttctgggaaacctggtattgaacctgtgggattgtggtgggcaagacaccttcatggaaaattatttcactagccaacgggacaacatcttccgaaatgtggaggttctgatttatgtctttgatgtggagagccgcgaactggaaaaggacatgcactattaccaatcatgcctggaggccattctgcagaattctccagatgccaaaatattttgcttggtacacaaaatggatctggtacaggaggatcaacgggacctgatttttaaagagcgagaagaagatttgaggcgtttgtctcgcccattggaatgttcttgtttccgaacatctatctgggatgaaaccctctataaggcttggtccagcatagtttatcagctgattcccaatgttcagcagctggaaatgaacctaaggaattttgctgaaattatcgaagctgatgaagtacttctttttgagagagctacttttctggtaatttctcactatcagtgtaaagagcagcgtgatgcccatagatttgagaaaataagcaacattattaagcagttcaagctgagctgcagcaagctggctgcctctttccagagtatggaagtcaggaactctaacttcgctgctttcattgacatctttacatccaacacttatgtgatggttgtgatgtctgatccgtccattccttctgcagctactctgatcaacatccgcaatgccaggaaacactttgaaaagctggaaagagtggatggaccaaagcagtgtcttctcatgcgctaaacatt

SEQ ID NO: 174435 - DNA, 2061 bp, Homo sapiens
  Payload ID: 14242
  Gene Symbol: RRAGB
  Gene Name: Ras-related GTP binding B
  Uniprot ID: Q5VZM2
  ENST ID: ENST00000374941
  CDS Start-End: 590-1630
ggggtaaggcagatgcccacgtgatcctggcctgcagttgggtggctgcggtgagatacctgggttcctgaagggcgggtggttaggtcgtaactactgcccccgccggctgactctccgagcggccgggctcggaagccacgagccagctgaggcgttctccgcttagtgcctacggcatgggtcagctctttctgccacctccgccttcgcggtcctcacctctttgcgggtgaagttacctttgggtttccagaccttgggggcctgaggcccaaactcgggacgaacccctaacccacctctcttttcctgtcattctccaactcttactttgtaccacggaatcacttggccttaaagctagccagctcggccgtgccttgaggccaggttcgagagataaaggtaaccgtggggaaagcggccccccagtggacaaaggcggaggcaagaatagagcaggcctgagggccataggcgatgagaataggcagttgaggggtgaaaaagaaaacaaacaaacaacaacaacaaaccctgaagagtactgaagatttagaagggactggaaaggacttgttgcgcaatggaagaatctgactctgagaaaacgacggagaaagaaaatctggggccgagaatggatccaccactaggggaaccggaaggatcgcttgggtgggtgctaccaaatacagccatgaagaaaaaggtgctgttgatgggtaaaagtgggtctggtaagaccagcatgaggtctattatctttgcaaattatattgccagagacacacgtcgccttggcgcaacaattgatgtagaacattctcatgttcgatttctgggaaacctggtattgaacctgtgggattgtggtgggcaagacaccttcatggaaaattatttcactagccaacgggacaacatcttccgaaatgtggaggttctgatttatgtctttgatgtggagagccgcgaactggaaaaggacatgcactattaccaatcatgcctggaggccattctgcagaattctccagatgccaaaatattttgcttggtacacaaaatggatctggtacaggaggatcaacgggacctgatttttaaagagcgagaagaagatttgaggcgtttgtctcgcccattggaatgttcttgtttccgaacatctatctgggatgaaaccctctataaggcttggtccagcatagtttatcagctgattcccaatgttcagcagctggaaatgaacctaaggaattttgctgaaattatcgaagctgatgaagtacttctttttgagagagctacttttctggtaatttctcactatcagtgtaaagagcagcgtgatgcccatagatttgagaaaataagcaacattattaagcagttcaagctgagctgcagcaagctggctgcctctttccagagtatggaagtcaggaactctaacttcgctgctttcattgacatctttacatccaacacttatgtgatggttgtgatgtctgatccgtccattccttctgcagctactctgatcaacatccgcaatgccaggaaacactttgaaaagctggaaagagtggatggaccaaagcagtgtcttctcatgcgctaaacattgatgaatattgtttcacacaaaaattaaaagtttcctaattaatgttgtattcatatatgtaggctctgaaatgttgtgatgcttattgcttctgtatttcttctctactccctagtcttaatgtttaaccttgaatgctattaacttaaatagccattgaggagttagaagatgaattgttcatgaagtcggtgttacataaaagtaggtgatatgtaagttttctgataacaaggttctaatagtgtttaaatgtactggtaacctggttccaatagttgtgtttgcccaagcctttctcggcatcatcttgtattccttatcagatagtaagtaacctgtaagtttggagtattactgttttctcagcatgcattaaaaatattccttaacttcaattgtaaataaacttttggtgttaggga

SEQ ID NO: 174436 - DNA, 644 bp, Homo sapiens
  Payload ID: 14242
  Gene Symbol: RRAGB
  Gene Name: Ras-related GTP binding B
  ENST ID: ENST00000414239
  CDS Start-End: 63-644
agatgcccacgtgatcctggcctgcagttgggtggctgcggtgggtgctaccaaatacagccatgaagaaaaaggtgctgttgatgggtaaaagtgggtctggtaagaccagcatgaggtctattatctttgcaaattatattgccagagacacacgtcgccttggcgcaacaattgatgtagaacattctcatgttcgatttctgggaaacctggtattgaacctgtgggattgtggtgggcaagacaccttcatggaaaattatttcactagccaacgggacaacatcttccgaaatgtggaggttctgatttatgtctttgatgtggagagccgcgaactggaaaaggacatgcactattaccaatcatgcctggaggccattctgcagaattctccagatgccaaaatattttgcttggtacacaaaatggatctggtacaggaggatcaacgggacctgatttttaaagagcgagaagaagatttgaggcgtttgtctcgcccattggaatgttcttgtttccgaacatctatctgggatgaaaccctctataaggcttggtccagcatagtttatcagctgattcccaatgttcagcagctggaaatgaacctaaggaattttgctgaaattatcgaa

SEQ ID NO: 174437 - DNA, 2732 bp, Homo sapiens
  Payload ID: 14243
  Gene Symbol: RRAGC
  Gene Name: Ras-related GTP binding C
  Uniprot ID: Q9HB90
  ENST ID: ENST00000373001
  CDS Start-End: 178-1377
ggctgggcttcggctcggggcctatgagagccgggctccggggggcgggccggactgtggcggctgccgggggcggtggcggtggtggcggcggcggcggaggcggactggggaggcggcggcctggctcggcctggcctggcctgtcagggcgcgggcggcggcggctccagcaccatgtccctgcagtacggggcggaggagacgcccctcgccggcagttacggcgcggccgattcgtttccaaaggacttcggctacggcgtggaggaggaggaagaggaggcggcggcggcgggcggaggggttggggcaggggcaggcggtggctgtggtccggggggcgctgacagctccaagccgaggattctgctcatgggactccggcgcagcggcaagtcctccatccagaaggtggtgtttcataagatgtcacccaacgagaccctctttttggaaagtaccaacaagatttataaggatgacatttccaatagctcctttgtgaatttccagatatgggattttcctgggcaaatggacttttttgacccaacctttgactatgagatgatcttcaggggaacaggagcattgatatacgtcattgacgcacaggatgactacatggaggctttaacaagacttcacattactgtttctaaagcctacaaagttaacccagacatgaattttgaggtttttattcacaaagttgatggtctgtctgatgatcacaaaatagaaacacagagggacattcatcaaagggccaatgatgaccttgcagatgctgggctagaaaaactccatcttagcttttatctgactagtatctatgaccattcaatatttgaagcctttagtaaggtggtgcagaaactcattccacaactgccgaccttggaaaacctattaaatatctttatatcaaattcaggtattgaaaaagcttttctctttgatgttgtcagcaaaatctacattgcaacagacagttcccctgtggatatgcaatcttatgaactttgctgtgacatgatcgatgttgtaattgatgtgtcttgtatatatgggttaaaggaagatggaagtggaagtgcttatgacaaagaatctatggcaattatcaagctgaataatacaactgtcctttatttaaaggaggtgactaaatttttggcactggtctgcattctaagggaagaaagctttgaaagaaaaggtttaatagactacaacttccactgtttccgaaaagctattcatgaggtttttgaggtgggtgtgacttctcacaggagctgtggtcaccagactagtgcctccagtctgaaagcgctgacacacaatggcacgccacgaaacgccatctagtctgaatcccagcgtcggggctctgtgccagcttactcttcactccagggtcggatgccacgtgctacaggacatgggagctgctgcttgtgggaatctggtgcctgttccactagagacaaggggtagagtttctcatttggatgaaaaccccttcaactggtggtgtacaactgaagctactatatcttttttgaaaatggcaaaaaaaaaaaaaaaaaattctggagaccacagaactcaagtgtgtgtttctcctcttttgggtcccctttaagtagttgggatattttggacctggagataacaccagttacccatccttaccagggaatgttgccatcaattccagttgaaaataatagaaaagactgaatttttatatgcttcacttaggctttcatttgagtagactctaaaaattctgccttgcttaagttctaacactgcctctcagatttcagttttggacattgcacaactaagaccttttaaatgcatttgcttgctaactcggaagacacatagtctgcagcaagacattcctatattgaagaaatgagagaaaattttatgctgcatcaggtggagagcaaggctcaacggtggttgcattagttccctcggaagtattgaaaaaactttgaaatggaagaaaatttttgcacctatgttctgagtaccagatgtctgggttctttcttctgcattagataaatgatcatgctcagtgtaacaaagggaattaaaagttttcccacagtccccttctaggggagaaactcattgtgtcactgaaatgtttagcttactttaatcttgatatcagcctctacagaccttttattctaagctatcgagcttcttgattgcatttggttgaccacgagtgaccctaaggcattgggggactgtccactgggagttggagtgagcacgtggtgctgcaacaggcattgttttacatactttgtctctagtattctgacaccaagtgtcaactgtggtactttctttgcctaggatatgaattcataattgttgcttttgttgatggttgataccctttccattgatttaaacctaacacattatttctattccacatgcccagtagacatatattccaaagccactggaccacttgagtacataagtgccactgtttaatgcaatatgtatattcaggtctgtaaagctaacagtgtgacttggagtgcttcctgcaggtgattctgacttgagtatttacatggaccatggtgatatccaaaagaaaaatgctttttatatttatagattatttcattgaactatatatgaaatgggtatcaataaatgtatttactccaaaa

SEQ ID NO: 174438 - DNA, 4042 bp, Homo sapiens
  Payload ID: 14244
  Gene Symbol: RRAGD
  Gene Name: Ras-related GTP binding D
  Uniprot ID: Q9NQL2
  ENST ID: ENST00000359203
  CDS Start-End: 235-984
tgcgggcggccggctaggaggcttggcccccaccccgggacccccgccgtccccgggccggccggccggtgggcacgatgagccaggtgctggggaagccgcagccgcaggacgaggacgacgcggaggaggaggaggaggaggatgagctggtggggctagcggactacggagacgggcccgactcctccgacgccgatccggacagcggcacagaggagggaggatgattacatggaagccctggccaggctccacctcacggtgaccagggcctacaaagtgaatactgacatcaacttcgaggtgtttattcataaagtggatggtctgtcagatgaccacaaaattgaaacccaaagagatattcaccagagggcaaacgatgaccttgcagatgctggattagaaaaaattcacctcagcttttatctgacaagcatatatgatcattcaatatttgaagcttttagcaaagttgttcagaaactgattccacaactcccaactctggagaatttgctgaacatctttatctcaaattctggaattgaaaaggcatttctatttgatgtggtcagtaaaatttatattgcaactgatagtactccggtggatatgcaaacctatgagctctgctgtgatatgatagatgtggttattgacatctcttgtatttatggtctcaaagaagatggagcaggaaccccctatgacaaggaatccacagccatcataaagcttaataatacaaccgtgctttatttaaaagaggtgacaaagttcctggctctcgtttgctttgtcagagaggaaagctttgaaagaaaagggctaattgactataattttcattgcttccggaaggccattcatgaagtttttgaggtgagaatgaaagtagtaaaatctcgaaaggttcagaatcggctgcagaagaaaaagagagccacccctaatgggacccctagagtgctgctgtaggtgaggtttcaggaatgtcttttgaaatcagaccttatccatgaggctgctgcgccatgttgcactaaaggaagaggaagaaggagattgggacacataccattgatttgttgttaaaaaaaaaaaattcctgcaaccctcttgatcttctcttttataaataaagtaagcactttgaagcaaaaacttgtatattaacagtgatgtgaaatccattgtcatttcattacacaaatgtaaacttttatggtctgtagtcaaaaaaatcccgtgtgagaactgccaggaattgtacatattttgcactttttcatgtttctcattgaactgaactttgataaaacgacttttctaagctttttttctgtacttggtgtcaaggacatgcatactgtagtccatatctatatggcaatcagaaattaatcaaaaagtgatgcattggtaatgactttttgtaaatttggaaatctttgctaccaattgttgagaaaaatcatttttcagtggagctggaacagattggagctacaagctccaggagcaataagaactgtcccctatttataatgggtgtaaacagttttgtagaataatgctagcaccagacttacctaaaaatttctatagcagtggctgtgcttccctgctcaacggtttttatgaagctgtttacctcaacacacatctctataatcactttatacagagaggttatttctttttgttgcattagtattcttttgaaactttgggaccagatttccaaaatggtgccgaacactggagagaagtaagaatgtcactgaattgtagggtttctggaggcttttctgtacctaccacccagggctaaagtaacatcagaggcctaaagttgttccaaaagtatgtgattggcaactgcagactaaaaaacatagatacaattctggacttttggccctgtgcgatggtctggtgtgctgcatttaaaatgcttattcaggaccagttctttattgctccatgaccatagtgaatagaacaaatcgcagaaccccaccatggagctcaatcctgttagtcacttttgtcacctccacatctccttctcactggtgataacatgcctcatgtactccacttgttcccaccttatgattaagccaagctcagcctgccaccagcatgctctgcaaggctgaagagtcatcctgaagacccctaaaggtcagtgggaaaaggatggctggagagacattacaattagctgtgtaattgtttctgtgaaattatttcacttatgtttactttagactaacaggaaattaagagtcctaaatctacccctatgccaaatcattccaagtagataattttacgtgcatctcaagggttagcaccctaaggcatgcttgtggggcattagaaaatgagatttttttttttttaaagcagagcctcctaagaacatcaaagttggtcctagcaaaatatataaagtccctaaagcaacttatacttgaaactttttttttttttttttttagaggggggcctcattctgttgcttgtgctggaatacattggtacaatcatagctcactgttacctcttgggctcaagggatccttccacctcagcctccctagtagctagaactacaggtgtgcacaaccacgcccggctaattcttaaattttgtttttgtagagacaggatctcactgtgttgcccaagatggtctcaaactcctggccccaagcaatcctcctgccttggcctcctcaaatgctgagattacaggcctgagctactgtgcccagcctaaactttcccacttctctctgtggcttctttccaacctctctccttcctctccccaagtcctgtttctttgaagctggtaactgaatttaagatgatatctggttggtgtttaaggtttgagcctcccaaggttctgtgcattttgaaaggagatttctaaaaataattaaggtgccctaactcctttcctcatgattcctactccgaaacctggatggttaggagcccagggctccctgatttccagagctatatcctgttggacctttgccaacagacctgacacttaggggttattgttataaatctaattctctaatattttttacatgttgtttcactttgaataagcaaatgaagaatcagttttctaatatgactttatcctcaagctagagacactagcctatttggtaaatcacacattacttaggtatatttattactataaccaggttggagcttccatgtttaagctgggtatatgatgggtttttgttaaaatgtgccttaaaaagcctattacttcaagagcaaatgattctttgggggaaaggcaaaaataattctatgacatagggcccaagttcatggtagtaagtgtactctttgattaatcacacgctaatatagattactgcctctaactttgtaagtgtggcaatgacttcttaattaaagaaagatgcaggagttatgtctaagcgttcagtttttcaaatctgtgttattggaaatgtcttcaagtcattttgcattgtatttttgatatgagaggcagcttattgcgatgtgtatggccatgtttcattctcaaatttaattctataaatacaaatcctaaatacatggctacagcaactgcactggaacatttttgcttggttttagggattgagaacttgccttgcaggtttccttcctcaaaaggagcagggcagtcctttccctgttgagtcaattagaatttttacatagaggtgagactgtgaattattttggttattttcagtgatgtagattagtgtgaatgaccagggtggaatgtttttgaaggaatataaagcaaaaactggttgacattcacaaactgttcttttgtgaacatattttggacccttaaatatgactaaaatcacagcaatattgttacatacgggttatatgccaactctgtttgaaatatactctggaaaaacagctgaattgtcttggttattaaagtatggtatgtattcaacttgta

SEQ ID NO: 174439 - DNA, 4900 bp, Homo sapiens
  Payload ID: 14244
  Gene Symbol: RRAGD
  Gene Name: Ras-related GTP binding D
  Uniprot ID: Q9NQL2
  ENST ID: ENST00000369415
  CDS Start-End: 278-1480
ctctctctctctccctcctccgggaggaactgccgcgctccggctgactcctccgccggcgggcggggcgggggagggggcttcgggcgcgctgggaaccgcgggacccggacctgggcgccgcccgccgggggacgcgcggcccccgcttccgccgggccccgctgagctctagacaaacctccgcttcagaaataggctgcgggcggccggctaggaggcttggcccccaccccgggacccccgccgtccccgggccggccggccggtgggcacgatgagccaggtgctggggaagccgcagccgcaggacgaggacgacgcggaggaggaggaggaggaggatgagctggtggggctagcggactacggagacgggcccgactcctccgacgccgatccggacagcggcacagaggagggagttctggacttcagtgaccccttcagcactgaagtgaagccgagaatcctgctcatgggcctgaggagaagcggcaagtcgtctattcagaaagttgtctttcacaaaatgtctcccaacgaaactctgttcttggagagcactaataagatatgccgggaagatgtttccaacagctcctttgtcaattttcagatttgggacttcccaggacagattgacttttttgaccctacatttgactatgagatgatcttccggggaacaggagcactgatatttgtcattgactcacaggatgattacatggaagccctggccaggctccacctcacggtgaccagggcctacaaagtgaatactgacatcaacttcgaggtgtttattcataaagtggatggtctgtcagatgaccacaaaattgaaacccaaagagatattcaccagagggcaaacgatgaccttgcagatgctggattagaaaaaattcacctcagcttttatctgacaagcatatatgatcattcaatatttgaagcttttagcaaagttgttcagaaactgattccacaactcccaactctggagaatttgctgaacatctttatctcaaattctggaattgaaaaggcatttctatttgatgtggtcagtaaaatttatattgcaactgatagtactccggtggatatgcaaacctatgagctctgctgtgatatgatagatgtggttattgacatctcttgtatttatggtctcaaagaagatggagcaggaaccccctatgacaaggaatccacagccatcataaagcttaataatacaaccgtgctttatttaaaagaggtgacaaagttcctggctctcgtttgctttgtcagagaggaaagctttgaaagaaaagggctaattgactataattttcattgcttccggaaggccattcatgaagtttttgaggtgagaatgaaagtagtaaaatctcgaaaggttcagaatcggctgcagaagaaaaagagagccacccctaatgggacccctagagtgctgctgtaggtgaggtttcaggaatgtcttttgaaatcagaccttatccatgaggctgctgcgccatgttgcactaaaggaagaggaagaaggagattgggacacataccattgatttgttgttaaaaaaaaaaaattcctgcaaccctcttgatcttctcttttataaataaagtaagcactttgaagcaaaaacttgtatattaacagtgatgtgaaatccattgtcatttcattacacaaatgtaaacttttatggtctgtagtcaaaaaaatcccgtgtgagaactgccaggaattgtacatattttgcactttttcatgtttctcattgaactgaactttgataaaacgacttttctaagctttttttctgtacttggtgtcaaggacatgcatactgtagtccatatctatatggcaatcagaaattaatcaaaaagtgatgcattggtaatgactttttgtaaatttggaaatctttgctaccaattgttgagaaaaatcatttttcagtggagctggaacagattggagctacaagctccaggagcaataagaactgtcccctatttataatgggtgtaaacagttttgtagaataatgctagcaccagacttacctaaaaatttctatagcagtggctgtgcttccctgctcaacggtttttatgaagctgtttacctcaacacacatctctataatcactttatacagagaggttatttctttttgttgcattagtattcttttgaaactttgggaccagatttccaaaatggtgccgaacactggagagaagtaagaatgtcactgaattgtagggtttctggaggcttttctgtacctaccacccagggctaaagtaacatcagaggcctaaagttgttccaaaagtatgtgattggcaactgcagactaaaaaacatagatacaattctggacttttggccctgtgcgatggtctggtgtgctgcatttaaaatgcttattcaggaccagttctttattgctccatgaccatagtgaatagaacaaatcgcagaaccccaccatggagctcaatcctgttagtcacttttgtcacctccacatctccttctcactggtgataacatgcctcatgtactccacttgttcccaccttatgattaagccaagctcagcctgccaccagcatgctctgcaaggctgaagagtcatcctgaagacccctaaaggtcagtgggaaaaggatggctggagagacattacaattagctgtgtaattgtttctgtgaaattatttcacttatgtttactttagactaacaggaaattaagagtcctaaatctacccctatgccaaatcattccaagtagataattttacgtgcatctcaagggttagcaccctaaggcatgcttgtggggcattagaaaatgagatttttttttttttaaagcagagcctcctaagaacatcaaagttggtcctagcaaaatatataaagtccctaaagcaacttatacttgaaactttttttttttttttttttagaggggggcctcattctgttgcttgtgctggaatacattggtacaatcatagctcactgttacctcttgggctcaagggatccttccacctcagcctccctagtagctagaactacaggtgtgcacaaccacgcccggctaattcttaaattttgtttttgtagagacaggatctcactgtgttgcccaagatggtctcaaactcctggccccaagcaatcctcctgccttggcctcctcaaatgctgagattacaggcctgagctactgtgcccagcctaaactttcccacttctctctgtggcttctttccaacctctctccttcctctccccaagtcctgtttctttgaagctggtaactgaatttaagatgatatctggttggtgtttaaggtttgagcctcccaaggttctgtgcattttgaaaggagatttctaaaaataattaaggtgccctaactcctttcctcatgattcctactccgaaacctggatggttaggagcccagggctccctgatttccagagctatatcctgttggacctttgccaacagacctgacacttaggggttattgttataaatctaattctctaatattttttacatgttgtttcactttgaataagcaaatgaagaatcagttttctaatatgactttatcctcaagctagagacactagcctatttggtaaatcacacattacttaggtatatttattactataaccaggttggagcttccatgtttaagctgggtatatgatgggtttttgttaaaatgtgccttaaaaagcctattacttcaagagcaaatgattctttgggggaaaggcaaaaataattctatgacatagggcccaagttcatggtagtaagtgtactctttgattaatcacacgctaatatagattactgcctctaactttgtaagtgtggcaatgacttcttaattaaagaaagatgcaggagttatgtctaagcgttcagtttttcaaatctgtgttattggaaatgtcttcaagtcattttgcattgtatttttgatatgagaggcagcttattgcgatgtgtatggccatgtttcattctcaaatttaattctataaatacaaatcctaaatacatggctacagcaactgcactggaacatttttgcttggttttagggattgagaacttgccttgcaggtttccttcctcaaaaggagcagggcagtcctttccctgttgagtcaattagaatttttacatagaggtgagactgtgaattattttggttattttcagtgatgtagattagtgtgaatgaccagggtggaatgtttttgaaggaatataaagcaaaaactggttgacattcacaaactgttcttttgtgaacatattttggacccttaaatatgactaaaatcacagcaatattgttacatacgggttatatgccaactctgtttgaaatatactctggaaaaacagctgaattgtcttggttattaaagtatggtatgtattcaacttgtacagactggatgtaatttgtaatcaggtatagtccatgttttactttaagcagtacatcacttaataaccattgttaagccattgctttcaagaatgttaactgccaatttaaaagcatgtgtcctaggttcatgctttggtaaagctctcatttcaagtgtattcatagctaagctttctgggagcagaattgtctctttggtgaaaaggaagtacagcctttcctgtttctgaggttgcttaccatacatgtatgtcactgtttcattggccctgttacatccatttggtaaaatttatttgtcctgattaaccagctctcattttatggaaatgatgataaatctcactacttaaattta

SEQ ID NO: 174440 - DNA, 495 bp, Homo sapiens
  Payload ID: 14245
  Gene Symbol:
  Gene Name: Ras-related protein Rap-1b-like protein [Source:UniProtKB/Swiss-Prot
  Acc:A6NIZ1]
  ENST ID: ENST00000506621
  CDS Start-End: 1-495
atgcgtgagtataagctagtcgttcttggctcacgaggcgttggaaagtctgctttgactgtacaatttgttcaaggaatttttgtagaaaaatacgatcctacgatagaagattcttatagaacggagcaatttacagcaatgagggatttatacatgaaaaatggacaagggtttgcattagtttattccatcacagcacagtccacatttaacgatttacaagacctgagagaacagattcttcgagttaaagacactgatgatgttccaatgattcttgttggtaataagtgtgacttggaagatgaaagagttgtagggaaggaacaaggtcaaaatctagcaagacaatggaacaactgtgcattcttagaatcttctgcaaaatcaaaaataaatgttaatgagatcttttatgacctagtgcggcaaattaacagaaaaactccagtgcctgggaaggctcgcaaaaagtcatcatgtcagctgctt

SEQ ID NO: 174441 - DNA, 1917 bp, Homo sapiens
  Payload ID: 14245
  Gene Symbol:
  Gene Name: Ras-related protein Rap-1b-like protein [Source:UniProtKB/Swiss-Prot
  Acc:A6NIZ1]
  Uniprot ID: A6NIZ1
  ENST ID: ENST00000631802
  CDS Start-End: 149-703
gtaaaccagccggagcggcgcggcagcggcaggaccgccgtggcgcctagagtagcgacccgcggggagcacggggcgacgctggctgcagagacccggtgacagcgtgagaggttcgcagagtactaggttttgacaagcttgcatcatgcgtgagtataagctagtcgttcttggctcacgaggcgttggaaagtctgctttgactgtacaatttgttcaaggaatttttgtagaaaaatacgatcctacgatagaagattcttatagagagcaagttgaagtagatgcacaacagtgtatgcttgaaatcttggatactgcaggaacggagcaatttacagcaatgagggatttatacatgaaaaatggacaagggtttgcattagtttattccatcacagcacagtccacatttaacgatttacaagacctgagagaacagattcttcgagttaaagacactgatgatgttccaatgattcttgttggtaataagtgtgacttggaagatgaaagagttgtagggaaggaacaaggtcaaaatctagcaagacaatggaacaactgtgcattcttagaatcttctgcaaaatcaaaaataaatgttaatgagatcttttatgacctagtgcggcaaattaacagaaaaactccagtgcctgggaaggctcgcaaaaagtcatcatgtcagctgctttaatatactaaatgcattgtagctctgagccaggtctgaagaactgttgcccaattcaacagtgccagcattccaactttgttaaacctaccaacatcttaaatggactttcctgtggtggtaccctttaagaggcggatgaaagctactatatcagtttgcacattctaatcactttccagtatcacaagagagatttttacttatataatagtcctagagtatgcagctggtaaaaccagaggctacatccagtattactgctaagagacattcttcatccaccaatgttgtacatgtatgaaaatggtgtactgtatactttaacatgccccatactttgtattggagagtacaataatgtaaatcctaaaagcaccactattttagcataataaaagaaagtccaaagagctcctatatagactactccagataacttcgcttctttgatacttgtagcttattgtaattttttttaagaaattcaaggtcattattattgtacaaaataagcgctttgattaacacagctatatagtttttttaatttttaaaaaacctgtggagacagtgatcttgtctttaaaatatgatagtcctttcagtataatgtcttagattaaagacgttgcctttaatatctgttgggaaggaaatgtccagacttttcaaatctcttattatatgtttcctttttttgtttacatagggaacaatgtttatagtcgtgtgtacagtgggggtctacaacaagaagtgtatattttcaaacaattttttaatgatttaacaatttttgtaaatcattttcaggcttctgcagctgtagattctcactgtgaatcccttgcttgctcatgcataagtgtatttgcaataccaaatatacaggtttagtatttttgcctgttagtgattgtttcacatgtgtaacgttttggttgagatgttaaatggtggacgagtactgtggatgtgaatgtgggaagtaattttaatcatatgtaattggtcacaaggcctaatttgcagtaactattgctgttttatttaacaatgccttgttgctttgtatgcattaatgtttggatgtaaagattgtgtgtctatccaacagggagccacagtatttaaattgaccaacctaatgttacaactactttgaggtggccaaatgtaaactaaaagccttaattaaagtggtgcaattttgt

SEQ ID NO: 174442 - DNA, 6635 bp, Homo sapiens
  Payload ID: 14246
  Gene Symbol: RB1CC1
  Gene Name: RB1-inducible coiled-coil 1
  Uniprot ID: Q8TDY2
  ENST ID: ENST00000025008
  CDS Start-End: 525-5309
gtcgacaataacaaaccaagccgcggcggtgtccgcggccctgccgagccctcggcgttgcctcagaatcccccagtcgcctgggcccctcggctctgacaggccgcggccttctgtcccccggccccagacccagagccgaggggcctgctcgcgtccttgtccgcccggacccctccctgcctcctagagttcggggccgcggcgggcgggcgcccgggacgccggcggttgtgtcggcttagcggtgccgaatgggcggttggtaaccgctgccgaggactaggcggcggcggaagatggtgccgggggtcgctggctctgctgctgccgccggcgaaggaggaggcgttgccggttttctgagtttaaccagtaatgccattcagttgccaatctcaagcaaagcaaacataagccagttttaatctactttttaagaaaagtggtagtccttttcacagtgcctgacgtaactgtatcagagggtgaggtataagctcacagaattcagataaatcatcatgaagttatatgtatttctggttaacactggaactactctaacatttgacactgaacttacagtgcaaactgtggcagaccttaagcatgccattcaaagcaaatacaagattgctattcaacaccaggtgctggtggtcaatggaggagaatgcatggctgcagatcgaagagtgtgtacctacagtgctgggacggatacaaatccaatttttctttttaacaaagaaatgatcttatgtgatcgtccacctgctattcctaaaactaccttttcgacagaaaatgacatggaaataaaagttgaagaatctcttatgatgcctgcagtttttcatactgttgcttcaaggacacagcttgcattggaaatgtatgaagttgccaagaaactttgttctttttgtgaaggtcttgtacatgatgaacatcttcaacaccaaggctgggctgcaatcatggccaacctggaggactgttcaaattcataccaaaagctacttttcaagtttgaaagtatttattcaaattatctgcagtccatagaagacatcaagttaaaacttactcatttaggaactgcagtttcagtaatggccaagattccactgttggagtgcctaaccagacatagttacagagaatgtttgggaagactggattctttacctgaacatgaagactcagaaaaagctgagatgaaaagatccactgaactggtgctctctcctgatatgcctagaacaactaacgaatctttgttaacctcatttcccaagtcagtggaacatgtgtccccagataccgcagatgctgaaagtggcaaagaaattagggaatcttgtcaaagtactgttcatcagcaagatgaaactacgattgacactaaagatggtgatctgcccttttttaatgtctctttgttagactggataaatgttcaagatagacctaatgatgtggaatctttggtcaggaagtgctttgattctatgagcaggcttgatccaaggattattcgaccatttatagcagaatgccgtcaaactattgccaaacttgataatcagaatatgaaagccattaaaggacttgaagatcggctctacgccctggaccagatgattgctagctgtggccgactggtgaatgaacagaaagagcttgctcagggatttttagctaatcagaagagagctgaaaacttaaaggatgcatctgtattacctgatttatgcctgagtcacgcaaatcagttgatgattatgttgcaaaatcatagaaaactgttagatattaagcagaagtgtaccactgccaaacaagaactagcaaataacctacatgtcagactgaagtggtgttgctttgtaatgcttcatgctgatcaagatggagagaagttacaagctttgctccgcctcgtaatagagctgttagaaagagtcaaaattgttgaagctcttagtacagttcctcagatgtactgcttagctgttgttgaggttgtaagaagaaaaatgttcataaaacactacagggagtgggctggtgctttagtcaaagatggaaagagattatatgaagcagaaaaatcaaaaagggaatcctttgggaaattatttaggaagtcttttttaagaaatcgtctgtttaggggactggactcctggcccccttccttttgtactcaaaagcctcgaaagtttgactgtgaacttccagatatttcattaaaagatttacagtttctgcaatcattttgtccttcggaagttcagccattcctcagggttcccttactttgtgactttgaacctctacaccagcatgtacttgctctacataatttggtaaaagcagcacaaagtttggatgaaatgtcacagaccattacagatctactgagtgaacaaaaggcatctgtgagtcagacatccccacagtctgcttcttcaccaaggatggaaagtacagcaggaattacaactactacctcaccgagaactcctccaccactgactgttcaggatcccttatgtcctgcagtttgtcccttagaagaattatctccagatagtattgatgcacatacgtttgattttgaaactattccccatccaaacatagaacagactattcaccaagtttctttagacttggattcattagcagaaagtcctgaatcagattttatgtctgctgtgaatgagtttgtaatagaagaaaatttgtcgtctcctaatcctataagtgatccacaaagcccagaaatgatggtggaatcactttattcatcagttatcaatgcgatagacagtagacgaatgcaggatacaaatgtatgtggtaaggaggattttggagatcatacttctctgaatgtccagttggaaagatgtagagttgttgcccaagactctcacttcagtatacaaaccattaaggaagacctttgccactttagaacatttgtacaaaaagaacagtgtgacttctcaaattcattaaaatgtacagcagtagaaataagaaacattattgaaaaagtaaaatgttctctggaaataacactaaaagaaaaacatcaaaaagaactactgtctttaaaaaatgaatatgaaggtaaacttgacggactaataaaggaaactgaagagaatgaaaacaaaattaaaaaattgaagggagagttagtatgccttgaggaggttttacaaaataaagataatgaatttgctttggttaaacatgaaaaagaagctgtaatctgcctgcagaatgaaaaggatcagaagttgttagagatggaaaatataatgcactctcaaaattgtgaaattaaagaactgaagcagtcacgagaaatagtgttagaagacttaaaaaagctccatgttgaaaatgatgagaagttacagttattgagggcagaacttcagtccttggagcaaagtcatctaaaggaattagaggacacacttcaggttaggcacatacaagagtttgagaaggttatgacagaccacagagtttctttggaggaattaaaaaaggaaaaccaacaaataattaatcaaatacaagaatctcatgctgaaattatccaggaaaaagaaaaacagttacaggaattaaaactcaaggtttctgatttgtcagacacgagatgcaagttagaggttgaacttgcgttgaaggaagcagaaactgatgaaataaaaattttgctggaagaaagcagagcccagcagaaggagaccttgaaatctcttcttgaacaagagacagaaaatttgagaacagaaattagtaaactcaaccaaaagattcaggataataatgaaaattatcaggtgggcttagcagagctaagaactttaatgacaattgaaaaagatcagtgtatttccgagttaattagtagacatgaagaagaatctaatatacttaaagctgaattaaacaaagtaacatctttgcataaccaagcatttgaaatagaaaaaaacctaaaagaacaaataattgaactgcagagtaaattggattcagaattgagtgctcttgaaagacaaaaagatgaaaaaattacccaacaagaagagaaatacgaagctattatccagaaccttgagaaagacagacaaaaattggtcagcagccaggagcaagacagagaacagttaattcagaagcttaattgtgaaaaagatgaagctattcagactgccctaaaagaatttaaattggagagagaagttgttgagaaagagttattagaaaaagttaaacatcttgagaatcaaatagcaaaaagtcctgccattgactctaccagaggagattcttcaagcttagttgctgaacttcaagaaaagcttcaggaagaaaaagctaagtttctagaacaacttgaagagcaagaaaaaagaaagaatgaagaaatgcaaaatgttcgaacatctttgattgcggaacaacagaccaattttaacactgttttaacaagagagaaaatgagaaaagaaaacataataaatgatcttagtgataagttgaaaagtacaatgcagcaacaagaacgggataaagatttgatagagtcactttctgaagatcgagctcgtttgcttgaggaaaagaaaaagcttgaagaagaagtcagtaagttgcgtagtagcagttttgttccttcaccatatgtagctacagccccagaactttatggagcttgtgcacctgaactcccaggtgaatcagatagatccgctgtggaaacagcagatgaaggaagagtggattcagcaatggagacaagcatgatgtctgtacaagaaaatattcatatgttgtctgaagaaaaacagcggataatgctgttagaacgaacattgcaattgaaagaagaagaaaataaacggttaaatcaaagactgatgtctcagagcatgtcttcagtatcttcaaggcattctgaaaagatagctattagagattttcaggtgggagatttggtactcatcatcctagacgaacgccatgacaattatgtgttatttactgttagtcctactttatattttctacattcagagtctctacctgccctggatctcaaaccaggtgagggtgcttcaggtgcatctagaagaccctgggtacttggaaaagtaatggaaaaagaatactgtcaagccaaaaaggcacaaaacagatttaaagttcctttggggacaaagttttacagagtgaaagccgtatcatggaataagaaagtataacttatggacaaaattaatacattctatgacatttttttctgatttgtcctgcagtgctcattcatcactccaaaaacagcaggccatctttttatgcaaaagtcagcgtgacaatatacttcactggtgtacatcgtttactttttaactggcttcattttaggaataataaattcatcagaatccttggctgaattaaaatggtttttgttttttggtttttttttttacccagacaactctagaaatgcggaccaaactacttcattttctcaaagggcataccttgtgcattgtggcttatgatgagccatattaattgcctgttaaatatacactagcttgaacttagatgttaaatgttattattaccagcatttgtccttttgtgaaatcagtatcagaatacttgcactctttaacacattctttataaaatgtataaattattcagaactatttaaaataaagaggagtgttattgcatgctgataatcattttgagtttgcctcagtagatactaaagcaaattgtttcagtttttttaaatgccctttgatgtttcaaaaaaaaaaaggaactgtaatttgattgactgattttaagatcagccataagtaatcagcaatcttcaaaagcactttcagtggattggtcatctgggttctaaagggaagagtctgtgctactaaccatttcaaatgcagactcaaaccttcccaacatctttatgactctagaataatcatattgatgaaatcgtaattcatggttgagtttcagaacaaaagatattcattgcacattaaccatttagaggtcatttaaataacaaaatattgtattgtaaaagaactgtacaattttaaaacaataaagatttgaacctgtaaatgtgtgtgccttttaaagaaggatacatttttaatatatttgagtgattgctgggaagtgtgaaaatattgttatgtatcatatcaaagagaaacatgtttattacaaaaatgttctttaactatatactatgtaacagggtaaacagtgttatgtagaatagaattgtgtaaactagatctttagagaagttgccattgagcaaagttatttaaatgagttagttgagttggatgagaattgtttgaggtttgttgctagagaacaataataaaataattctttttcagaaaatatttaatttcttcataaaaataagttaaatatttttttaaatatgtatatctaatagtacaaaatggaataaacatcatagtgtatagaaaactgaatttgacaagttaatgaataaatgaacaaatgatttcaca

SEQ ID NO: 174443 - DNA, 6614 bp, Homo sapiens
  Payload ID: 14246
  Gene Symbol: RB1CC1
  Gene Name: RB1-inducible coiled-coil 1
  Uniprot ID: Q8TDY2
  ENST ID: ENST00000435644
  CDS Start-End: 516-5291
aacaaaccaagccgcggcggtgtccgcggccctgccgagccctcggcgttgcctcagaatcccccagtcgcctgggcccctcggctctgacaggccgcggccttctgtcccccggccccagacccagagccgaggggcctgctcgcgtccttgtccgcccggacccctccctgcctcctagagttcggggccgcggcgggcgggcgcccgggacgccggcggttgtgtcggcttagcggtgccgaatgggcggttggtaaccgctgccgaggactaggcggcggcggaagatggtgccgggggtcgctggctctgctgctgccgccggcgaaggaggaggcgttgccggttttctgagtttaaccagtaatgccattcagttgccaatctcaagcaaagcaaacataagccagttttaatctactttttaagaaaagtggtagtccttttcacagtgcctgacgtaactgtatcagagggtgaggtataagctcacagaattcagataaatcatcatgaagttatatgtatttctggttaacactggaactactctaacatttgacactgaacttacagtgcaaactgtggcagaccttaagcatgccattcaaagcaaatacaagattgctattcaacaccaggtgctggtggtcaatggaggagaatgcatggctgcagatcgaagagtgtgtacctacagtgctgggacggatacaaatccaatttttctttttaacaaagaaatgatcttatgtgatcgtccacctgctattcctaaaactaccttttcgacagaaaatgacatggaaataaaagttgaagaatctcttatgatgcctgcagtttttcatactgttgcttcaaggacacagcttgcattggaaatgtatgaagttgccaagaaactttgttctttttgtgaaggtcttgtacatgatgaacatcttcaacaccaaggctgggctgcaatcatggccaacctggaggactgttcaaattcataccaaaagctacttttcaagtttgaaagtatttattcaaattatctgcagtccatagaagacatcaagttaaaacttactcatttaggaactgcagtttcagtaatggccaagattccactgttggagtgcctaaccagacatagttacagagaatgtttgggaagactggattctttacctgaacatgaagactcagaaaaagctgagatgaaaagatccactgaactggtgctctctcctgatatgcctagaacaactaacgaatctttgttaacctcatttcccaagtcagtggaacatgtgtccccagataccgcagatgctgaaagtggcaaagaaattagggaatcttgtcaaagtactgttcatcagcaagatgaaactacgattgacactaaagatggtgatctgcccttttttaatgtctctttgttagactggataaatgttcaagatagacctaatgatgtggaatctttggtcaggaagtgctttgattctatgagcaggcttgatccaaggattattcgaccatttatagcagaatgccgtcaaactattgccaaacttgataatcagaatatgaaagccattaaaggacttgaagatcggctctacgccctggaccagatgattgctagctgtggccgactggtgaatgaacagaaagagcttgctcagggatttttagctaatcagaagagagctgaaaacttaaaggatgcatctgtattacctgatttatgcctgagtcacgcaaatcagttgatgattatgttgcaaaatcatagaaaactgttagatattaagcagaagtgtaccactgccaaacaagaactagcaaataacctacatgtcagactgaagtggtgttgctttgtaatgcttcatgctgatcaagatggagagaagttacaagctttgctccgcctcgtaatagagctgttagaaagagtcaaaattgttgaagctcttagtacagttcctcagatgtactgcttagctgttgttgaggttgtaagaagaaaaatgttcataaaacactacagggagtgggctggtgctttagtcaaagatggaaagagattatatgaagcagaaaaatcaaaaagggaatcctttgggaaattatttaggaagtcttttttaagaaatcgtctgtttaggggactggactcctggcccccttccttttgtactcaaaagcctcgaaagtttgactgtgaacttccagatatttcattaaaagatttacagtttctgcaatcattttgtccttcggaagttcagccattcctcagggttcccttactttgtgactttgaacctctacaccagcatgtacttgctctacataatttggtaaaagcagcacaaagtttggatgaaatgtcacagaccattacagatctactgagtgaacaaaaggcatctgtgagtcagacatccccacagtctgcttcttcaccaaggatggaaagtacagcaggaattacaactactacctcaccgagaactcctccaccactgactgttcaggatcccttatgtcctgcagtttgtcccttagaagaattatctccagatagtattgatgcacatacgtttgattttgaaactattccccatccaaacatagaacagactattcaccaagtttctttagacttggattcattagcagaaagtcctgaatcagattttatgtctgctgtgaatgagtttgtaatagaagaaaatttgtcgtctcctaatcctataagtgatccacaaagcccagaaatgatggtggaatcactttattcatcagttatcaatgcgatagacagtagacgaatgcaggatacaaatgtatgtggtaaggaggattttggagatcatacttctctgaatgtccagttggaaagatgtagagttgttgcccaagactctcacttcagtatacaaaccattaaggaagacctttgccactttagaacatttgtacaaaaagaacagtgtgacttctcaaattcattaaaatgtacagcagtagaaataagaaacattattgaaaaagtaaaatgttctctggaaataacactaaaagaaaaacatcaaaaagaactactgtctttaaaaaatgaatatgaaggtaaacttgacggactaataaaggaaactgaagagaatgaaaacaaaattaaaaaattgaagggagagttagtatgccttgaggaggttttacaaaataaagataatgaatttgctttggttaaacatgaaaaagaagctgtaatctgcctgcagaatgaaaaggatcagaagttgttagagatggaaaatataatgcactctcaaaattgtgaaattaaagaactgaagcagtcacgagaaatagtgttagaagacttaaaaaagctccatgttgaaaatgatgagaagttacagttattgagggcagaacttcagtccttggagcaaagtcatctaaaggaattagaggacacacttcaggttaggcacatacaagagtttgagaaggttatgacagaccacagagtttctttggaggaattaaaaaaggaaaaccaacaaataattaatcaaatacaagaatctcatgctgaaattatccaggaaaaagaaaaacagttacaggaattaaaactcaaggtttctgatttgtcagacacgagatgcaagttagaggttgaacttgcgttgaaggaagcagaaactgatgaaataaaaattttgctggaagaaagcagagcccagcagaaggagaccttgaaatctcttcttgaacaagagacagaaaatttgagaacagaaattagtaaactcaaccaaaagattcaggataataatgaaaattatcaggtgggcttagcagagctaagaactttaatgacaattgaaaaagatcagtgtatttccgagttaattagtagacatgaagaagaatctaatatacttaaagctgaattaaacaaagtaacatctttgcataaccaagcatttgaaatagaaaaaaacctaaaagaacaaataattgaactgcagagtaaattggattcagaattgagtgctcttgaaagacaaaaagatgaaaaaattacccaacaagaagagaaatacgaagctattatccagaaccttgagaaagacagacaaaaattggtcagcagccaggagcaagacagagaacagttaattcagaagcttaattgtgaaaaagatgaagctattcagactgccctaaaagaatttaaattggagagagaagttgttgagaaagagttattagaaaaagttaaacatcttgagaatcaaatagcaaaaagtcctgccattgactctaccagaggagattcttcaagcttagttgctgaacttcaagaaaagcttcaggaagaaaaagctaagtttctagaacaacttgaagagcaagaaaaaagaaagaatgaagaaatgcaaaatgttcgaacatctttgattgcggaacaacagaccaattttaacactgttttaacaagagagaaaatgagaaaagaaaacataataaatgatcttagtgataagttgaaaagtacaatgcagcaacaagaacgggataaagatttgatagagtcactttctgaagatcgagctcgtttgcttgaggaaaagaaaaagcttgaagaagaagtcagtaagttgcgtagtagcagttttgttccttcaccatatgtagctacagccccagaactttatggagcttgtgcacctgaactcccaggtgaatcagatagatccgctgtggaaacagcagatgaaggaagagtggattcagcaatggagacaagcatgatgtctgtacaagaaaatattcatatgttgtctgaagaaaaacagcggataatgctgttagaacgaacattgcaattgaaagaagaagaaaataaacggttaaatcaaagactgatgtctcagagcatgtcttcagtatcttcaaggcattctgaaaagatagctattagagattttcaggtgggagatttggtactcatcatcctagacgaacgccatgacaattatgtgttatttactgttagtcctactttatattttctacattcagagtctctacctgccctggatctcaaaccagcttcaggtgcatctagaagaccctgggtacttggaaaagtaatggaaaaagaatactgtcaagccaaaaaggcacaaaacagatttaaagttcctttggggacaaagttttacagagtgaaagccgtatcatggaataagaaagtataacttatggacaaaattaatacattctatgacatttttttctgatttgtcctgcagtgctcattcatcactccaaaaacagcaggccatctttttatgcaaaagtcagcgtgacaatatacttcactggtgtacatcgtttactttttaactggcttcattttaggaataataaattcatcagaatccttggctgaattaaaatggtttttgttttttggtttttttttttacccagacaactctagaaatgcggaccaaactacttcattttctcaaagggcataccttgtgcattgtggcttatgatgagccatattaattgcctgttaaatatacactagcttgaacttagatgttaaatgttattattaccagcatttgtccttttgtgaaatcagtatcagaatacttgcactctttaacacattctttataaaatgtataaattattcagaactatttaaaataaagaggagtgttattgcatgctgataatcattttgagtttgcctcagtagatactaaagcaaattgtttcagtttttttaaatgccctttgatgtttcaaaaaaaaaaaggaactgtaatttgattgactgattttaagatcagccataagtaatcagcaatcttcaaaagcactttcagtggattggtcatctgggttctaaagggaagagtctgtgctactaaccatttcaaatgcagactcaaaccttcccaacatctttatgactctagaataatcatattgatgaaatcgtaattcatggttgagtttcagaacaaaagatattcattgcacattaaccatttagaggtcatttaaataacaaaatattgtattgtaaaagaactgtacaattttaaaacaataaagatttgaacctgtaaatgtgtgtgccttttaaagaaggatacatttttaatatatttgagtgattgctgggaagtgtgaaaatattgttatgtatcatatcaaagagaaacatgtttattacaaaaatgttctttaactatatactatgtaacagggtaaacagtgttatgtagaatagaattgtgtaaactagatctttagagaagttgccattgagcaaagttatttaaatgagttagttgagttggatgagaattgtttgaggtttgttgctagagaacaataataaaataattctttttcagaaaatatttaatttcttcataaaaataagttaaatatttttttaaatatgtatatctaatagtacaaaatggaataaacatcatagtgtatagaaaactgaatttgacaagttaatgaataaatgaacaaatgatttc

SEQ ID NO: 174444 - DNA, 891 bp, Homo sapiens
  Payload ID: 14246
  Gene Symbol: RB1CC1
  Gene Name: RB1-inducible coiled-coil 1
  ENST ID: ENST00000518211
  CDS Start-End: 312-440
ggaagagacggagtcgacaataacaaaccaagccgcggcggtgtccgcggccctgccgagccctcggcgttgcctcagaatcccccagtcgcctgggcccctcggctctgacaggccgcggccttctgtcccccggccccagacccagagccgaggggcctgctcgcgtccttgtccgcccggacccctccctgcctcctagagttcggggccgcggcgggcgggcgcccgggacgccggcggttgtgtcggcttagcggtgccgaatgggcggttggtaaccgctgccgaggactaggcggcggcggaagatggtgccgggggtcgctggctctgctgctgccgccggcgaaggaggaggcgttgccggttttctgagtttaaccagtaatgccattcagttgccaatctcaagcaaagcaaacataagccagttttaatctactttttaagaaaagtggtagtccttttcacagtgcctgacgacctgtacacttgctactgttacacaaagtgatggaactattaaggaggatttcttgctcagtgtagaggtgaaaagcagttcaacaggcagctgatggaagtgatggaactattatggaggatttctagctcagtgtagaggtgaaacacagatgatggaaggaattgggattcatttcccctaatttgcaagtaacggctactcttaatttgcgattataactgtatcagagggtgaggtataagctcacagaattcagataaatcatcatgaagttatatgtatttctggttaacactggaactactctaacatttgacactgaacttacagtgcaaactgtggcagaccttaagcatgccattcaaagcaaatacaagattgctattcaacaccaggtgctg

SEQ ID NO: 174445 - DNA, 507 bp, Homo sapiens
  Payload ID: 14246
  Gene Symbol: RB1CC1
  Gene Name: RB1-inducible coiled-coil 1
  ENST ID: ENST00000518468
  CDS Start-End: 462-507
agagagggagcttcgccatgtttctcaggctgatctcgaatttctgacctcaagtaatccgcccgcctcggcctcagaagtgctgagattaggggcttgagccaccgcacccgaccttcttttaaatttaaattagatggccagaggtggggcaaatgcataaataccctaaaaaggatttaaggaagagagttctgaggtgtttattctgaacttagaactaacgtttctacagcatttgctttcgtccgcctctacctccaccacggaaggataagaactagactttgacaagttttctgagtttaaccagtaatgccattcagttgccaatctcaagcaaagcaaacataagccagttttaatctactttttaagaaaagtggtagtccttttcacagtgcctgacgtaactgtatcagagggtgaggtataagctcacagaattcagataaatcatcatgaagttatatgtatttctggttaacactggaactactctaacat

SEQ ID NO: 174446 - DNA, 711 bp, Homo sapiens
  Payload ID: 14246
  Gene Symbol: RB1CC1
  Gene Name: RB1-inducible coiled-coil 1
  ENST ID: ENST00000518710
  CDS Start-End: 554-711
caataacaaaccaagccgcggcggtgtccgcggccctgccgagccctcggcgttgcctcagaatcccccagtcgcctgggcccctcggctctgacaggccgcggccttctgtcccccggccccagacccagagccgaggggcctgctcgcgtccttgtccgcccggacccctccctgcctcctagagttcggggccgcggcgggcgggcgcccgggacgccggcggttgtgtcggcttagcggtgccgaatgggcggttggtaaccgctgccgaggactaggcggcggcggaagatggtgccgggggtcgctggctctgctgctgccgccggcgaaggaggaggcgttgccggttttctgagtttaaccagtaatgccattcagttgccaatctcaagcaaagcaaacataagccagttttaatctactttttaagaaaagtggtagtccttttcacagtgcctgacgtgtggcagaccttaagcatgccattcaaagcaaatacaagattgctattcaacaccaggtgctggtggtcaatggaggagaatgcatggctgcagatcgaagagtgtgtacctacagtgctgggacggatacaaatccaatttttctttttaacaaagaaatgatcttatgtgatcgtccacctgctattcctaaaactaccttttcgacagaaaatgacatggaaataaaagttgaagaatc

SEQ ID NO: 174447 - DNA, 551 bp, Homo sapiens
  Payload ID: 14246
  Gene Symbol: RB1CC1
  Gene Name: RB1-inducible coiled-coil 1
  ENST ID: ENST00000517963
  CDS Start-End: 334-551
gtttcccggcatgcgccgcggaggaagagacggagtcgacaataacaaaccaagccgcggcggtgtccgcggccctgccgagccctcggcgttgcctcagaatcccccagtcgcctgggcccctcggctctgacaggccgcggccttctgtcccccggccccagacccagagccgaggggcctgctcgcgtccttgtccgcccggacccctccctgcctcctagagttcggggccgcggcgggcgggcgcccgggacgccggcggttgtgtcggcttagcggtgccgaatgggcggttggtaaccgctgccgaggactaggcggcggcggaagatggtgccgggggtcgctggctctgctgctgccgccggcgaaggaggaggcgttgccggtgtggcagaccttaagcatgccattcaaagcaaatacaagattgctattcaacaccaggtgctggtggtcaatggaggagaatgcatggctgcagatcgaagagtgtgtacctacagtgctgggacggatacaaatccaatttttctttttaacaaaga

SEQ ID NO: 174448 - DNA, 560 bp, Homo sapiens
  Payload ID: 14246
  Gene Symbol: RB1CC1
  Gene Name: RB1-inducible coiled-coil 1
  ENST ID: ENST00000523594
  CDS Start-End: 1-328
acaagaactagcaaataacctacatgtcagactgaagtggtgttgctttgtaatgcttcatgctgatcaagatggagagaagttacaagctttgctccgcctcgtaatagagctgttagaaagagtcaaaattgttgaagctcttagtacagttcctcagatgtactgcttagctgttgttgaggttgtaagaagaaaaatgttcataaaacactacagggagtgggctggtgctttagtcaaagatggaaagagattatatgaagcagaaaaatcaaaaagggaatcctttgggaaattatttaactcaaaagcctcgaaagtttgactgtgaacttccagatatttcattaaaagatttacagtttctgcaatcattttgtccttcggaagttcagccattcctcagggttcccttactttgtgactttgaacctctacaccagcatgtacttgctctacataatttggtaaaagcagcacaaagtttggatgaaatgtcacagaccattacagatctactgagtgaacaaaaggcatctgtgagtcagacatcccca

SEQ ID NO: 174449 - DNA, 470 bp, Homo sapiens
  Payload ID: 14246
  Gene Symbol: RB1CC1
  Gene Name: RB1-inducible coiled-coil 1
  ENST ID: ENST00000519912
  CDS Start-End: 1-383
ggataatgctgttagaacgaacattgcaattgaaagaagaagaaaataaacggttaaatcaaagactgatgtctcagagcatgtcttcagtatcttcaaggcattctgaaaagatagctattagagattttcaggtgggagatttggtactcatcatcctagacgaacgccatgacaattatgtgttatttactgttagtcctactttatattttctacattcagagtctctacctgccctggatctcaaaccagcttcaggtgcatctagaagaccctgggtacttggaaaagtaatggaaaaagaatactgtcaagccaaaaagtgctcattcatcactccaaaaacagcaggccatctttttatgcaaaagtcagcgtgacaatatacttcactggtgtacatcgtttactttttaactggcttcattttaggaataataaattcatcagaatccttggctgaatta

SEQ ID NO: 174450 - DNA, 766 bp, Homo sapiens
  Payload ID: 14247
  Gene Symbol: RBAK-RBAKDN
  Gene Name: RBAK-RBAKDN readthrough
  ENST ID: ENST00000396904
  CDS Start-End: 93-434
ggctttggcctccagtggacgagaatcgcggagcctgcggggctggaggtctaccagccacagtctctgcacgtttccaagagcagcagaaaatgaacacattgcaggggccagtgtcattcaaagatgtggctgtggatttcacccaggaggagtggcagcagctggaccctgatgagaagataacttacagggatgtgatgttggagaactatagccatctagtttctgtgggatatgataccaccaagccaaacgtcatcattaagttggagcagggagaggagccgtggataatgggaggtgaatttccatgtcaacatagtccagccgccctgcccgcaggccatgtggcccccgctgttgctgctgctgctgctgctcccggccgccccggtccccaccgccaaagccgctccccacccggatgctaacacccaggaaggccttcagaacctgctccaaggagtcggggctggcggagacggagagctgcgggcagactcacacctggccccgggctctggctgtattgatggggctgtggtggccacgcgaccagaaagccggggaggaagacctgcggttccgtgagaggcgtccagggctgcaggccacggcgacaggctccggggaacatggggctttccctgtccactcccaaggagtgtgggcctcaacgcattggcaggggacggccgtgtgccctctccagaccccacccccagatgcatttattagaaataataaagttctttcttagcta

SEQ ID NO: 174451 - DNA, 1001 bp, Homo sapiens
  Payload ID: 14247
  Gene Symbol: RBAK-RBAKDN
  Gene Name: RBAK-RBAKDN readthrough
  ENST ID: ENST00000407184
  CDS Start-End: 267-998
acagaatcattataaatcccagtagcagtctgctggccagccaagatgagacaaagttgcctaaaataagacttttttgactattctaaattgactcctcttgaccagcactgcttcatccaagctgctgacctcctcatggccgacttcaaagtgctcagtagtcaggacatcatgtgggccctgcacgagctcaaaggacactatgcaatcacccgaaaggtctaccagccacagtctctgcacgtttccaagagcagcagaaaatgaacacattgcaggggccagtgtcattcaaagatgtggctgtggatttcacccaggaggagtggcagcagctggaccctgatgagaagataacttacagggatgtgatgttggagaactatagccatctagtttctgtgggatatgataccaccaagccaaacgtcatcattaagttggagcagggagaggagccgtggataatgggaggtgaatttccatgtcaacatagtccagaagcctggagagttgatgacctgatagagagaatccaagaaaacgaagacaaacattcaagccgccctgcccgcaggccatgtggcccccgctgttgctgctgctgctgctgctcccggccgccccggtccccaccgccaaagccgctccccacccggatgctaacacccaggaaggccttcagaacctgctccaaggagtcggggctggcggagacggagagctgcgggcagactcacacctggccccgggctctggctgtattgatggggctgtggtggccacgcgaccagaaagccggggaggaagacctgcggttccgtgagaggcgtccagggctgcaggccacggcgacaggctccggggaacatggggctttccctgtccactcccaaggagtgtgggcctcaacgcattggcaggggacggccgtgtgccctctccagaccccacccccagatgcatttattagaaataataaagttctttcttagcta

SEQ ID NO: 174452 - DNA, 4125 bp, Homo sapiens
  Payload ID: 14248
  Gene Symbol: RBAK
  Gene Name: RB-associated KRAB zinc finger
  Uniprot ID: Q9NYW8
  ENST ID: ENST00000353796
  CDS Start-End: 325-2469
ctctctgtgtgcgtgttcgcgcatgcgcgccgccgctgcactgccctcgcttcctgtgcgtcctcaggtcaccgcttgctctagttcccaggctttggcctccagtggacgagaatcgcggagcctgcggggctggaggcccggcccgggcccctcgggagcagaacaaccttagtgaggtggacaggaggggacctcgcgagcagacgcgcgccagcgacagcagccccgccccggcctctcgggagccgtggggcagaggctgcggagccccagaagggtctaccagccacagtctctgcacgtttccaagagcagcagaaaatgaacacattgcaggggccagtgtcattcaaagatgtggctgtggatttcacccaggaggagtggcagcagctggaccctgatgagaagataacttacagggatgtgatgttggagaactatagccatctagtttctgtgggatatgataccaccaagccaaacgtcatcattaagttggagcagggagaggagccgtggataatgggaggtgaatttccatgtcaacatagtccagaagcctggagagttgatgacctgatagagagaatccaagaaaacgaagacaaacattcaaggcaagctgcttgtatcaatagcaaaaccctgactgaagagaaagagaatacatttagtcaaatttacatggaaacaagccttgttccttcaagcataatagctcataattgtgtctcatgtggaaagaatttagaatctatttcgcaattaattagtagtgatggaagctatgctaggacaaaacctgatgagtgtaatgaatgtgggaaaacatatcatggagagaaaatgtgtgaatttaatcaaaatggggatacctattctcacaatgaagaaaatattcttcagaaaattagtattttggagaaaccctttgaatataatgaatgcatggaagccttagacaatgaggctgtttttattgctcataagagagcttacataggggagaagccctatgagtggaatgattctggaccagacttcatacagatgtcaaattttaatgcatatcagagatcacaaatggaaatgaagccctttgaatgcagtgaatgtggaaaatccttctgtaaaaagtcaaaattcatcatccaccagagggctcacacaggagagaaaccttatgaatgtaatgtatgtgggaaatccttcagccaaaagggaaccctcactgtacatcggagatcacacttagaggagaagccctataaatgtaatgaatgtgggaaaaccttttgtcagaagttacacctcactcaacacctaagaactcattcaggagagaaaccctacgaatgtagcgaatgtgggaaaaccttctgccaaaagacacatctcaccctgcaccagaggaatcattcaggagagaggccctatccatgtaacgaatgtgggaaatccttctcccgcaagtctgctctcagtgaccatcagagaactcacacgggagagaagctttataaatgtaatgaatgtgggaaatcctactaccgaaagtctactctgattacacatcagagaacacacacgggagagaagccctatcagtgtagcgagtgtgggaaattcttttctcgggtgtcatacctcactatacattatagaagtcatttagaagagaaaccctatgaatgtaatgaatgtggcaaaaccttcaatttaaattcagccttcattagacatcggaaagtacacacagaagagaaatcccatgaatgtagtgaatgtggaaagttctctcagttgtatctcaccgaccatcatacagctcatttagaagagaaaccctatgaatgtaatgaatgtgggaaaaccttccttgtaaattcagccttcgatgggcaccagccacttccaaaaggggagaaatcctatgaatgtaatgtatgtggaaagttattcaatgagttgtcatactatactgaacattatagaagtcattcagaagagaaaccttatggatgtagcgaatgtgggaaaaccttttcccataattcatccctcttcagacatcaaagagtacacacaggcgagaaaccctatgaatgttacgaatgtggaaaattcttctctcagaaatcatatctcactatacatcatcgaattcattcaggagagaaaccctatgaatgtagtaaatgtggaaaagtcttctctcggatgtcaaacctcactgtccactacagaagccattcaggagagaaaccctatgaatgtaatgaatgtgggaaagtcttttctcagaagtcatacctcactgtacactatagaactcattcaggagagaaaccctatgaatgtaacgagtgtgggaaaaaattccaccacagatcagccttcaatagccatcagagaattcatagaagaggaaatatgaacgtacttgatgtggaaaatctctgaagtcagatctcaatttttagaaaactctctgaatataatgaatatggggaatccaataggaagtcaaagcgtttatctgagagttcgtgttcctgaacggtgagaagcatttaggcattagagtcattttaatccaaattttcacagagaagaatcccgaagaatgtaacaagaagcaaagccttcagcaagatcatacgactcatcggacactaatttatataggagtgaagttttataaatatttaatatttattttggattcaaattgtatttacatatcagggaatcatacaaaggcaaaatctgtcaatatggtgaatgtggaaaatatattgtcttggaaatttgttgtaaaagccatatttctaatggaaaatcaggtgtttacaggaaagatctcagaggctatgagctctgaataaatcttcattgtataaaatgaagtttttaaattgtcaggagttgatcatgaggacagtagcattaaataagtatatggccgttttttatcatgtcttaaaaatgcaatctaatggtaattctatgcaagtttggaattggatgacttgtgaagaggcagttttcttatttgagtattaggatggcaaaatgtattaagacaggacatattgttggtgagataatatttaataggtataaaatggtaaaatacctagttttctatttagaggaatttacaaatgggtttttaacaaatgcctcattagtacaggaggcagtcgttttgtaaagttttcaactgcatctgagtaagataagattttctaaaagactattttgataaactatacatacataatttggaattgtttaagtctatttcagtgaaagagaacaagcatactgcccatactctaaaatatccccagctctcacaccacccttgttttttaacccataggtttgagtgtgcctagtgccaatattttgtaatttagaaattttattcacaaacttctgtttggtacaaatacagtgtcattgttttgtgcattctcctttttcccagtatttcagaacaaattgattcaagtttctagcagatattttttgatcaattaacttaatgtcctcgctccatttcttgctggaacagtttaggtacctaccacttcttcacatgacacaggggaatcctgattagtcaaaataataatgatttcattctctttgccagtaacttgttttatagtggtcatatgacctgatactgggtaaacaaaacaaagatggacttgttctgggaaaaggtaaaatggtaatcaaatagattgtgttccaggaatgcaaaggtggcttaatattcacaagtcagttgctattatacaccacctgtagaaaagtaatctggcatgcagaacattcttgtggtacaattaatgttcgtttatgatcttagcaaatgatggattgaaagggacttacttaactgcataaagagacttaaactacaacaaacaatatgcttaatgatgaaatagtgaacatttctcctaagattataaaaataagacaaggatatctgctgtcaatgattttattcggcattgttcagaaggacctaaccagaaaactaatgcaaggaagagaaacaaaaggcatagagattagaaaagaagtaaaactttaaaa

SEQ ID NO: 174453 - DNA, 6551 bp, Homo sapiens
  Payload ID: 14248
  Gene Symbol: RBAK
  Gene Name: RB-associated KRAB zinc finger
  Uniprot ID: Q9NYW8
  ENST ID: ENST00000396912
  CDS Start-End: 520-2664
ccagtggacgagaatcgcggagcctgcggggctggaggttgagcgcccgggccagcacctaggcgggcgcgggggtgtgcaggccagggttcgcgcgggccgggtggaggcttgagcggggacccccgagcttgagccccggagccggcggcgctggggccagaggggccggacgggaggtggcggaggtggcggcggaggcgaaggggcggcgggacgcgggcctggcccgtgtgtgtcctggcggcctggcccaggctgccgctgtacggtgagcccgagggaggcggatctgggtcccgggaaggacacccgcctggatttgccccttaggcccggcccgggcccctcgggagcagaacaaccttagtgaggtggacaggaggggacctcgcgagcagacgcgcgccagcgacagcagccccgccccggcctctcgggagccgtggggcagaggctgcggagccccagaagggtctaccagccacagtctctgcacgtttccaagagcagcagaaaatgaacacattgcaggggccagtgtcattcaaagatgtggctgtggatttcacccaggaggagtggcagcagctggaccctgatgagaagataacttacagggatgtgatgttggagaactatagccatctagtttctgtgggatatgataccaccaagccaaacgtcatcattaagttggagcagggagaggagccgtggataatgggaggtgaatttccatgtcaacatagtccagaagcctggagagttgatgacctgatagagagaatccaagaaaacgaagacaaacattcaaggcaagctgcttgtatcaatagcaaaaccctgactgaagagaaagagaatacatttagtcaaatttacatggaaacaagccttgttccttcaagcataatagctcataattgtgtctcatgtggaaagaatttagaatctatttcgcaattaattagtagtgatggaagctatgctaggacaaaacctgatgagtgtaatgaatgtgggaaaacatatcatggagagaaaatgtgtgaatttaatcaaaatggggatacctattctcacaatgaagaaaatattcttcagaaaattagtattttggagaaaccctttgaatataatgaatgcatggaagccttagacaatgaggctgtttttattgctcataagagagcttacataggggagaagccctatgagtggaatgattctggaccagacttcatacagatgtcaaattttaatgcatatcagagatcacaaatggaaatgaagccctttgaatgcagtgaatgtggaaaatccttctgtaaaaagtcaaaattcatcatccaccagagggctcacacaggagagaaaccttatgaatgtaatgtatgtgggaaatccttcagccaaaagggaaccctcactgtacatcggagatcacacttagaggagaagccctataaatgtaatgaatgtgggaaaaccttttgtcagaagttacacctcactcaacacctaagaactcattcaggagagaaaccctacgaatgtagcgaatgtgggaaaaccttctgccaaaagacacatctcaccctgcaccagaggaatcattcaggagagaggccctatccatgtaacgaatgtgggaaatccttctcccgcaagtctgctctcagtgaccatcagagaactcacacgggagagaagctttataaatgtaatgaatgtgggaaatcctactaccgaaagtctactctgattacacatcagagaacacacacgggagagaagccctatcagtgtagcgagtgtgggaaattcttttctcgggtgtcatacctcactatacattatagaagtcatttagaagagaaaccctatgaatgtaatgaatgtggcaaaaccttcaatttaaattcagccttcattagacatcggaaagtacacacagaagagaaatcccatgaatgtagtgaatgtggaaagttctctcagttgtatctcaccgaccatcatacagctcatttagaagagaaaccctatgaatgtaatgaatgtgggaaaaccttccttgtaaattcagccttcgatgggcaccagccacttccaaaaggggagaaatcctatgaatgtaatgtatgtggaaagttattcaatgagttgtcatactatactgaacattatagaagtcattcagaagagaaaccttatggatgtagcgaatgtgggaaaaccttttcccataattcatccctcttcagacatcaaagagtacacacaggcgagaaaccctatgaatgttacgaatgtggaaaattcttctctcagaaatcatatctcactatacatcatcgaattcattcaggagagaaaccctatgaatgtagtaaatgtggaaaagtcttctctcggatgtcaaacctcactgtccactacagaagccattcaggagagaaaccctatgaatgtaatgaatgtgggaaagtcttttctcagaagtcatacctcactgtacactatagaactcattcaggagagaaaccctatgaatgtaacgagtgtgggaaaaaattccaccacagatcagccttcaatagccatcagagaattcatagaagaggaaatatgaacgtacttgatgtggaaaatctctgaagtcagatctcaatttttagaaaactctctgaatataatgaatatggggaatccaataggaagtcaaagcgtttatctgagagttcgtgttcctgaacggtgagaagcatttaggcattagagtcattttaatccaaattttcacagagaagaatcccgaagaatgtaacaagaagcaaagccttcagcaagatcatacgactcatcggacactaatttatataggagtgaagttttataaatatttaatatttattttggattcaaattgtatttacatatcagggaatcatacaaaggcaaaatctgtcaatatggtgaatgtggaaaatatattgtcttggaaatttgttgtaaaagccatatttctaatggaaaatcaggtgtttacaggaaagatctcagaggctatgagctctgaataaatcttcattgtataaaatgaagtttttaaattgtcaggagttgatcatgaggacagtagcattaaataagtatatggccgttttttatcatgtcttaaaaatgcaatctaatggtaattctatgcaagtttggaattggatgacttgtgaagaggcagttttcttatttgagtattaggatggcaaaatgtattaagacaggacatattgttggtgagataatatttaataggtataaaatggtaaaatacctagttttctatttagaggaatttacaaatgggtttttaacaaatgcctcattagtacaggaggcagtcgttttgtaaagttttcaactgcatctgagtaagataagattttctaaaagactattttgataaactatacatacataatttggaattgtttaagtctatttcagtgaaagagaacaagcatactgcccatactctaaaatatccccagctctcacaccacccttgttttttaacccataggtttgagtgtgcctagtgccaatattttgtaatttagaaattttattcacaaacttctgtttggtacaaatacagtgtcattgttttgtgcattctcctttttcccagtatttcagaacaaattgattcaagtttctagcagatattttttgatcaattaacttaatgtcctcgctccatttcttgctggaacagtttaggtacctaccacttcttcacatgacacaggggaatcctgattagtcaaaataataatgatttcattctctttgccagtaacttgttttatagtggtcatatgacctgatactgggtaaacaaaacaaagatggacttgttctgggaaaaggtaaaatggtaatcaaatagattgtgttccaggaatgcaaaggtggcttaatattcacaagtcagttgctattatacaccacctgtagaaaagtaatctggcatgcagaacattcttgtggtacaattaatgttcgtttatgatcttagcaaatgatggattgaaagggacttacttaactgcataaagagacttaaactacaacaaacaatatgcttaatgatgaaatagtgaacatttctcctaagattataaaaataagacaaggatatctgctgtcaatgattttattcggcattgttcagaaggacctaaccagaaaactaatgcaaggaagagaaacaaaaggcatagagattagaaaagaagtaaaactttaaaaacgaaaaagaatataaatctctatttgcagatgccatgagtaaatttggtaagttccctgcataaaagttatgcaaaaagcattttatgatataccagcaaaaaacatggaaaatgaaattttgaaaagcaatgccacttcaaagatccctcaagtgcctagagggagaaaatgagttaatatgctttgaagaactgtatccagaaaataaaattacaaaggaggagagggataggattccaggacaatctcaaaactattgctttttcctaaattcattgcaaccttaaaatcctagcaagttctttaatgtaaattaacaagctaattctagaattcatatgcatattcaaaagtcgaataattgtcaaggctatcctgtagaatggacagagaggattgaaatttctaaatatcaagacctgttataaagccatagaaataatgaaggtgttaatttggcacaaggatgaaaaaactgactagtggaacagcatacagattcaaaagtagacccacgtgtataccatcacctgagttttgagaaaggtgacattgaagtgtagtgggggaaagggtgttctttccagtaaatgtactttgccaataaaattttgtaatttgataaaaagttatttggaggtggattgcagatctgaatatgaaatgtgaaagctttacaaagaaatcttaggacagtttgtaatcttggagtaagcaaaggtttattgagacccaaaaagcattaacccataaaattagaacttaatattaaatttgagaacttctatttatcagaaagaccaccagtaagaaaatgaacaggaaatcatggggaggagaagatatttgcagttcatgtatgtgacaacagcaccgagtatagcagaagtgttggcaaactttataaagcaaggcaccagatggtgaaaattttcagctttgtcacaactgctcatctttgctattgtgtgaaagcatccatacaccatgcattaaaaaaaaaatgagcatggctgcttcccagtaaaaccattcacaatcccaggtggcagtctggatttggtctgcactcatagttttctggtccctgatctcgaatatgtaaagagcacctacaaatcaacaagggggaaactggaaaaggcaaaagactttagaggatatccactcactttagaggatatccagacggccaataagcatgaaaagatgtgttagctttattagtaatcagggaaatgcaaacttaaaacatgtagcactgctacccatccatggaaatggttaaaatgaaaagcatgaaaaagcatcacgttttggcaaggatgtaagcaagaggaactgtacactactggtggaattgctcatcgataaaaccattttgaaagctggcactaaaagccaagcatatgtatactgttttacccaaacccagcaaaaatgcatgtgtctgtccaccaaaggacatgcactagaatatttatagcctaaaactgcacaaaacagaactatcttaaggcacatgtgcaatggaatgaataaagaagtggcatatgtccatggaatactgtaaaacagtgagcatgaatgaactagaagtccgtgtaataacgcagctgaatttaacaaaccttgctgaatgaaagactccagacacaaaagccaacatgctgtatgattccttctatataaattataaagacgggcaaaacttgtatacgtggtttaaaattagggtagcagttagccttggccaaggctgaaagggggcatttatctggtgctgggaataatctgtttctaaacctaggtgctaagtatttgagtgtgttttgagctgtgcacttaagatatgtgtatttttctgcatgtgtgttaaactttccataaaagttttctaaaatcacaaatggctaacatttgtgtcgctcatcactctaatcatatttttctagatgtgtatgaatatgctgcacaacaggaattaaatggcagattttgcataattctgtgcaggaaatacatatttatagtaattttgatggcaactactaagatttcctacgctgtccttaaagcttagcataatgtatattttaagtgaaatatttgagaaggttaaagaatcattacatactttgtcatcctatacttttgcatatataaataggtctgagctgcctcttcaataaagaagctaatgtgtaacatttcatatttccctaaac

SEQ ID NO: 174454 - DNA, 2793 bp, Homo sapiens
  Payload ID: 14249
  Gene Symbol: RBBP8NL
  Gene Name: RBBP8 N-terminal like
  Uniprot ID: Q8NC74
  ENST ID: ENST00000252998
  CDS Start-End: 158-2152
ttctctctccctgtgaagagcgtgggggactccgcgcagaggtcgacagaggttgaggcagggccaggagccatgatggacacagaggggcagtagaggctgcaggcgtctccacaaccccagcgcagaggggcccgggccagggccacagggagccatggagagcttcatggagtcgctgaacaggctgaaggagatccacgagaaggaagtcctgggcctgcagaacaagcttctggaactgaactcagagaggtgccgggacgcccagaggatcgaggagctcttctccaagaaccaccagctccgggaacagcagaagacactgaaggagaacctgcgggtgctggagaacaggctgcgggccggcctgtgcgaccgctgcatggtcacccaggagctggccaggaagcggcagcaggagttcgagagctcccacctgcagaacctgcagcgcatcttcatcctcaccaacgagatgaacgggctgaaggaagagaacgagaccttgaaggaggaggtgaagcggcttcggggcctgggagacaggcccaagccccgggccaaggagggcacctcggaccccccctcacccctgctgctcccctcccctggtggctggaaggccatcacagagaagccaccgggaggccacgaggaggctgaggaagaccaccagggcgtgggcctacggggagaagaaaagccagcagggcacaggacatctccagtggccaaaatctccccaggggccaccctgcctgagtcgcgagccccagacatgagcccccagcgcatctccaaccagctgcacgggaccattgccgtggtgcggcctgggtcccaggcttgccctgccgaccgaggccccgccaatgggacgcccccaccactgcccgccaggagcagcccacccagcccagcgtatgagcgtggcctctccctggacagcttcctgcgggcctcccggccctccgccatgacccatgaggccccgaagctctccccgaaggtggaccggctctgcctcctaaaccgccccctgtccctgcaccttcagagcccccacagcagccccctggcccctgctgcagcccccagcgacccccggctccaggacctgaaggccagagaagcagaggcctgggaggagcccacagaactgctggggctgcccagtgccctggcgggcatgcaggaccttcgcctggagggggcactgcacctgctcctggcccagcagcagctgcgggctagggccagggcaggcagtgtcaggccaaggggccagcccacacccggggagatgctgccctccctaccagtcggctcagactctgagggccctgagaatgaggggaccagggcagctctggccgcagcaggcctgtctggagggcggcacacacagcctgcaggcccgggccgcgcccagaggacagaggctgcagccacgcaggactgtgccctagacaagcccctggacctctcggagtggggccgggcccggggccaggacactcccaagccggccggccagcatgggtcactcagccctgccgctgcccacactgccagccccgagccacccacccagtccggacccctgactcgcagtccccaggcactcagcaatggcaccaaggggaccagagtgccagagcaggaggaggcttccactcccatggacccctcacgcccacttccagggtcccagctcagcctgtcctctccaggcagtacagaagatgaagacacagggaggcctctgccacctccccacccacagccgcctccccacccacagccgcctgacctggacggccacccagagcccagcaaggctgaagtgctgagaccagagtccgacgaactggatgagacagacaccccaggcagcgaggtgggcctgagctcccaggcggaggccactacgagcacgaccggggaggggcctgagtgcatctgcacccaggagcacgggcagggtccaccacggaagaggaagcgggcctcggagcctggggacaaagcctccaaaaagccatccagagggagaaggaaactgacagccactgaggggcccgggagcccaagggacgccgaggaccacagtccctcccccaacagcagcccctgggaggagacctagccagcctgcaccagggtccacagcgagcccggggcagccctccacctgcccaccagggcctggagagggcacaccatccaaccagcaggcagccctgcacagaaccctgggagaagacctagccagcctcagctgaacccacagtgagcccagggcagctctctgcctgctcaccacagcctggagagggcacaccacccaaccagcaggcaaccccgaagagccggtgacgggcacatcctggcccacttcaagaggggctggaggaccgagaggggtctcaggctggcgattcaccccgtctccacccacctgggaaatgctctgcggcccctcccacagcccagcacctgctccctgaggggtgtggggactggaggcgggatcactcaggctccagcccagccctacccctgctgtgcactgcagccgttcccaggcagtgcccacgctctgggaggcaacggaccactcggacccccacccctgcccgccaagctccaagcacaatcttggacgccccctcgtgggctgacagcaaacagatgtctggcagtgagggtggagggagacagtgggcggcagcaccctcgaagaccgggtcccctgagtgacggagaataaacacttgaagaaccgtg

SEQ ID NO: 174455 - DNA, 1566 bp, Homo sapiens
  Payload ID: 14250
  Gene Symbol: RBM14-RBM4
  Gene Name: RBM14-RBM4 readthrough
  ENST ID: ENST00000412278
  CDS Start-End: 96-1115
agccattcctgaggaggactgccggtcgttcggacgtcttgcctgtcgctggaggagaggtccgggctctccaggaaggtggctgcggcgacaaaatgaagatattcgtgggcaacgtcgacggggcggatacgactccggaggagctggcagccctctttgcgccctacggcacggtcatgagctgcgccgtcatgaaacagttcgccttcgtgcacatgcgcgagaacgcgggcgcgctgcgcgccatcgaagccctgcacggccacgagctgcggccggggcgcgcgctcgtggtggagatgtcgcgcccaaggcctcttaatacttggaagattttcgtgggcaatgtgtcggctgcatgcacgagccaggaactgcgcagcctcttcgagcgccgcggacgcgtcatcgagtgtgacgtggtgaaaggcaaacgaatgcacgtgcagttgtccaccagccggcttaggactgcgcccgggatgggagaccagagcggctgctatcggtgcgggaaagaggggcactggtccaaagagtgtccgatagatcgttcaggccgcgtggcagacttgaccgagcaatataatgagcaatacggagcagtgcgtacgccttacaccatgagctatggggattcattgtattacaacaacgcgtacggagcgctcgatgcctactacaagcgctgccgtgctgcccggtcctatgaggcagtggcagctgcagctgcctccgtgtataattacgcagagcagaccctgtcccagctgccacaagtccagaatacagccatggccagtcacctcacctccacctctctcgatccctacgatagacacctgttgccgacctcaggagctgctgccacagctgctgctgcagcagcagccgctgctgctgttactgcagcttccacttcatattacgggcgggatcggagccccctgcgtcgcgctacagccccagtccccactgttggagagggctacggttacgggcatgagagtgagttgtcccaagcttcagcagccgcgcggaattctctgtacgacatggcccggtatgagcgggagcagtatgccgatcgggcgcggtactcagccttttaaagcttgaggtgggatgtgtgtgggctgaaattccgagctgcggttgtgcatgagaatacacccttcgtggtaccccatctccgggacgttctcggctctgtgcgttcagtccctcaggaaccgtggaccttaatttaccttgctaagttcagaccttctcttcctttcctttcctttcctctcctgcccattttcctgttcttctgtccttcaatacttctgtagcttcccattcatgttctcttctcccagcaggcctcattgtgtgcagaaactgtggtgggggctgtgctgtctcctccctgcctcctgcctcctgcggctgttggatttgggaatgaccttggtgagagtctcactgctccagggtctctttttggtccaaaggctagacctatagagttggatcactttttttctttccggtgaaataaatggtttttcaacttag

SEQ ID NO: 174456 - DNA, 2034 bp, Homo sapiens
  Payload ID: 14250
  Gene Symbol: RBM14-RBM4
  Gene Name: RBM14-RBM4 readthrough
  ENST ID: ENST00000421355
  CDS Start-End: 91-534
ttcctgaggaggactgccggtcgttcggacgtcttgcctgtcgctggaggagaggtccgggctctccaggaaggtggctgcggcgacaaaatgaagatattcgtgggcaacgtcgacggggcggatacgactccggaggagctggcagccctctttgcgccctacggcacggtcatgagctgcgccgtcatgaaacagttcgccttcgtgcacatgcgcgagaacgcgggcgcgctgcgcgccatcgaagccctgcacggccacgagctgcggccggggcgcgcgctcgtggtggagatgtcgcgcccaaggcctcttaatacttggaagattttcgtgggcaatgtgtcggctgcatgcacgagccaggaactgcgcagcctcttcgagcgccgcggacgcgtcatcgagtgtgacgtggtgaaaggctcttgtcaggatggtgaagctgttcatcggaaacctgccccgggaggctacagagcaggagattcgctcactcttcgagcagtatgggaaggtgctggaatgtgacatcattaagaattacggctttgtgcacatagaagacaagacggcagctgaggatgccatacgcaacctgcaccattacaagcttcatggggtgaacatcaacgtggaagccagcaagaataagagcaaaacctcaacaaagttgcatgtgggcaacatcagtcccacctgcaccaataaggagcttcgagccaagtttgaggagtatggtccggtcatcgaatgtgacatcgtgaaagattatgccttcgtacacatggagcgggcagaggatgcagtggaggccatcaggggccttgataacacagagtttcaaggcaaacgaatgcacgtgcagttgtccaccagccggcttaggactgcgcccgggatgggagaccagagcggctgctatcggtgcgggaaagaggggcactggtccaaagagtgtccgatagatcgttcaggccgcgtggcagacttgaccgagcaatataatgagcaatacggagcagtgcgtacgccttacaccatgagctatggggattcattgtattacaacaacgcgtacggagcgctcgatgcctactacaagcgctgccgtgctgcccggtcctatgaggcagtggcagctgcagctgcctccgtgtataattacgcagagcagaccctgtcccagctgccacaagtccagaatacagccatggccagtcacctcacctccacctctctcgatccctacgatagacacctgttgccgacctcaggagctgctgccacagctgctgctgcagcagcagccgctgctgctgttactgcagcttccacttcatattacgggcgggatcggagccccctgcgtcgcgctacagccccagtccccactgttggagagggctacggttacgggcatgagagtgagttgtcccaagcttcagcagccgcgcggaattctctgtacgacatggcccggtatgagcgggagcagtatgccgatcgggcgcggtactcagccttttaaagcttgaggtgagaggggtggggtgttccctcttctggttttgccatccctcctgcagcctaaagggctccaattaggctgccctgcttgcttgcttgcttttgcagggttaggggaaggttactaggatggctcacaggctagagagaagtcctaactgcttaactttaaaatacatagagttccttggccctcatggctatttttcagggcttctggtagtgggagtcaatttgattctatttgtgcctagaaaaataaagaatgatgtgctggtgaatcttgggtcacctatgtactatactataattgaaccttacctggggacccacacgttcaggctcaggtgttttgtttcttagagcctttgttaagtttcctacgtgtgcgacattcctaaggtcttcaagtttcctattctgttttgtgctgtgtgaaagttctgatatgacccctgatgataaagtccataactgtagttaactggtcatcactgctca

SEQ ID NO: 174457 - DNA, 829 bp, Homo sapiens
  Payload ID: 14250
  Gene Symbol: RBM14-RBM4
  Gene Name: RBM14-RBM4 readthrough
  ENST ID: ENST00000500635
  CDS Start-End: 52-408
gtcgctggaggagaggtccgggctctccaggaaggtggctgcggcgacaaaatgaagatattcgtgggcaacgtcgacggggcggatacgactccggaggagctggcagccctctttgcgccctacggcacggtcatgagctgcgccgtcatgaaacagttcgccttcgtgcacatgcgcgagaacgcgggcgcgctgcgcgccatcgaagccctgcacggccacgagctgcggccggggcgcgcgctcgtggtggagatgtcgcgcccaaggcctcttaatacttggaagattttcgtgggcaatgtgtcggctgcatgcacgagccaggaactgcgcagcctcttcgagcgccgcggacgcgtcatcgagtgtgacgtggtgaaaggtgggatgtgtgtgggctgaaattccgagctgcggttgtgcatgagaatacacccttcgtggtaccccatctccgggacgttctcggctctgtgcgttcagtccctcaggaaccgtggaccttaatttaccttgctaagttcagaccttctcttcctttcctttcctttcctctcctgcccattttcctgttcttctgtccttcaatacttctgtagcttcccattcatgttctcttctcccagcaggcctcattgtgtgcagaaactgtggtgggggctgtgctgtctcctccctgcctcctgcctcctgcggctgttggatttgggaatgaccttggtgagagtctcactgctccagggtctctttttggtccaaaggctagacctatagagttggatcactttttttctttccggtgaaataaatggtttttcaactt

SEQ ID NO: 174458 - DNA, 2041 bp, Homo sapiens
  Payload ID: 14251
  Gene Symbol: RITA1
  Gene Name: RBPJ interacting and tubulin associated 1
  Uniprot ID: Q96K30
  ENST ID: ENST00000549621
  CDS Start-End: 685-1494
gcggtgaccacgtgacctccgctgagctttcgccagtgcctgcggccctcggcggcctagtacacacgcacctgagtgagtggcaccagaggaccctctccatgtttagggacctcctgggcctcaggagcgtggcgcccgcccctgggcggactccccccatccgcgggcgcgaatggtccgggccgcgtccgcagtgctgctggctgctccctggttgctgggtgcaaagtgctgggttctgggtttctggattcgcgggccgttcacacgtagcctgtgccggctcctcgggtgagtccgtccgcgcgcggtgccccgggacggcctaggctgccgggggtccggggccccaggcattccgggctgcagattgacggggatcccggatgcaccgcgcgcccccgcgccctcaccgacgggtccagacctggtgggaagaaggtgcggggacgggtccctgaggatcccgatgcctacgagccaagatgctcaggtgtgacctacacatgtgacttcacctcagttttgtgatccgtaaaatggacaaattcgaagctacttcacagtgctgttgagaggattaaatgaaacaatgcttgtaaagctctttgcaggagggagcctcggaagcagggcctggccggcagagcacacctgctgtcaccagggaccacaggcagcatgaagacccccgtggagctggccgtcagtgggatgcagaccctcggccttcagcaccgctgccgaggtggctaccgggtcaaggccaggacgtcatatgtggatgagactctgtttggcagcccagcaggcacccggcctaccccaccggacttcgatccgccctgggtggagaaggctaacagaaccagaggcgtgggcaaggaggcatcgaaggccttgggggcaaaggggagctgtgagaccaccccctcaaggggcagcacccccaccctcacaccaaggaagaagaacaaatacagacccatcagccacaccccgtcttactgtgatgagtcgctgtttggctcccgatctgaaggcgccagcttcggggccccgcggatggcgaagggggatgccgcaaagctccgtgctctcttgtggacgccaccacctacccccaggggtagccactcgccccgccccagggaggcaccactgcgagccattcacccagctggtccctccaagacagagccggggccagcggcagactcccagaagttatctatgggtgggttacactcttcacgccccctgaagcggggactttcccattccctcacccacctgaatgtccccagcactggtcatccagccaccagtgccccccacacaaatgggcctcaggatctcaggccttccacgtcaggggtgaccttccggagccccctggtgacttccagggctcgctcagttagcatttcagtgccatctaccccacgacgaggtggggccacccagaaaccaaagcccccttggaaatgatactctttcatcagggttgcctatggggccacggcgacaggtatggccccttgccagggtaggaggacattcatcacccagggaaccccaggtattaaagaagcccctgtgggggcagacagacatagcaggggtgggcagtgcctccctttatcctgacaatctctagtcgattcttgcctttttctcccgattgcggatttgggggccacctctaagatgcctctctccagccctgtctcaaccatactccaaattagtgccaacccaggggcctggcacctcccacatcatccattgtcttgctgccaagtgcgaataaacggcgtgattgccaacctggagggtcccctcttatcccttcaagccaagcttcctgctcaggattagtttccagctaagtctgcaagccctagaggagtttttccaggctgtctgtgaagcctggggaacacaacggcaactgggagatttgtgagtgaacactgtttcatcttaatatgcttctgaatttattttcatgtactaaatagatcagctcatcaaa

SEQ ID NO: 174459 - DNA, 1898 bp, Homo sapiens
  Payload ID: 14251
  Gene Symbol: RITA1
  Gene Name: RBPJ interacting and tubulin associated 1
  Uniprot ID: Q96K30
  ENST ID: ENST00000552495
  CDS Start-End: 473-1354
ctccgctgagctttcgccagtgcctgcggccctcggcggcctagtacacacgcacctgagtgagtggcaccagaggaccctctccatgtttagggacctcctgggcctcaggagcgtggcgcccgcccctgggcggactccccccatccgcgggcgcgaatggtccgggccgcgtccgcagtgctgctggctgctccctggttgctgggtgcaaagtgctgggttctgggtttctggattcgcgggccgttcacacgtagcctgtgccggctcctcgggtgagtccgtccgcgcgcggtgccccgggacggcctaggctgccgggggtccggggccccaggcattccgggctgcagattgacggggatcccggatgcaccgcgcgcccccgcgccctcaccgacgggtccagacctggtgggaagaaggtgcggggacgggtccctgaggatcccgatgcctacgagccaagatgctcagggagcctcggaagcagggcctggccggcagagcacacctgctgtcaccagggaccacaggcagcatgaagacccccgtggagctggccgtcagtgggatgcagaccctcggccttcagcaccgctgccgaggtggctaccgggtcaaggccaggacgtcatatgtggatgagactctgtttggcagcccagcaggcacccggcctaccccaccggacttcgatccgccctgggtggagaaggctaacagaaccagaggcgtgggcaaggaggcatcgaaggccttgggggcaaaggggagctgtgagaccaccccctcaaggggcagcacccccaccctcacaccaaggaagaagaacaaatacagacccatcagccacaccccgtcttactgtgatgagtcgctgtttggctcccgatctgaaggcgccagcttcggggccccgcggatggcgaagggggatgccgcaaagctccgtgctctcttgtggacgccaccacctacccccaggggtagccactcgccccgccccagggaggcaccactgcgagccattcacccagctggtccctccaagacagagccggggccagcggcagactcccagaagttatctatgggtgggttacactcttcacgccccctgaagcggggactttcccattccctcacccacctgaatgtccccagcactggtcatccagccaccagtgccccccacacaaatgggcctcaggatctcaggccttccacgtcaggggtgaccttccggagccccctggtgacttccagggctcgctcagttagcatttcagtgccatctaccccacgacgaggtggggccacccagaaaccaaagcccccttggaaatgatactctttcatcagggttgcctatggggccacggcgacaggtatggccccttgccagggtaggaggacattcatcacccagggaaccccaggtattaaagaagcccctgtgggggcagacagacatagcaggggtgggcagtgcctccctttatcctgacaatctctagtcgattcttgcctttttctcccgattgcggatttgggggccacctctaagatgcctctctccagccctgtctcaaccatactccaaattagtgccaacccaggggcctggcacctcccacatcatccattgtcttgctgccaagtgcgaataaacggcgtgattgccaacctggagggtcccctcttatcccttcaagccaagcttcctgctcaggattagtttccagctaagtctgcaagccctagaggagtttttccaggctgtctgtgaagcctggggaacacaacggcaactgggagatttgtgagtgaacactgtttcatcttaatatgcttctgaatttattttcatgtactaaatagatcagctcatc

SEQ ID NO: 174460 - DNA, 2053 bp, Homo sapiens
  Payload ID: 14251
  Gene Symbol: RITA1
  Gene Name: RBPJ interacting and tubulin associated 1
  Uniprot ID: Q96K30
  ENST ID: ENST00000548278
  CDS Start-End: 693-1502
gcggtgaccacgtgacctccgctgagctttcgccagtgcctgcggccctcggcggcctagtacacacgcacctgagtgagtggcaccagaggaccctctccatgtttagggacctcctgggcctcaggagcgtggcgcccgcccctgggcggactccccccatccgcgggcgcgaatggtccgggccgcgtccgcagtgctgctggctgctccctggttgctgggtgcaaagtgctgggttctgggtttctggattcgcgggccgttcacacgtagcctgtgccggctcctcgggtgagtccgtccgcgcgcggtgccccgggacggcctaggctgccgggggtccggggccccaggcattccgggctgcagattgacggggatcccggatgcaccgcgcgcccccgcgccctcaccgacgggtccagacctggtgggaagaaggtgcggggacgggtccctgaggatcccgatgcctacgagccaagatgctcagctttataggtgtgacctacacatgtgacttcacctcagttttgtgatccgtaaaatggacaaattcgaagctacttcacagtgctgttgagaggattaaatgaaacaatgcttgtaaagctctttgcaggagggagcctcggaagcagggcctggccggcagagcacacctgctgtcaccagggaccacaggcagcatgaagacccccgtggagctggccgtcagtgggatgcagaccctcggccttcagcaccgctgccgaggtggctaccgggtcaaggccaggacgtcatatgtggatgagactctgtttggcagcccagcaggcacccggcctaccccaccggacttcgatccgccctgggtggagaaggctaacagaaccagaggcgtgggcaaggaggcatcgaaggccttgggggcaaaggggagctgtgagaccaccccctcaaggggcagcacccccaccctcacaccaaggaagaagaacaaatacagacccatcagccacaccccgtcttactgtgatgagtcgctgtttggctcccgatctgaaggcgccagcttcggggccccgcggatggcgaagggggatgccgcaaagctccgtgctctcttgtggacgccaccacctacccccaggggtagccactcgccccgccccagggaggcaccactgcgagccattcacccagctggtccctccaagacagagccggggccagcggcagactcccagaagttatctatgggtgggttacactcttcacgccccctgaagcggggactttcccattccctcacccacctgaatgtccccagcactggtcatccagccaccagtgccccccacacaaatgggcctcaggatctcaggccttccacgtcaggggtgaccttccggagccccctggtgacttccagggctcgctcagttagcatttcagtgccatctaccccacgacgaggtggggccacccagaaaccaaagcccccttggaaatgatactctttcatcagggttgcctatggggccacggcgacaggtatggccccttgccagggtaggaggacattcatcacccagggaaccccaggtattaaagaagcccctgtgggggcagacagacatagcaggggtgggcagtgcctccctttatcctgacaatctctagtcgattcttgcctttttctcccgattgcggatttgggggccacctctaagatgcctctctccagccctgtctcaaccatactccaaattagtgccaacccaggggcctggcacctcccacatcatccattgtcttgctgccaagtgcgaataaacggcgtgattgccaacctggagggtcccctcttatcccttcaagccaagcttcctgctcaggattagtttccagctaagtctgcaagccctagaggagtttttccaggctgtctgtgaagcctggggaacacaacggcaactgggagatttgtgagtgaacactgtttcatcttaatatgcttctgaatttattttcatgtactaaatagatcagctcatcaaagcca

SEQ ID NO: 174461 - DNA, 369 bp, Homo sapiens
  Payload ID: 14251
  Gene Symbol: RITA1
  Gene Name: RBPJ interacting and tubulin associated 1
  ENST ID: ENST00000615042
  CDS Start-End: 1-117
agaggcgtgggcaaggaggcatcgaaggccttgggggcaaaggggagctgtgagaccaccccctcaaggggcagcacccccaccctcacaccaaggaagaagaacaaatacaggtaatggggtagggagatgcaaatcctgtactcagtgcagccacctggattccagttacagctctggtgttcacctgctctgtgaccttgggcaagcatcttgacctctctgagccagtttactcatgtggaaaataggaccaattattcctacctagggggattgttgatggattaaatgagagaggggtctgcagtgcttcgcacagtaacctaatacttagaaagctgtcaataaatggtagtgttgatggtt

SEQ ID NO: 174462 - DNA, 382 bp, Homo sapiens
  Payload ID: 14252
  Gene Symbol: RCAN3
  Gene Name: RCAN family member 3
  Uniprot ID: Q9UKA8
  ENST ID: ENST00000374393
  CDS Start-End: 1-348
atgctgagggacactatgaaatcttggaatgatagccagtcagatctgtgtagcactgaccaagaagaggaagaagagatgatttttggtgaaaatgaagatgatttggatgagatgatggatttaagtgatctgcctacctcactttttgcttgcagcgtccatgaagcagtgtttgaggcacgagagcagaaggagagaaatatgaacttcacgcgggaacagagtcgacacccagcgtggtggttcatgtctgtgaaagtgaaactgaagaggaagaagagacaaaaaaccccaaacagaaaattgcccagacgaggcgccccgaccctccgaccgcagcgttgaatgagccccagacctttgattgcgcgctgtgagg

SEQ ID NO: 174463 - DNA, 6802 bp, Homo sapiens
  Payload ID: 14252
  Gene Symbol: RCAN3
  Gene Name: RCAN family member 3
  Uniprot ID: Q9UKA8
  ENST ID: ENST00000374395
  CDS Start-End: 314-1039
cctagtcccagcccagggggccgctctcgccggcgtcgagggcgtggcggcgaggctgctgctgcaggcggctcccggctctgccttcggccccgcccgccgcccaccaggctcccagaggccccgcagctcgcgccgtccggctccccgcagccccgtcgggcagcccgggcccgtccgctgccctcccggctcccgtcctgcggcggcggggcgtgcaggtgaggccccacggcgcccggcctctccagcagtgggtgcctgatagacatcctaggactatacagaaggaaaaggcccactttgggggataatgctgagggacactatgaaatcttggaatgatagccagtcagatctgtgtagcactgaccaagaagaggaagaagagatgatttttggtgaaaatgaagatgatttggatgagatgatggatttaagtgatctgcctacctcactttttgcttgcagcgtccatgaagcagtgtttgaggcacgagagcagaaggaaagatttgaagcactcttcaccatctatgatgaccaggttacttttcagctgtttaaaagctttagaagagtcagaataaatttcagcaaacctgaagcggcagcaagagcgcgaatagaactccacgaaacagacttcaatgggcagaagctaaagctatattttgcacaggtgcagatgtccggcgaagtgcgggacaagtcctatctcctgccgccccagcctgtcaagcagttcctcatctcccctccagcctctcccccggtggggtggaagcagagcgaagatgcgatgcctgttataaattatgatttactctgtgctgtttccaaattgggaccaggagagaaatatgaacttcacgcgggaacagagtcgacacccagcgtggtggttcatgtctgtgaaagtgaaactgaagaggaagaagagacaaaaaaccccaaacagaaaattgcccagacgaggcgccccgaccctccgaccgcagcgttgaatgagccccagacctttgattgcgcgctgtgaggcccttggttgtggtgcgaggcggctgccctggtgggctctggccatggcgctctgtgcctgcggccgatgcgttgctgcgaacagcataggtgagactctgccgagtgaggtataggtcttctcaccacgcctgtactgcagacacggtcgtgtagagtagcagctgatttgacctgtcccagattttaagtgatattccaaaagggactttacattaaaggagaagcccccaagatgtggccacccttaaccatttttaaatagtaacaaattaggaaaacagctcccctcccctccagccatgtaagtcctcctgattctgtatcacatgagacaccaaaaactggaaatgtagtcacacccagtacagtaccatttttatgaatttaaaaatagtcttataattttaattgtttgtgggtatttttctactggtataaatagcttctaattaataaatcgatcaaaggttgttactcagtatacatgaaattttttgcaggaaaagaaaccagaaatacagaataattcatagaaatcatggttctcaagtatttgttcaattagctttggggaagaaatgccaaatccactttgaggatgagtcttacgacacagatccacccacatgttgctcttatctggaatttgggacaaagcaatgcacaggccctcattcctgatgtggcgccctccagacatggctgcccaggaaggacggccactttagaagtgggacgtatcaccagtaagcttgaatgattaggatcgcaggtggctactgcattctgccgttcgtgaccgtgttctagcctgtagaccacccagctaccttcattcaccagtttttatccttcaccttttccagtatcttgttaaccactagttcttgagttttttggctatgatgtgtacgtttatgtatgtcattcatggactttcaactagaaaaggtaatgataaggttttctgaagaccatttgtaaattgtccatttaaccatttttcagcttgctttgaaacaaaagtcacacctactatttttctatgaattagggaatgagggggagatcattcagttttacttttctttttgttgaaattttgtacccggattgcagttggcacttttcctaaaacagaattgtttcccacttaggtgtcagaatgtacctttgaacttccctaagaagcagcaggatctttttaactctctctggtctgtttagactttgaagtcccttctgtagaaaagtctcataactgagaaggctctgttttgggccgggtgggtctgctggcctccactcactgtgctgtttcctttgagtggcacacttgggaagctccggggcatgtgaaggagctgcaaacatgagaactaatgaaccaaggcggctgccaccaggaaggaacagaacgcaggcattcaaccatgacgtctgcacagtgttagtaacatgtcattgtggtttcgttctcactgtggtaaaatttatttctgagcacttaaactgtgttgcatacccctaattttttttttttctgtatcttccttgccctcaaataccctgaggtgataaactgttccagttgtagccaactaccactgctaggcctcaatgtaaattcagttgaaatttgcaattctatcagcaatttaatgtattgaattcagatcatcatttgtcattttaaccgacaaccacccaataaatttactctgcagttctgaactcagcattgtgcccattttttactgcaagatggaccctgtatgccaggagacatgtattatcaacaattgggaattttttgaatttccttttaggtaatattgattcactgtaattttctaagtgatcaaaacccatgagattttgttatttggcttggctttcattctctgcctgcccattaaagaatattctattcctaacacataaaacattttacagtcaagcagtgcaaattacagtgcttttctattttttttttgagagccttgaataaattgaagaaaactttaaaccaaaattagagacgagtcatttaagcttttctgaatggaaagtattaatattttcatttttctagtataatataataaaatgaatttttttaaaaaagctactaagtacccatcaactttttcatattgtgaaatgaaccaggatcttaacagatactatcatcgctgtccttttttggctgtttaatatctagttcatgtaacaaatttacaagagataagtctcatggttttttttttcttttaataggcttttctgcaatttttttgaaattgagttattacttggatttaaccctgataggaccaggtgtggtggctcacaccataatcccagcactttgggaggccaaggtgggtggatccacctgaggtcaggagttcaagaccagcctgaccaacatggtgaaatcctgtctctacttaaaaaatacaaaattagcctggcatggtggcacatgcctgtaatcccagctacttgggaggctgaggcaggagaatttcctgaaccgggagacggaggttgcggtgagccgagatcacgccatcgcactccagcctcggcaacaagagcgaaactccgtctcaaaaaaaaaagatttaaccctgattgatagtatagtagccatgttttctttagaaatcataacctcttcatgggaatcaaactatgttgaaaattgtgaggaaagataatggtgctttgtgttgggaaaaaaacatttgtgaaggattagaaaaccgtaacacttaacaaggatagtcacagaaccgacgctgcattggctcttaggttctagatttttgtagcacactcacctgatgaaaccaaagacaaatccatgtaaaaagtgttccagtgagcatctctgaggtttaaggtactaagaggcagaagtggatagcaacagttccattgccttcgagaactaaaactcagctggaaagcaaattagtcttttcacattctgcttcttcaaaatgttgtactcaaaaacataccagtaattaagagccaaagcaaagcttcaaggaacttttaagttcaacataaaggtttaaataaaatattttttattttttatttttatttatttatttatttattttgagacagagtctcactctgtcgcccaggctggagcgcagccgcgtgatctcggctcactgcaagctccgcctcccgggttcacgccattctcctgcctcagcctcccaagtagctgggactacaggcgcccgctcccacgcccggctaattttttttttttttttttttataagtagagacggggtttcaccacgttagccaggatggtctcgatctcctgacctagtgatccgcctgccttggcctcccaaagtgctgggattaaccaggcgtgagccactgcgcccggccttaaataaaatattgtagtcattaatggtgtgtttgaattgaagagataccaggagatagaggtgaagtgcagtacttttattctttaagaatatagtctttagccaggtgcagtggtgtgtgcctgtagtctcagctatttgagaggctgaggtgagaggatcacttgagttcaggagttcaagaccagcctgggcaacatagcaagtccctggctcaaaaaaaaaaaagtttcccattcatattaactccatcttttaaaaatgtcatgattacaaagtgaaaagatttggctttcttagaggctcaatcacagaggtgaaagtgaccttggaaatcatatactctatccccatgttacacagattagaaaaactgaggttatggcactgacttaggcacccccagcaaggcaacccagggactacaactggcaatcccaactcctgggctagggctttttctacctttttttgcattggcctcttaaagaggcaatgaatactaattcctggcatcagaaaaaaaaaaaggcatgaggtgggaggattcttttttccctgatgggaaacagtgaataagaaaaatctcatcattcgatggaagaggtgacttaataattttattaatgaatttgatgtcccatgttttgtagttttgttatcattgaaccattggggctggaatctgcctaaataattttatcttggtagccagcaattatgttggtattttatgtgggccttcccagattttcatattaatgaaatgactaatagtcgtacttaagaggtaactctactaaagcagaatgagatctaatatgttgtggaaataaaagagtttgcagtggaatgatactctcactccgtgcttgtaaaattgagttctattcaagacggaactgctatgactggcctattcaaggcttcatatttttatacagactatttcacagaccatagatttattttaaaagggaaaatctcacacataattaagcagtggaaaatgtgctcaatgctatggtgcgtcaggccctctgtctaccaggtttctcccctttctgcagagctgtggaccctgtacgtaccaaacaggtgaacttggtccatctttccttcttcctttttttgcacatttgcatttatatcttcctgtactaaaagaaacaaattatttataattggggtgacaatataaaggaacaaaagatggggcaatagttgcttcctagctggagctgtaagtccatgttacagaaactcactatttaaaaagttttaaaagatttatgaaccttgtcctacaattcgctgaatacttatttgtcttttaaactcccctcggtgtatggatcatcttcgtcagaatgccgttgtttcattgtgaatcaggggaaaatgttaatcatttggagactgttttcttattaccaaatgtacaatccataagacaactgaaagcaacaactgctgggttcactgacaaagattataaaaatcatcacgttcaaagtagagtttttagccaaggtcaagaactaacctggggctgagtcagcgtctctacccacttaaataacagcgtaaagatctttcactaaattcgttatgtggtctgtctggatgtaaacctatatatttccttttgaaacagaatcatatcctgcagactcttggcactcctgcatagctttgaccgaatgttcactctcatcgtaatggaagatttctatctatgcagataatacatgtttttaaatactgttttctgtttagtcctcaatcttcctaactcaaattggggactgaggagagagaaaggtggttacccctgttaccgtgccatattcttcttgctgcttttcaaccccacgtgattgttgattgacggttctgctataatgtgcgtgcccttcaagtttcagaaaactttcccaatcatttcacttcaatcttaattgaacccaagagtcaaagttattattttctccgaacgtgtttgtgatcttctgttatattttggggcatgttacctttatggtatataagctgtagtgcatactctttgtattgcaaaaaactggtcagtaatttatgtacatgtattccacattttagtgtgcttgaagtgacaatccatagtttgtagtagtttgttatttgtcaactttaccctgtgttttaaggacatctaaacattccttgtcctatcaagatgacaaaagcagaatgtaatttttttttggaagcttcgtgattacctgtaacaagttctgtttttaaaacgaatacaaataaagttagtaactatttttaaatca

SEQ ID NO: 174464 - DNA, 667 bp, Homo sapiens
  Payload ID: 14252
  Gene Symbol: RCAN3
  Gene Name: RCAN family member 3
  Uniprot ID: Q9UKA8
  ENST ID: ENST00000412742
  CDS Start-End: 54-575
cctgatagacatcctaggactatacagaaggaaaaggcccactttgggggataatgctgagggacactatgaaatcttggaatgatagccagtcagatctgtgtagcactgaccaagaagaggaagaagagatgatttttggtgaaaatgaagatgatttggatgagatgatggatttaagtgatctgcctacctcactttttgcttgcagcgtccatgaagcagtgtttgaggcacgagagcagaaggaaagatttgaagcactcttcaccatctatgatgaccaggttacttttcagctgtttaaaagctttagaagagtcagaataaatttcagcaaacctgaagcggcagcaagagcgcgaatagaactccacgaaacagacttcaatgggcagaagctaaagctatattttgcacaggagagaaatatgaacttcacgcgggaacagagtcgacacccagcgtggtggttcatgtctgtgaaagtgaaactgaagaggaagaagagacaaaaaaccccaaacagaaaattgcccagacgaggcgccccgaccctccgaccgcagcgttgaatgagccccagacctttgattgcgcgctgtgaggcccttggttgtggtgcgaggcggctgccctggtgggctctggccatggcgctctgtgc

SEQ ID NO: 174465 - DNA, 997 bp, Homo sapiens
  Payload ID: 14252
  Gene Symbol: RCAN3
  Gene Name: RCAN family member 3
  Uniprot ID: Q9UKA8
  ENST ID: ENST00000425530
  CDS Start-End: 222-917
gtataacagaaaaatgaaccaagcactgtaagagctaagtccacctgacaactttgtcttgaagaaaagattaatgaaagccacagtgagatacactgtcactccctgccccgcttccgcagggcccctttccagattggagatttctggcacgataaatgatgggtgcctgatagacatcctaggactatacagaaggaaaaggcccactttgggggataatgctgagggacactatgaaatcttggaatgatagccagtcagatctgtgtagcactgaccaagaagaggaagaagagatgatttttggtgaaaatgaagatgatttggatgagatgatggatttaagtgatctgcctacctcactttttgcttgcagcgtccatgaagcagtgtttgaggcacgagagcagaaggaaagatttgaagcactcttcaccatctatgatgaccaggttacttttcagctgtttaaaagctttagaagagtcagaataaatttcagcaaacctgaagcggcagcaagagcgcgaatagaactccacgaaacagacttcaatgggcagaagctaaagctatattttgcacagtcctatctcctgccgccccagcctgtcaagcagttcctcatctcccctccagcctctcccccggtggggtggaagcagagcgaagatgcgatgcctgttataaattatgatttactctgtgctgtttccaaattgggaccaggagagaaatatgaacttcacgcgggaacagagtcgacacccagcgtggtggttcatgtctgtgaaagtgaaactgaagaggaagaagagacaaaaaaccccaaacagaaaattgcccagacgaggcgccccgaccctccgaccgcagcgttgaatgagccccagacctttgattgcgcgctgtgaggcccttggttgtggtgcgaggcggctgccctggtgggctctggccatggcgctctgtgcctgcggccgatgcgttgctg

SEQ ID NO: 174466 - DNA, 2574 bp, Homo sapiens
  Payload ID: 14252
  Gene Symbol: RCAN3
  Gene Name: RCAN family member 3
  Uniprot ID: Q9UKA8
  ENST ID: ENST00000436717
  CDS Start-End: 281-832
cctagtcccagcccagggggccgctctcgccggcgtcgagggcgtggcggcgaggctgctgctgcaggcggctcccggctctgccttcggccccgcccgccgcccaccaggctcccagaggccccgcagctcgcgccgtccggctccccgcagccccgtcgggcagcccgggcccgtccgctgccctcccggctcccgtcctgcggcggcggggcgtgcagtgggtgcctgatagacatcctaggactatacagaaggaaaaggcccactttgggggataatgctgagggacactatgaaatcttggaatgatagccagtcagatctgtgtagcactgaccaagaagaggaagaagagatgatttttggtgaaaatgaagatgatttggatgagatgatggatttaagtgatctgcctacctcactttttgcttgcagcgtccatgaagcagtgtttgaggcacgagagcagaaggtgcagatgtccggcgaagtgcgggacaagtcctatctcctgccgccccagcctgtcaagcagttcctcatctcccctccagcctctcccccggtggggtggaagcagagcgaagatgcgatgcctgttataaattatgatttactctgtgctgtttccaaattgggaccaggagagaaatatgaacttcacgcgggaacagagtcgacacccagcgtggtggttcatgtctgtgaaagtgaaactgaagaggaagaagagacaaaaaaccccaaacagaaaattgcccagacgaggcgccccgaccctccgaccgcagcgttgaatgagccccagacctttgattgcgcgctgtgaggcccttggttgtggtgcgaggcggctgccctggtgggctctggccatggcgctctgtgcctgcggccgatgcgttgctgcgaacagcataggtgagactctgccgagtgaggtataggtcttctcaccacgcctgtactgcagacacggtcgtgtagagtagcagctgatttgacctgtcccagattttaagtgatattccaaaagggactttacattaaaggagaagcccccaagatgtggccacccttaaccatttttaaatagtaacaaattaggaaaacagctcccctcccctccagccatgtaagtcctcctgattctgtatcacatgagacaccaaaaactggaaatgtagtcacacccagtacagtaccatttttatgaatttaaaaatagtcttataattttaattgtttgtgggtatttttctactggtataaatagcttctaattaataaatcgatcaaaggttgttactcagtatacatgaaattttttgcaggaaaagaaaccagaaatacagaataattcatagaaatcatggttctcaagtatttgttcaattagctttggggaagaaatgccaaatccactttgaggatgagtcttacgacacagatccacccacatgttgctcttatctggaatttgggacaaagcaatgcacaggccctcattcctgatgtggcgccctccagacatggctgcccaggaaggacggccactttagaagtgggacgtatcaccagtaagcttgaatgattaggatcgcaggtggctactgcattctgccgttcgtgaccgtgttctagcctgtagaccacccagctaccttcattcaccagtttttatccttcaccttttccagtatcttgttaaccactagttcttgagttttttggctatgatgtgtacgtttatgtatgtcattcatggactttcaactagaaaaggtaatgataaggttttctgaagaccatttgtaaattgtccatttaaccatttttcagcttgctttgaaacaaaagtcacacctactatttttctatgaattagggaatgagggggagatcattcagttttacttttctttttgttgaaattttgtacccggattgcagttggcacttttcctaaaacagaattgtttcccacttaggtgtcagaatgtacctttgaacttccctaagaagcagcaggatctttttaactctctctggtctgtttagactttgaagtcccttctgtagaaaagtctcataactgagaaggctctgttttgggccgggtgggtctgctggcctccactcactgtgctgtttcctttgagtggcacacttgggaagctccggggcatgtgaaggagctgcaaacatgagaactaatgaaccaaggcggctgccaccaggaaggaacagaacgcaggcattcaaccatgacgtctgcacagtgttagtaacatgtcattgtggtttcgttctcactgtggtaaaatttatttctgagcacttaaactgtgttgcatacccctaattttttttttttctgtatcttccttgccctcaaataccctgaggtgataaactgttccagttgtagccaactaccactgctaggcctcaatgtaaattcagttgaaatttgcaattctatcagcaatttaatgtattgaattcagatcatcatttgtcattttaaccgacaaccacccaataaatttactctgcagttctgaactc

SEQ ID NO: 174467 - DNA, 497 bp, Homo sapiens
  Payload ID: 14252
  Gene Symbol: RCAN3
  Gene Name: RCAN family member 3
  ENST ID: ENST00000482807
  CDS Start-End: 1-326
cctatctcctgccgccccagcctgtcaagcagttcctcatctcccctccagcctctcccccggtggggtggaagcagagcgaagatgcgatgcctgttataaattatgatttactctgtgctgtttccaaattgggaccaggagagaaatatgaacttcacgcgggaacagagtcgacacccagcgtggtggttcatgtctgtgaaagtgaaactgaagaggaagaagagacaaaaaaccccaaacagaaaattgcccagacgaggcgccccgaccctccgaccgcagcgttgaatgagccccagacctttgattgcgcgctgtgaggcccttggttgtggtgcgaggcggctgccctggtgggctctggccatggcgctctgtgcctgcggccgatgcgttgctgcgaacagcataggaaaagaaaccagaaatacagaataattcatagaaatcatggttctcaagtatttgttcaattagctttggggaagaaa

SEQ ID NO: 174468 - DNA, 2640 bp, Homo sapiens
  Payload ID: 14252
  Gene Symbol: RCAN3
  Gene Name: RCAN family member 3
  Uniprot ID: Q9UKA8
  ENST ID: ENST00000538532
  CDS Start-End: 173-898
gtgctagctccagctcagctacctgcggccgcctctcctcgggcaatgaggcgccgggaagcccacagcatctgataatatccgggccgccggttgccgggaggtgaaccgagtgggtgcctgatagacatcctaggactatacagaaggaaaaggcccactttgggggataatgctgagggacactatgaaatcttggaatgatagccagtcagatctgtgtagcactgaccaagaagaggaagaagagatgatttttggtgaaaatgaagatgatttggatgagatgatggatttaagtgatctgcctacctcactttttgcttgcagcgtccatgaagcagtgtttgaggcacgagagcagaaggaaagatttgaagcactcttcaccatctatgatgaccaggttacttttcagctgtttaaaagctttagaagagtcagaataaatttcagcaaacctgaagcggcagcaagagcgcgaatagaactccacgaaacagacttcaatgggcagaagctaaagctatattttgcacaggtgcagatgtccggcgaagtgcgggacaagtcctatctcctgccgccccagcctgtcaagcagttcctcatctcccctccagcctctcccccggtggggtggaagcagagcgaagatgcgatgcctgttataaattatgatttactctgtgctgtttccaaattgggaccaggagagaaatatgaacttcacgcgggaacagagtcgacacccagcgtggtggttcatgtctgtgaaagtgaaactgaagaggaagaagagacaaaaaaccccaaacagaaaattgcccagacgaggcgccccgaccctccgaccgcagcgttgaatgagccccagacctttgattgcgcgctgtgaggcccttggttgtggtgcgaggcggctgccctggtgggctctggccatggcgctctgtgcctgcggccgatgcgttgctgcgaacagcataggtgagactctgccgagtgaggtataggtcttctcaccacgcctgtactgcagacacggtcgtgtagagtagcagctgatttgacctgtcccagattttaagtgatattccaaaagggactttacattaaaggagaagcccccaagatgtggccacccttaaccatttttaaatagtaacaaattaggaaaacagctcccctcccctccagccatgtaagtcctcctgattctgtatcacatgagacaccaaaaactggaaatgtagtcacacccagtacagtaccatttttatgaatttaaaaatagtcttataattttaattgtttgtgggtatttttctactggtataaatagcttctaattaataaatcgatcaaaggttgttactcagtatacatgaaattttttgcaggaaaagaaaccagaaatacagaataattcatagaaatcatggttctcaagtatttgttcaattagctttggggaagaaatgccaaatccactttgaggatgagtcttacgacacagatccacccacatgttgctcttatctggaatttgggacaaagcaatgcacaggccctcattcctgatgtggcgccctccagacatggctgcccaggaaggacggccactttagaagtgggacgtatcaccagtaagcttgaatgattaggatcgcaggtggctactgcattctgccgttcgtgaccgtgttctagcctgtagaccacccagctaccttcattcaccagtttttatccttcaccttttccagtatcttgttaaccactagttcttgagttttttggctatgatgtgtacgtttatgtatgtcattcatggactttcaactagaaaaggtaatgataaggttttctgaagaccatttgtaaattgtccatttaaccatttttcagcttgctttgaaacaaaagtcacacctactatttttctatgaattagggaatgagggggagatcattcagttttacttttctttttgttgaaattttgtacccggattgcagttggcacttttcctaaaacagaattgtttcccacttaggtgtcagaatgtacctttgaacttccctaagaagcagcaggatctttttaactctctctggtctgtttagactttgaagtcccttctgtagaaaagtctcataactgagaaggctctgttttgggccgggtgggtctgctggcctccactcactgtgctgtttcctttgagtggcacacttgggaagctccggggcatgtgaaggagctgcaaacatgagaactaatgaaccaaggcggctgccaccaggaaggaacagaacgcaggcattcaaccatgacgtctgcacagtgttagtaacatgtcattgtggtttcgttctcactgtggtaaaatttatttctgagcacttaaactgtgttgcatacccctaattttttttttttctgtatcttccttgccctcaaataccctgaggtgataaactgttccagttgtagccaactaccactgctaggcctcaatgtaaattcagttgaaatttgcaattctatcagcaatttaatgtattgaattcagatcatcatttgtcattttaaccgacaaccacccaataaatttactctgcagttctgaactc

SEQ ID NO: 174469 - DNA, 2527 bp, Homo sapiens
  Payload ID: 14252
  Gene Symbol: RCAN3
  Gene Name: RCAN family member 3
  Uniprot ID: Q9UKA8
  ENST ID: ENST00000616511
  CDS Start-End: 435-785
cctagtcccagcccagggggccgctctcgccggcgtcgagggcgtggcggcgaggctgctgctgcaggcggctcccggctctgccttcggccccgcccgccgcccaccaggctcccagaggccccgcagctcgcgccgtccggctccccgcagccccgtcgggcagcccgggcccgtccgctgccctcccggctcccgtcctgcggcggcggggcgtgcaggtgaggccccacggcgcccggcctctccagcaggaaagatttgaagcactcttcaccatctatgatgaccaggttacttttcagctgtttaaaagctttagaagagtcagaataaatttcagcaaacctgaagcggcagcaagagcgcgaatagaactccacgaaacagacttcaatgggcagaagctaaagctatattttgcacaggtgcagatgtccggcgaagtgcgggacaagtcctatctcctgccgccccagcctgtcaagcagttcctcatctcccctccagcctctcccccggtggggtggaagcagagcgaagatgcgatgcctgttataaattatgatttactctgtgctgtttccaaattgggaccaggagagaaatatgaacttcacgcgggaacagagtcgacacccagcgtggtggttcatgtctgtgaaagtgaaactgaagaggaagaagagacaaaaaaccccaaacagaaaattgcccagacgaggcgccccgaccctccgaccgcagcgttgaatgagccccagacctttgattgcgcgctgtgaggcccttggttgtggtgcgaggcggctgccctggtgggctctggccatggcgctctgtgcctgcggccgatgcgttgctgcgaacagcataggtgagactctgccgagtgaggtataggtcttctcaccacgcctgtactgcagacacggtcgtgtagagtagcagctgatttgacctgtcccagattttaagtgatattccaaaagggactttacattaaaggagaagcccccaagatgtggccacccttaaccatttttaaatagtaacaaattaggaaaacagctcccctcccctccagccatgtaagtcctcctgattctgtatcacatgagacaccaaaaactggaaatgtagtcacacccagtacagtaccatttttatgaatttaaaaatagtcttataattttaattgtttgtgggtatttttctactggtataaatagcttctaattaataaatcgatcaaaggttgttactcagtatacatgaaattttttgcaggaaaagaaaccagaaatacagaataattcatagaaatcatggttctcaagtatttgttcaattagctttggggaagaaatgccaaatccactttgaggatgagtcttacgacacagatccacccacatgttgctcttatctggaatttgggacaaagcaatgcacaggccctcattcctgatgtggcgccctccagacatggctgcccaggaaggacggccactttagaagtgggacgtatcaccagtaagcttgaatgattaggatcgcaggtggctactgcattctgccgttcgtgaccgtgttctagcctgtagaccacccagctaccttcattcaccagtttttatccttcaccttttccagtatcttgttaaccactagttcttgagttttttggctatgatgtgtacgtttatgtatgtcattcatggactttcaactagaaaaggtaatgataaggttttctgaagaccatttgtaaattgtccatttaaccatttttcagcttgctttgaaacaaaagtcacacctactatttttctatgaattagggaatgagggggagatcattcagttttacttttctttttgttgaaattttgtacccggattgcagttggcacttttcctaaaacagaattgtttcccacttaggtgtcagaatgtacctttgaacttccctaagaagcagcaggatctttttaactctctctggtctgtttagactttgaagtcccttctgtagaaaagtctcataactgagaaggctctgttttgggccgggtgggtctgctggcctccactcactgtgctgtttcctttgagtggcacacttgggaagctccggggcatgtgaaggagctgcaaacatgagaactaatgaaccaaggcggctgccaccaggaaggaacagaacgcaggcattcaaccatgacgtctgcacagtgttagtaacatgtcattgtggtttcgttctcactgtggtaaaatttatttctgagcacttaaactgtgttgcatacccctaattttttttttttctgtatcttccttgccctcaaataccctgaggtgataaactgttccagttgtagccaactaccactgctaggcctcaatgtaaattcagttgaaatttgcaattctatcagcaatttaatgtattgaattcagatcatcatttgtcattttaaccgacaaccacccaataaatttactctgcagttctgaactc

SEQ ID NO: 174470 - DNA, 2662 bp, Homo sapiens
  Payload ID: 14252
  Gene Symbol: RCAN3
  Gene Name: RCAN family member 3
  Uniprot ID: Q9UKA8
  ENST ID: ENST00000610732
  CDS Start-End: 195-920
gtaagagctaagtccacctgacaactttgtcttgaagaaaagattaatgaaagccacagtgagatacactgtcactccctgccccgcttccgcagggcccctttccagattggagatttctggcacgataaatgatgggtgcctgatagacatcctaggactatacagaaggaaaaggcccactttgggggataatgctgagggacactatgaaatcttggaatgatagccagtcagatctgtgtagcactgaccaagaagaggaagaagagatgatttttggtgaaaatgaagatgatttggatgagatgatggatttaagtgatctgcctacctcactttttgcttgcagcgtccatgaagcagtgtttgaggcacgagagcagaaggaaagatttgaagcactcttcaccatctatgatgaccaggttacttttcagctgtttaaaagctttagaagagtcagaataaatttcagcaaacctgaagcggcagcaagagcgcgaatagaactccacgaaacagacttcaatgggcagaagctaaagctatattttgcacaggtgcagatgtccggcgaagtgcgggacaagtcctatctcctgccgccccagcctgtcaagcagttcctcatctcccctccagcctctcccccggtggggtggaagcagagcgaagatgcgatgcctgttataaattatgatttactctgtgctgtttccaaattgggaccaggagagaaatatgaacttcacgcgggaacagagtcgacacccagcgtggtggttcatgtctgtgaaagtgaaactgaagaggaagaagagacaaaaaaccccaaacagaaaattgcccagacgaggcgccccgaccctccgaccgcagcgttgaatgagccccagacctttgattgcgcgctgtgaggcccttggttgtggtgcgaggcggctgccctggtgggctctggccatggcgctctgtgcctgcggccgatgcgttgctgcgaacagcataggtgagactctgccgagtgaggtataggtcttctcaccacgcctgtactgcagacacggtcgtgtagagtagcagctgatttgacctgtcccagattttaagtgatattccaaaagggactttacattaaaggagaagcccccaagatgtggccacccttaaccatttttaaatagtaacaaattaggaaaacagctcccctcccctccagccatgtaagtcctcctgattctgtatcacatgagacaccaaaaactggaaatgtagtcacacccagtacagtaccatttttatgaatttaaaaatagtcttataattttaattgtttgtgggtatttttctactggtataaatagcttctaattaataaatcgatcaaaggttgttactcagtatacatgaaattttttgcaggaaaagaaaccagaaatacagaataattcatagaaatcatggttctcaagtatttgttcaattagctttggggaagaaatgccaaatccactttgaggatgagtcttacgacacagatccacccacatgttgctcttatctggaatttgggacaaagcaatgcacaggccctcattcctgatgtggcgccctccagacatggctgcccaggaaggacggccactttagaagtgggacgtatcaccagtaagcttgaatgattaggatcgcaggtggctactgcattctgccgttcgtgaccgtgttctagcctgtagaccacccagctaccttcattcaccagtttttatccttcaccttttccagtatcttgttaaccactagttcttgagttttttggctatgatgtgtacgtttatgtatgtcattcatggactttcaactagaaaaggtaatgataaggttttctgaagaccatttgtaaattgtccatttaaccatttttcagcttgctttgaaacaaaagtcacacctactatttttctatgaattagggaatgagggggagatcattcagttttacttttctttttgttgaaattttgtacccggattgcagttggcacttttcctaaaacagaattgtttcccacttaggtgtcagaatgtacctttgaacttccctaagaagcagcaggatctttttaactctctctggtctgtttagactttgaagtcccttctgtagaaaagtctcataactgagaaggctctgttttgggccgggtgggtctgctggcctccactcactgtgctgtttcctttgagtggcacacttgggaagctccggggcatgtgaaggagctgcaaacatgagaactaatgaaccaaggcggctgccaccaggaaggaacagaacgcaggcattcaaccatgacgtctgcacagtgttagtaacatgtcattgtggtttcgttctcactgtggtaaaatttatttctgagcacttaaactgtgttgcatacccctaattttttttttttctgtatcttccttgccctcaaataccctgaggtgataaactgttccagttgtagccaactaccactgctaggcctcaatgtaaattcagttgaaatttgcaattctatcagcaatttaatgtattgaattcagatcatcatttgtcattttaaccgacaaccacccaataaatttactctgcagttctgaactc

SEQ ID NO: 174471 - DNA, 2386 bp, Homo sapiens
  Payload ID: 14252
  Gene Symbol: RCAN3
  Gene Name: RCAN family member 3
  Uniprot ID: Q9UKA8
  ENST ID: ENST00000618490
  CDS Start-End: 294-644
gtgctagctccagctcagctacctgcggccgcctctcctcgggcaatgaggcgccgggaagcccacagcatctgataatatccgggccgccggttgccgggaggtgaaccgaggaaagatttgaagcactcttcaccatctatgatgaccaggttacttttcagctgtttaaaagctttagaagagtcagaataaatttcagcaaacctgaagcggcagcaagagcgcgaatagaactccacgaaacagacttcaatgggcagaagctaaagctatattttgcacaggtgcagatgtccggcgaagtgcgggacaagtcctatctcctgccgccccagcctgtcaagcagttcctcatctcccctccagcctctcccccggtggggtggaagcagagcgaagatgcgatgcctgttataaattatgatttactctgtgctgtttccaaattgggaccaggagagaaatatgaacttcacgcgggaacagagtcgacacccagcgtggtggttcatgtctgtgaaagtgaaactgaagaggaagaagagacaaaaaaccccaaacagaaaattgcccagacgaggcgccccgaccctccgaccgcagcgttgaatgagccccagacctttgattgcgcgctgtgaggcccttggttgtggtgcgaggcggctgccctggtgggctctggccatggcgctctgtgcctgcggccgatgcgttgctgcgaacagcataggtgagactctgccgagtgaggtataggtcttctcaccacgcctgtactgcagacacggtcgtgtagagtagcagctgatttgacctgtcccagattttaagtgatattccaaaagggactttacattaaaggagaagcccccaagatgtggccacccttaaccatttttaaatagtaacaaattaggaaaacagctcccctcccctccagccatgtaagtcctcctgattctgtatcacatgagacaccaaaaactggaaatgtagtcacacccagtacagtaccatttttatgaatttaaaaatagtcttataattttaattgtttgtgggtatttttctactggtataaatagcttctaattaataaatcgatcaaaggttgttactcagtatacatgaaattttttgcaggaaaagaaaccagaaatacagaataattcatagaaatcatggttctcaagtatttgttcaattagctttggggaagaaatgccaaatccactttgaggatgagtcttacgacacagatccacccacatgttgctcttatctggaatttgggacaaagcaatgcacaggccctcattcctgatgtggcgccctccagacatggctgcccaggaaggacggccactttagaagtgggacgtatcaccagtaagcttgaatgattaggatcgcaggtggctactgcattctgccgttcgtgaccgtgttctagcctgtagaccacccagctaccttcattcaccagtttttatccttcaccttttccagtatcttgttaaccactagttcttgagttttttggctatgatgtgtacgtttatgtatgtcattcatggactttcaactagaaaaggtaatgataaggttttctgaagaccatttgtaaattgtccatttaaccatttttcagcttgctttgaaacaaaagtcacacctactatttttctatgaattagggaatgagggggagatcattcagttttacttttctttttgttgaaattttgtacccggattgcagttggcacttttcctaaaacagaattgtttcccacttaggtgtcagaatgtacctttgaacttccctaagaagcagcaggatctttttaactctctctggtctgtttagactttgaagtcccttctgtagaaaagtctcataactgagaaggctctgttttgggccgggtgggtctgctggcctccactcactgtgctgtttcctttgagtggcacacttgggaagctccggggcatgtgaaggagctgcaaacatgagaactaatgaaccaaggcggctgccaccaggaaggaacagaacgcaggcattcaaccatgacgtctgcacagtgttagtaacatgtcattgtggtttcgttctcactgtggtaaaatttatttctgagcacttaaactgtgttgcatacccctaattttttttttttctgtatcttccttgccctcaaataccctgaggtgataaactgttccagttgtagccaactaccactgctaggcctcaatgtaaattcagttgaaatttgcaattctatcagcaatttaatgtattgaattcagatcatcatttgtcattttaaccgacaaccacccaataaatttactctgcagttctgaactc

SEQ ID NO: 174472 - DNA, 658 bp, Homo sapiens
  Payload ID: 14252
  Gene Symbol: RCAN3
  Gene Name: RCAN family member 3
  Uniprot ID: Q9UKA8
  ENST ID: ENST00000630217
  CDS Start-End: 27-578
aaggaaaaggcccactttgggggataatgctgagggacactatgaaatcttggaatgatagccagtcagatctgtgtagcactgaccaagaagaggaagaagagatgatttttggtgaaaatgaagatgatttggatgagatgatggatttaagtgatctgcctacctcactttttgcttgcagcgtccatgaagcagtgtttgaggcacgagagcagaaggtgcagatgtccggcgaagtgcgggacaagtcctatctcctgccgccccagcctgtcaagcagttcctcatctcccctccagcctctcccccggtggggtggaagcagagcgaagatgcgatgcctgttataaattatgatttactctgtgctgtttccaaattgggaccaggagagaaatatgaacttcacgcgggaacagagtcgacacccagcgtggtggttcatgtctgtgaaagtgaaactgaagaggaagaagagacaaaaaaccccaaacagaaaattgcccagacgaggcgccccgaccctccgaccgcagcgttgaatgagccccagacctttgattgcgcgctgtgaggcccttggttgtggtgcgaggcggctgccctggtgggctctggccatggcgctctgtgcctgcggccgatgcgttgctg

SEQ ID NO: 174473 - DNA, 2689 bp, Homo sapiens
  Payload ID: 14253
  Gene Symbol: RCCD1
  Gene Name: RCC1 domain containing 1
  Uniprot ID: A6NED2
  ENST ID: ENST00000394258
  CDS Start-End: 203-1333
ggaaggtaaaagctgcttcctgttggggcatgagtccggcgcgtgtcgggttttgagctgccgcggtcccgggactgagataaggcagctccagcccctggaaggccagagacttgccagtgtcccactagcgggctcttcgcaagaatccccccgggcccgccgcagccaggcggcggccggcagagggcgctgctcgggcatggcggaggagcggccgggggcctggttcggcttcggtttctgcggcttcgggcaggagctgggctccggacgcgggcgccaggtgcacagccccagtccgctgcgggcgggcgtcgacatctgccgcgtgagcgcgagctggagctacaccgctttcgtgacccgtggaggccgcttggagctgtcgggctcagccagcggcgcggcgggccgctgcaaggacgcgtgggcctcggaggggctcctcgcggtgctgcgcgccgggccggggccggaggcgttactgcaggtctgggcggccgaatcggcgctgcgtggggagccattgtgggcccagaatgtggtgcccgaggccgaaggggaagacgatccggccggtgaggcccaggctgggaggctacccctgctgccctgcgcccgtgcctacgtgagcccgcgggcgcccttctaccggcctctggctccggagctgcgggcacgccagctggagctgggcgccgagcacgcgttgctgctggacgctgctggccaggtgttctcctggggcgggggcaggcatggacagctgggccatgggaccctggaggcagagctggagccacggctgttggaggcgttgcagggcctagtcatggctgaggtggccgcggggggctggcattctgtgtgtgtgagtgagactggggatatttatatctggggctggaatgaatcagggcagctggccctgcccaccaggaacctggcagaggatggagagactgtcgcaagggaagccacagaactgaatgaagatggttctcaggtgaagagaacgggtggggctgaggatggagcccctgcccccttcatagctgtccagcccttcccggcattactggatctccccatgggctcagatgcagtcaaggccagctgtggatcccggcacacagctgtggtgacacgaacaggggagctctacacctggggctggggtaaatatggacagctgggccacgaggacaccaccagcttggatcggcctcgccgtgtggaatactttgtagataagcaactccaagtaaaggctgtcacctgtgggccgtggaacacctacgtgtatgctgtggagaaagggaagagctgacatgtgtacgtatatgtatatgcaacacctgtgagacccccattcaggtcaaggaaaaccattgcctgcaccccaagggccccatatttgcccctccccatcacagtcctgcccttcaccctcaagcacggtcctaaacttgtctgcactttagaaacacctggagagcattgaaaactctgctgcctaaggtcagcatcaatcaaaacaatgaaatcaatgaaacaatgaaaccagagcttctaggtgtgtggcctggatagtggtagattcaaagctccacccacctcatcccaggtacatttgatgtgcagctgagattggggcacattccaggtcatcgtcttctgtcagtcatttccctgctttcgtttgaattttaccattcttgtatgcagccttatacgacatagttgtgtttgcttttgagtgttagataaatggaatcctgtgtatgtgcttttgtgtcgtttttgtcactcagcattgtataatccatccttgttgggtcctggagttcatttttaatgctatatggtgttctgttgtatgaataatacctcaagtgatacagccttgttgatggtcatttttattgtttctgattttggtcattccacataattctttgtgcagtcttctgcacatgtgcacaagttcctttgcagaacattgagttgaattgctaagtcaggagatacctttaattttactagataactgttgcccccagcagggtggggtctactgtggctaaaatgtcaggtagatgcacactggttttaattggcatttccctggatactgatgaggttgagtagcttttcatttgttttggatggctgggcatggtggctcacacctgtagtcccagcactttgggaggctaagcagggagattgcttgaggcgaagagttcatatgtttattggccacttggagtttttctgttgtcaagtgcctgttcaagttttctggccttttaaaatgttctgtattttccttagtgatttttcttttggatatttcagatacaagtcttttgagagttagtattcagagtatcttctgctacaatgtagtttgtttcagtctctcttggtattaccaattttaatacttaggtgatgcttactccatgccaggtaaggctcaaagtgctttacaagtatcaacttattttgataaaataagcttatcagtagttttctttatagttaaattctatttgtgcatgtgtgtgtctgtggtttagcaaatgtttcccacccatggggtcttttttattgtggtaaaatatactgaacataaaatttatgttcaataaaaaacaaaaattgtttttaaccattttaa

SEQ ID NO: 174474 - DNA, 1871 bp, Homo sapiens
  Payload ID: 14253
  Gene Symbol: RCCD1
  Gene Name: RCC1 domain containing 1
  ENST ID: ENST00000555155
  CDS Start-End: 192-1316
gctgcttcctgttggggcatgagtccggcgcgtgtcgggttttgagctgccgcggtcccgggactgagataaggcagctccagcccctggaaggccagagacttgccagtgtcccactagcgggctcttcgcaagaatccccccgggcccgccgcagccaggcggcggccggcagagggcgctgctcgggcatggcggaggagcggccgggggcctggttcggcttcggtttctgcggcttcgggcaggagctgggctccggacgcgggcgccaggtgcacagccccagtccgctgcgggcgggcgtcgacatctgccgcgtgagcgcgagctggagctacaccgctttcgtgacccgtggaggccgcttggagctgtcgggctcagccagcggcgcggcgggccgctgcaaggacgcgtgggcctcggaggggctcctcgcggtgctgcgcgccgggccggggccggaggcgttactgcaggtctgggcggccgaatcggcgctgcgtggggagccattgtgggcccagaatgtggtgcccgaggccgaaggggaagacgatccggccggtgaggcccaggctgggaggctacccctgctgccctgcgcccgtgcctacgtgagcccgcgggcgcccttctaccggcctctggctccggagctgcgggcacgccagctggagctgggcgccgagcacgcgttgctgctggacgctgctggccaggtgttctcctggggcgggggcaggcatggacagctgggccatgggaccctggaggcagagctggagccacggctgttggaggcgttgcagggcctagtcatggctgaggtggccgcggggggctggcattctgtgtgtgtgagtgagactggggatatttatatctggggctggaatgaatcagggcagctggccctgcccaccaggaacctggcagaggatggagagactgtcgcaagggaagaactgaatgaagatggttctcaggtgaagagaacgggtggggctgaggatggagcccctgcccccttcatagctgtccagcccttcccggcattactggatctccccatgggctcagatgcagtcaaggccagctgtggatcccggcacacagctgtggtgacacgaacaggggagctctacacctggggctggggtaaatatggacagctgggccacgaggacaccaccagcttggatcggcctcgccgtgtggaatactttgtagataagcaactccaagtaaaggctgtcacctgtgggccgtggaacacctacgtgtatgctgtggagaaagggaagagctgacatgtgtacgtatatgtatatgcaacacctgtgagacccccattcaggtcaaggaaaaccattgcctgcaccccaagggccccatatttgcccctccccatcacagtcctgcccttcaccctcaagcacggtcctaaacttgtctgcactttagaaacacctggagagcattgaaaactctgctgcctaaggtcagcatcaatcaaaacaatgaaatcaatgaaacaatgaaaccagagcttctaggtgtgtggcctggatagtggtagattcaaagctccacccacctcatcccaggtacatttgatgtgcagctgagattggggcacattccaggtcatcgtcttctgtcagtcatttccctgctttcgtttgaattttaccattcttgtatgcagccttatacgacatagttgtgtttgcttttgagtgttagataaatggaatcctgtgtatgtgcttttgtgtcgtttttgtcactcagcattgtataatccatccttgttgggtcctggagttcatttttaatgctatatggtgttctgttgtatgaat

SEQ ID NO: 174475 - DNA, 735 bp, Homo sapiens
  Payload ID: 14253
  Gene Symbol: RCCD1
  Gene Name: RCC1 domain containing 1
  ENST ID: ENST00000556333
  CDS Start-End: 1-235
ggaggagcggccgggggcctggttcggcttcggtttctgcggcttcgggcaggagctgggctccggacgcgggcgccaggtgcacagccccagtccgctgcgggcgggcgtcgacatctgccgcgtgagcgcgagctggagctacaccgctttcgtgacccgcatggacagctgggccatgggaccctggaggcagagctggagccacggctgttggaggcgttgcagggcctagtcatggctgaggtggccgcggggggctggcattctgtgtgtgtgagtgagactggggatatttatatctggggctggaatgaatcagggcagctggccctgcccaccaggaacctggcagaggatggagagactgtcgcaagggaagccacagaactgaatgaagatggttctcaggtgaagagaacgggtggggctgaggatggagcccctgcccccttcatagctgtccagcccttcccggcattactggatctccccatgggctcagatgcagtcaaggccagctgtggatcccggcacacagctgtggtgacacgaacaggggagctctacacctggggctggggtaaatatggacagctgggccacgaggacaccaccagcttggatcggcctcgccgtgtggaatactttgtagataagcaactccaagtaaaggctgtcacctgtgggccgtggaacacctacgtgtatgctgtggagaaagggaagagctga

SEQ ID NO: 174476 - DNA, 1556 bp, Homo sapiens
  Payload ID: 14253
  Gene Symbol: RCCD1
  Gene Name: RCC1 domain containing 1
  Uniprot ID: A6NED2
  ENST ID: ENST00000556618
  CDS Start-End: 123-1253
ttagctccttgggagcagacagctgtcctcactggcagaggaggagcgctcagtaaatgctcgctggacgaataaatggctagataagccaggcggcggccggcagagggcgctgctcgggcatggcggaggagcggccgggggcctggttcggcttcggtttctgcggcttcgggcaggagctgggctccggacgcgggcgccaggtgcacagccccagtccgctgcgggcgggcgtcgacatctgccgcgtgagcgcgagctggagctacaccgctttcgtgacccgtggaggccgcttggagctgtcgggctcagccagcggcgcggcgggccgctgcaaggacgcgtgggcctcggaggggctcctcgcggtgctgcgcgccgggccggggccggaggcgttactgcaggtctgggcggccgaatcggcgctgcgtggggagccattgtgggcccagaatgtggtgcccgaggccgaaggggaagacgatccggccggtgaggcccaggctgggaggctacccctgctgccctgcgcccgtgcctacgtgagcccgcgggcgcccttctaccggcctctggctccggagctgcgggcacgccagctggagctgggcgccgagcacgcgttgctgctggacgctgctggccaggtgttctcctggggcgggggcaggcatggacagctgggccatgggaccctggaggcagagctggagccacggctgttggaggcgttgcagggcctagtcatggctgaggtggccgcggggggctggcattctgtgtgtgtgagtgagactggggatatttatatctggggctggaatgaatcagggcagctggccctgcccaccaggaacctggcagaggatggagagactgtcgcaagggaagccacagaactgaatgaagatggttctcaggtgaagagaacgggtggggctgaggatggagcccctgcccccttcatagctgtccagcccttcccggcattactggatctccccatgggctcagatgcagtcaaggccagctgtggatcccggcacacagctgtggtgacacgaacaggggagctctacacctggggctggggtaaatatggacagctgggccacgaggacaccaccagcttggatcggcctcgccgtgtggaatactttgtagataagcaactccaagtaaaggctgtcacctgtgggccgtggaacacctacgtgtatgctgtggagaaagggaagagctgacatgtaaacacctggagagcattgaaaactctgctgcctaaggtcagcatcaatcaaaacaatgaaatcaatgaaacaatgaaaccagagcttctaggtgtgtggcctggatagtggtagattcaaagctccacccacctcatcccaggtacatttgatgtgcagctgagattggggcacattccaggtcatcgtcttctgtcagtcatttccctgctttcgtttgaattttaccattcttgtatgcagccttatacgacatagttgtgtttgcttttgagtgttagataaatggaatcctgt

SEQ ID NO: 174477 - DNA, 4079 bp, Homo sapiens
  Payload ID: 14254
  Gene Symbol: RQCD1
  Gene Name: RCD1 required for cell differentiation1 homolog (S. pombe)
  Uniprot ID: Q92600
  ENST ID: ENST00000273064
  CDS Start-End: 376-1275
agttgtcttgccgggactgtccatcttttcccgccgttcactggcttttggaggagggtcagagttcacgccgctctctggaaataactgctcaaagccagaagttgcggggactagtggtcgcggacgtccttccggtcctaaatcttaaggggcaaaggacatactctgggactgttaactaggccctggaggcgggaagaggatgtgtgggtggggtcaggggtgagaggtcagagggccgcgaagtgggcggagcgagccggagtcggatggcggctacggcggctcattgttttccgctgcaggggtgctgaaggggggacgcgggtcggacgcgtccggctgtggaagagagcggcggccgctcacaacatgcacagcctggcgacggctgcgcctgtgcctactacactggcacaagtggatagagaaaagatctatcagtggatcaatgagctgtccagtcctgagactagggaaaatgctttgctggagctaagtaagaagcgagaatctgttcctgaccttgcacccatgctgtggcattcatttggtactattgcagcacttttacaggaaattgtaaatatttatccatctatcaacccacccaccttgacagcacaccagtctaacagagtttgcaatgctctggcattactgcaatgtgtagcatcacatccagaaaccaggtcagcgtttctcgcagcacacatcccactttttttgtacccctttttgcacactgtcagcaaaacacgtccctttgagtatctccggctcaccagccttggagttattggggccctggtgaaaacagatgaacaagaagtaatcaactttttattaacaacagaaattatccctttatgtttgcgaattatggaatctggaagtgaactttctaaaacagttgccacattcatcctccagaagatcttgttagatgacactggtttggcttatatatgtcagacgtatgagcgtttctcccatgttgccatgatcttgggtaagatggtcctgcagctatccaaagagccttctgcccgtctgctgaagcatgtagtgagatgttaccttcgactttcagataaccccagggcacgtgaagcactcagacagtgcctccctgaccagctgaaagacacaaccttcgcccaggtgctaaaagatgacaccaccacgaaacgctggcttgcacaactggtgaagaacctgcaagagggccaggtcaccgatccccggggtatccccctgccccctcagtgatccttccctgttccctcccactactcccccaagttggggaaaggagggggaacctacgagaaaaacagctcaggttttatcaccgactgggaatagacaacctcaatgctgaaccgcactggagaaaaggggcaaggtacccctgctgaggtgtatgggctgccatctcaggctgtcttgaggacctgggctccctctgctactcccaggaaatgggctcctgacacagcagtctgccaccacagccccaggagggtgtcaacaccagcaaatgctgtatttgcagcatgtccaagatgacccttctcccctacctctacctagccactggcagggaggggagacagtggtgatagcagcagcactctaggcatggtgaacgcctgggaccaagccatgtggcgttttttattttgcctttctggaagactcaagatatgtctcttcattctctctcagtatttgtttactttggtttttttgtttttaatctcagagagaggtgtgtttagtgggcacaagctgtaatattcagcaaaactttgtcgactggcactgtttacaagtctgttagctgcataagctcaataaaaagttggtctgggcattacatcccctctggcaggccaatagctgcatcaagctgttgggagaaatgggagggcaggggaaagatgtaaagccaaagtacagcaggaacccaccacctgtttcccttccttctcccattctactcccagtccggaatgccacgaggaccttaaccttgtttctggctttagctgctagttttcccaaatctcagtgctttccctttttgaacttcccttctattaaacttaaaacagatgtcttaattaatcaggctgtcttggaagggtattgtattgggagacaaggggcggtggtggacctcaccttcaatccaagttttcaaagatattttctcaataactctaaaagggaggtgcttgggattaaggtgacagtccacttgatccttttctttgttttagtgtgaatttcagcagctccatctgtcttcatgattgtacttgagcagtattagctgtatgagttaattttattcagattgaagatggagggctgggttctgctcactcagtcttttttttttttttttttttttttttttgaccattctcttttagtctatgggaattacagggttgccgctaaaatattcacttgttcatatcgtgtcagagatttcctcttctctggagcttaggtggctcttcacaatccataggcttgaatctgcaacctagtgtaaactgccttgctttccccggttctttcccctgctagcacctgctttctcatccctatctccagtcaaagatgggattgcttaatccaactctggagagggaccaagtcttttctgcccacatctcacacaattgaggtgtctgaacaagcttggggagggtctataaggggtaggctcaaaaaaaaaaaaacccatttgcagaggcagttttgccaacacaagggctctttcaagccgactttcacaaagagagccggacttgttagttggcttctgtctctttagagccaagaaaatagtaattaagtggcctagatataggaagggcagaataagcacttactccccctgccttccaagatgaagaggagaagcaggccaaccctcaataattgcaagcctgaagagaagtgatcttagagaaagcagagaacagaatggactggatagacatcttgactctattcagcccgtagtctgtgatctggagagtccagttaaggtaacccagatttttgacaaccgccttcctgctgagccaaagttttctcattacccctccactggggaagcagctgaggcccagggccttgctccctgggaaattctcttctctccatctttcggtgcattggccatgttactgtgccaaagtgtcttaattcttgtcccatctattctcagctggccttggaacccacataggagttggtgggggagggatggaatgggtattattcattgtagttgatcctggtgtgtgtattatataaagagacccctccccttattttgtgttttccatccctctcccttaacaggattgaaataaaacatgcttctgtttttgtaaaaataatttttcctttacactggagattttattctatcagtatatgggtaactaggcactttggtcaggtgatccttgtcatgcctgcttctcccctctgtctacctacacaacacacacacacacacacacacagccctgctaagatggcagtagtggttcttttgtgaacatgttttttggggagactccatctgaggtacaaaagctgtttgggaggctgggagggggatgatgccccttacctgataaaagtatgttttactgggacagaacttcactcctggccatattggccagaacttagtgccagtgtagggagagacttccatagtgacaaggtaatgcttgaaacatcttacgaactttgatgttcatttcctcaagttcaaggcttggagcacatctccaggattgtttccatgcctggctgtcagtgggacacagctgccctatgcttccacgttcttttttcaagagccttagagggcctgtggcctgtttcactggtggaacaggagcagcattggtagccttcagagcatgccttgcttactaactacatattattcctctgctcattgttcctgctgcttaaaggctaggaaaagggggatatacaaagttgttgctttcaaaaactcagagaaaaaa

SEQ ID NO: 174478 - DNA, 1126 bp, Homo sapiens
  Payload ID: 14254
  Gene Symbol: RQCD1
  Gene Name: RCD1 required for cell differentiation1 homolog (S. pombe)
  Uniprot ID: Q92600
  ENST ID: ENST00000295701
  CDS Start-End: 81-857
ttttccgctgcaggggtgctgaaggggggacgcgggtcggacgcgtccggctgtggaagagagcggcggccgctcacaacatgcacagcctggcgacggctgcgcctgtgcctactacactggcacaagtggatagagaaaagatctatcagtggatcaatgagctgtccagtcctgagactagggaaaatgctttgctggagctaagtaagaagcgagaatctgttcctgaccttgcacccatgctgtggcattcatttggtactattgcagcacttttacaggaaattgtaaatatttatccatctatcaacccacccaccttgacagcacaccagtctaacagagtttgcaatgctctggcattactgcaatgtgtagcatcacatccagaaaccaggtcagcgtttctcgcagcacacatcccactttttttgtacccctttttgcacactgtcagcaaaacacgtccctttgagtatctccggctcaccagccttggagttattggggccctggtgaaaacagatgaacaagaagtaatcaactttttattaacaacagaaattatccctttatgtttgcgaattatggaatctggaagtgaactttctaaaacagttgccacattcatcctccagaagatcttgttagatgacactggtttggcttatatatgtcagacgtatgagcgtttctcccatgttgccatgatcttgggtaagatggtcctgcagctatccaaagagccttctgcccgtctgctgaagcatgtagtgagatgttaccttcgactttcagataaccccaggttttcagatttgactttctgctggtcatcttttcaaagaaaatgaaacgtttaaaagttcatctgataatactgctaccatagttttgttttcactgctcatctcttattaaggtttttaaccataaaactgaagcaatttctgtaaagacacaaattgataacttagtatagaattaaaattcattaagttatcataagtttgatgatatccttgttaatgtactgatttttgaattattttatttgccataatccatatatttctaacatgagtattttgacagtatttaataaatcagaaagctgtttgaa

SEQ ID NO: 174479 - DNA, 581 bp, Homo sapiens
  Payload ID: 14254
  Gene Symbol: RQCD1
  Gene Name: RCD1 required for cell differentiation1 homolog (S. pombe)
  ENST ID: ENST00000432877
  CDS Start-End: 97-324
ctacggcggctcattgttttccgctgcaggggtgctgaaggggggacgcgggtcggacgcgtccggctgtggaagagagcggcggccgctcacaacatgcacagcctggcgacggctgcgcctgtgcctactacactggcacaagtggatagagaaaagatctatcagtggatcaatgagctgtccagtcctgagactagggaaaatgctttgctggagctaagtaagaagcgagaatctgttcctgaccttgcacccatgctgtggcattcatttggtactattgcagcacttttacaggtgattgtgatgcaagtgatctaagaactacgctttgacgaacaccgctttaggagtactgtaagataaatctacatgacagggggaggaaggtggaaagtagagtataaggaccacaaggaaattgtaaatatttatccatctatcaacccacccaccttgacagcacaccagtctaacagagtttgcaatgctctggcattactgcaatgtgtagcatcacatccagaaaccaggtcagcgtttctcgcagcacacatcccactttttttgtacccctt

SEQ ID NO: 174480 - DNA, 907 bp, Homo sapiens
  Payload ID: 14254
  Gene Symbol: RQCD1
  Gene Name: RCD1 required for cell differentiation1 homolog (S. pombe)
  ENST ID: ENST00000418808
  CDS Start-End: 1-186
atcctccagaagatcttgttagatgacactggtttggcttatatatgtcagacgtatgagcgtttctcccatgttgccatgatcttgggtaagatggtcctgcagctatccaaagagccttctgcccgtctgctgaagcatgtagtgagatgttaccttcgactttcagataaccccaggtgctaaaagatgacaccaccacgaaacgctggcttgcacaactggtgaagaacctgcaagagggccaggtcaccgatccccggggtatccccctgccccctcagtgatccttccctgttccctcccactactcccccaagttggggaaaggagggggaacctacgagaaaaacagctcaggttttatcaccgactgggaatagacaacctcaatgctgaaccgcactggagaaaaggggcaaggtacccctgctgaggtgtatgggctgccatctcaggctgtcttgaggacctgggctccctctgctactcccaggaaatgggctcctgacacagcagtctgccaccacagccccaggagggtgtcaacaccagcaaatgctgtatttgcagcatgtccaagatgacccttctcccctacctctacctagccactggcagggaggggagacagtggtgatagcagcagcactctaggcatggtgaacgcctgggaccaagccatgtggcgttttttattttgcctttctggaagactcaagatatgtctcttcattctctctcagtatttgtttactttggtttttttgtttttaatctcagagagaggtgtgtttagtgggcacaagctgtaatattcagcaaaactttgtcgactggcactgtttacaagtctgttagctgcataagctcaataaaaagttggtctgggcattacatcccctct

SEQ ID NO: 174481 - DNA, 567 bp, Homo sapiens
  Payload ID: 14254
  Gene Symbol: RQCD1
  Gene Name: RCD1 required for cell differentiation1 homolog (S. pombe)
  ENST ID: ENST00000433439
  CDS Start-End: 141-266
agagggccgcgaagtgggcggagcgagccggagtcggatggcggctacggcggctcattgttttccgctgcaggggtgctgaaggggggacgcgggtcggacgcgtccggctgtggaagagagcggcggccgctcacaacatgcacagcctggcgacggctgcggatctcgctttgttacccaggctggagtgcagtggtgtgatcttggctcaccgcaacctcgaccttctgggttcagtcgattctcccacctcagcctcttgagtagctgggattacaggcaaacgacaccacaccaggctaatttttgtatttttagtaggggcagggtttcactgtgttgaaactcctgacctcaagtgatccaccagcctcagcctcccaaagtgctgggattacagcctgtgcctactacactggcacaagtggatagagaaaagatctatcagtggatcaatgagctgtccagtcctgagactagggaaaatgctttgctggagctaagtaagaagcgagaatctgttcctgaccttgcacccatgctgtggcattcatttggtactat

SEQ ID NO: 174482 - DNA, 3259 bp, Homo sapiens
  Payload ID: 14254
  Gene Symbol: RQCD1
  Gene Name: RCD1 required for cell differentiation1 homolog (S. pombe)
  Uniprot ID: Q92600
  ENST ID: ENST00000542068
  CDS Start-End: 248-1147
gtccttccggtcctaaatcttaaggggcaaaggacatactctgggactgttaactaggccctggaggcgggaagaggatgtgtgggtggggtcaggggtgagaggtcagagggccgcgaagtgggcggagcgagccggagtcggatggcggctacggcggctcattgttttccgctgcaggggtgctgaaggggggacgcgggtcggacgcgtccggctgtggaagagagcggcggccgctcacaacatgcacagcctggcgacggctgcgcctgtgcctactacactggcacaagtggatagagaaaagatctatcagtggatcaatgagctgtccagtcctgagactagggaaaatgctttgctggagctaagtaagaagcgagaatctgttcctgaccttgcacccatgctgtggcattcatttggtactattgcagcacttttacaggaaattgtaaatatttatccatctatcaacccacccaccttgacagcacaccagtctaacagagtttgcaatgctctggcattactgcaatgtgtagcatcacatccagaaaccaggtcagcgtttctcgcagcacacatcccactttttttgtacccctttttgcacactgtcagcaaaacacgtccctttgagtatctccggctcaccagccttggagttattggggccctggtgaaaacagatgaacaagaagtaatcaactttttattaacaacagaaattatccctttatgtttgcgaattatggaatctggaagtgaactttctaaaacagttgccacattcatcctccagaagatcttgttagatgacactggtttggcttatatatgtcagacgtatgagcgtttctcccatgttgccatgatcttgggtaagatggtcctgcagctatccaaagagccttctgcccgtctgctgaagcatgtagtgagatgttaccttcgactttcagataaccccagggcacgtgaagcactcagacagtgcctccctgaccagctgaaagacacaaccttcgcccaggtgctaaaagatgacaccaccacgaaacgctggcttgcacaactggtgaagaacctgcaagagggccaggtcaccgatccccggggtatccccctgccccctcagtgatccttccctgttccctcccactactcccccaagttggggaaaggagggggaacctacgagaaaaacagctcaggttttatcaccgactgggaatagacaacctcaatgctgaaccgcactggagaaaaggggcaaggtacccctgctgaggtgtatgggctgccatctcaggctgtcttgaggacctgggctccctctgctactcccaggaaatgggctcctgacacagcagtctgccaccacagccccaggagggtgtcaacaccagcaaatgctgtatttgcagcatgtccaagatgacccttctcccctacctctacctagccactggcagggaggggagacagtggtgatagcagcagcactctaggcatggtgaacgcctgggaccaagccatgtggcgttttttattttgcctttctggaagactcaagatatgtctcttcattctctctcagtatttgtttactttggtttttttgtttttaatctcagagagaggtgtgtttagtgggcacaagctgtaatattcagcaaaactttgtcgactggcactgtttacaagtctgttagctgcataagctcaataaaaagttggtctgggcattacatcccctctggcaggccaatagctgcatcaagctgttgggagaaatgggagggcaggggaaagatgtaaagccaaagtacagcaggaacccaccacctgtttcccttccttctcccattctactcccagtccggaatgccacgaggaccttaaccttgtttctggctttagctgctagttttcccaaatctcagtgctttccctttttgaacttcccttctattaaacttaaaacagatgtcttaattaatcaggctgtcttggaagggtattgtattgggagacaaggggcggtggtggacctcaccttcaatccaagttttcaaagatattttctcaataactctaaaagggaggtgcttgggattaaggtgacagtccacttgatccttttctttgttttagtgtgaatttcagcagctccatctgtcttcatgattgtacttgagcagtattagctgtatgagttaattttattcagattgaagatggagggctgggttctgctcactcagtcttttttttttttttttttttttttttttgaccattctcttttagtctatgggaattacagggttgccgctaaaatattcacttgttcatatcgtgtcagagatttcctcttctctggagcttaggtggctcttcacaatccataggcttgaatctgcaacctagtgtaaactgccttgctttccccggttctttcccctgctagcacctgctttctcatccctatctccagtcaaagatgggattgcttaatccaactctggagagggaccaagtcttttctgcccacatctcacacaattgaggtgtctgaacaagcttggggagggtctataaggggtaggctcaaaaaaaaaaaaacccatttgcagaggcagttttgccaacacaagggctctttcaagccgactttcacaaagagagccggacttgttagttggcttctgtctctttagagccaagaaaatagtaattaagtggcctagatataggaagggcagaataagcacttactccccctgccttccaagatgaagaggagaagcaggccaaccctcaataattgcaagcctgaagagaagtgatcttagagaaagcagagaacagaatggactggatagacatcttgactctattcagcccgtagtctgtgatctggagagtccagttaaggtaacccagatttttgacaaccgccttcctgctgagccaaagttttctcattacccctccactggggaagcagctgaggcccagggccttgctccctgggaaattctcttctctccatctttcggtgcattggccatgttactgtgccaaagtgtcttaattcttgtcccatctattctcagctggccttggaacccacataggagttggtgggggagggatgtgtattatataaagagacccctccccttattttgtgttttccatccctctcccttaacaggattgaaataaaacatgcttctgtttttgt

SEQ ID NO: 174483 - DNA, 1621 bp, Homo sapiens
  Payload ID: 14254
  Gene Symbol: RQCD1
  Gene Name: RCD1 required for cell differentiation1 homolog (S. pombe)
  Uniprot ID: Q92600
  ENST ID: ENST00000627282
  CDS Start-End: 376-1371
agttgtcttgccgggactgtccatcttttcccgccgttcactggcttttggaggagggtcagagttcacgccgctctctggaaataactgctcaaagccagaagttgcggggactagtggtcgcggacgtccttccggtcctaaatcttaaggggcaaaggacatactctgggactgttaactaggccctggaggcgggaagaggatgtgtgggtggggtcaggggtgagaggtcagagggccgcgaagtgggcggagcgagccggagtcggatggcggctacggcggctcattgttttccgctgcaggggtgctgaaggggggacgcgggtcggacgcgtccggctgtggaagagagcggcggccgctcacaacatgcacagcctggcgacggctgcgcctgtgcctactacactggcacaagtggatagagaaaagatctatcagtggatcaatgagctgtccagtcctgagactagggaaaatgctttgctggagctaagtaagaagcgagaatctgttcctgaccttgcacccatgctgtggcattcatttggtactattgcagcacttttacaggaaattgtaaatatttatccatctatcaacccacccaccttgacagcacaccagtctaacagagtttgcaatgctctggcattactgcaatgtgtagcatcacatccagaaaccaggtcagcgtttctcgcagcacacatcccactttttttgtacccctttttgcacactgtcagcaaaacacgtccctttgagtatctccggctcaccagccttggagttattgtagagacggggtttcaccatgttggccaggctgatcttgaactcccgacctcaagtgatctgcccgcctcggcctcccaaagtgctgggattacaggggccctggtgaaaacagatgaacaagaagtaatcaactttttattaacaacagaaattatccctttatgtttgcgaattatggaatctggaagtgaactttctaaaacagttgccacattcatcctccagaagatcttgttagatgacactggtttggcttatatatgtcagacgtatgagcgtttctcccatgttgccatgatcttgggtaagatggtcctgcagctatccaaagagccttctgcccgtctgctgaagcatgtagtgagatgttaccttcgactttcagataaccccagggcacgtgaagcactcagacagtgcctccctgaccagctgaaagacacaaccttcgcccaggtgctaaaagatgacaccaccacgaaacgctggcttgcacaactggtgaagaacctgcaagagggccaggtcaccgatccccggggtatccccctgccccctcagtgatccttccctgttccctcccactactcccccaagttggggaaaggagggggaacctacgagaaaaacagctcaggttttatcaccgactgggaatagacaacctcaatgctgaaccgcactggagaaaaggggcaaggtacccctgctgaggtgtatgggctgccatctcaggctgtcttgaggacctgggctccctctgctactcccaggaaatgggctcctgacacagcagtctgccaccacagcccca

SEQ ID NO: 174484 - DNA, 822 bp, Homo sapiens
  Payload ID: 14255
  Gene Symbol: RCSD1
  Gene Name: RCSD domain containing 1
  ENST ID: ENST00000361496
  CDS Start-End: 232-822
tccccttcctccctccctccctcctcctccttcctcgttctctcgcgcagggcccccgcggccggggcagtcccgcagccgagcgcagccgggcgcgcgccaccgcccactcgccctgtgcccgccgcagcccgaaactggccacggccgggagcggaggggacagcggggatcgtgagctccggcccgggcgagcgggtgcgtctgccgcagagtcggcacctgaaggacatggaggaaagaccggcagagaccaatgccaatgtggacaactcggcgtccccctcggtggcccagctggccgggcggtttagggagcaggcggctgcagccaaggagacaccagccagtaaaccaacccgaaggaaaccgccctgttccctccccctgttcccccccaaggtagacctgggccagaatggtgaggaggccaatttaacctttgacccagctgctctactgcctggggcctcacccaagagtcctggactcaaggctatggtgtcgccatttcacagcccaccttctacccccagcagccctggtgtgcgatctaggcccagcgaggcagaggaggtgcctgtcagcttcgaccagccccctgaaggcagtcatctgccctgttacaacaaggtgcggacgaggggctcaataaaaaggcgccctccctccaggcgattccgaaggtcacagtcagactgtggagaacttggagatttcagggcggtggagtcatctcagcagaacggtgctaaggaagaggatggggatgaagtgttgccatccaagagcaaggccccaggatcccctttgtccagtgag

SEQ ID NO: 174485 - DNA, 3135 bp, Homo sapiens
  Payload ID: 14255
  Gene Symbol: RCSD1
  Gene Name: RCSD domain containing 1
  Uniprot ID: Q6JBY9
  ENST ID: ENST00000367854
  CDS Start-End: 332-1582
ttgagtcctgccctgggagggacagtatctgtttagatttgcgtctaaatttaaaccctgatcgtcggcctccctccccgctccccaccctcccctcccctccccttcctccctccctccctcctcctccttcctcgttctctcgcgcagggcccccgcggccggggcagtcccgcagccgagcgcagccgggcgcgcgccaccgcccactcgccctgtgcccgccgcagcccgaaactggccacggccgggagcggaggggacagcggggatcgtgagctccggcccgggcgagcgggtgcgtctgccgcagagtcggcacctgaaggacatggaggaaagaccggcagagaccaatgccaatgtggacaactcggcgtccccctcggtggcccagctggccgggcggtttagggagcaggcggctgcagccaaggagacaccagccagtaaaccaacccgaaggaaaccgccctgttccctccccctgttcccccccaaggtagacctgggccagaatggtgaggagaaatcaccacccaatgcgagccaccctcctaaattcaaggtcaagagctcgcctctgattgagaagcttcaggccaatttaacctttgacccagctgctctactgcctggggcctcacccaagagtcctggactcaaggctatggtgtcgccatttcacagcccaccttctacccccagcagccctggtgtgcgatctaggcccagcgaggcagaggaggtgcctgtcagcttcgaccagccccctgaaggcagtcatctgccctgttacaacaaggtgcggacgaggggctcaataaaaaggcgccctccctccaggcgattccgaaggtcacagtcagactgtggagaacttggagatttcagggcggtggagtcatctcagcagaacggtgctaaggaagaggatggggatgaagtgttgccatccaagagcaaggccccaggatcccctttgtccagtgagggagcagcgggagagggagtgagaaccctgggacctgctgaaaagcctcctctgaggaggtcacccagcaggacagagaagcaggaggaggacagggccacagaggaagccaagaacggtgaaaaggccaggcggagttcagaggaggtggacggccagcacccggcccaagaggaggtcccggaatcgccccagacctctggcccagaggcagaaaataggtgtgggagccccagggaggaaaagccagctggagaggaagcagagatggaaaaggctacagaggtgaagggggagagggtgcaaaatgaagaggtgggacctgaacatgacagccaagaaacaaagaagctggaggagggagctgcagtgaaggagaccccccacagtccccctggaggagtgaagggcggagatgtccccaagcaggaaaaaggcaaggaaaaacaacaggagggggcagtgctcgagccaggctgcagcccccagaccggccctgcccagctggagaccagcagtgaggtccagagcgagccagcagtccccaagccggaggatgacactcctgtccaggacactaaaatgtgaagaacagctcattgtgccccagtgatgaagttgctggacacatctctttgcaggtagcagcaacagttgtagcagcagcagacgaagccattgcagaggcagaatatgctgagtgtctggagtcagcctgaagacacagggtggattatttcctggcctccacaccaaacgttcccttgcagatggagactgaatctgagggcagcagacttttatcagcttgagtttatgtcatttgatggacttggttcaacaacaagaacttacttaaaacaatgtactgtggtgatgagtcccaggggcactggtcagcctgtggagccctggatgctatccacacccacctatccctgcagctaatttagctgatctctaatttaactgagctctaatttagctgatcagattttgcttgggtaaagttcctttttaatgttctaaagtgtttacggttctcaaatatcagttaaaaactaattttaggtggccataaacataaaatagaaaccctgtaagttacagaagaccctaaattgtatcaaaaccctagagacaacttttcaatttgatccaaatttgaactggccaaccagtctttaaaacactggactagaagagataatgattgaaacatttaaaaaaaaaaagtgctccattcgcaggagcttttcctgtcctgtggttttccagttggtgaccaccatgggaggtcgctggctcggctcactcccttctcccacccttgagaatgtggagaactcccatggagaggcagaatggcaggaggtttcatgtcccgcgttgcatctcctcctgaaagaaaagcagtgatacctgaataatgctggctctccgattgatcctgtgaggatgaatttgcatttccagaatccttgagcatggattagatgtttcctgggaggtgccttgagtaccattatgtgcaagctacataattaaaacatttttcttagtttccctgggaagcttttcttgactcacagcccaggttcttctgcccaacacaaaaggagtgagttggggtctttagtctcttcttattgggtagctcttgctttaatattctgtttggtgagtgtaagggattctgcaagggacagggggcctgactacccagtctttgacttgtatcctctcccctcttcatacactcctgctgaaaaatgttaatccaaatacacatttaaacttagggtcggtccttattctgatttgagtattttaatgtctcagtgtgctgatttggtagttggaagaattattcttctggaggtctgttagactacatcctacactgacttcagaaaacagtctgtcagacaaaaaggccttatgtcaccactggtacctcagtttcctcatcccatttacagtttttctaactccagggtagtgtttagtgttaatatttgggatatattttttttcaaaactgtttttaagtagtttgtaatttgtaacaaacttgtaacctggttgggactgatattgtcatagctatgataaactttggatattagcagaatttggga

SEQ ID NO: 174486 - DNA, 3044 bp, Homo sapiens
  Payload ID: 14255
  Gene Symbol: RCSD1
  Gene Name: RCSD domain containing 1
  ENST ID: ENST00000537350
  CDS Start-End: 332-1492
ttgagtcctgccctgggagggacagtatctgtttagatttgcgtctaaatttaaaccctgatcgtcggcctccctccccgctccccaccctcccctcccctccccttcctccctccctccctcctcctccttcctcgttctctcgcgcagggcccccgcggccggggcagtcccgcagccgagcgcagccgggcgcgcgccaccgcccactcgccctgtgcccgccgcagcccgaaactggccacggccgggagcggaggggacagcggggatcgtgagctccggcccgggcgagcgggtgcgtctgccgcagagtcggcacctgaaggacatggaggaaagaccggcagagaccaatgccaatgtggacaactcggcgtccccctcggtggcccagctggccgggcggtttagggagcaggcggctgcagccaaggagaaatcaccacccaatgcgagccaccctcctaaattcaaggtcaagagctcgcctctgattgagaagcttcaggccaatttaacctttgacccagctgctctactgcctggggcctcacccaagagtcctggactcaaggctatggtgtcgccatttcacagcccaccttctacccccagcagccctggtgtgcgatctaggcccagcgaggcagaggaggtgcctgtcagcttcgaccagccccctgaaggcagtcatctgccctgttacaacaaggtgcggacgaggggctcaataaaaaggcgccctccctccaggcgattccgaaggtcacagtcagactgtggagaacttggagatttcagggcggtggagtcatctcagcagaacggtgctaaggaagaggatggggatgaagtgttgccatccaagagcaaggccccaggatcccctttgtccagtgagggagcagcgggagagggagtgagaaccctgggacctgctgaaaagcctcctctgaggaggtcacccagcaggacagagaagcaggaggaggacagggccacagaggaagccaagaacggtgaaaaggccaggcggagttcagaggaggtggacggccagcacccggcccaagaggaggtcccggaatcgccccagacctctggcccagaggcagaaaataggtgtgggagccccagggaggaaaagccagctggagaggaagcagagatggaaaaggctacagaggtgaagggggagagggtgcaaaatgaagaggtgggacctgaacatgacagccaagaaacaaagaagctggaggagggagctgcagtgaaggagaccccccacagtccccctggaggagtgaagggcggagatgtccccaagcaggaaaaaggcaaggaaaaacaacaggagggggcagtgctcgagccaggctgcagcccccagaccggccctgcccagctggagaccagcagtgaggtccagagcgagccagcagtccccaagccggaggatgacactcctgtccaggacactaaaatgtgaagaacagctcattgtgccccagtgatgaagttgctggacacatctctttgcaggtagcagcaacagttgtagcagcagcagacgaagccattgcagaggcagaatatgctgagtgtctggagtcagcctgaagacacagggtggattatttcctggcctccacaccaaacgttcccttgcagatggagactgaatctgagggcagcagacttttatcagcttgagtttatgtcatttgatggacttggttcaacaacaagaacttacttaaaacaatgtactgtggtgatgagtcccaggggcactggtcagcctgtggagccctggatgctatccacacccacctatccctgcagctaatttagctgatctctaatttaactgagctctaatttagctgatcagattttgcttgggtaaagttcctttttaatgttctaaagtgtttacggttctcaaatatcagttaaaaactaattttaggtggccataaacataaaatagaaaccctgtaagttacagaagaccctaaattgtatcaaaaccctagagacaacttttcaatttgatccaaatttgaactggccaaccagtctttaaaacactggactagaagagataatgattgaaacatttaaaaaaaaaaagtgctccattcgcaggagcttttcctgtcctgtggttttccagttggtgaccaccatgggaggtcgctggctcggctcactcccttctcccacccttgagaatgtggagaactcccatggagaggcagaatggcaggaggtttcatgtcccgcgttgcatctcctcctgaaagaaaagcagtgatacctgaataatgctggctctccgattgatcctgtgaggatgaatttgcatttccagaatccttgagcatggattagatgtttcctgggaggtgccttgagtaccattatgtgcaagctacataattaaaacatttttcttagtttccctgggaagcttttcttgactcacagcccaggttcttctgcccaacacaaaaggagtgagttggggtctttagtctcttcttattgggtagctcttgctttaatattctgtttggtgagtgtaagggattctgcaagggacagggggcctgactacccagtctttgacttgtatcctctcccctcttcatacactcctgctgaaaaatgttaatccaaatacacatttaaacttagggtcggtccttattctgatttgagtattttaatgtctcagtgtgctgatttggtagttggaagaattattcttctggaggtctgttagactacatcctacactgacttcagaaaacagtctgtcagacaaaaaggccttatgtcaccactggtacctcagtttcctcatcccatttacagtttttctaactccagggtagtgtttagtgttaatatttgggatatattttttttcaaaactgtttttaagtagtttgtaatttgtaacaaacttgtaacctggttgggactgatattgtcatagctatgataaactttggatattagcagaatttggg

SEQ ID NO: 174487 - DNA, 7300 bp, Homo sapiens
  Payload ID: 14256
  Gene Symbol: REST
  Gene Name: RE1-silencing transcription factor
  Uniprot ID: Q13127
  ENST ID: ENST00000309042
  CDS Start-End: 315-3608
gcagcgtcctgtgttggaatgtgcggctgccgcgagctcgcggcgcagcagcggagcgagcgccgccgaggcccggggccccagaccctggcggcggctgccgcagccgagacggcagggcgaggcccggaggcctgagcaccctctgcagccccactcctgggccttcttggtccacgacggccccagcacccaactttaccaccctcccccacctctcccccgaaactccagcaacaaagaaaagtagtcggagaaggagcggcgactcagggtcgcccgcccctcctcaccgaggaaggccgaatacagttatggccacccaggtaatggggcagtcttctggaggaggagggctgtttaccagcagtggcaacattggaatggccctgcctaacgacatgtatgacttgcatgacctttccaaagctgaactggccgcacctcagcttattatgctggcaaatgtggccttaactggggaagtaaatggcagctgctgtgattacctggtcggtgaagaaagacagatggcagaactgatgccggttggggataacaacttttcagatagtgaagaaggagaaggacttgaagagtctgctgatataaaaggtgaacctcatggactggaaaacatggaactgagaagtttggaactcagcgtcgtagaacctcagcctgtatttgaggcatcaggtgctccagatatttacagttcaaataaagatcttccccctgaaacacctggagcggaggacaaaggcaagagctcgaagaccaaaccctttcgctgtaagccatgccaatatgaagcagaatctgaagaacagtttgtgcatcacatcagagttcacagtgctaagaaattttttgtggaagagagtgcagagaagcaggcaaaagccagggaatctggctcttccactgcagaagagggagatttctccaagggccccattcgctgtgaccgctgcggctacaatactaatcgatatgatcactatacagcacacctgaaacaccacaccagagctggggataatgagcgagtctacaagtgtatcatttgcacatacacaacagtgagcgagtatcactggaggaaacatttaagaaaccattttccaaggaaagtatacacatgtggaaaatgcaactatttttcagacagaaaaaacaattatgttcagcatgttagaactcatacaggagaacgcccatataaatgtgaactttgtccttactcaagttctcagaagactcatctaactagacatatgcgtactcattcaggtgagaagccatttaaatgtgatcagtgcagttatgtggcctctaatcaacatgaagtaacccgccatgcaagacaggttcacaatgggcctaaacctcttaattgcccacactgtgattacaaaacagcagatagaagcaacttcaaaaaacatgtagagctacatgtgaacccacggcagttcaattgccctgtatgtgactatgcagcttccaagaagtgtaatctacagtatcacttcaaatctaagcatcctacttgtcctaataaaacaatggatgtctcaaaagtgaaactaaagaaaaccaaaaaacgagaggctgacttgcctgataatattaccaatgaaaaaacagaaatagaacaaacaaaaataaaaggggatgtggctggaaagaaaaatgaaaagtccgtcaaagcagagaaaagagatgtctcaaaagagaaaaagccttctaataatgtgtcagtgatccaggtgactaccagaactcgaaaatcagtaacagaggtgaaagagatggatgtgcatacaggaagcaattcagaaaaattcagtaaaactaagaaaagcaaaaggaagctggaagttgacagccattctttacatggtcctgtgaatgatgaggaatcttcaacaaaaaagaaaaagaaggtagaaagcaaatccaaaaataatagtcaggaagtgccaaagggtgacagcaaagtggaggagaataaaaagcaaaatacttgcatgaaaaaaagtacaaagaagaaaactctgaaaaataaatcaagtaagaaaagcagtaagcctcctcagaaggaacctgttgagaagggatctgctcagatggaccctcctcagatggggcctgctcccacagaggcggttcagaaggggcccgttcaggtggagccgccacctcccatggagcatgctcagatggagggtgcccagatacggcctgctcctgacgagcctgttcagatggaggtggttcaggaggggcctgctcagaaggagctgctgcctcccgtggagcctgctcagatggtgggtgcccaaattgtacttgctcacatggagctgcctcctcccatggagactgctcagacggaggttgcccaaatggggcctgctcccatggaacctgctcagatggaggttgcccaggtagaatctgctcccatgcaggtggtccagaaggagcctgttcagatggagctgtctcctcccatggaggtggtccagaaggagcctgttcagatagagctgtctcctcccatggaggtggtccagaaggaacctgttaagatagagctgtctcctcccatagaggtggtccagaaggagcctgttcagatggagttgtctcctcccatgggggtggttcagaaggagcctgctcagagggagccacctcctcccagagagcctccccttcacatggagccaatttccaaaaagcctcctctccgaaaagataaaaaggaaaagtctaacatgcagagtgaaagggcacggaaggagcaagtccttattgaagttggcttagtgcctgttaaagatagctggcttctaaaggaaagtgtaagcacagaggatctctcaccaccatcaccaccactgccaaaggaaaatttaagagaagaggcatcaggagaccaaaaattactcaacacaggtgaaggaaataaagaagcccctcttcagaaagtaggagcagaagaggcagatgagagcctacctggtcttgctgctaatatcaacgaatctacccatatttcatcctctggacaaaacttgaatacgccagagggtgaaactttaaatggtaaacatcagactgacagtatagtttgtgaaatgaaaatggacactgatcagaacacaagagagaatctcactggtataaattcaacagttgaagaaccagtttcaccaatgcttcccccttcagcagtagaagaacgtgaagcagtgtccaaaactgcactggcatcacctcctgctacaatggcagcaaatgagtctcaggaaattgatgaagatgaaggcatccacagccatgaaggaagtgacctaagtgacaacatgtcagagggtagtgatgattctggattgcatggggctcggccagttccacaagaatctagcagaaaaaatgcaaaggaagccttggcagtcaaagcggctaagggagattttgtttgtatcttctgtgatcgttctttcagaaagggaaaagattacagcaaacacctcaatcgccatttggttaatgtgtactatcttgaagaagcagctcaagggcaggagtaatgaaactttgaacaaggtttcagttcttagtttgtaaggtatattacattttatattcatttatgatagcagacaaccttttaagattgctttaattagtatctgatgttgatttttaagtggcattcttttccttaggactttttatgtatacctgttgattgttgtgtaaattttagtaaatctaagagagtgtactaaaccagcaggtatctgttagcttatgtgtttaattgaaattagaaggctaagatggtataacagcattttattgctttgtccagctacaacttgtcatttttttctccatgtcttatcttcctgtttcactttagtttattcttcgttttttattgagatctataaaaaattggcttacttaatagcaaattacttgaagaatttgcctgctttatataaagttagcactttaagatttttttttttagagatgagaagacatttaaattgaagaaaaattcccccagcaatagacagtctatcagtccaagtatttacttcctgagttttgatcaatattttttatttgtgtatgttaatcgtcataaaaacagtgattttggtgtgttttttattttggtgctttaatggcttaagatgttgcacattttttttttcttttggtttctgtttatgtttttttgcctatgcagttaaatttttcctagaaatagcatttgtgttgaacagtaacactttatacatatatatatgcatgtttattttgtttggcgtctttggagggatgcttttagacttgtttgcaaaagggcagttttctttttctttgctgcagttgtctattttgcagaataatagtgtgtgcaagtttgtgagcaaatgaaatatgcaggttcaatctattgattttgatttttacatcttatatctatgccagaatctgtatttcatataacttatttatttcgaatggatgtagtaaattcacagctatcagttttgattttgcaataaataaaccactaggttgcatgtcgaacaaatttttatctcaaataccaaccatcagttttttttttcatgtgttttggtacagctaattcctaattgtagagtgttaaatgtttgaggagaaccttttctcatagatggttggtgttcatatggctactttacaataaagagaactgtaagtgatatttggaaactacaaacctggaattaggagatataattattccttcaagttttatagaatatcacttgggagattccaaagccatagctattacgcggcaaacctaggataagaaaggtagtatgagtgctggtagaccagctgcaactttcctatacagtgaaaaaggctggtgaaacaagtacagtccagattttttaaaatcatactttctcagggatctccacaaactggtgggtgtcctggctgtctgtgtgatagcctctttctataggtgaggcctcaaatgaattgcagctatcctggtgttcctatgagggcactttgtatgaaaaagggcatgtactccaaaacatttttgtaggttctttggccagttgccaaagagtgtgaaagaatccaatagaggatttttcttactgatagcagtcattcattgcagtaaaataaaatatgatcccattagggaatcttgaattctgacctcccatactccgttttgaaataaccactttatatttcattttttaaaaatctgatgatctctttgaggcaggtttcagatttggcagtacaacatgaaagattaggaaaagcattaataacgtgtgggtggaaagcttgttaaaaatctgagagtgaagtttgagttaaaagttgtttgaacatggcattgactgggaggccaaagatttaaagaagcggaagattcttctcttaagacatgaggagtaagttgtgtgataatggtatgtgttttgtgtgcatgaatggacattgtaaatgttgaattctaggctccgacaatcattgtcaacagaagatcaagctgcaaatatttatgttttaaaacttaaattataaagctagttaagtctttctaatgactagttttaatgttcatgggtacattttacctaagttaccgtttacattgtatagaaaaagatacatcttaagcacagattggttattaggaattagtttggggaagaggtttttttgtggattctttcatactgcaaagaaaaaccatttgccttttggggaattgagctaacttctaatctagtcttaagactagaatgctaaaaacaaaaacatgaaggaaattaaaaccccttattattaaattgatttgtaaaaacattgttactggaaatttattggacttgaggccttcctccagaaaataaggacttgattgtcaggcctatattaggttctgaaccttaatgccatgtatttgtacttactaaaaattgtttcaatgaaaagtacattagcagtatgaacttctggtccagttggaagtttttccatttgaaaaatgtgatgtttgcatggaactgtttgaaacttttttattttctagtccccctcccccacactggatagaatttagcctagaattttccctttggataaaagaacaaaaattgaacatgttatttgtaaattgatgtttagtaattagtgataaacttgaaatactagcatatattataagccttaatcttaggtagtcttatgaaaatgaatctcttaactatcttttgaacctgtattcacattggttttcaagatattttaagttatattttttcctcttttcagagctgcttcttattctggggctacttttttttttagttgtgtaattcacaaagggctgcatttttttttttttttaataaggcttataactatggctggatcttttgctctagtcttctaagaagggccattttattttttagagtcacttctaaagtcatgtggtaattaactttggagactgttttgcgtatgagtgctgatacaaattaaaacccaagtagacctcattgcatgtcaccctatgaatgttgacaatggaaggaataccttgcctgtagtatactgtcacttctggattgataagctgaggaagaaagttaagtttcttttttacataagtcagaaaaacttacagctggtgttcctagtttcctggttgacctcagcagatgaagtgaacagatagtgttaattcagattgaagaaattatctgaatcttggtttgtgtagatttacaatctacatgcaatattaactaaatcagatagcttttacagtttcacatgtgtacataggttccctcccggtcccttccatatccattagttattgaactttctaaactggcattgaaacattacaacaatgttttgttgcaccaattttataaacttaagcagtgcaatacgtgttacttttctgaggcaaaccaaaggtaaatttctcaaggttcttgctgccttctttagcagcatttgatggaagatcttttatacatttgtaatagataaaaataaaccagattgcaaatccttttttaaaatcctaaaccatgtaccaagtttttggtccaaattatgtaggataagttaaacttaaattgcattctattaaccaatatgagtgtatttctgtaagcatagttatgttgaaataaagttttaaaaacca

SEQ ID NO: 174488 - DNA, 1103 bp, Homo sapiens
  Payload ID: 14256
  Gene Symbol: REST
  Gene Name: RE1-silencing transcription factor
  ENST ID: ENST00000611211
  CDS Start-End: 34-1056
agaagcccggacgccggctgcgcgaatacagttatggccacccaggtaatggggcagtcttctggaggaggagggctgtttaccagcagtggcaacattggaatggccctgcctaacgacatgtatgacttgcatgacctttccaaagctgaactggccgcacctcagcttattatgctggcaaatgtggccttaactggggaagtaaatggcagctgctgtgattacctggtcggtgaagaaagacagatggcagaactgatgccggttggggataacaacttttcagatagtgaagaaggagaaggacttgaagagtctgctgatataaaaggtgaacctcatggactggaaaacatggaactgagaagtttggaactcagcgtcgtagaacctcagcctgtatttgaggcatcaggtgctccagatatttacagttcaaataaagatcttccccctgaaacacctggagcggaggacaaaggcaagagctcgaagaccaaaccctttcgctgtaagccatgccaatatgaagcagaatctgaagaacagtttgtgcatcacatcagagttcacagtgctaagaaattttttgtggaagagagtgcagagaagcaggcaaaagccagggaatctggctcttccactgcagaagagggagatttctccaagggccccattcgctgtgaccgctgcggctacaatactaatcgatatgatcactatacagcacacctgaaacaccacaccagagctggggataatgagcgagtctacaagtgtatcatttgcacatacacaacagtgagcgagtatcactggaggaaacatttaagaaaccattttccaaggaaagtatacacatgtggaaaatgcaactatttttcagacagaaaaaacaattatgttcagcatgttagaactcatacaggagaacgcccatataaatgtgaactttgtccttactcaagttctcagaagactcatctaactagacatatgcgtactcattcagtggggtatggataccatttggtaatatttactagagtgtgatctagatgggtgagaagccatttaaatgtgatcagtgcagttatgtg

SEQ ID NO: 174489 - DNA, 1106 bp, Homo sapiens
  Payload ID: 14256
  Gene Symbol: REST
  Gene Name: RE1-silencing transcription factor
  ENST ID: ENST00000622863
  CDS Start-End: 130-1074
ccagcacccaactttaccaccctcccccacctctcccccgaaactccagcaacaaagaaaagtagtcggagaaggagcggcgactcagggtcgcccgcccctcctcaccgaggaaggccgaatacagttatggccacccaggtaatggggcagtcttctggaggaggagggctgtttaccagcagtggcaacattggaatggccctgcctaacgacatgtatgacttgcatgacctttccaaagctgaactggccgcacctcagcttattatgctggcaaatgtggccttaactggggaagtaaatggcagctgctgtgattacctggtcggtgaagaaagacagatggcagaactgatgccggttggggataacaacttttcagatagtgaagaaggagaaggacttgaagagtctgctgatataaaagcacacctgaaacaccacaccagagctggggataatgagcgagtctacaagtgtatcatttgcacatacacaacagtgagcgagtatcactggaggaaacatttaagaaaccattttccaaggaaagtatacacatgtggaaaatgcaactatttttcagacagaaaaaacaattatgttcagcatgttagaactcatacaggagaacgcccatataaatgtgaactttgtccttactcaagttctcagaagactcatctaactagacatatgcgtactcattcagtagaagaacgtgaagcagtgtccaaaactgcactggcatcacctcctgctacaatggcagcaaatgagtctcaggaaattgatgaagatgaaggcatccacagccatgaaggaagtgacctaagtgacaacatgtcagagggtagtgatgattctggattgcatggggctcggccagttccacaagaatctagcagaaaaaatgcaaaggaagccttggcagtcaaagcggctaagggagattttgtttgtatcttctgtgatcgttctttcagaaagggaaaagattacagcaaacacctcaatcgccatttggttaatgtgtactatcttgaagaagcagctcaagggcaggagtaatgaaactttgaacaaggtttcagttcttagtt

SEQ ID NO: 174490 - DNA, 1370 bp, Homo sapiens
  Payload ID: 14256
  Gene Symbol: REST
  Gene Name: RE1-silencing transcription factor
  ENST ID: ENST00000616975
  CDS Start-End: 348-1370
ggcggcggcggcggcgcggactgggtgcgcggcgcagcgtcctgtgttggaatgtgcggctgccgcgagctcgcggcgcagcagcggagcgagcgccgccgaggcccggggccccagaccctggcggcggctgccgcagccgagacggcagggcgaggcccggaggcctgagcaccctctgcagccccactcctgggccttcttggtccacgacggccccagcacccaactttaccaccctcccccacctctcccccgaaactccagcaacaaagaaaagtagtcggagaaggagcggcgactcagggtcgcccgcccctcctcaccgaggaaggccgaatacagttatggccacccaggtaatggggcagtcttctggaggaggagggctgtttaccagcagtggcaacattggaatggccctgcctaacgacatgtatgacttgcatgacctttccaaagctgaactggccgcacctcagcttattatgctggcaaatgtggccttaactggggaagtaaatggcagctgctgtgattacctggtcggtgaagaaagacagatggcagaactgatgccggttggggataacaacttttcagatagtgaagaaggagaaggacttgaagagtctgctgatataaaaggtgaacctcatggactggaaaacatggaactgagaagtttggaactcagcgtcgtagaacctcagcctgtatttgaggcatcaggtgctccagatatttacagttcaaataaagatcttccccctgaaacacctggagcggaggacaaaggcaagagctcgaagaccaaaccctttcgctgtaagccatgccaatatgaagcagaatctgaagaacagtttgtgcatcacatcagagttcacagtgctaagaaattttttgtggaagagagtgcagagaagcaggcaaaagccagggaatctggctcttccactgcagaagagggagatttctccaagggccccattcgctgtgaccgctgcggctacaatactaatcgatatgatcactatacagcacacctgaaacaccacaccagagctggggataatgagcgagtctacaagtgtatcatttgcacatacacaacagtgagcgagtatcactggaggaaacatttaagaaaccattttccaaggaaagtatacacatgtggaaaatgcaactatttttcagacagaaaaaacaattatgttcagcatgttagaactcatacaggagaacgcccatataaatgtgaactttgtccttactcaagttctcagaagactcatctaactagacatatgcgtactcattcagtggggtatggataccatttggtaatatttactagagtgtga

SEQ ID NO: 174491 - DNA, 1376 bp, Homo sapiens
  Payload ID: 14256
  Gene Symbol: REST
  Gene Name: RE1-silencing transcription factor
  ENST ID: ENST00000612429
  CDS Start-End: 348-1376
ggcggcggcggcggcgcggactgggtgcgcggcgcagcgtcctgtgttggaatgtgcggctgccgcgagctcgcggcgcagcagcggagcgagcgccgccgaggcccggggccccagaccctggcggcggctgccgcagccgagacggcagggcgaggcccggaggcctgagcaccctctgcagccccactcctgggccttcttggtccacgacggccccagcacccaactttaccaccctcccccacctctcccccgaaactccagcaacaaagaaaagtagtcggagaaggagcggcgactcagggtcgcccgcccctcctcaccgaggaaggccgaatacagttatggccacccaggtaatggggcagtcttctggaggaggagggctgtttaccagcagtggcaacattggaatggccctgcctaacgacatgtatgacttgcatgacctttccaaagctgaactggccgcacctcagcttattatgctggcaaatgtggccttaactggggaagtaaatggcagctgctgtgattacctggtcggtgaagaaagacagatggcagaactgatgccggttggggataacaacttttcagatagtgaagaaggagaaggacttgaagagtctgctgatataaaaggtgaacctcatggactggaaaacatggaactgagaagtttggaactcagcgtcgtagaacctcagcctgtatttgaggcatcaggtgctccagatatttacagttcaaataaagatcttccccctgaaacacctggagcggaggacaaaggcaagagctcgaagaccaaaccctttcgctgtaagccatgccaatatgaagcagaatctgaagaacagtttgtgcatcacatcagagttcacagtgctaagaaattttttgtggaagagagtgcagagaagcaggcaaaagccagggaatctggctcttccactgcagaagagggagatttctccaagggccccattcgctgtgaccgctgcggctacaatactaatcgatatgatcactatacagcacacctgaaacaccacaccagagctggggataatgagcgagtctacaagtgtatcatttgcacatacacaacagtgagcgagtatcactggaggaaacatttaagaaaccattttccaaggaaagtatacacatgtggaaaatgcaactatttttcagacagaaaaaacaattatgttcagcatgttagaactcatacaggagaacgcccatataaatgtgaactttgtccttactcaagttctcagaagactcatctaactagacatatgcgtactcattcagagatggagtttcgctcttgttgcccaggctggaataaaatggtgtga

SEQ ID NO: 174492 - DNA, 7114 bp, Homo sapiens
  Payload ID: 14256
  Gene Symbol: REST
  Gene Name: RE1-silencing transcription factor
  Uniprot ID: Q13127
  ENST ID: ENST00000619101
  CDS Start-End: 137-3430
cggcgctcggagcccgacgcctcgcgagggcgcccgcggagcctccccggccctgggcgttgggcgagccccggggcggtcggaggggcccgggggcggtcggagaagcccggacgccggctgcgcgaatacagttatggccacccaggtaatggggcagtcttctggaggaggagggctgtttaccagcagtggcaacattggaatggccctgcctaacgacatgtatgacttgcatgacctttccaaagctgaactggccgcacctcagcttattatgctggcaaatgtggccttaactggggaagtaaatggcagctgctgtgattacctggtcggtgaagaaagacagatggcagaactgatgccggttggggataacaacttttcagatagtgaagaaggagaaggacttgaagagtctgctgatataaaaggtgaacctcatggactggaaaacatggaactgagaagtttggaactcagcgtcgtagaacctcagcctgtatttgaggcatcaggtgctccagatatttacagttcaaataaagatcttccccctgaaacacctggagcggaggacaaaggcaagagctcgaagaccaaaccctttcgctgtaagccatgccaatatgaagcagaatctgaagaacagtttgtgcatcacatcagagttcacagtgctaagaaattttttgtggaagagagtgcagagaagcaggcaaaagccagggaatctggctcttccactgcagaagagggagatttctccaagggccccattcgctgtgaccgctgcggctacaatactaatcgatatgatcactatacagcacacctgaaacaccacaccagagctggggataatgagcgagtctacaagtgtatcatttgcacatacacaacagtgagcgagtatcactggaggaaacatttaagaaaccattttccaaggaaagtatacacatgtggaaaatgcaactatttttcagacagaaaaaacaattatgttcagcatgttagaactcatacaggagaacgcccatataaatgtgaactttgtccttactcaagttctcagaagactcatctaactagacatatgcgtactcattcaggtgagaagccatttaaatgtgatcagtgcagttatgtggcctctaatcaacatgaagtaacccgccatgcaagacaggttcacaatgggcctaaacctcttaattgcccacactgtgattacaaaacagcagatagaagcaacttcaaaaaacatgtagagctacatgtgaacccacggcagttcaattgccctgtatgtgactatgcagcttccaagaagtgtaatctacagtatcacttcaaatctaagcatcctacttgtcctaataaaacaatggatgtctcaaaagtgaaactaaagaaaaccaaaaaacgagaggctgacttgcctgataatattaccaatgaaaaaacagaaatagaacaaacaaaaataaaaggggatgtggctggaaagaaaaatgaaaagtccgtcaaagcagagaaaagagatgtctcaaaagagaaaaagccttctaataatgtgtcagtgatccaggtgactaccagaactcgaaaatcagtaacagaggtgaaagagatggatgtgcatacaggaagcaattcagaaaaattcagtaaaactaagaaaagcaaaaggaagctggaagttgacagccattctttacatggtcctgtgaatgatgaggaatcttcaacaaaaaagaaaaagaaggtagaaagcaaatccaaaaataatagtcaggaagtgccaaagggtgacagcaaagtggaggagaataaaaagcaaaatacttgcatgaaaaaaagtacaaagaagaaaactctgaaaaataaatcaagtaagaaaagcagtaagcctcctcagaaggaacctgttgagaagggatctgctcagatggaccctcctcagatggggcctgctcccacagaggcggttcagaaggggcccgttcaggtggagccgccacctcccatggagcatgctcagatggagggtgcccagatacggcctgctcctgacgagcctgttcagatggaggtggttcaggaggggcctgctcagaaggagctgctgcctcccgtggagcctgctcagatggtgggtgcccaaattgtacttgctcacatggagctgcctcctcccatggagactgctcagacggaggttgcccaaatggggcctgctcccatggaacctgctcagatggaggttgcccaggtagaatctgctcccatgcaggtggtccagaaggagcctgttcagatggagctgtctcctcccatggaggtggtccagaaggagcctgttcagatagagctgtctcctcccatggaggtggtccagaaggaacctgttaagatagagctgtctcctcccatagaggtggtccagaaggagcctgttcagatggagttgtctcctcccatgggggtggttcagaaggagcctgctcagagggagccacctcctcccagagagcctccccttcacatggagccaatttccaaaaagcctcctctccgaaaagataaaaaggaaaagtctaacatgcagagtgaaagggcacggaaggagcaagtccttattgaagttggcttagtgcctgttaaagatagctggcttctaaaggaaagtgtaagcacagaggatctctcaccaccatcaccaccactgccaaaggaaaatttaagagaagaggcatcaggagaccaaaaattactcaacacaggtgaaggaaataaagaagcccctcttcagaaagtaggagcagaagaggcagatgagagcctacctggtcttgctgctaatatcaacgaatctacccatatttcatcctctggacaaaacttgaatacgccagagggtgaaactttaaatggtaaacatcagactgacagtatagtttgtgaaatgaaaatggacactgatcagaacacaagagagaatctcactggtataaattcaacagttgaagaaccagtttcaccaatgcttcccccttcagcagtagaagaacgtgaagcagtgtccaaaactgcactggcatcacctcctgctacaatggcagcaaatgagtctcaggaaattgatgaagatgaaggcatccacagccatgaaggaagtgacctaagtgacaacatgtcagagggtagtgatgattctggattgcatggggctcggccagttccacaagaatctagcagaaaaaatgcaaaggaagccttggcagtcaaagcggctaagggagattttgtttgtatcttctgtgatcgttctttcagaaagggaaaagattacagcaaacacctcaatcgccatttggttaatgtgtactatcttgaagaagcagctcaagggcaggagtaatgaaactttgaacaaggtttcagttcttagtttgtaaggtatattacattttatattcatttatgatagcagacaaccttttaagattgctttaattagtatctgatgttgatttttaagtggcattcttttccttaggactttttatgtatacctgttgattgttgtgtaaattttagtaaatctaagagagtgtactaaaccagcaggtatctgttagcttatgtgtttaattgaaattagaaggctaagatggtataacagcattttattgctttgtccagctacaacttgtcatttttttctccatgtcttatcttcctgtttcactttagtttattcttcgttttttattgagatctataaaaaattggcttacttaatagcaaattacttgaagaatttgcctgctttatataaagttagcactttaagatttttttttttagagatgagaagacatttaaattgaagaaaaattcccccagcaatagacagtctatcagtccaagtatttacttcctgagttttgatcaatattttttatttgtgtatgttaatcgtcataaaaacagtgattttggtgtgttttttattttggtgctttaatggcttaagatgttgcacattttttttttcttttggtttctgtttatgtttttttgcctatgcagttaaatttttcctagaaatagcatttgtgttgaacagtaacactttatacatatatatatgcatgtttattttgtttggcgtctttggagggatgcttttagacttgtttgcaaaagggcagttttctttttctttgctgcagttgtctattttgcagaataatagtgtgtgcaagtttgtgagcaaatgaaatatgcaggttcaatctattgattttgatttttacatcttatatctatgccagaatctgtatttcatataacttatttatttcgaatggatgtagtaaattcacagctatcagttttgattttgcaataaataaaccactaggttgcatgtcgaacaaatttttatctcaaataccaaccatcagttttttttttcatgtgttttggtacagctaattcctaattgtagagtgttaaatgtttgaggagaaccttttctcatagatggttggtgttcatatggctactttacaataaagagaactgtaagtgatatttggaaactacaaacctggaattaggagatataattattccttcaagttttatagaatatcacttgggagattccaaagccatagctattacgcggcaaacctaggataagaaaggtagtatgagtgctggtagaccagctgcaactttcctatacagtgaaaaaggctggtgaaacaagtacagtccagattttttaaaatcatactttctcagggatctccacaaactggtgggtgtcctggctgtctgtgtgatagcctctttctataggtgaggcctcaaatgaattgcagctatcctggtgttcctatgagggcactttgtatgaaaaagggcatgtactccaaaacatttttgtaggttctttggccagttgccaaagagtgtgaaagaatccaatagaggatttttcttactgatagcagtcattcattgcagtaaaataaaatatgatcccattagggaatcttgaattctgacctcccatactccgttttgaaataaccactttatatttcattttttaaaaatctgatgatctctttgaggcaggtttcagatttggcagtacaacatgaaagattaggaaaagcattaataacgtgtgggtggaaagcttgttaaaaatctgagagtgaagtttgagttaaaagttgtttgaacatggcattgactgggaggccaaagatttaaagaagcggaagattcttctcttaagacatgaggagtaagttgtgtgataatggtatgtgttttgtgtgcatgaatggacattgtaaatgttgaattctaggctccgacaatcattgtcaacagaagatcaagctgcaaatatttatgttttaaaacttaaattataaagctagttaagtctttctaatgactagttttaatgttcatgggtacattttacctaagttaccgtttacattgtatagaaaaagatacatcttaagcacagattggttattaggaattagtttggggaagaggtttttttgtggattctttcatactgcaaagaaaaaccatttgccttttggggaattgagctaacttctaatctagtcttaagactagaatgctaaaaacaaaaacatgaaggaaattaaaaccccttattattaaattgatttgtaaaaacattgttactggaaatttattggacttgaggccttcctccagaaaataaggacttgattgtcaggcctatattaggttctgaaccttaatgccatgtatttgtacttactaaaaattgtttcaatgaaaagtacattagcagtatgaacttctggtccagttggaagtttttccatttgaaaaatgtgatgtttgcatggaactgtttgaaacttttttattttctagtccccctcccccacactggatagaatttagcctagaattttccctttggataaaagaacaaaaattgaacatgttatttgtaaattgatgtttagtaattagtgataaacttgaaatactagcatatattataagccttaatcttaggtagtcttatgaaaatgaatctcttaactatcttttgaacctgtattcacattggttttcaagatattttaagttatattttttcctcttttcagagctgcttcttattctggggctacttttttttttagttgtgtaattcacaaagggctgcatttttttttttttttaataaggcttataactatggctggatcttttgctctagtcttctaagaagggccattttattttttagagtcacttctaaagtcatgtggtaattaactttggagactgttttgcgtatgagtgctgatacaaattaaaacccaagtagacctcattgcatgtcaccctatgaatgttgacaatggaaggaataccttgcctgtagtatactgtcacttctggattgataagctgaggaagaaagttaagtttcttttttacataagtcagaaaaacttacagctggtgttcctagtttcctggttgacctcagcagatgaagtgaacagatagtgttaattcagattgaagaaattatctgaatcttggtttgtgtagatttacaatctacatgcaatattaactaaatcagatagcttttacagtttcacatgtgtacataggttccctcccggtcccttccatatccattagttattgaactttctaaactggcattgaaacattacaacaatgttttgttgcaccaattttataaacttaagcagtgcaatacgtgttacttttctgaggcaaaccaaaggtaaatttctcaaggttcttgctgccttctttagcagcatttgatggaagatcttttatacatttgtaatagataaaaataaaccagattgcaaatccttttttaaaatcctaaaccatgtaccaagtttttggtccaaattatgtaggataagttaaacttaaattgcattctattaaccaatatgagtgtatttctgtaagcatagttatgttgaaataaagtttt

SEQ ID NO: 174493 - DNA, 496 bp, Homo sapiens
  Payload ID: 14257
  Gene Symbol: ROMO1
  Gene Name: reactive oxygen species modulator 1
  Uniprot ID: P60602
  ENST ID: ENST00000336695
  CDS Start-End: 183-422
ggtgaggtaggcgccgggcgacgcggggccggaacgcgaagagggtggtggagtcgggctacccactgattttccttcccttacttcccctgagcccttgggcccacttcccagcctaccgcttccgtccccgcccgactcttgggccagcgcctgggcccacactttcctatcccccgcagatgccggtggccgtgggtccctacggacagtcccagccaagctgcttcgaccgtgtcaaaatgggcttcgtgatgggttgcgccgtgggcatggcggccggggcgctcttcggcaccttttcctgtctcaggatcggaatgcggggtcgagagctgatgggcggcattgggaaaaccatgatgcagagtggcggcacctttggcacattcatggccattgggatgggcatccgatgctaaccatggttgccaactacatctgtcccttcccatcaatcccagcccatgtactaataaaagaaagtctttgagta

SEQ ID NO: 174494 - DNA, 350 bp, Homo sapiens
  Payload ID: 14257
  Gene Symbol: ROMO1
  Gene Name: reactive oxygen species modulator 1
  Uniprot ID: P60602
  ENST ID: ENST00000374072
  CDS Start-End: 16-195
cgcgagcgaggtgagatgccggtggccgtgggtccctacggacagtcccagccaagctgcttcgaccgtgtcaaaatgggcttcgtgatgggttgcgccgtgggcatggcggccggggcgctcttcggcaccttttcctgtctcagctccatcttggtttcctcctcaggatcggaatgcggggtcgagagctgatgggcggcattgggaaaaccatgatgcagagtggcggcacctttggcacattcatggccattgggatgggcatccgatgctaaccatggttgccaactacatctgtcccttcccatcaatcccagcccatgtactaataaaagaaagtctttgag

SEQ ID NO: 174495 - DNA, 422 bp, Homo sapiens
  Payload ID: 14257
  Gene Symbol: ROMO1
  Gene Name: reactive oxygen species modulator 1
  Uniprot ID: P60602
  ENST ID: ENST00000374077
  CDS Start-End: 105-344
gctgcccggcgctccggaagcgattcatcgggccgcgagcgccctccccgtcgttttccgtgagagacgtagagctgagcgacccagcccgcgagcgaggtgagatgccggtggccgtgggtccctacggacagtcccagccaagctgcttcgaccgtgtcaaaatgggcttcgtgatgggttgcgccgtgggcatggcggccggggcgctcttcggcaccttttcctgtctcaggatcggaatgcggggtcgagagctgatgggcggcattgggaaaaccatgatgcagagtggcggcacctttggcacattcatggccattgggatgggcatccgatgctaaccatggttgccaactacatctgtcccttcccatcaatcccagcccatgtactaataaaagaaagtctttgagtagtca

SEQ ID NO: 174496 - DNA, 498 bp, Homo sapiens
  Payload ID: 14257
  Gene Symbol: ROMO1
  Gene Name: reactive oxygen species modulator 1
  Uniprot ID: P60602
  ENST ID: ENST00000374078
  CDS Start-End: 181-420
gcggctcggagcagcatggtcccgctggcagagcccaccttccgaagccgctgcagtcctgggccccaggctcccggaagtgctgcccggcgctccggaagcgattcatcgggccgcgagcgccctccccgtcgttttccgtgagagacgtagagctgagcgacccagcccgcgagcgagatgccggtggccgtgggtccctacggacagtcccagccaagctgcttcgaccgtgtcaaaatgggcttcgtgatgggttgcgccgtgggcatggcggccggggcgctcttcggcaccttttcctgtctcaggatcggaatgcggggtcgagagctgatgggcggcattgggaaaaccatgatgcagagtggcggcacctttggcacattcatggccattgggatgggcatccgatgctaaccatggttgccaactacatctgtcccttcccatcaatcccagcccatgtactaataaaagaaagtctttgagtagtca

SEQ ID NO: 174497 - DNA, 288 bp, Homo sapiens
  Payload ID: 14257
  Gene Symbol: ROMO1
  Gene Name: reactive oxygen species modulator 1
  Uniprot ID: P60602
  ENST ID: ENST00000397416
  CDS Start-End: 45-284
ggtgaggtaggcgccgggcgacgcggggccggaacgcgaagaggatgccggtggccgtgggtccctacggacagtcccagccaagctgcttcgaccgtgtcaaaatgggcttcgtgatgggttgcgccgtgggcatggcggccggggcgctcttcggcaccttttcctgtctcaggatcggaatgcggggtcgagagctgatgggcggcattgggaaaaccatgatgcagagtggcggcacctttggcacattcatggccattgggatgggcatccgatgctaaccat

SEQ ID NO: 174498 - DNA, 6246 bp, Homo sapiens
  Payload ID: 14258
  Gene Symbol: RLF
  Gene Name: rearranged L-myc fusion
  Uniprot ID: Q13129
  ENST ID: ENST00000372771
  CDS Start-End: 28-5772
gcctacgcgctggtgggccgtgggaagatggcggacggaaagggagacgccgccgctgtcgccggggctggggctgaggctccggcggtagcgggagccggagatggagtcgagactgagtccatggttcggggtcatcgccccgtatctccagcgccgggagcctcgggactgcggccgtgtctgtggcagctggagacagagctgagggagcaagaggtgtcggaggtctcatctttgaactactgccggagcttctgccagaccttattgcaatatgcaagcaacaagaatgcatcagaacatattgtgtatcttctggaggtatatcgacttgccatccaaagctttgccagtgcacgtccatacttaactactgaatgtgaagatgtcctcttagtgcttggcagattagtactgagttgtttcgaattactgctttcagtgtctgaaagtgaactgccatgtgaagtctggctaccattccttcagtctctacaggagtcacatgatgcattattggaatttgggaataataacctacaaatattggttcatgttaccaaggaaggggtgtggaaaaacccagttcttcttaaaattctgtctcaacagccagtagaaacggaggaagtcaataaattgattgcacaagaaggaccttcctttctgcaaatgcgaataaaacatttgttgaaatctaactgcatcccccaggctactgctttatcaaaactatgtgcagaatctaaagaaatttcaaatgtgtcatcttttcagcaagcctatatcacatgtttatgttctatgctccctaatgaagatgctattaaggagattgcaaaggtcgactgcaaggaagtactagacatcatttgtaatctggaatctgaggggcaggataacacagcatttgttctttgtacgacttaccttacccagcagctccaaactgcaagtgtatattgttcttgggaactgactcttttttggagtaaactgcaaagaagaattgacccttctttagatacttttttggagcgctgtcgtcagtttggtgtcatagctaaaacgcagcagcatttattttgcctcattagagttatacaaactgaagcacaagatgctggtcttggggtgtcaattttactgtgtgtcagagctcttcaactcagatcaagtgaagatgaggaaatgaaggcatcagtttgtaaaacaattgcctgtcttttaccagaagatttagaagttagacgagcctgtcagcttacagaattcttaattgaacccagtttggatggatttaatatgttagaagaactatatttgcaaccagatcaaaaatttgatgaagaaaatgcaccggttccaaattctcttcgatgtgagctcttactagctttaaaagcccactggccttttgatcctgagttttgggactggaaaactttaaaacgacactgccaccaacttttaggacaagaagcctcagattctgatgatgatttaagtggctatgaaatgtccattaatgacacagatgttttagagtcatttctcagtgactatgatgagggtaaagaagataaacaatatagaagaagagatttgacagatcagcataaggagaaaagagacaaaaaacctattggctcttctgaaagatatcagaggtggcttcagtacaagtttttctgtttgttatgtaagcgggaatgtatagaggctagaattcttcatcattctaagatgcatatggaagatggaatttacacctgtccagtttgtattaaaaaatttaagagaaaagaaatgtttgttcctcatgtgatggagcatgttaaaatgccaccaagcagaagggaccgctctaaaaagaaattactgttaaaaggctctcaaaagggtatttgtcctaagagcccctctgcaatcccagagcaaaaccattcattgaatgaccaagccaaaggagagtctcatgaatatgtcacattcagcaaattagaagattgccacctgcaagacagagatttgtatccatgtcccggtacagactgttcccgtgtgtttaagcaatttaaatacttaagtgtgcatcttaaagctgaacaccaaaataatgatgaaaatgccaagcactacttggatatgaaaaatagaagagagaagtgtacttactgtcgacgacattttatgtctgcttttcaccttcgagagcacgaacaagtgcattgtgggcctcagccttatatgtgtgtatctatagattgctatgctaggtttggatcagtaaatgaactacttaaccataaacaaaagcatgacgatctgcgttacaaatgtgaattaaatggctgtaatattgttttcagtgacttgggacagctttaccaccatgaagcacaacactttagggatgcatcttacacatgcaacttccttggctgtaaaaagttctattactccaaaattgaataccagaatcacctctcaatgcataatgttgaaaattcaaatggagacataaagaaatcagtgaaacttgaggagtctgcaacaggtgaaaagcaagattgtattaatcagccccatctacttaaccaaactgataaatcacatttacctgaagatcttttctgtgcagaatcagctaattctcaaatagatacagaaactgcagaaaacctgaaagaaaacagtgacagtaattctagtgatcagttaagtcatagctcttcagcttcaatgaatgaagagctaattgacacactagatcactctgaaactatgcaggatgtattgttatctaatgagaaagtctttgggccctccagtttaaaagaaaaatgttccagtatggcagtttgttttgacgggactaagtttacctgtggttttgatggctgtggttccacatacaaaaatgcaagaggaatgcagaaacatttacggaaggttcatccataccatttcaagcccaaaaagataaagacgaaagatctgtttccctctttgggtaatgaacataatcagacaactgaaaagttggatgcagaacctaaaccctgctcagatacaaacagtgactccccagatgaaggtctagatcacaatattcacattaaatgtaaacgagaacatcaaggttattcctcagaatcctccatttgtgcttctaaaaggccctgtacagaggataccatgttggaacttctgttacgcttgaaacatttaagcttgaaaaactcaataacacatggatctttctcagggtcattgcaggggtacccatccagtggtgctaagtctcttcagtcagtttcatctatctcagaccttaattttcagaatcaagatgaaaacatgccaagtcagtaccttgcacagttggcggctaagccgtttttctgtgagcttcaaggatgcaaatatgaatttgtgaccagagaggctctgttaatgcattatcttaaaaagcataattattcaaaagaaaaagtccttcagttaaccatgttccaacatcggtattccccatttcagtgtcatatttgccaaaggtcatttacaagaaaaacacaccttaggattcattataaaaataaacatcaaattggcagtgacagagcaactcacaaactattagataatgaaaagtgtgatcatgaaggcccatgttcagtagataggttgaaaggtgattgttctgcagaacttggaggtgatcccagtagtaactctgagaaaccacactgtcatcctaaaaaggatgaatgtagttctgaaacagatttggaatcatcttgtgaagaaacagaaagtaaaacatctgacatttcatcaccaataggcagccatagagaagaacaagaaggaagagagggcagaggtagcaggcgaactgttgctaaaggaaatctgtgttatattttgaataaataccacaaaccattccattgtattcataaaacttgcaactcctcattcaccaatctaaaaggcttaattcgccattacagaactgtacatcagtacaacaaagaacagttatgtttggagaaagacaaagcaagaaccaaaagggaacttgtcaaatgtaaaaagatatttgcttgcaaatataaggaatgtaataaacgcttcctgtgttccaaagctcttgctaagcactgtagtgattctcataacctagaccatattgaagagcctaaagtactttccgaagctggatctgcagcaaggttttcttgtaaccagcctcagtgccctgctgttttttatacattcaacaagttgaagcaccacttgatggaacagcataatattgaaggggaaatacattcagattatgaaattcattgtgatcttaatggctgtggccagattttcacccatcgcagtaattactcacaacatgtatattaccgacataaagactattatgatgatttgtttagaagccagaaagtagcaaatgagagactactaaggagtgaaaaggtatgtcaaacagctgatactcaggggcatgaacatcagaccaccaggagatcatttaatgctaagtctaaaaaatgtggcttaatcaaagaaaagaaagccccaataagttttaaaaccagagctgaggccctccatatgtgtgtggagcactctgagcacacacagtacccctgcatggttcaaggatgcttatctgtggtgaagttggagagcagcattgtgaggcattacaaacgcactcatcagatgagtagtgcctatttagagcaacagatggagaatcttgttgtttgcgttaagtacggtaccaaaattaaggaggaacccccttctgaagcagatccctgtataaagaaagaagaaaatagaagctgtgaatcagagcgcacagaacacagccattccccgggtgacagtagtgcacccatccagaacactgattgctgtcattcaagtgaaagggatggaggtcagaaagggtgcatagaaagcagctcagtatttgatgcagatactctgctctacaggggaactttgaaatgtaatcatagttccaaaaccacttccctagaacagtgtaatatagttcagcctcctcctccttgtaaaatagaaaattccatacctaatcccaatgggactgaaagtgggacttatttcacaagtttccagctgcctttaccaaggatcaaagaatcagaaactaggcagcatagttcagggcaagaaaacactgtaaaaaatccaacccatgtcccaaaagagaattttaggaaacattcacagccccggtcatttgatttgaagacttacaaacctatgggatttgaatcttcatttctgaaatttattcaggaaagtgaagagaaagaagatgattttgatgattgggagccttcagagcacttaacattaagtaattcttcacagtccagtaatgatttaacagggaatgttgtggcaaataatatggtgaatgacagtgaacctgaagttgacatacctcattcttccagtgactctacaattcatgagaacctgactgcaatcccacctttaatagtagctgaaacaacaacagttccttccttggaaaacctgagggttgtattggacaaagcattaacagactgtggagagcttgccttaaaacagcttcattatcttcggccagtggtggttcttgaaagatctaagttttccacaccaattttagacttatttccaacaaaaaagacagatgagctttgtgtaggaagttcataagtagcaattttgttttagtaacagactggctccaacactgcaacatggggacatttgccaactcgaacaaaggctgagaagcagccacaccgttgtttagggtagaataggctgtgtatttacatgaatgtataatatctatgtcagcagtattggctgagtccattagctctccagttggtttaatgattgggtttatttttgtttgtttgtttattaaaaaaatggaactgtacacttgtttggtgctaattaatacatcaaaatatactggggcttcctttttcaaattaagtgtgcatgattgtatatggaacaaatactaaggtcccagggtgggagggctagggaaagggatatggagttcttacttgacttgaatgtgcacctgagggtgctttgtgtaatatattgtacactacagcatcttatattttttgagttgagtttcaataaattacaatttttcaccca

SEQ ID NO: 174499 - DNA, 927 bp, Homo sapiens
  Payload ID: 14259
  Gene Symbol: REC114
  Gene Name: REC114 meiotic recombination protein
  Uniprot ID: Q7Z4M0
  ENST ID: ENST00000331090
  CDS Start-End: 29-829
gccggcagtgcgtgtggtgaggcaggacatggcggaggcaggaaaagtgcccttgagcctcgggcttaccggaggagaagcggcagagtggcctctgcagcggtacgcccgctgcataccctcaaacaccagagacccacctgggccatgcctggaagctgggacagccccctgccccacatggaaggtttttgattccaatgaagaatctggatatcttgttctcaccatagttatatcaggtcatttcttcattttccaaggacagacactactggaagggttttcactcattggtagcaaggactggttgaagattgtaagacgcgtggattgtctgttgtttggaacaacgataaaggacaagagtcgcctgtttcgagtacagttcagtggagagtcaaaggagcaggcgctggaacactgctgcagttgtgttcagaagctggcacaatacataaccgtgcaggtgcctgatggaaacatccaggagcttcagctgattcctggcccacccagggcaactgaaagtcaagggaaggattctgcaaagagtgtcccacggcagcctggatcccaccagcactcagaacaacagcaagtgtgtgtaacagcgggcacaggcgctccagacggaaggacctcactgacgcagttagctcagactcttctggcatcggaggagctgccccatgtctatgaacaatctgcatggggtgcagaagagttaggccccttcctacgtttgtgccttatggatcagaatttcccagcatttgtggaagaggtagaaaaggaactgaaaaagctggcgggtttgagaaattaatgctctatatacatatataactaaggaacttcaaagtattgaaaaatgcttcctcctaaaattaaagaagatattagaataaagagtattatccaaac

SEQ ID NO: 174500 - DNA, 833 bp, Homo sapiens
  Payload ID: 14259
  Gene Symbol: REC114
  Gene Name: REC114 meiotic recombination protein
  ENST ID: ENST00000560581
  CDS Start-End: 23-739
agtgcgtgtggtgaggcaggacatggcggaggcaggaaaagtgcccttgagcctcgggcttaccggaggagaagcggcagagtggcctctgcagcggtacgcccgctgcataccctcaaacaccagagacccacctgggccatgcctggaagctgggacagccccctgccccacatggaaggtttttgattccaatgaagaatctggatatcttgttctcaccatagttatatcaggtcatttcttcattttccaaggacagacactactggacaagagtcgcctgtttcgagtacagttcagtggagagtcaaaggagcaggcgctggaacactgctgcagttgtgttcagaagctggcacaatacataaccgtgcaggtgcctgatggaaacatccaggagcttcagctgattcctggcccacccagggcaactgaaagtcaagggaaggattctgcaaagagtgtcccacggcagcctggatcccaccagcactcagaacaacagcaagtgtgtgtaacagcgggcacaggcgctccagacggaaggacctcactgacgcagttagctcagactcttctggcatcggaggagctgccccatgtctatgaacaatctgcatggggtgcagaagagttaggccccttcctacgtttgtgccttatggatcagaatttcccagcatttgtggaagaggtagaaaaggaactgaaaaagctggcgggtttgagaaattaatgctctatatacatatataactaaggaacttcaaagtattgaaaaatgcttcctcctaaaattaaagaagatattagaataaagagtattatcc

SEQ ID NO: 174501 - DNA, 1007 bp, Homo sapiens
  Payload ID: 14260
  Gene Symbol: REC8
  Gene Name: REC8 meiotic recombination protein
  ENST ID: ENST00000559797
  CDS Start-End: 1-1007
ccgtcgtcgccggttactgttctgggacaaggagactcagatctccccggagaaattccaggaacaactgcaaaccagagcccactgctgggaatgtcctatggtgcagccgcccgagaggaccatcagaggccctgcggagttgttcagaaccccaactctctctggctggctaccccctgaactactgggtctctggacccattgtgcccagccacccccaaaagccctcaggcgagagctgcctgaggaggcagccgctgaggaggaaaggagaaagattgaagttccaagtgagattgaggtcccgagggaggccctggagcccagtgttccccttatggtgtctttagagatctccctagaggcagctgaagaggagaagtcccgcatcagcctcatcccaccagaagaacggtgggcctggcctgaggtggaggcgccagaagctcctgcattgcccgtggtgcctgaactccctgaggtgcccatggagatgcctttggtgctgcccccagagctcgagctgctctcactggaagcagtgcacagggcagtggcactggagctgcaggctaacagggagcccgacttcagcagcctggtgtcacctctcagcccccgcaggatggctgcccgggtcttctacctgctcctgggtgagtgtatgcatgtgtgtgtgtgtatgtggggcagggacacagagaccagaggcccgtacagggactcccccgacctgccctctcctcgcctcttgaccagtgctctcagcgcaacagattcttcacgtgaaacaagaaaagccatatggtcgcctcctgatccagccggggcccagattccactgaggttagagtccatttacaaagctgccaggaaaccggccacttctagtaaaccacgtcgtgcctcactgggtcctgcttacctcatttctgaatgtgcatttccagccttcttgctctcagagctattgttcaagcagaaaacaagctgcttttattaca

SEQ ID NO: 174502 - DNA, 653 bp, Homo sapiens
  Payload ID: 14260
  Gene Symbol: REC8
  Gene Name: REC8 meiotic recombination protein
  ENST ID: ENST00000560501
  CDS Start-End: 374-653
aagggcggggcccgttggcgcgcgatggcggacgctgcccgggatcccagcctgacagctccccctccatccccattctcccaccttccccacccacttcaggctggcggcgactcgcggcagccggttggtgaagcgcgaatacctgagggtgaatgtggtgaaaacctgcgaggaaatcctcaattacgtgctggtacgagtgcaacccccgcagcccggcctgccgcggccccgcttctccctctatctctcagcccaacttcagatcggtgtgatccgcgtctattctcaacaatgccagtacctcgtggaggacatccagcacatcttggagcgcctccaccgtgcccagctgcagatccgaatagatatggagactgagctacccagcctgctgcttcctaaccacctggccatgatggagaccctagaagatgctccagatcccttttttgggatgatgtctgtggatcccagacttcctagtcctttcgatatccctcagattcgacacctcttagaggctgcaatcccagagagagttgaagagatccctcctgaagttcctacagagcccagggagccagagaggattccggtcactgtgctgccacctgaggccatcacgatcctggaggcagagcccatac

SEQ ID NO: 174503 - DNA, 635 bp, Homo sapiens
  Payload ID: 14260
  Gene Symbol: REC8
  Gene Name: REC8 meiotic recombination protein
  ENST ID: ENST00000557806
  CDS Start-End: 413-635
aaaagccgccatctaatgaggagcgaggtgcggtgccccgaagcgctcgcttcccgcggtgcgatctagtcctgcagtaggcggcccggggccacaccgcggccgcccaagccagtgcaaggcccaggggcctgacatcgctcccagcgctcgaggaccgaggcctgctgtggaggacaccgtgctccctcgggacctgctctggattccggcccggacgtccccttggagctctgcatctccaacctggaacccaacccagaagtctcaagtttgacgcatcacgtggcgtgcggatccactgagggtccacagagaggggcgcccatctcctgcgtctcagttatcctgaattccgactcagatccgaacggggatctggtggaatcgagggtgaaagaccagagggacaatgttctactatcccaacgtgcttcagcgccacaccggctgctttgccaccatctggctggcggcgactcgcggcagccggttggtgaagcgcgaatacctgagggtgaatgtggtgaaaacctgcgaggaaatcctcaattacgtgctggtacgagtgcaacccccgcagcccggcctgccgcggccccgcttctccctctatctctcagcccaacttcaga

SEQ ID NO: 174504 - DNA, 2331 bp, Homo sapiens
  Payload ID: 14260
  Gene Symbol: REC8
  Gene Name: REC8 meiotic recombination protein
  Uniprot ID: O95072
  ENST ID: ENST00000611366
  CDS Start-End: 529-2172
atctaatgaggagcgaggtgcggtgccccgaagcgctcgcttcccgcggtgcgatctagtcctgcagtaggcggcccggggccacaccgcggccgcccaagccagtgcaaggcccaggggcctgacatcgctcccagcgctcgaggaccgaggcctgctgtggaggacaccgtgctccctcgggacctgctctggattccggcccggacgtccccttggagctctgcatctccaacctggaacccaacccagaagtctcaagtttgacgcatcacgtggcgtgcggatccactgagggtccacagagaggggcgcccatctcctgcgtctcagttatcctggtaattgtgtatctgcccattgttcgttgcctcattaacttggctttctaggtgcacccaccttgccaccagagaagtccaaatcctgacttctctccaaggtgttgggaattctgtgccctaaagaattccgactcagatccgaacggggatctggtggaatcgagggtgaaagaccagagggacaatgttctactatcccaacgtgcttcagcgccacaccggctgctttgccaccatctggctggcggcgactcgcggcagccggttggtgaagcgcgaatacctgagggtgaatgtggtgaaaacctgcgaggaaatcctcaattacgtgctggtacgagtgcaacccccgcagcccggcctgccgcggccccgcttctccctctatctctcagcccaacttcagatcggtgtgatccgcgtctattctcaacaatgccagtacctcgtggaggacatccagcacatcttggagcgcctccaccgtgcccagctgcagatccgaatagatatggagactgagctacccagcctgctgcttcctaaccacctggccatgatggagaccctagaagatgctccagatcccttttttgggatgatgtctgtggatcccagacttcctagtcctttcgatatccctcagattcgacacctcttagaggctgcaatcccagagagagttgaagagatccctcctgaagttcctacagagcccagggagccagagaggattccggtcactgtgctgccacctgaggccatcacgatcctggaggcagagcccatacggatgctggagattgagggtgaacgggagctcccagaggtcagccgccgagaactggacctgctgatcgcagaggaagaagaagctatcttgttagaaatcccgcggctcccacctccagctcctgcagaggtggaaggaataggagaggcactgggtcctgaggagctgaggctgacaggctgggaacctggggccctactcatggaggtgacccccccggaggagctgcgtctgccagccccacccagcccagagaggaggcccccagtccccccacctcctcgccgccgccgtcgtcgccggttactgttctgggacaaggagactcagatctccccggagaaattccaggaacaactgcaaaccagagcccactgctgggaatgtcctatggtgcagccgcccgagaggaccatcagaggccctgcggagttgttcagaaccccaactctctctggctggctaccccctgaactactgggtctctggacccattgtgcccagccacccccaaaagccctcaggcgagagctgcctgaggaggcagccgctgaggaggaaaggagaaagattgaagttccaagtgagattgaggtcccgagggaggccctggagcccagtgttccccttatggtgtctttagagatctccctagaggcagctgaagaggagaagtcccgcatcagcctcatcccaccagaagaacggtgggcctggcctgaggtggaggcgccagaagctcctgcattgcccgtggtgcctgaactccctgaggtgcccatggagatgcctttggtgctgcccccagagctcgagctgctctcactggaagcagtgcacagggcagtggcactggagctgcaggctaacagggagcccgacttcagcagcctggtgtcacctctcagcccccgcaggatggctgcccgggtcttctacctgctcctggtgctctcagcgcaacagattcttcacgtgaaacaagaaaagccatatggtcgcctcctgatccagccggggcccagattccactgaggttagagtccatttacaaagctgccaggaaaccggccacttctagtaaaccacgtcgtgcctcactgggtcctgcttacctcatttctgaatgtgcatttccagccttcttgctctcagagctattgttcaagcagaaaacaagctgcttttattaca

SEQ ID NO: 174505 - DNA, 2405 bp, Homo sapiens
  Payload ID: 14260
  Gene Symbol: REC8
  Gene Name: REC8 meiotic recombination protein
  Uniprot ID: O95072
  ENST ID: ENST00000620473
  CDS Start-End: 600-2243
actagaggcgagaaccggagcccattggtcggaacacctcacaatggaccccagcggcgcgcaaaatccttatgattggtttgctggctgcctcgggagaccctgttgccaggatacttggcgttcccgacccgacccccgttccccattggctgtcagggcaaaagccgccatctaatgaggagcgaggtgcggtgccccgaagcgctcgcttcccgcggtgcgatctagtcctgcagtaggcggcccggggccacaccgcggccgcccaagccagtgcaaggcccaggggcctgacatcgctcccagcgctcgaggaccgaggcctgctgtggaggacaccgtgctccctcgggacctgctctggattccggcccggacgtccccttggagctctgcatctccaacctggaacccaacccagaagtctcaagtttgacgcatcacgtggcgtgcggatccactgagggtccacagagaggggcgcccatctcctgcgtctcagttatcctggtgttgggaattctgtgccctaaagaattccgactcagatccgaacggggatctggtggaatcgagggtgaaagaccagagggacaatgttctactatcccaacgtgcttcagcgccacaccggctgctttgccaccatctggctggcggcgactcgcggcagccggttggtgaagcgcgaatacctgagggtgaatgtggtgaaaacctgcgaggaaatcctcaattacgtgctggtacgagtgcaacccccgcagcccggcctgccgcggccccgcttctccctctatctctcagcccaacttcagatcggtgtgatccgcgtctattctcaacaatgccagtacctcgtggaggacatccagcacatcttggagcgcctccaccgtgcccagctgcagatccgaatagatatggagactgagctacccagcctgctgcttcctaaccacctggccatgatggagaccctagaagatgctccagatcccttttttgggatgatgtctgtggatcccagacttcctagtcctttcgatatccctcagattcgacacctcttagaggctgcaatcccagagagagttgaagagatccctcctgaagttcctacagagcccagggagccagagaggattccggtcactgtgctgccacctgaggccatcacgatcctggaggcagagcccatacggatgctggagattgagggtgaacgggagctcccagaggtcagccgccgagaactggacctgctgatcgcagaggaagaagaagctatcttgttagaaatcccgcggctcccacctccagctcctgcagaggtggaaggaataggagaggcactgggtcctgaggagctgaggctgacaggctgggaacctggggccctactcatggaggtgacccccccggaggagctgcgtctgccagccccacccagcccagagaggaggcccccagtccccccacctcctcgccgccgccgtcgtcgccggttactgttctgggacaaggagactcagatctccccggagaaattccaggaacaactgcaaaccagagcccactgctgggaatgtcctatggtgcagccgcccgagaggaccatcagaggccctgcggagttgttcagaaccccaactctctctggctggctaccccctgaactactgggtctctggacccattgtgcccagccacccccaaaagccctcaggcgagagctgcctgaggaggcagccgctgaggaggaaaggagaaagattgaagttccaagtgagattgaggtcccgagggaggccctggagcccagtgttccccttatggtgtctttagagatctccctagaggcagctgaagaggagaagtcccgcatcagcctcatcccaccagaagaacggtgggcctggcctgaggtggaggcgccagaagctcctgcattgcccgtggtgcctgaactccctgaggtgcccatggagatgcctttggtgctgcccccagagctcgagctgctctcactggaagcagtgcacagggcagtggcactggagctgcaggctaacagggagcccgacttcagcagcctggtgtcacctctcagcccccgcaggatggctgcccgggtcttctacctgctcctggtgctctcagcgcaacagattcttcacgtgaaacaagaaaagccatatggtcgcctcctgatccagccggggcccagattccactgaggttagagtccatttacaaagctgccaggaaaccggccacttctagtaaaccacgtcgtgcctcactgggtcctgcttacctcatttctgaatgtgcatttccagccttcttgctctcagagctattgttcaagcagaaaacaagctgcttttattacagta

SEQ ID NO: 174506 - DNA, 2217 bp, Homo sapiens
  Payload ID: 14261
  Gene Symbol: RTP1
  Gene Name: receptor (chemosensory) transporter protein 1
  Uniprot ID: P59025
  ENST ID: ENST00000312295
  CDS Start-End: 31-822
gctgggtcctgcttcctcctggtcttgtcgatgaggatttttagaccgtggagactgcgctgccctgccctgcacctaccctcactctccgtgttctcactaaggtggaaattgccttccctcactactgacgagaccatgtgtaaaagcgtgaccacagatgagtggaagaaagtcttctatgagaagatggaggaggcaaagccggctgacagctgggacctcatcatagaccccaacctcaagcacaatgtgctgagccctggttggaagcagtacctggaattgcatgcttcaggcaggttccactgctcctggtgctggcacacctggcagtcgccctacgtggtcatcctcttccacatgttcctggaccgcgcccagcgggcgggctcggtgcgcatgcgcgtcttcaagcagctgtgctatgagtgcggcacggcgcggctggacgagtccagcatgctggaggagaacatcgagggcctggtggacaacctcatcaccagcctgcgcgagcagtgctacggcgagcgtggcggccagtaccgcatccacgtggccagccgccaggacaaccggcggcaccgcggagagttctgcgaggcctgccaggagggcatcgtgcactggaagcccagcgagaagctgctggaggaggaggcgaccacctacaccttctcccgggcgcccagccccaccaagtcgcaggaccagacgggctcaggctggaacttctgctctatcccctggtgcttgttttgggccacggtcctgctgctgatcatctacctgcagttctctttccgtagctccgtataagattccgtggttgggcccagagcctgtcgagggtgccagttagctgatgcgagggtagaggagagacgtgggttgagaatagtgtaaacttctagcgctggtgatgtcactgactcagtggggatcttggacaaattatacagtttttccatctataaaactcagggtttgggcaagatcattggtttatcatagtgaaacccaggaccccaaagttctgcgtaggtgcctcagggacttttggatttggaaagtaggctaagctagtgggtgtctccaactcctgatctaaacacccatcctccaactcctacctcctcctcttgcttcgatcagaacagctttactttagatagggttccatttaagatttttgtaccaaaaaaaaaaaaaaaaaaagtttaactacttttaaaaagtttgaaaattagaggactgggtgatctcaaaagggctttccacagtaatgagctcgaccttgctcttattagtccctcacccctgcccctcatgatctcccactttctctagctgcagccttaaattagcttctttgcccaccctgtgagcctcatccgtgattctgccttcacacacgcagcagaggtttcccttgaagtgcaagaggtgggagatcaggctgttcctttgctgccaggtacacagggtctcttttttttgtttctcagattccagcttctttccactcagggcagattctggggtctgcctgcctgaaagatggtggttggggtggggtctcatagagttaggcttctcacccactgcgtattaactggcagagaatttaggggaggttcagaagacagagttttagaagcaaagcacaaaatctctgggaggcattataatggagggtcttcagagttcggggaccaagtctagcagattctcagcagtgctgatggccagaattcaggagcaggggcctggcctcctgggttctttgctgaaattatagttgaatggctttctcacattggccaagcatgaggcctcttgccaaagatcagctgtccccctaaagccacagggatggggtatcttcagcaagagagagggcgttaaagatgtaaaatgctttgtccatggggaagtgcacagatatgtgggagaaccttacaaggctctaaaatgagatgtgatatggcttgaaatgggaggagacactttctgacagtggggggtctggaatggaattggtggggacaggcagcaagctgcacttttgaggggcctcatttaccccacctctgttaaaaacttgactactctcctctttaatagaaagtcaccatcatctgtagtgatggaggaagggggtcacttatataaagatgggacactttaataaagacaggatatcttccataa

SEQ ID NO: 174507 - DNA, 1346 bp, Homo sapiens
  Payload ID: 14262
  Gene Symbol: RTP2
  Gene Name: receptor (chemosensory) transporter protein 2
  Uniprot ID: Q5QGT7
  ENST ID: ENST00000358241
  CDS Start-End: 430-1107
ctagggtgtcgtacttaccatagcacatgatgtggagaatgctagaagagcagttgggtgaagcagggccaccaaatagtccttgcctcctggagacctctggaaatccagatgagtgtggtctgaggttgggcctcccactgtgcttgctcctctcaggcctacccagcgctgcctctgaagcctaactcagggccctgaaactcccccttggggcttcccttctccccagccctcactcttggtgccctgcctggctaccatggtaacaggttccagggtaacagaggagggagctgggtcctgtttactcccagtcctgccgatgaggattctgaccgtagacactgaattgtcccgtacctatccgtgctctttctgtgttctcaccagggctgagctcgaactgccacctctgccagcaggaccatgtgtaccagcttgaccacttgtgagtggaagaaagtcttctatgagaagatggaggtggcaaagccagcggacagctgggagctcatcatagaccccaacctcaagcccagtgagctggcccctggctggaagcagtacctggagcagcacgcctcaggcaggttccactgctcctggtgctggcacacctggcagtctgcccatgtggtcatcctcttccacatgttcctggaccgcgcccagcgggcgggctcggtgcgcatgcgcgtcttcaagcagctgtgctatgagtgcggcacggcgcggctggacgagtccagcatgctggaggagaacatcgagggcctggtggacaacctcatcaccagcctgcgcgagcagtgctacgaggaggatggtggccagtaccgcatccacgtggccagccgcccggacagcgggccgcatcgtgcagagttctgtgaggcctgccaggagggcatcgttcactggaagcccagcgagaagctgctggaggaggaggtgaccacctacacctctgaagcctccaagccgagggcccaggcgggatccggctacaacttcttgtctcttcgctggtgcctcttctgggcctctctctgcctgctcgttgtttacctgcagttctccttcctcagtcctgccttcttttagtggagctggttaagggtgggagagggcacatgggcttgagagtggggaggacacagtctggacttgatcctgctacagattcaacatatgactggacaatccggtcacctctctgggcctcagttaatgcatctgcggaatgagaggattgcattagaagataggcaatgattctttcactggatgtgacaataattgggggaaggggaaaagggtgtaataaaggttttagagcttgc

SEQ ID NO: 174508 - DNA, 1321 bp, Homo sapiens
  Payload ID: 14263
  Gene Symbol: RTP3
  Gene Name: receptor (chemosensory) transporter protein 3
  Uniprot ID: Q9BQQ7
  ENST ID: ENST00000296142
  CDS Start-End: 573-1271
tttctcatgggtgggcagccttggctgtctgccggaacgtaaagagcatggagcaaggacatgggaatccgaatcccgctgaggtcccaggaccacttcatccttcttccctgtgcctctcctccccagcatgagcacagcagcctgatggagaaggattttccaatgttagaactggaaagaacacctgtagcctgtctccaccgtttacagtggtgctggaagtgaaaagatgtgttccaggtcacaggcaggtagacagcggagccagactgaaattcactcctcctgatttggagtttagagctcttctttggcaacattttgatgaataaaatcacaagttctgtgtcttttgaaattccttgtggagcctagtgccatcctctgaacttggagccaactgacctttgtccttggggcagagacatggttcatgggcccaatccaggtcctcaaagggagggcaggtctgagtccttgccctctgaagtcagaaacctcatctcccactacagacctgccagggcccaggagagctcgacccacccaggcacaccatagccccagagatggctggggacacagaagtgtggaagcaaatgtttcaggagttaatgcgggaggtgaagccatggcacaggtggaccctgagaccagacaagggccttcttcccaacgtcctgaagccaggctggatgcaataccagcagtggaccttcgccaggttccagtgctcctcctgctctcgtaactgggcctctgcccaagttctggtccttttccacatgaactggagtgaggagaagtccaggggccaggtgaagatgagggtgtttacccagagatgtaagaagtgcccccaacctctgtttgaggaccctgagttcacacaagagaacatctcaaggatcctgaaaaacctggtgttccgaattctgaagaaatgctatagaggaagatttcagttgatagaggaggttcctatgatcaaggacatctctcttgaagggccacacaatagtgacaactgtgaggcatgtctgcagggcttctgtgctgggcccatacaggttacaagcctccccccatctcagaccccaagagtacactccatttacaaggtggaggaggtagttaagccctgggcctcaggagagaatgtctattcctacgcatgccaaaaccacatctgtaggaacttaagcattttctgctgttgtgtcattctcattgttatcgtggtgattgttgtaaaaactgctatatgagccttggaaacatgaagctaagtcagaaaaaaaatcagatacaaaaagtc

SEQ ID NO: 174509 - DNA, 1554 bp, Homo sapiens
  Payload ID: 14264
  Gene Symbol: RTP4
  Gene Name: receptor (chemosensory) transporter protein 4
  Uniprot ID: Q96DX8
  ENST ID: ENST00000259030
  CDS Start-End: 111-851
gtccatacacagaaacagaaactgaaccgaacaccgaaactgaaactgtttgtctcttcctgagaaacgagcaaacctgaaagctactctctcagcttcagagggaaaaaatggttgtagatttctggacttgggagcagacatttcaagaactaatccaagaggcaaaaccccgggccacatggacgctgaagttggatggcaaccttcagctagactgcctggctcaagggtggaagcaataccaacagagagcatttggctggttccggtgttcctcctgccagcgaagttgggcttccgcccaagtgcagattctgtgccacacgtactgggagcactggacatcccagggtcaggtgcgtatgaggctctttggccaaaggtgccagaagtgctcctggtcccaatatgagatgcctgagttctcctcggatagcaccatgaggattctgagcaacctggtgcagcatatactgaagaaatactatggaaatggcacgaggaagtctccagaaatgccagtaatcctggaagtgtccctggaaggatcccatgacacagccaattgtgaggcatgcactttgggcatctgtggacagggcttaaaaagctgcatgacaaagccgtccaaatccctactcccccacctaaagactgggaattcctcacctggaattggtgctgtgtacctcgcaaaccaagccaagaaccagtcagctgaggcaaaagaggctaaggggagtgggtatgagaaattagggcccagtcgagacccagatccactgaacatctgtgtctttattttgctgcttgtatttattgtagtcaaatgctttacatcagaatgatgaaaataggcttgccactttctcttattttaattccatggtagtcaatgaactggctgccactttaatataactgaaaattcattttgagaccaagcaggatcaagtttgtagaataaacactggtttcctagccatcctctgaaaacagtatgaaacatgaccaagtacataatggatttagtaataaatattgtcgaattgctaaaaagtcttcaatcattcattcactaagtcactcagtgatatcaatatacttagctcagaaagtgtgggaggctgaataatggtgtctcccaacatatgcatgacttaatccccagaacctgtaaacatgttactttacatggtagaatggactttgcggatgtaattaaggaccttgaaatggttagattatttcatattgtccgggtggataagaaccaggattttgtaacagggaggcaacaagctcaaaatcagaaaaaagagatttgtcaatggaacaagaggttgaagtgctttgaagttggaggaagaggtcacaggcaaaaaagtacaggcagcctttagaaacccaaaaggacaaaggaacagattctcccctggagtctgcagaaggaaccagccctgcctgcacatggctttagcccagtgacactgattttggacatctgaccttcagaactgcttgctcataaacttgtcttgttttaatgca

SEQ ID NO: 174510 - DNA, 2296 bp, Homo sapiens
  Payload ID: 14265
  Gene Symbol: RTP5
  Gene Name: receptor (chemosensory) transporter protein 5 (putative)
  Uniprot ID: Q14D33
  ENST ID: ENST00000343216
  CDS Start-End: 29-1747
agcccacactgcggagccaggcggcagcatggaccgggctggggcagacatgtgggccagcaccttcaccctggccatggccgagaggaagccccaggacgtctgggttctgctacctgagcacagcctggtcccgggatgcctggacggcggtggtgtccagtacctgctggtggggctctcgaggctccagtgcggtcactgtccggggacctgggactcggcccatgtgcacgtcctcttccacctgtggtgggacagggccagccaccgggggctggtgaagatgcgcatctggggccagcggtgcaggctgtgccccgcacccggggactgccaggtgaggcccccgggcgagcagcccttcctcagcaggctggtcttgcacatcctgcaggactgctacggggatggccccggcccagcccggcaccccagggaggcctatgagggctgctgtgaggcctgtgagctgggggtctgcttcctccagaaggccccagaccccgcctggagcgccaacgccacaaaaggcaacttccccgccacggcctggggtggcactggcaccgtctccaggggcaaaccgctgtccacccctggcgacgaccttggcaagggtggcgttgtcatcgccatccccttctcccttgtgggtaccagcaatgaccaggtgcccatcgctgagggccctgccccccctgcgggggcctctctccctgtgactggcagctgtgaggccctggtcatcggccagggctccatcttcctgtctggggattcagtggccatgcctgggggcaaaggcttcccggtggccattggagaccccctcttccacggccccggcctcctcggcagcagcatccagaccttcgagctcaagggcttcctcttcaaaggccggggctccctctgcagcccggttggcgtggcccagggctggggccccatctccctcaacaatggcctcgtccctgtggggaaacacacgccaaccgtgttctactgtgtgggcctctcggccagcggggagggctccctcaccttcccctcctccctcaccagcatcttcaccaacaccctctcggagcccaccgatggccctgtggccactaaagaggcctccatcaccttccccttcatctttactgatgtcaaggatgccgttgctgaggtggctgaaggcaacgggaaggaaggaggcggccagggcctcgtcccagtgggtcacgacgccctgccagagaccaatgctggtggcctcccctcccaggtcaagggctcccttgccctccccttccctgctgatgtccaaggcaaagatgcctttactgacatcactgaaggcaaagagaaggaaggtggcctggtcaccgcgggtcacgacgcccctctggaggccaatgccgagggccccatcacggttagtgagggctgcatcaccatccccttcgcagtcttcgatgtcataaagcgcaagggcggtggccacgttgcctacggcccccagggcaatggctgcttctcccaaggctattaccagaagaggcagctgaggtccaggttccacaaggcccgctgtgggtgccgccgggaggaagacgagcgccctggccgtgcctgccgtaggccgcacgccgagccctacgaggacttctggatctgggtgtccatgaccgtgtgcgtcttctggctgatgtgcatgtgtcggctgaaccccgggatctacccgcagcaagtgtgacgccccgaagttcaggcaaccctcgcctctgggaccccgcctcgcctctgagacaccccccaaccccgcctttgagatgcccgccccgcctccgagaccccgcctccacctccgagacccctttctctgagacccccgcctctgaggccccgccccccgcctccgagaccccgccctgcctctgagaccccgcctcacctctgagacaccccccaaccccacctttgagatgcccgccccgcctccgtggccccgcctccacctccgagaccccgcctccacctccgagacccctttctctgagacccctgcctctgaagccccgccccccgcctccgagaccccgcttcacctccgaggccccgccccccgcctccgagaccccgccccccgcctccgagaccccgcctcacctctgagaccccgcccccgccagcagctcagcccctcctgtctcttgcccctggttttgtgggtctgccctgagctgtgcctgtgtgctccagcctcttcctatgtgtgtaacttcaataaaaccaagcaaagcca

SEQ ID NO: 174511 - DNA, 2602 bp, Homo sapiens
  Payload ID: 14265
  Gene Symbol: RTP5
  Gene Name: receptor (chemosensory) transporter protein 5 (putative)
  ENST ID: ENST00000419912
  CDS Start-End: 158-325
ttcctttctgcttcccatttctcggagacaaatctggttgccatggagaccatgctgttgtcaaggtggctgattggccggcgcgggatgcggggacgtttccttgggcccccggcgggcgcagccctcagcccacactgcggagccaggcggcagcatggaccgggctggggcagacatgtgggccagcaccttcaccctggccatggccgagaggaagccccaggacgtctgggttctgctacctgagcacagcctggtcccgggatgcctggacggcggtggtgtccagtacctgctggtggggctctcgagggttccctgaagctcacagctgcttgtgtggctagcaaatggtcaccggtctgatgaccgccatggacaagccaatccctcccagtgctctccccaaacctctcctcgcctggtgacgcccagcagggctgcccgggccatgaccgcaggcctccgtgacatccttcccctcagctggcaggctccagtgcggtcactgtccggggacctgggactcggcccatgtgcacgtcctcttccacctgtggtgggacagggccagccaccgggggctggtgaagatgcgcatctggggccagcggtgcaggctgtgccccgcacccggggactgccaggtgaggcccccgggcgagcagcccttcctcagcaggctggtcttgcacatcctgcaggactgctacggggatggccccggcccagcccggcaccccagggaggcctatgagggctgctgtgaggcctgtgagctgggggtctgcttcctccagaaggccccagaccccgcctggagcgccaacgccacaaaaggcaacttccccgccacggcctggggtggcactggcaccgtctccaggggcaaaccgctgtccacccctggcgacgaccttggcaagggtggcgttgtcatcgccatccccttctcccttgtgggtaccagcaatgaccaggtgcccatcgctgagggccctgccccccctgcgggggcctctctccctgtgactggcagctgtgaggccctggtcatcggccagggctccatcttcctgtctggggattcagtggccatgcctgggggcaaaggcttcccggtggccattggagaccccctcttccacggccccggcctcctcggcagcagcatccagaccttcgagctcaagggcttcctcttcaaaggccggggctccctctgcagcccggttggcgtggcccagggctggggccccatctccctcaacaatggcctcgtccctgtggggaaacacacgccaaccgtgttctactgtgtgggcctctcggccagcggggagggctccctcaccttcccctcctccctcaccagcatcttcaccaacaccctctcggagcccaccgatggccctgtggccactaaagaggcctccatcaccttccccttcatctttactgatgtcaaggatgccgttgctgaggtggctgaaggcaacgggaaggaaggaggcggccagggcctcgtcccagtgggtcacgacgccctgccagagaccaatgctggtggcctcccctcccaggtcaagggctcccttgccctccccttccctgctgatgtccaaggcaaagatgcctttactgacatcactgaaggcaaagagaaggaaggtggcctggtcaccgcgggtcacgacgcccctctggaggccaatgccgagggccccatcacggttagtgagggctgcatcaccatccccttcgcagtcttcgatgtcataaagcgcaagggcggtggccacgttgcctacggcccccagggcaatggctgcttctcccaaggctattaccagaagaggcagctgaggtccaggttccacaaggcccgctgtgggtgccgccgggaggaagacgagcgccctggccgtgcctgccgtaggccgcacgccgagccctacgaggacttctggatctgggtgtccatgaccgtgtgcgtcttctggctgatgtgcatgtgtcggctgaaccccgggatctacccgcagcaagtgtgacgccccgaagttcaggcaaccctcgcctctgggaccccgcctcgcctctgagacaccccccaaccccgcctttgagatgcccgccccgcctccgagaccccgcctccacctccgagacccctttctctgagacccccgcctctgaggccccgccccccgcctccgagaccccgccctgcctctgagaccccgcctcacctctgagacaccccccaaccccacctttgagatgcccgccccgcctccgtggccccgcctccacctccgagaccccgcctccacctccgagacccctttctctgagacccctgcctctgaagccccgccccccgcctccgagaccccgcttcacctccgaggccccgccccccgcctccgagaccccgccccccgcctccgagaccccgcctcacctctgagaccccgcccccgccagcagctcagcccctcctgtctcttgcccctggttttgtgggtctgccctgagctgtgcctgtgtgctccagcctcttcctatgtgtgtaacttcaataaaaccaagcaaa

SEQ ID NO: 174512 - DNA, 2296 bp, Homo sapiens; identical to SEQ ID NO: 174510
  Payload ID: 14265
  Gene Symbol: RTP5
  Gene Name: receptor (chemosensory) transporter protein 5 (putative)
  Uniprot ID: Q14D33
  ENST ID: ENST00000617264
  CDS Start-End: 29-1747

SEQ ID NO: 174513 - DNA, 2602 bp, Homo sapiens; identical to SEQ ID NO: 174511
  Payload ID: 14265
  Gene Symbol: RTP5
  Gene Name: receptor (chemosensory) transporter protein 5 (putative)
  ENST ID: ENST00000627567
  CDS Start-End: 158-325

SEQ ID NO: 174514 - DNA, 910 bp, Homo sapiens
  Payload ID: 14266
  Gene Symbol: RAMP1
  Gene Name: receptor (G protein-coupled) activity modifying protein 1
  Uniprot ID: O60894
  ENST ID: ENST00000254661
  CDS Start-End: 133-579
gcggccgccgcctcccaccgctcccgcgcccgctcccgcccccggcgcgtctcctccgggcccgcgccgcggcgggctcagtcctcagcggggcgcgtggcgagcggactcgactcggcaccgctgtgcaccatggcccgggccctgtgccgcctcccgcggcgcggcctctggctgctcctggcccatcacctcttcatgaccactgcctgccaggaggctaactacggtgccctcctccgggagctctgcctcacccagttccaggtagacatggaggccgtcggggagacgctgtggtgtgactggggcaggaccatcaggagctacagggagctggccgactgcacctggcacatggcggagaagctgggctgcttctggcccaatgcagaggtggacaggttcttcctggcagtgcatggccgctacttcaggagctgccccatctcaggcagggccgtgcgggacccgcccggcagcatcctctaccccttcatcgtggtccccatcacggtgaccctgctggtgacggcactggtggtctggcagagcaagcgcactgagggcattgtgtaggcggggcccaggctgcccgcgggtgcacccaggctgcagggtgaggccaggcaggcctgggtaggggcagcttctggagccttgggacagagcaggcccacaatgccccccttcttccagccaagaagagctcacaggagtccagagtagccgaggctctggtattaacctggaagcccccctggctggaggccaccgccaccctaggaagggggcagggacgtgaccttgacttacctctggaaagggtcccagcctagactgcttaccccatagccacatttgtggatgagtggtttgtgattaaaagggatgttcttgaacttggaaa

SEQ ID NO: 174515 - DNA, 857 bp, Homo sapiens
  Payload ID: 14266
  Gene Symbol: RAMP1
  Gene Name: receptor (G protein-coupled) activity modifying protein 1
  ENST ID: ENST00000404910
  CDS Start-End: 250-630
gcagctgccagagtgccaccaaagcaaacctcatctcaagactctgtggccaggccctcacaacctcctgccaggctctcgctacctacccatcaacagcaagactcccaggccatctcaatccccccaaagagccctgttcctccagccccacggcttctgttcacctgccgtgctgtccccgcctctgcccacccactcatcctgcagatctggagcagcattccagggcctgcccatcacctcttcatgaccactgcctgccaggaggctaactacggtgccctcctccgggagctctgcctcacccagttccaggtagacatggaggccgtcggggagacgctgtggtgtgactggggcaggaccatcaggagctacagggagctggccgactgcacctggcacatggcggagaagctgggctgcttctggcccaatgcagaggtggacaggttcttcctggcagtgcatggccgctacttcaggagctgccccatctcaggcagggccgtgcgggacccgcccggcagcatcctctaccccttcatcgtggtccccatcacggtgaccctgctggtgacggcactggtggtctggcagagcaagcgcactgagggcattgtgtaggcggggcccaggctgcccgcgggtgcacccaggctgcagggtgaggccaggcaggcctgggtaggggcagcttctggagccttgggacagagcaggcccacaatgccccccttcttccagccaagaagagctcacaggagtccagagtagccgaggctctggtattaacctggaagcccccctggctggaggccaccgccaccctaggaagggggcagggacgtgac

SEQ ID NO: 174516 - DNA, 650 bp, Homo sapiens
  Payload ID: 14266
  Gene Symbol: RAMP1
  Gene Name: receptor (G protein-coupled) activity modifying protein 1
  ENST ID: ENST00000403885
  CDS Start-End: 43-423
ggagagcgggcattctggaaagcgtgggcccatcacctcttcatgaccactgcctgccaggaggctaactacggtgccctcctccgggagctctgcctcacccagttccaggtagacatggaggccgtcggggagacgctgtggtgtgactggggcaggaccatcaggagctacagggagctggccgactgcacctggcacatggcggagaagctgggctgcttctggcccaatgcagaggtggacaggttcttcctggcagtgcatggccgctacttcaggagctgccccatctcaggcagggccgtgcgggacccgcccggcagcatcctctaccccttcatcgtggtccccatcacggtgaccctgctggtgacggcactggtggtctggcagagcaagcgcactgagggcattgtgtaggcggggcccaggctgcccgcgggtgcacccaggctgcagggtgaggccaggcaggcctgggtaggggcagcttctggagccttgggacagagcaggcccacaatgccccccttcttccagccaagaagagctcacaggagtccagagtagccgaggctctggtattaacctggaagcccccctggctggaggccaccgccaccctaggaagggggcagggacgtgac

SEQ ID NO: 174517 - DNA, 734 bp, Homo sapiens
  Payload ID: 14266
  Gene Symbol: RAMP1
  Gene Name: receptor (G protein-coupled) activity modifying protein 1
  ENST ID: ENST00000409726
  CDS Start-End: 181-561
agtcctcagcggggcgcgtggcgagcggactcgactcggcaccgctgtgcaccatggcccgggccctgtgccgcctcccgcggcgcggcctctggctgctcctgggcaggatagcctgaggcacgcttgcttcactcccaggcagaatggccactgagaaatccggcccatcacctcttcatgaccactgcctgccaggaggctaactacggtgccctcctccgggagctctgcctcacccagttccaggtagacatggaggccgtcggggagacgctgtggtgtgactggggcaggaccatcaggagctacagggagctggccgactgcacctggcacatggcggagaagctgggctgcttctggcccaatgcagaggtggacaggttcttcctggcagtgcatggccgctacttcaggagctgccccatctcaggcagggccgtgcgggacccgcccggcagcatcctctaccccttcatcgtggtccccatcacggtgaccctgctggtgacggcactggtggtctggcagagcaagcgcactgagggcattgtgtaggcggggcccaggctgcccgcgggtgcacccaggctgcagggtgaggccaggcaggcctgggtaggggcagcttctggagccttgggacagagcaggcccacaatgccccccttcttccagccaagaagagctcacaggagtccagagtagccgaggctctggtattaacctgg

SEQ ID NO: 174518 - DNA, 780 bp, Homo sapiens
  Payload ID: 14267
  Gene Symbol: RAMP2
  Gene Name: receptor (G protein-coupled) activity modifying protein 2
  Uniprot ID: O60895
  ENST ID: ENST00000253796
  CDS Start-End: 69-596
ggatataggcgcccccacacccgggcccggctcagcgccgccgccgctcctcgcctccttgctgcacgatggcctcgctccgggtggagcgcgccggcggcccgcgtctccctaggacccgagtcgggcggccggcagcgctccgcctcctcctcctgctgggcgctgtcctgaatccccacgaggccctggctcagcctcttcccaccacaggcacaccagggtcagaaggggggacggtgaagaactatgagacagctgtccaattttgctggaatcattataaggatcaaatggatcctatcgaaaaggattggtgcgactgggccatgattagcaggccttatagcaccctgcgagattgcctggagcactttgcagagttgtttgacctgggcttccccaatcccttggcagagaggatcatctttgagactcaccagatccactttgccaactgctccctggtgcagcccaccttctctgaccccccagaggatgtactcctggccatgatcatagcccccatctgcctcatccccttcctcatcactcttgtagtatggaggagtaaagacagtgaggcccaggcctagggggccacgagcttctcaacaaccatgttactccacttccccacccccaccaggcctccctcctcccctcctactcccttttctcactctcatccccaccacagatccctggattgctgggaatggaagccaggtggggtcatggcacaagttctgtaatcttcaaaataaaactttttttttg

SEQ ID NO: 174519 - DNA, 573 bp, Homo sapiens
  Payload ID: 14267
  Gene Symbol: RAMP2
  Gene Name: receptor (G protein-coupled) activity modifying protein 2
  ENST ID: ENST00000588576
  CDS Start-End: 5-343
cacgatggcctcgctccgggtggagcgcgccggcggcccgcgtctccctaggacccgagtcgggcggccggcagcgctccgcctcctcctcctgctgggcgctgtcctgaatccccacgaggccctggctcagcctcttcccaccacaggcacaccagggtcagaaggccttatagcaccctgcgagattgcctggagcactttgcagagttgtttgacctgggcttccccaatcccttggcagagaggatcatctttgagactcaccagatccactttgccaactgctccctggtgcagcccaccttctctgaccccccagaggatgtactcctggccatgatcatagcccccatctgcctcatccccttcctcatcactcttgtagtatggaggagtaaagacagtgaggcccaggcctagggggccacgagcttctcaacaaccatgttactccacttccccacccccaccaggcctccctcctcccctcctactcccttttctcactctcatccccaccacagatccctggattgctgggaatggaagccaggtggggtcatggcacaa

SEQ ID NO: 174520 - DNA, 549 bp, Homo sapiens
  Payload ID: 14267
  Gene Symbol: RAMP2
  Gene Name: receptor (G protein-coupled) activity modifying protein 2
  Uniprot ID: O60895
  ENST ID: ENST00000587142
  CDS Start-End: 5-547
cacgatggcctcgctccgggtggagcgcgccggcggcccgcgtctccctaggacccgagtcgggcggccggcagcgctccgcctcctcctcctgctgggcgctgtcctgaatccccacgaggccctggctcagcctcttcccaccacaggcacaccagggtcagaagcatctgtacctacaggggggacggtgaagaactatgagacagctgtccaattttgctggaatcattataaggatcaaatggatcctatcgaaaaggattggtgcgactgggccatgattagcaggccttatagcaccctgcgagattgcctggagcactttgcagagttgtttgacctgggcttccccaatcccttggcagagaggatcatctttgagactcaccagatccactttgccaactgctccctggtgcagcccaccttctctgaccccccagaggatgtactcctggccatgatcatagcccccatctgcctcatccccttcctcatcactcttgtagtatggaggagtaaagacagtgaggcccaggcctaggg

SEQ ID NO: 174521 - DNA, 548 bp, Homo sapiens
  Payload ID: 14267
  Gene Symbol: RAMP2
  Gene Name: receptor (G protein-coupled) activity modifying protein 2
  ENST ID: ENST00000588928
  CDS Start-End: 400-548
cgagaggccgctggagctcccagccccctccctcttctccacgtctgggagagcagcttgccgacccctccagacccgaaagagagagggggcgactcgaattcggggagcgatcctgggagaccctggagagtcctgggcgccacgcagccgagcccccgaaatagatcccggttccggggttccgggagctgtccagcctcgcggggtgagctacgagagggtgggccaacgccggcgaggcggagggagccgcgggcgccaggcgcggctgtcctgaatccccacgaggccctggctcagcctcttcccaccacaggcacaccagggtcagaaggggggacggtgaagaactatgagacagctgtccaattttgctggaatcattataaggatcaaatggatcctatcgaaaaggattggtgcgactgggccatgattagcaggccttatagcaccctgcgagattgcctggagcactttgcagagttgtttgacctgggcttccccaatcccttggcagagaggatcatctttgagactcacca

SEQ ID NO: 174522 - DNA, 858 bp, Homo sapiens
  Payload ID: 14267
  Gene Symbol: RAMP2
  Gene Name: receptor (G protein-coupled) activity modifying protein 2
  ENST ID: ENST00000589683
  CDS Start-End: 367-669
cccaggacagccccttagaagcagcggcgtcgagaggccgctggagctcccagccccctccctcttctccacgtctgggagagcagcttgccgacccctccagacccgaaagagagagggggcgactcgaattcggggagcgatcctgggagaccctggagagtcctgggcgccacgcagccgagcccccgaaatagatcccggttccggggttccgggagctgtccagcctcgcgggctgtcctgaatccccacgaggccctggctcagcctcttcccaccacaggcacaccagggtcagaaggggggacggtgaagaactatgagacagctgtccaattttgctggaatcattataaggatcaaatggatcctatcgaaaaggattggtgcgactgggccatgattagcaggccttatagcaccctgcgagattgcctggagcactttgcagagttgtttgacctgggcttccccaatcccttggcagagaggatcatctttgagactcaccagatccactttgccaactgctccctggtgcagcccaccttctctgaccccccagaggatgtactcctggccatgatcatagcccccatctgcctcatccccttcctcatcactcttgtagtatggaggagtaaagacagtgaggcccaggcctagggggccacgagcttctcaacaaccatgttactccacttccccacccccaccaggcctccctcctcccctcctactcccttttctcactctcatccccaccacagatccctggattgctgggaatggaagccaggtggggtcatggcacaagttctgtaatcttcaaaataaaactttttttttgtacaa

SEQ ID NO: 174523 - DNA, 1323 bp, Homo sapiens
  Payload ID: 14268
  Gene Symbol: RAMP3
  Gene Name: receptor (G protein-coupled) activity modifying protein 3
  Uniprot ID: O60896
  ENST ID: ENST00000242249
  CDS Start-End: 39-485
agcgggaccgagcgtgacccagctgcggccggccagccatggagactggagcgctgcggcgcccgcaacttctcccgttgctgctgctgctctgcggtgggtgtcccagagcaggcggctgcaacgagacaggcatgttggagaggctgcccctgtgtgggaaggctttcgcagacatgatgggcaaggtggacgtctggaagtggtgcaacctgtccgagttcatcgtgtactatgagagtttcaccaactgcaccgagatggaggccaatgtcgtgggctgctactggcccaaccccctggcccagggcttcatcaccggcatccacaggcagttcttctccaactgcaccgtggacagggtccacttggaggaccccccagacgaggttctcatcccgctgatcgttatacccgtcgttctgactgtcgccatggctggcctggtggtgtggcgcagcaaacgcaccgacacgctgctgtgagggtcccggtgagatggagtgggtcacacctggcaagctggaagaaagttccctggggatgggagagcgggtgggtgctgccaatctccagctactgtggccacaccccacctggtcatgggcagacccctcccttcctgggctgacctgctccctcgaggccagcctgctccctggctgaggctcaggctatccgcccaagctctttgctcattctagggccagtggaggaaaatgtgataaggccagagcttgtgtgctgggcacagaaatcacctgctgcatcctgtgctccgcaggctgggccggagcctctgcccgcaggtttctatgctgtttcttagcacagaatccagcctagccttagccgcagtctaggccctgcttggactaggactccttgcttgaccccatctctggttcctgccctggctcctgcaccagccccagctcctgcctacatccaggcagaaagataggcaggggctcttggaagacgttccgtgctgtgacctccgagccctcctggtgggaagacagctggaaaggctgggaggagaagggaggggctgggggttcccaggagccatgcgtggcctgcagagtccattccatcatgatgctgtgcccgctatgggctgtgtccatgaccagaggctggagtgggggtgtgttagagcccctcaccgggacttgctgtgcggatggggcctgggcctccttcctacaggggctcctctgtgggtgaggggccctctggaatggcatcccatgagcttgtggcctctatctgctaccatctgtgttttatctgagtaaagttaccttacttctggaa

SEQ ID NO: 174524 - DNA, 543 bp, Homo sapiens
  Payload ID: 14268
  Gene Symbol: RAMP3
  Gene Name: receptor (G protein-coupled) activity modifying protein 3
  ENST ID: ENST00000496212
  CDS Start-End: 1-456
atggagactggagcgctgcggcgcccgcaacttctcccgttgctgctgctgctctgcggtgggtgtcccagagcaggcggctgcaacgagacaggcatgttggagaggctgcccctgtgtgggaaggctttcgcagacatgatgggcaaggtggacgtctggaagtggtgcaacctgtccgagttcatcgtgtactatgagagtttcaccaactgcaccgagatggaggccaatgtcgtgggctgctactggcccaaccccctggcccagggcttcatcaccggcatccacaggcagttcttctccaactgcaccgtggacagggtccacttggaggaccccccagacgaggttctcatcccgctgatcgttatacccgtcgttctgactgtcgccatggctggcctggtggtgtggcgcagcaaacgcaccgacacgctgctatgtggaaattgaggctcagaaatgtaaggggacttgctgaagagtggtcttttatattttcctggcctgctgccctactgaatccagccctgagaggtg

SEQ ID NO: 174525 - DNA, 559 bp, Homo sapiens
  Payload ID: 14268
  Gene Symbol: RAMP3
  Gene Name: receptor (G protein-coupled) activity modifying protein 3
  Uniprot ID: O60896
  ENST ID: ENST00000481345
  CDS Start-End: 1-447
atggagactggagcgctgcggcgcccgcaacttctcccgttgctgctgctgctctgcggtgggtgtcccagagcaggcggctgcaacgagacaggcatgttggagaggctgcccctgtgtgggaaggctttcgcagacatgatgggcaaggtggacgtctggaagtggtgcaacctgtccgagttcatcgtgtactatgagagtttcaccaactgcaccgagatggaggccaatgtcgtgggctgctactggcccaaccccctggcccagggcttcatcaccggcatccacaggcagttcttctccaactgcaccgtggacagggtccacttggaggaccccccagacgaggttctcatcccgctgatcgttatacccgtcgttctgactgtcgccatggctggcctggtggtgtggcgcagcaaacgcaccgacacgctgctgtgagggtcccgatgtggaaattgaggctcagaaatgtaaggggacttgctgaagagtggtcttttatattttcctggcctgctgccctactgaatccagccctgagaggtgacaa

SEQ ID NO: 174526 - DNA, 4160 bp, Homo sapiens
  Payload ID: 14269
  Gene Symbol: RIPK1
  Gene Name: receptor (TNFRSF)-interacting serine-threonine kinase 1
  Uniprot ID: Q13546
  ENST ID: ENST00000259808
  CDS Start-End: 299-2314
cggcggggcggcgctctcgcggtcctcctccccggcaagggccggggcagggggaggaggcagcgcgaacagtccacgccctccagccgggcgcgctcgacgcggacggcgggccagctgccggagcgcggcgactccaggggacccacagctggggcgccagagcgcggccatccgggcggggccgacggagcgcggcaggacttggctggacggcgcggccacggagaagggcgcgggtacagctctgccggggggggaaaaagtggtaccattttgggcgttcttgagcttcagaatgcaaccagacatgtccttgaatgtcattaagatgaaatccagtgacttcctggagagtgcagaactggacagcggaggctttgggaaggtgtctctgtgtttccacagaacccagggactcatgatcatgaaaacagtgtacaaggggcccaactgcattgagcacaacgaggccctcttggaggaggcgaagatgatgaacagactgagacacagccgggtggtgaagctcctgggcgtcatcatagaggaagggaagtactccctggtgatggagtacatggagaagggcaacctgatgcacgtgctgaaagccgagatgagtactccgctttctgtaaaaggaaggataattttggaaatcattgaaggaatgtgctacttacatggaaaaggcgtgatacacaaggacctgaagcctgaaaatatccttgttgataatgacttccacattaagatcgcagacctcggccttgcctcctttaagatgtggagcaaactgaataatgaagagcacaatgagctgagggaagtggacggcaccgctaagaagaatggcggcaccctctactacatggcgcccgagcacctgaatgacgtcaacgcaaagcccacagagaagtcggatgtgtacagctttgctgtagtactctgggcgatatttgcaaataaggagccatatgaaaatgctatctgtgagcagcagttgataatgtgcataaaatctgggaacaggccagatgtggatgacatcactgagtactgcccaagagaaattatcagtctcatgaagctctgctgggaagcgaatccggaagctcggccgacatttcctggcattgaagaaaaatttaggcctttttatttaagtcaattagaagaaagtgtagaagaggacgtgaagagtttaaagaaagagtattcaaacgaaaatgcagttgtgaagagaatgcagtctcttcaacttgattgtgtggcagtaccttcaagccggtcaaattcagccacagaacagcctggttcactgcacagttcccagggacttgggatgggtcctgtggaggagtcctggtttgctccttccctggagcacccacaagaagagaatgagcccagcctgcagagtaaactccaagacgaagccaactaccatctttatggcagccgcatggacaggcagacgaaacagcagcccagacagaatgtggcttacaacagagaggaggaaaggagacgcagggtctcccatgacccttttgcacagcaaagaccttacgagaattttcagaatacagagggaaaaggcactgcttattccagtgcagccagtcatggtaatgcagtgcaccagccctcagggctcaccagccaacctcaagtactgtatcagaacaatggattatatagctcacatggctttggaacaagaccactggatccaggaacagcaggtcccagagtttggtacaggccaattccaagtcatatgcctagtctgcataatatcccagtgcctgagaccaactatctaggaaatacacccaccatgccattcagctccttgccaccaacagatgaatctataaaatataccatatacaatagtactggcattcagattggagcctacaattatatggagattggtgggacgagttcatcactactagacagcacaaatacgaacttcaaagaagagccagctgctaagtaccaagctatctttgataataccactagtctgacggataaacacctggacccaatcagggaaaatctgggaaagcactggaaaaactgtgcccgtaaactgggcttcacacagtctcagattgatgaaattgaccatgactatgagcgagatggactgaaagaaaaggtttaccagatgctccaaaagtgggtgatgagggaaggcataaagggagccacggtggggaagctggcccaggcgctccaccagtgttccaggatcgaccttctgagcagcttgatttacgtcagccagaactaaccctggatgggctacggcagctgaagtggacgcctcacttagtggataaccccagaaagttggctgcctcagagcattcagaattctgtcctcactgataggggttctgtgtctgcagaaattttgtttcctgtacttcatagctggagaatggggaaagaaatctgcagcaaaggggtctcactctgttgccaggctggtctcaaacttctggactcaagtgatcctcccgcctcggccttccaaagtgctgggatatcaggcactgagccactgcgcccagccaacaatccgctctgaggaaagcgtaagcaggaagacctcttaatggcatagcaccaataaaaaaatgactcctagttgtgtttggaaagggagagaagagatgtctgaggaaggtcatgttctttcagcttatggcatttcctagagttttgttgaagcaagaagaaaaactcagagaatataaaatcaacttttaaaattgtgtgctctcttcttcacgtaggctcctgttaaaaacaaagtgcagtcagattctaagccctgttcagagacttcgtggatcacagctgcagctcaccgccacatcacaggatccgttaacgttaatacccaatactctgtcagccactgtaggctctaagaaccacgtgcagtcttcagcccattaaattatcgattattttttaatgaattgaatttatattgagtcttcaaattaactgaatggatttaaaggggtaccaaggaggggggaaacatcagaatttcccaggcagttgttgcaaggaattggtactaaccgtgactacaacaaaaattcttgattgacttttaaagttatttcctggcattctggtaccttcacccagcctgagtgccctggagagggaacaggaaatgctgatctctacccctgggtgagaccagaacctcagggctgatactgttgagtggcttcctcggtttactctgtgtactgtgaaagtattttcatattttttctgtgtgccagagtgaaaaaggacagcttctgagtgtggtaattgtgcctctagcacccagcctttcaaagcccacctgaaacctgggggtggatgaaagaactagaatagaagactgaagctgggtaggccgctcagtgtccactggcattttgctaaaccgacaaggaaggctgtgtgcttagctctccccagagggagggcgagaagggtgtggtgatggtcaatctggctgtcggaacagattctggtgtcttgggctgataacagtgttgttgattctgattgtgaatcccctcaactctagcagacacatacacacccctgaaatggggctgcagagcaggctgtctcagccttgccactgtcggcatctcggcctgggtaattctgttgtggggactgtcctgttccttgtaggatgtttagtagcatccctgcccccacctactagatgccaggggcactgttctccccagccccccgccccagttgtgacaatagtctctaaacattgtcaaatggtccaaggaaaggggaaaattgccccggttgagaagagcactgctgtaaagtaatgagcctcggctctcctgtctgcacctgtccggttactacttggccaccacgcagccttggctcctacagcccaaaagggagaatggagggaggctccaggctttgctggaggggcctgggtgagttctgtttgctccttgtaccaccatccaaatggtgttatcaaatctcttagattccaaagaggttgaataattaatgttcaaaggcaagagggcaaggcattttttaacactttttaaaataaaaatttataccac

SEQ ID NO: 174527 - DNA, 3864 bp, Homo sapiens
  Payload ID: 14269
  Gene Symbol: RIPK1
  Gene Name: receptor (TNFRSF)-interacting serine-threonine kinase 1
  Uniprot ID: Q13546
  ENST ID: ENST00000380409
  CDS Start-End: 1-2016
atgcaaccagacatgtccttgaatgtcattaagatgaaatccagtgacttcctggagagtgcagaactggacagcggaggctttgggaaggtgtctctgtgtttccacagaacccagggactcatgatcatgaaaacagtgtacaaggggcccaactgcattgagcacaacgaggccctcttggaggaggcgaagatgatgaacagactgagacacagccgggtggtgaagctcctgggcgtcatcatagaggaagggaagtactccctggtgatggagtacatggagaagggcaacctgatgcacgtgctgaaagccgagatgagtactccgctttctgtaaaaggaaggataattttggaaatcattgaaggaatgtgctacttacatggaaaaggcgtgatacacaaggacctgaagcctgaaaatatccttgttgataatgacttccacattaagatcgcagacctcggccttgcctcctttaagatgtggagcaaactgaataatgaagagcacaatgagctgagggaagtggacggcaccgctaagaagaatggcggcaccctctactacatggcgcccgagcacctgaatgacgtcaacgcaaagcccacagagaagtcggatgtgtacagctttgctgtagtactctgggcgatatttgcaaataaggagccatatgaaaatgctatctgtgagcagcagttgataatgtgcataaaatctgggaacaggccagatgtggatgacatcactgagtactgcccaagagaaattatcagtctcatgaagctctgctgggaagcgaatccggaagctcggccgacatttcctggcattgaagaaaaatttaggcctttttatttaagtcaattagaagaaagtgtagaagaggacgtgaagagtttaaagaaagagtattcaaacgaaaatgcagttgtgaagagaatgcagtctcttcaacttgattgtgtggcagtaccttcaagccggtcaaattcagccacagaacagcctggttcactgcacagttcccagggacttgggatgggtcctgtggaggagtcctggtttgctccttccctggagcacccacaagaagagaatgagcccagcctgcagagtaaactccaagacgaagccaactaccatctttatggcagccgcatggacaggcagacgaaacagcagcccagacagaatgtggcttacaacagagaggaggaaaggagacgcagggtctcccatgacccttttgcacagcaaagaccttacgagaattttcagaatacagagggaaaaggcactgcttattccagtgcagccagtcatggtaatgcagtgcaccagccctcagggctcaccagccaacctcaagtactgtatcagaacaatggattatatagctcacatggctttggaacaagaccactggatccaggaacagcaggtcccagagtttggtacaggccaattccaagtcatatgcctagtctgcataatatcccagtgcctgagaccaactatctaggaaatacacccaccatgccattcagctccttgccaccaacagatgaatctataaaatataccatatacaatagtactggcattcagattggagcctacaattatatggagattggtgggacgagttcatcactactagacagcacaaatacgaacttcaaagaagagccagctgctaagtaccaagctatctttgataataccactagtctgacggataaacacctggacccaatcagggaaaatctgggaaagcactggaaaaactgtgcccgtaaactgggcttcacacagtctcagattgatgaaattgaccatgactatgagcgagatggactgaaagaaaaggtttaccagatgctccaaaagtgggtgatgagggaaggcataaagggagccacggtggggaagctggcccaggcgctccaccagtgttccaggatcgaccttctgagcagcttgatttacgtcagccagaactaaccctggatgggctacggcagctgaagtggacgcctcacttagtggataaccccagaaagttggctgcctcagagcattcagaattctgtcctcactgataggggttctgtgtctgcagaaattttgtttcctgtacttcatagctggagaatggggaaagaaatctgcagcaaaggggtctcactctgttgccaggctggtctcaaacttctggactcaagtgatcctcccgcctcggccttccaaagtgctgggatatcaggcactgagccactgcgcccagccaacaatccgctctgaggaaagcgtaagcaggaagacctcttaatggcatagcaccaataaaaaaatgactcctagttgtgtttggaaagggagagaagagatgtctgaggaaggtcatgttctttcagcttatggcatttcctagagttttgttgaagcaagaagaaaaactcagagaatataaaatcaacttttaaaattgtgtgctctcttcttcacgtaggctcctgttaaaaacaaagtgcagtcagattctaagccctgttcagagacttcgtggatcacagctgcagctcaccgccacatcacaggatccgttaacgttaatacccaatactctgtcagccactgtaggctctaagaaccacgtgcagtcttcagcccattaaattatcgattattttttaatgaattgaatttatattgagtcttcaaattaactgaatggatttaaaggggtaccaaggaggggggaaacatcagaatttcccaggcagttgttgcaaggaattggtactaaccgtgactacaacaaaaattcttgattgacttttaaagttatttcctggcattctggtaccttcacccagcctgagtgccctggagagggaacaggaaatgctgatctctacccctgggtgagaccagaacctcagggctgatactgttgagtggcttcctcggtttactctgtgtactgtgaaagtattttcatattttttctgtgtgccagagtgaaaaaggacagcttctgagtgtggtaattgtgcctctagcacccagcctttcaaagcccacctgaaacctgggggtggatgaaagaactagaatagaagactgaagctgggtaggccgctcagtgtccactggcattttgctaaaccgacaaggaaggctgtgtgcttagctctccccagagggagggcgagaagggtgtggtgatggtcaatctggctgtcggaacagattctggtgtcttgggctgataacagtgttgttgattctgattgtgaatcccctcaactctagcagacacatacacacccctgaaatggggctgcagagcaggctgtctcagccttgccactgtcggcatctcggcctgggtaattctgttgtggggactgtcctgttccttgtaggatgtttagtagcatccctgcccccacctactagatgccaggggcactgttctccccagccccccgccccagttgtgacaatagtctctaaacattgtcaaatggtccaaggaaaggggaaaattgccccggttgagaagagcactgctgtaaagtaatgagcctcggctctcctgtctgcacctgtccggttactacttggccaccacgcagccttggctcctacagcccaaaagggagaatggagggaggctccaggctttgctggaggggcctgggtgagttctgtttgctccttgtaccaccatccaaatggtgttatcaaatctcttagattccaaagaggttgaataattaatgttcaaaggcaagagggcaaggcattttttaacactttttaaaataaaaatttataccacaa

SEQ ID NO: 174528 - DNA, 3857 bp, Homo sapiens
  Payload ID: 14270
  Gene Symbol: REEP1
  Gene Name: receptor accessory protein 1
  Uniprot ID: Q9H902
  ENST ID: ENST00000165698
  CDS Start-End: 145-750
aacgccgggcagggcggcgggcgcgctcagtctggcggcggctgccgtgagctgactgacgttccgggaacgccgcagcagcccgcgccgcccgcagcctagccgagccgcgccgcccgggcctcgcccgcccgcctgcccgccatggtgtcatggatcatctccaggctggtggtgcttatatttggcaccctttaccctgcgtattattcctacaaggctgtgaaatcaaaggacattaaggaatatgtcaaatggatgatgtactggattatatttgcacttttcaccacagcagagacattcacagacatcttcctttgttggtttccattctattatgaactaaaaatagcatttgtagcctggctgctgtctccctacacaaaaggctccagcctcctgtacaggaagtttgtacatcccacgctatcttcaaaagaaaaggaaatcgatgattgtctggtccaagcaaaagaccgaagttacgatgcccttgtgcacttcgggaagcggggcttgaacgtggccgccacagcggctgtgatggctgcttccaagggacagggtgccttatcggagagactgcggagcttcagcatgcaggacctcaccaccatcaggggagacggcgcccctgctccctcgggccccccaccaccggggtctgggcgggccagcggcaaacacggccagcctaagatgtccaggagtgcttctgagagcgctagcagctcaggcaccgcctagaatccttcgatctcgcttcaggaagaaaagtacctcatcctcggccaccgaaaccacgtgagtgagatgagccaacagcaccggatccacagaatgtttcttctctgccttaaagagctattcactaataacatagaaatccgcaagctgggtgtgctttgagtgtgcagcctcacaaacatggccttttctctctccccttccacttttaaggatttatttttttcccccttttctttattttgctggggagaggctaaagggaaaggtagtaggggcgggggtggtgacctttaagtcttctgaggttggtaattttccacaattggattgtcattatagacagcagtgtgttttttagaaagataagagaatcacccctatgctgctgagatgtacatttgtaatttatctgttgcatacttagtttttagtcctgtaaatgcaaacacagcattttttacaactttctttgttcttggtacttatactttgaactatgatgtacatatttatggcttttggcttttaatataatggacttgcaagggctgccagaggttctgatatgtaagaaaactgcaaaaacaaatatagacaaatattttgattctagagaacgtctcagatgtgcttataaagcttccaaatacaactccagtaagacatccctttccctgcaggagtgtggtctatattctttagatagttgtttagtcaaaagaccagacaagttacaaactaagagaaacaatatttcacaacacagtaaagtgtgatgagaggtcaggggaacatcccagtaaaagagaagagtcacaggaagctcatctcctccctggattctggattaggagcttctgaatcttttccagggataggcaggtagctcactcttggtgcaatttcttgaggatgggaacatgtagagctgctggaaggagtaattctgtgcttgacaaaggacgatttctcctttatcgtgaccagtgctgccgatttcctgacagaggagcttacactctgagcaccttgttttagcgaactctagcaaaacttgtttagcttagcaaaaacaaacacacaaaaaactgagaactctgctgtttcagatatgccataacatacatctgaaacacatgtgtaacaatcaaaatggtgggctctagaatggttttggagctcgagatcttcatgggttagacttgctggtcagacccaggagcacctgtggctcacaccttctgttcccctcctggcctgtgcagaatgtaaacagcagactcatactcaatgggcactacaggccttatcagacgttttatacaagcctggattgcttagtaggggaataaggcattctctgagggggctttccacttagattgagaattttatttgaaaagaatctggtttaaatggcattgtggtccgaggtagctgctctccccactgagagctgagccgaaatataagaataatatatttgtgcttcgagttggtgtttctttcagtgtaatgcatgcagtggtcacaacccagttactcataatatttggattgtatttgttcgtagatatgcccagaagactagagaattagtgttatataccatatagaacttactgtcagtcaactataaacaggcccaattaaaaactgttccattactacgcaaacacatattagaggcctttgctgatgacacattagctggatcttagccaccccagaaagggtttgatttgaagctgattgttgccagatatgcatattggaatcccatctacccatagttcctctgaaggtgattttgtaatttgcaaaagggtataggaaaatatacctaaaagcgaatttgtggctgagaggataaacagaagctgtttgctcatgttctgtgccccacacccaccaatacctaaatctgttaaggaagacagaaaatgttttctttgtgctcattgagtagttccagacagaagaagaatatactctttaaaatgtatttacctgttagttggaagtacccagaattatcagaaacgaatgcaaaaaaaaaaaaaaaaaaaaaaagcttacacagcttcttagcaatttttttttttttgccgaaacaataaattgcctttagcagcagtttaaaatcctatcgtgaacaacctatattttcgccattttacaatggagagttgtgacaagtacaggttatcaagtttgcacttaactatgccaaaaaaagtttgaagcgctctattctcagacatgctgtattattacttctcattcaagattgaaaaatataaaggtatccaaactctgtcttaatgtaaatgtaactatttttccttcaagtgttgactagggagtcggtttctctcttaaagacactcactgtacaactgaaagcagctgtcatatttctggcaaaatgtgtttacgtatctgacaagttgtacatttgtgtatgaactgacataaaatgtgaaagcctgtaagtgtacatgtagtggtgtggtgttctgtctagaggatacaactgaatgtttttaatttgctgacttacagacacaggctgtttacaaaatgctagctggaaagtctgtaatgttcatgtcataacttttagttaattgccattgagcacctgttctgaggaggtgagatgtggacttgtgcttataaactggagagtttagtcataatccctcctggctttgtgtgaatagcttgctcactttgctggcctttgaaatgtgttctccgtgataagctatccatgtgtttgtgataagagtgcttgtcaaccatgaccatctttgagccttcctagtcctccacctggcacagtatttgaaatggcaaaggatgtgcttcatcctctaacagtgtacactcccagagctgatattctggattttgactgtgcacatttcctctagttcatgtctgtagtccctatagaatgatctgtaataaaatagtatactggactgtgcatcaaagggatgtaaaattacagtattccaaaggttgaagttctgctgttttgttataatgcctgatacacatcttgaataaagtcttaacatttttcttttaaaaaa

SEQ ID NO: 174529 - DNA, 578 bp, Homo sapiens
  Payload ID: 14270
  Gene Symbol: REEP1
  Gene Name: receptor accessory protein 1
  ENST ID: ENST00000453231
  CDS Start-End: 8-578
gtttcttatgcagaaagtgctgagcaacggacagactgaagaggttaggtctggatccaggcttatatttggcaccctttaccctgcgtattattcctacaaggctgtgaaatcaaaggacattaaggaatatgtcaaatggatgatgtactggattatatttgcacttttcaccacagcagagacattcacagacatcttcctttgttggtttccattctattatgaactaaaaatagcatttgtagcctggctgctgtctccctacacaaaaggctccagcctcctgtacaggaagtttgtacatcccacgctatcttcaaaagaaaaggaaatcgatgattgtctggtccaagcaaaagaccgaagttacgatgcccttgtgcacttcgggaagcggggcttgaacgtggccgccacagcggctgtgatggctgcttccaagggacagggtgccttatcggagagactgcggagcttcagcatgcaggacctcaccaccatcaggggagacggcgcccctgctccctcgggccccccaccaccggggtctgggcgggccagcggcaaacacggcc

SEQ ID NO: 174530 - DNA, 546 bp, Homo sapiens
  Payload ID: 14270
  Gene Symbol: REEP1
  Gene Name: receptor accessory protein 1
  ENST ID: ENST00000428491
  CDS Start-End: 126-546
cagtctggcggcggctgccgtgagctgactgacgttccgggaacgccgcagcagcccgcgccgcccgcagcctagccgagccgcgccgcccgggcctcgcccgcccgcctgcccgccatggtgtcatggatcatctccaggctggtggtgtcaaatggatgatgtactggattatatttgcacttttcaccacagcagagacattcacagacatcttcctttgttggtttccattctattatgaactaaaaatagcatttgtagcctggctgctgtctccctacacaaaaggctccagcctcctgtacaggaagtttgtacatcccacgctatcttcaaaagaaaaggaaatcgatgattgtctggtccaagcaaaagaccgaagttacgatgcccttgtgcacttcgggaagcggggcttgaacgtggccgccacagcggctgtgatggctgcttccaagggacagggtgccttatcggagagactgcggagcttcagcatgcaggacctcaccaccatcaggggagacggcgcccctgctccct

SEQ ID NO: 174531 - DNA, 440 bp, Homo sapiens
  Payload ID: 14270
  Gene Symbol: REEP1
  Gene Name: receptor accessory protein 1
  ENST ID: ENST00000437769
  CDS Start-End: 80-440
gggaacgccgcagcagcccgcgccgcccgcagcctagccgagccgcgccgcccgggcctcgcccgcccgcctgcccgccatggtgtcatggatcatctccaggctggtggtgcttatatttggcaccctttaccctgcgtattattcctacaaggctgtgaaatcaaaggacattaaggaatatgtcaaatggatgatgtactggattatatttgcacttttcaccacagcagagacattcacagacatcttcctttgttgggacagggtgccttatcggagagactgcggagcttcagcatgcaggacctcaccaccatcaggggagacggcgcccctgctccctcgggccccccaccaccggggtctgggcgggccagcggcaaacacggccagcctaagatgtccaggagtgcttctgagagcgctagcagctcagg

SEQ ID NO: 174532 - DNA, 3778 bp, Homo sapiens
  Payload ID: 14270
  Gene Symbol: REEP1
  Gene Name: receptor accessory protein 1
  Uniprot ID: Q9H902
  ENST ID: ENST00000535845
  CDS Start-End: 153-677
aacgccgggcagggcggcgggcgcgctcagtctggcggcggctgccgtgagctgactgacgttccgggaacgccgcagcagcccgcgccgcccgcagcctagccgagccgcgccgcccgggcctcgcccgcccgcctgcccgccatggtgtcatggatcatctccaggctggtggtgtcaaatggatgatgtactggattatatttgcacttttcaccacagcagagacattcacagacatcttcctttgttggtttccattctattatgaactaaaaatagcatttgtagcctggctgctgtctccctacacaaaaggctccagcctcctgtacaggaagtttgtacatcccacgctatcttcaaaagaaaaggaaatcgatgattgtctggtccaagcaaaagaccgaagttacgatgcccttgtgcacttcgggaagcggggcttgaacgtggccgccacagcggctgtgatggctgcttccaagggacagggtgccttatcggagagactgcggagcttcagcatgcaggacctcaccaccatcaggggagacggcgcccctgctccctcgggccccccaccaccggggtctgggcgggccagcggcaaacacggccagcctaagatgtccaggagtgcttctgagagcgctagcagctcaggcaccgcctagaatccttcgatctcgcttcaggaagaaaagtacctcatcctcggccaccgaaaccacgtgagtgagatgagccaacagcaccggatccacagaatgtttcttctctgccttaaagagctattcactaataacatagaaatccgcaagctgggtgtgctttgagtgtgcagcctcacaaacatggccttttctctctccccttccacttttaaggatttatttttttcccccttttctttattttgctggggagaggctaaagggaaaggtagtaggggcgggggtggtgacctttaagtcttctgaggttggtaattttccacaattggattgtcattatagacagcagtgtgttttttagaaagataagagaatcacccctatgctgctgagatgtacatttgtaatttatctgttgcatacttagtttttagtcctgtaaatgcaaacacagcattttttacaactttctttgttcttggtacttatactttgaactatgatgtacatatttatggcttttggcttttaatataatggacttgcaagggctgccagaggttctgatatgtaagaaaactgcaaaaacaaatatagacaaatattttgattctagagaacgtctcagatgtgcttataaagcttccaaatacaactccagtaagacatccctttccctgcaggagtgtggtctatattctttagatagttgtttagtcaaaagaccagacaagttacaaactaagagaaacaatatttcacaacacagtaaagtgtgatgagaggtcaggggaacatcccagtaaaagagaagagtcacaggaagctcatctcctccctggattctggattaggagcttctgaatcttttccagggataggcaggtagctcactcttggtgcaatttcttgaggatgggaacatgtagagctgctggaaggagtaattctgtgcttgacaaaggacgatttctcctttatcgtgaccagtgctgccgatttcctgacagaggagcttacactctgagcaccttgttttagcgaactctagcaaaacttgtttagcttagcaaaaacaaacacacaaaaaactgagaactctgctgtttcagatatgccataacatacatctgaaacacatgtgtaacaatcaaaatggtgggctctagaatggttttggagctcgagatcttcatgggttagacttgctggtcagacccaggagcacctgtggctcacaccttctgttcccctcctggcctgtgcagaatgtaaacagcagactcatactcaatgggcactacaggccttatcagacgttttatacaagcctggattgcttagtaggggaataaggcattctctgagggggctttccacttagattgagaattttatttgaaaagaatctggtttaaatggcattgtggtccgaggtagctgctctccccactgagagctgagccgaaatataagaataatatatttgtgcttcgagttggtgtttctttcagtgtaatgcatgcagtggtcacaacccagttactcataatatttggattgtatttgttcgtagatatgcccagaagactagagaattagtgttatataccatatagaacttactgtcagtcaactataaacaggcccaattaaaaactgttccattactacgcaaacacatattagaggcctttgctgatgacacattagctggatcttagccaccccagaaagggtttgatttgaagctgattgttgccagatatgcatattggaatcccatctacccatagttcctctgaaggtgattttgtaatttgcaaaagggtataggaaaatatacctaaaagcgaatttgtggctgagaggataaacagaagctgtttgctcatgttctgtgccccacacccaccaatacctaaatctgttaaggaagacagaaaatgttttctttgtgctcattgagtagttccagacagaagaagaatatactctttaaaatgtatttacctgttagttggaagtacccagaattatcagaaacgaatgcaaaaaaaaaaaaaaaaaaaaaaagcttacacagcttcttagcaatttttttttttttgccgaaacaataaattgcctttagcagcagtttaaaatcctatcgtgaacaacctatattttcgccattttacaatggagagttgtgacaagtacaggttatcaagtttgcacttaactatgccaaaaaaagtttgaagcgctctattctcagacatgctgtattattacttctcattcaagattgaaaaatataaaggtatccaaactctgtcttaatgtaaatgtaactatttttccttcaagtgttgactagggagtcggtttctctcttaaagacactcactgtacaactgaaagcagctgtcatatttctggcaaaatgtgtttacgtatctgacaagttgtacatttgtgtatgaactgacataaaatgtgaaagcctgtaagtgtacatgtagtggtgtggtgttctgtctagaggatacaactgaatgtttttaatttgctgacttacagacacaggctgtttacaaaatgctagctggaaagtctgtaatgttcatgtcataacttttagttaattgccattgagcacctgttctgaggaggtgagatgtggacttgtgcttataaactggagagtttagtcataatccctcctggctttgtgtgaatagcttgctcactttgctggcctttgaaatgtgttctccgtgataagctatccatgtgtttgtgataagagtgcttgtcaaccatgaccatctttgagccttcctagtcctccacctggcacagtatttgaaatggcaaaggatgtgcttcatcctctaacagtgtacactcccagagctgatattctggattttgactgtgcacatttcctctagttcatgtctgtagtccctatagaatgatctgtaataaaatagtatactggactgtgcatcaaagggatgtaaaattacagtattccaaaggttgaagttctgctgttttgttataatgcctgatacacatcttgaataaagtcttaacatttttctttt

SEQ ID NO: 174533 - DNA, 3735 bp, Homo sapiens
  Payload ID: 14270
  Gene Symbol: REEP1
  Gene Name: receptor accessory protein 1
  Uniprot ID: Q9H902
  ENST ID: ENST00000538924
  CDS Start-End: 8-634
gtttcttatgcagaaagtgctgagcaacggacagactgaagaggttaggtctggatccaggcttatatttggcaccctttaccctgcgtattattcctacaaggctgtgaaatcaaaggacattaaggaatatgtcaaatggatgatgtactggattatatttgcacttttcaccacagcagagacattcacagacatcttcctttgttggtttccattctattatgaactaaaaatagcatttgtagcctggctgctgtctccctacacaaaaggctccagcctcctgtacaggaagtttgtacatcccacgctatcttcaaaagaaaaggaaatcgatgattgtctggtccaagcaaaagaccgaagttacgatgcccttgtgcacttcgggaagcggggcttgaacgtggccgccacagcggctgtgatggctgcttccaagggacagggtgccttatcggagagactgcggagcttcagcatgcaggacctcaccaccatcaggggagacggcgcccctgctccctcgggccccccaccaccggggtctgggcgggccagcggcaaacacggccagcctaagatgtccaggagtgcttctgagagcgctagcagctcaggcaccgcctagaatccttcgatctcgcttcaggaagaaaagtacctcatcctcggccaccgaaaccacgtgagtgagatgagccaacagcaccggatccacagaatgtttcttctctgccttaaagagctattcactaataacatagaaatccgcaagctgggtgtgctttgagtgtgcagcctcacaaacatggccttttctctctccccttccacttttaaggatttatttttttcccccttttctttattttgctggggagaggctaaagggaaaggtagtaggggcgggggtggtgacctttaagtcttctgaggttggtaattttccacaattggattgtcattatagacagcagtgtgttttttagaaagataagagaatcacccctatgctgctgagatgtacatttgtaatttatctgttgcatacttagtttttagtcctgtaaatgcaaacacagcattttttacaactttctttgttcttggtacttatactttgaactatgatgtacatatttatggcttttggcttttaatataatggacttgcaagggctgccagaggttctgatatgtaagaaaactgcaaaaacaaatatagacaaatattttgattctagagaacgtctcagatgtgcttataaagcttccaaatacaactccagtaagacatccctttccctgcaggagtgtggtctatattctttagatagttgtttagtcaaaagaccagacaagttacaaactaagagaaacaatatttcacaacacagtaaagtgtgatgagaggtcaggggaacatcccagtaaaagagaagagtcacaggaagctcatctcctccctggattctggattaggagcttctgaatcttttccagggataggcaggtagctcactcttggtgcaatttcttgaggatgggaacatgtagagctgctggaaggagtaattctgtgcttgacaaaggacgatttctcctttatcgtgaccagtgctgccgatttcctgacagaggagcttacactctgagcaccttgttttagcgaactctagcaaaacttgtttagcttagcaaaaacaaacacacaaaaaactgagaactctgctgtttcagatatgccataacatacatctgaaacacatgtgtaacaatcaaaatggtgggctctagaatggttttggagctcgagatcttcatgggttagacttgctggtcagacccaggagcacctgtggctcacaccttctgttcccctcctggcctgtgcagaatgtaaacagcagactcatactcaatgggcactacaggccttatcagacgttttatacaagcctggattgcttagtaggggaataaggcattctctgagggggctttccacttagattgagaattttatttgaaaagaatctggtttaaatggcattgtggtccgaggtagctgctctccccactgagagctgagccgaaatataagaataatatatttgtgcttcgagttggtgtttctttcagtgtaatgcatgcagtggtcacaacccagttactcataatatttggattgtatttgttcgtagatatgcccagaagactagagaattagtgttatataccatatagaacttactgtcagtcaactataaacaggcccaattaaaaactgttccattactacgcaaacacatattagaggcctttgctgatgacacattagctggatcttagccaccccagaaagggtttgatttgaagctgattgttgccagatatgcatattggaatcccatctacccatagttcctctgaaggtgattttgtaatttgcaaaagggtataggaaaatatacctaaaagcgaatttgtggctgagaggataaacagaagctgtttgctcatgttctgtgccccacacccaccaatacctaaatctgttaaggaagacagaaaatgttttctttgtgctcattgagtagttccagacagaagaagaatatactctttaaaatgtatttacctgttagttggaagtacccagaattatcagaaacgaatgcaaaaaaaaaaaaaaaaaaaaaaagcttacacagcttcttagcaatttttttttttttgccgaaacaataaattgcctttagcagcagtttaaaatcctatcgtgaacaacctatattttcgccattttacaatggagagttgtgacaagtacaggttatcaagtttgcacttaactatgccaaaaaaagtttgaagcgctctattctcagacatgctgtattattacttctcattcaagattgaaaaatataaaggtatccaaactctgtcttaatgtaaatgtaactatttttccttcaagtgttgactagggagtcggtttctctcttaaagacactcactgtacaactgaaagcagctgtcatatttctggcaaaatgtgtttacgtatctgacaagttgtacatttgtgtatgaactgacataaaatgtgaaagcctgtaagtgtacatgtagtggtgtggtgttctgtctagaggatacaactgaatgtttttaatttgctgacttacagacacaggctgtttacaaaatgctagctggaaagtctgtaatgttcatgtcataacttttagttaattgccattgagcacctgttctgaggaggtgagatgtggacttgtgcttataaactggagagtttagtcataatccctcctggctttgtgtgaatagcttgctcactttgctggcctttgaaatgtgttctccgtgataagctatccatgtgtttgtgataagagtgcttgtcaaccatgaccatctttgagccttcctagtcctccacctggcacagtatttgaaatggcaaaggatgtgcttcatcctctaacagtgtacactcccagagctgatattctggattttgactgtgcacatttcctctagttcatgtctgtagtccctatagaatgatctgtaataaaatagtatactggactgtgcatcaaagggatgtaaaattacagtattccaaaggttgaagttctgctgttttgttataatgcctgatacacatcttgaataaagtcttaacatttttctttt

SEQ ID NO: 174534 - DNA, 3616 bp, Homo sapiens
  Payload ID: 14270
  Gene Symbol: REEP1
  Gene Name: receptor accessory protein 1
  Uniprot ID: Q9H902
  ENST ID: ENST00000541910
  CDS Start-End: 145-576
aacgccgggcagggcggcgggcgcgctcagtctggcggcggctgccgtgagctgactgacgttccgggaacgccgcagcagcccgcgccgcccgcagcctagccgagccgcgccgcccgggcctcgcccgcccgcctgcccgccatggtgtcatggatcatctccaggctggtggtgcttatatttggcaccctttaccctgcgtattattcctacaaggctgtgaaatcaaaggacattaaggaatatgtcaaatggatgatgtactggattatatttgcacttttcaccacagcagagacattcacagacatcttcctttgttgggacagggtgccttatcggagagactgcggagcttcagcatgcaggacctcaccaccatcaggggagacggcgcccctgctccctcgggccccccaccaccggggtctgggcgggccagcggcaaacacggccagcctaagatgtccaggagtgcttctgagagcgctagcagctcaggcaccgcctagaatccttcgatctcgcttcaggaagaaaagtacctcatcctcggccaccgaaaccacgtgagtgagatgagccaacagcaccggatccacagaatgtttcttctctgccttaaagagctattcactaataacatagaaatccgcaagctgggtgtgctttgagtgtgcagcctcacaaacatggccttttctctctccccttccacttttaaggatttatttttttcccccttttctttattttgctggggagaggctaaagggaaaggtagtaggggcgggggtggtgacctttaagtcttctgaggttggtaattttccacaattggattgtcattatagacagcagtgtgttttttagaaagataagagaatcacccctatgctgctgagatgtacatttgtaatttatctgttgcatacttagtttttagtcctgtaaatgcaaacacagcattttttacaactttctttgttcttggtacttatactttgaactatgatgtacatatttatggcttttggcttttaatataatggacttgcaagggctgccagaggttctgatatgtaagaaaactgcaaaaacaaatatagacaaatattttgattctagagaacgtctcagatgtgcttataaagcttccaaatacaactccagtaagacatccctttccctgcaggagtgtggtctatattctttagatagttgtttagtcaaaagaccagacaagttacaaactaagagaaacaatatttcacaacacagtaaagtgtgatgagaggtcaggggaacatcccagtaaaagagaagagtcacaggaagctcatctcctccctggattctggattaggagcttctgaatcttttccagggataggcaggtagctcactcttggtgcaatttcttgaggatgggaacatgtagagctgctggaaggagtaattctgtgcttgacaaaggacgatttctcctttatcgtgaccagtgctgccgatttcctgacagaggagcttacactctgagcaccttgttttagcgaactctagcaaaacttgtttagcttagcaaaaacaaacacacaaaaaactgagaactctgctgtttcagatatgccataacatacatctgaaacacatgtgtaacaatcaaaatggtgggctctagaatggttttggagctcgagatcttcatgggttagacttgctggtcagacccaggagcacctgtggctcacaccttctgttcccctcctggcctgtgcagaatgtaaacagcagactcatactcaatgggcactacaggccttatcagacgttttatacaagcctggattgcttagtaggggaataaggcattctctgagggggctttccacttagattgagaattttatttgaaaagaatctggtttaaatggcattgtggtccgaggtagctgctctccccactgagagctgagccgaaatataagaataatatatttgtgcttcgagttggtgtttctttcagtgtaatgcatgcagtggtcacaacccagttactcataatatttggattgtatttgttcgtagatatgcccagaagactagagaattagtgttatataccatatagaacttactgtcagtcaactataaacaggcccaattaaaaactgttccattactacgcaaacacatattagaggcctttgctgatgacacattagctggatcttagccaccccagaaagggtttgatttgaagctgattgttgccagatatgcatattggaatcccatctacccatagttcctctgaaggtgattttgtaatttgcaaaagggtataggaaaatatacctaaaagcgaatttgtggctgagaggataaacagaagctgtttgctcatgttctgtgccccacacccaccaatacctaaatctgttaaggaagacagaaaatgttttctttgtgctcattgagtagttccagacagaagaagaatatactctttaaaatgtatttacctgttagttggaagtacccagaattatcagaaacgaatgcaaaaaaaaaaaaaaaaaaaaaaagcttacacagcttcttagcaatttttttttttttgccgaaacaataaattgcctttagcagcagtttaaaatcctatcgtgaacaacctatattttcgccattttacaatggagagttgtgacaagtacaggttatcaagtttgcacttaactatgccaaaaaaagtttgaagcgctctattctcagacatgctgtattattacttctcattcaagattgaaaaatataaaggtatccaaactctgtcttaatgtaaatgtaactatttttccttcaagtgttgactagggagtcggtttctctcttaaagacactcactgtacaactgaaagcagctgtcatatttctggcaaaatgtgtttacgtatctgacaagttgtacatttgtgtatgaactgacataaaatgtgaaagcctgtaagtgtacatgtagtggtgtggtgttctgtctagaggatacaactgaatgtttttaatttgctgacttacagacacaggctgtttacaaaatgctagctggaaagtctgtaatgttcatgtcataacttttagttaattgccattgagcacctgttctgaggaggtgagatgtggacttgtgcttataaactggagagtttagtcataatccctcctggctttgtgtgaatagcttgctcactttgctggcctttgaaatgtgttctccgtgataagctatccatgtgtttgtgataagagtgcttgtcaaccatgaccatctttgagccttcctagtcctccacctggcacagtatttgaaatggcaaaggatgtgcttcatcctctaacagtgtacactcccagagctgatattctggattttgactgtgcacatttcctctagttcatgtctgtagtccctatagaatgatctgtaataaaatagtatactggactgtgcatcaaagggatgtaaaattacagtattccaaaggttgaagttctgctgttttgttataatgcctgatacacatcttgaataaagtcttaacatttttctttt

SEQ ID NO: 174535 - DNA, 958 bp, Homo sapiens
  Payload ID: 14270
  Gene Symbol: REEP1
  Gene Name: receptor accessory protein 1
  ENST ID: ENST00000489855
  CDS Start-End: 1-443
attcctacaaggctgtgaaatcaaaggacattaaggaatatgtcaaatggatgatgtactggattatatttgcacttttcaccacagcagagacattcacagacatcttcctttgttggtttccattctattatgaactaaaaatagcatttgtagcctggctgctgtctccctacacaaaaggctccagcctcctgtacaggaagtttgtacatcccacgctatcttcaaaagaaaaggaaatcgatgattgtctggtccaagcaaaagaccgaagttacgatgcccttgtgcacttcgggaagcggggcttgaacgtggccgccacagcggctgtgatggctgcttccaaggtactgtgctggaagtaccacaactacatgagtctcagtccctctagtgtgccctgctcatcacctgtgcgaccacacagaacaggctaaggaccaatcagtggtttttcatcttttaggggtccttttgaaaatctgatggaaaaaaatgctgaatcttgccccagaaaattctcaccccccaacacacatgcccacatacttgcaatatcaagaggttcccagagcccctgaagctcatctgtgcgtcccaggttaagaatttctaacttatccaaccccactggaaacaagaaaataatagaatttctaacttacttggcacttaggcctgggagaaacagaagagggcaggggagagagggagagagtgcttctctgcagtttcctagggtgcactgggagagtcgcctaaatgcagtggacaggtggagagactacctgagcaagcgggtggactcactcacgatcatgtggcccagcagatccaggggaaggaacccaggtcctagaataagttgagtggtccagacatggaggtcagtaatgtgccaagccataacaactgaagtggaggaggtttgaaataaacaccagtctgtggg

SEQ ID NO: 174536 - DNA, 2099 bp, Homo sapiens
  Payload ID: 14271
  Gene Symbol: REEP2
  Gene Name: receptor accessory protein 2
  Uniprot ID: Q9BRK0
  ENST ID: ENST00000254901
  CDS Start-End: 123-881
gctgctgcagcggctgctgctgctactgcggctcctgctgccgccgccgccgccgctcggcctcaggcagctgcatcctcggccgggccgggtccccgccccgcgccgcgcccggccccgccatggtgtcctggatcatctctcgcctggtggtgctcatctttggcaccctgtacccagcctattcttcctacaaggccgtgaagacaaaaaacgtgaaggaatatgtgaaatggatgatgtactggatcgtctttgccttcttcaccacggccgagacgctcacggatatagtgctctcctggttccccttctactttgaactgaagatcgccttcgtgatatggctgctgtccccttacaccaagggctccagcgtgctctaccgcaagttcgtgcacccaacgctgtccaacaaggagaaggagatcgacgagtacatcacgcaggcccgagacaagagctatgagaccatgatgagggtgggcaagaggggcctgaaccttgccgccaatgctgcagtcacagctgccgccaagggggtgctgtcagagaagctccgcagcttcagcatgcaggacctgaccctgatccgggacgaggacgcactgcccctgcagaggcctgacggccgcctccgacccagccctggcagcctcctggacaccatcgaggacttaggagatgaccctgccctgagtctaaggtccagcacaaacccggcagattcccggacagaggcttctgaggatgacatgggagacaaagctcccaagagggccaaacccatcaaaaaagcgcccaaagctgagccactggcttccaagacactgaagacccggcccaagaagaagacctctggcgggggcgactcagcttgagcccctccacccccgcaggctgcagagcaaggatgaagcctcaggaggggcctcagacccagcccctgctccacactgtgccagtagcctaggtgtctcaggcccctgggccccgcagatggccatttccggtgcctgcccagtggccactcttctggaaggggcttggaaaagaggaaggaggcccagctgtgggggttgagggtagagggtggaccagaggctgaggactgagccacccaaggaggtggggactgctcggcctccaccgctgttccgctgcagccccgccctgccccacccacccagtgccttgctgaagcccatagcaatccgcttctcagaggtcctgtcgtgtttccactgctcgccttggtttgggagcagggagggggaagtcctagcccagatggaccaaggacgggcctgaaggcacatgggggaaagggagcacacggggaggacgttggggaccctgggtggggcctccaggtgcagctgtggatggaagacagggattggcctgtgcttcagcgaccaggatggccaggccagagctgcagctgggggctcttttcctggtcattgggtggggctgagtgccacatgttcccacattaaaaaggggggtccagggctgtgtgagtgtgtctttctgggtctagggctcggggtagtttgggtcaaggactgtccctccagcagtcgcctcctcccaccctgagccccacagtcatctggccctttccctgctcaaccctccatcctaggctctgagcctcagaggacccagcccatgagagaacggggatctggggggcctctcacctgctcctatgaccttgctcccttttaggtcaccccattgccaccgtgcccctgggctggactcccgtgctcctcagggcccacccctgctctgtctggtacaggcccctgctgagtgggcccctctcctctgcccctggggtccatcccctcttgcccagggtccccatcctgtaccaagcagactgggccctaagacccctggcagaacccagcctctgctcacacccgccccagcttctgccacggcttcagtcagggccaggaggaacacgtgaaggagaaagagaaatgcaggagccgcggggctcccggttccttgggaagagggtgcccattggacctttggcactggatgagccaataaaccaaactctggcacctcattta

SEQ ID NO: 174537 - DNA, 2170 bp, Homo sapiens
  Payload ID: 14271
  Gene Symbol: REEP2
  Gene Name: receptor accessory protein 2
  Uniprot ID: Q9BRK0
  ENST ID: ENST00000378339
  CDS Start-End: 193-957
cacggcccgccgctgcggcagggacctcccctttaacggcggcgctgggcgctccgctgcccccgcggcggctgctgcagcggctgctgctgctactgcggctcctgctgccgccgccgccgccgctcggcctcaggcagctgcatcctcggccgggccgggtccccgccccgcgccgcgcccggccccgccatggtgtcctggatcatctctcgcctggtggtgctcatctttggcaccctgtacccagcctattcttcctacaaggccgtgaagacaaaaaacgtgaaggaatatgtgaaatggatgatgtactggatcgtctttgccttcttcaccacggccgagacgctcacggatatagtgctctcctggttccccttctactttgaactgaagatcgccttcgtgatatggctgctgtccccttacaccaagggctccagcgtgctctaccgcaagttcgtgcacccaacgctgtccaacaaggagaaggagatcgacgagtacatcacgcaggcccgagacaagagctatgagaccatgatgagggtgggcaagaggggcctgaaccttgccgccaatgctgcagtcacagctgccgccaagggccagggggtgctgtcagagaagctccgcagcttcagcatgcaggacctgaccctgatccgggacgaggacgcactgcccctgcagaggcctgacggccgcctccgacccagccctggcagcctcctggacaccatcgaggacttaggagatgaccctgccctgagtctaaggtccagcacaaacccggcagattcccggacagaggcttctgaggatgacatgggagacaaagctcccaagagggccaaacccatcaaaaaagcgcccaaagctgagccactggcttccaagacactgaagacccggcccaagaagaagacctctggcgggggcgactcagcttgagcccctccacccccgcaggctgcagagcaaggatgaagcctcaggaggggcctcagacccagcccctgctccacactgtgccagtagcctaggtgtctcaggcccctgggccccgcagatggccatttccggtgcctgcccagtggccactcttctggaaggggcttggaaaagaggaaggaggcccagctgtgggggttgagggtagagggtggaccagaggctgaggactgagccacccaaggaggtggggactgctcggcctccaccgctgttccgctgcagccccgccctgccccacccacccagtgccttgctgaagcccatagcaatccgcttctcagaggtcctgtcgtgtttccactgctcgccttggtttgggagcagggagggggaagtcctagcccagatggaccaaggacgggcctgaaggcacatgggggaaagggagcacacggggaggacgttggggaccctgggtggggcctccaggtgcagctgtggatggaagacagggattggcctgtgcttcagcgaccaggatggccaggccagagctgcagctgggggctcttttcctggtcattgggtggggctgagtgccacatgttcccacattaaaaaggggggtccagggctgtgtgagtgtgtctttctgggtctagggctcggggtagtttgggtcaaggactgtccctccagcagtcgcctcctcccaccctgagccccacagtcatctggccctttccctgctcaaccctccatcctaggctctgagcctcagaggacccagcccatgagagaacggggatctggggggcctctcacctgctcctatgaccttgctcccttttaggtcaccccattgccaccgtgcccctgggctggactcccgtgctcctcagggcccacccctgctctgtctggtacaggcccctgctgagtgggcccctctcctctgcccctggggtccatcccctcttgcccagggtccccatcctgtaccaagcagactgggccctaagacccctggcagaacccagcctctgctcacacccgccccagcttctgccacggcttcagtcagggccaggaggaacacgtgaaggagaaagagaaatgcaggagccgcggggctcccggttccttgggaagagggtgcccattggacctttggcactggatgagccaataaaccaaactctggcacctc

SEQ ID NO: 174538 - DNA, 1021 bp, Homo sapiens
  Payload ID: 14271
  Gene Symbol: REEP2
  Gene Name: receptor accessory protein 2
  ENST ID: ENST00000506158
  CDS Start-End: 297-941
gctgctgctactgcggctcctgctgccgccgccgccgccgctcggcctcaggcagctgcatcctcggccgggccgggtccccgccccgcgccgcgcccggccccgccatggtgtcctggatcatctctcgcctggtggtgggctgatgcggagctgggagggagaggccactgcccttggctgagaggcccagtaaccatgcctgcctccctaggctcatctttggcaccctgtacccagcctattcttcctacaaggccgtgaagacaaaaaacgtgaaggaatatgtgaaatggatgatgtactggatcgtctttgccttcttcaccacggccgagacgctcacggatatagtgctctcctggttccccttctactttgaactgaagatcgccttcgtgatatggctgctgtccccttacaccaagggctccagcgtgctctaccgcaagttcgtgcacccaacgctgtccaacaaggagaaggagatcgacgagtacatcacgcaggcccgagacaagagctatgagaccatgatgagggtgggcaagaggggcctgaaccttgccgccaatgctgcagtcacagctgccgccaagggggtgctgtcagagaagctccgcagcttcagcatgcaggacctgaccctgatccgggacgaggacgcactgcccctgcagaggcctgacggccgcctccgacccagccctggcagcctcctggacaccatcgaggacttaggagatgaccctgccctgagtctaaggtccagcacaaacccggcagattcccggacagaggcttctgaggatgacatgggagacaaagctcccaagagggccaaacccatcaaaaaagcgcccaaagctgagccactggcttccaagacactgaagacccggcccaagaagaagacctctggcgggggcgactcagcttgagcccctccacccccgcaggctgcagagcaaggatgaagcctcaggaggggcctcagacccagcccctgctccacactgtg

SEQ ID NO: 174539 - DNA, 560 bp, Homo sapiens
  Payload ID: 14271
  Gene Symbol: REEP2
  Gene Name: receptor accessory protein 2
  ENST ID: ENST00000507511
  CDS Start-End: 99-221
actgcggctcctgctgccgccgccgccgccgctcggcctcaggcagctgcatcctcggccgggccgggtccccgccccgcgccgcgcccggccccgccatggtgtcctggatcatctctcgcctggtggtgctcatctttggcaccctgtacccagcctattcttcctacaaggccgtgaagacaaaaaacgtgaaggaatatgttccccttctactttgaactgaagatcgccttcgtgatatggctgctgtccccttacaccaagggctccagcgtgctctaccgcaagttcgtgcacccaacgctgtccaacaaggagaaggagatcgacgagtacatcacgcaggcccgagacaagagctatgagaccatgatgagggtgggcaagaggggcctgaaccttgccgccaatgctgcagtcacagctgccgccaagggccagggggtgctgtcagagaagctccgcagcttcagcatgcaggacctgaccctgatccgggacgaggacgcactgcccctgcagaggcctgacggccgcctccgacccagccctggcag

SEQ ID NO: 174540 - DNA, 572 bp, Homo sapiens
  Payload ID: 14271
  Gene Symbol: REEP2
  Gene Name: receptor accessory protein 2
  ENST ID: ENST00000512126
  CDS Start-End: 1-572
agctcagagccatcaccaggccccttggtctctcccttccactcactgtcaggagactggggacgagggcatatgcccttaggccccctagggaggaagtctgggtatcgggaagcagaaatgctcggaggacaaagtgtgagaggctcatctttggcaccctgtacccagcctattcttcctacaaggccgtgaagacaaaaaacgtgaaggaatatgtgaaatggatgatgtactggatcgtctttgccttcttcaccacggccgagacgctcacggatatagtgctctcctggttccccttctactttgaactgaagatcgccttcgtgatatggctgctgtccccttacaccaagggctccagcgtgctctaccgcaagttcgtgcacccaacgctgtccaacaaggagaaggagatcgacgagtacatcacgcaggcccgagacaagagctatgagaccatgatgagggtgggcaagaggggcctgaaccttgccgccaatgctgcagtcacagctgccgccaagggccagggggtgctgtcagagaagctccgcagcttcagcatg

SEQ ID NO: 174541 - DNA, 1944 bp, Homo sapiens
  Payload ID: 14271
  Gene Symbol: REEP2
  Gene Name: receptor accessory protein 2
  ENST ID: ENST00000613650
  CDS Start-End: 83-538
gctcatctttggcaccctgtacccagcctattcttcctacaaggccgtgaagacaaaaaacgtgaaggaatatgtgaaatggatgatgtactggatcgtctttgccttcttcaccacggccgagacgctcacggatatagtgctctcctggttccccttctactttgaactgaagatcgccttcgtgatatggctgctgtccccttacaccaagggctccagcgtgctctaccgcaagttcgtgcacccaacgctgtccaacaaggagaaggagatcgacgagtacatcacgcaggcccgagacaagagctatgagaccatgatgagggtgggcaagaggggcctgaaccttgccgccaatgctgcagtcacagctgccgccaagggccagggggtgctgtcagagaagctccgcagcttcagcatgcaggacctgaccctgatccgggacgaggacgcactgcccctgcagaggcctgacggccctccgacccagccctggcagcctcctggacaccatcgaggacttaggagatgaccctgccctgagtctaaggtccagcacaaacccggcagattcccggacagaggcttctgaggatgacatgggagacaaagctcccaagagggccaaacccatcaaaaaagcgcccaaagctgagccactggcttccaagacactgaagacccggcccaagaagaagacctctggcgggggcgactcagcttgagcccctccacccccgcaggctgcagagcaaggatgaagcctcaggaggggcctcagacccagcccctgctccacactgtgccagtagcctaggtgtctcaggcccctgggccccgcagatggccatttccggtgcctgcccagtggccactcttctggaaggggcttggaaaagaggaaggaggcccagctgtgggggttgagggtagagggtggaccagaggctgaggactgagccacccaaggaggtggggactgctcggcctccaccgctgttccgctgcagccccgccctgccccacccacccagtgccttgctgaagcccatagcaatccgcttctcagaggtcctgtcgtgtttccactgctcgccttggtttgggagcagggagggggaagtcctagcccagatggaccaaggacgggcctgaaggcacatgggggaaagggagcacacggggaggacgttggggaccctgggtggggcctccaggtgcagctgtggatggaagacagggattggcctgtgcttcagcgaccaggatggccaggccagagctgcagctgggggctcttttcctggtcattgggtggggctgagtgccacatgttcccacattaaaaaggggggtccagggctgtgtgagtgtgtctttctgggtctagggctcggggtagtttgggtcaaggactgtccctccagcagtcgcctcctcccaccctgagccccacagtcatctggccctttccctgctcaaccctccatcctaggctctgagcctcagaggacccagcccatgagagaacggggatctggggggcctctcacctgctcctatgaccttgctcccttttaggtcaccccattgccaccgtgcccctgggctggactcccgtgctcctcagggcccacccctgctctgtctggtacaggcccctgctgagtgggcccctctcctctgcccctggggtccatcccctcttgcccagggtccccatcctgtaccaagcagactgggccctaagacccctggcagaacccagcctctgctcacacccgccccagcttctgccacggcttcagtcagggccaggaggaacacgtgaaggagaaagagaaatgcaggagccgcggggctcccggttccttgggaagagggtgcccattggacctttggcactggatgagccaataaaccaaactctggcacctc

SEQ ID NO: 174542 - DNA, 5205 bp, Homo sapiens
  Payload ID: 14272
  Gene Symbol: REEP3
  Gene Name: receptor accessory protein 3
  Uniprot ID: Q6NUK4
  ENST ID: ENST00000373758
  CDS Start-End: 184-951
gggggaccgacctctgcgcagcccaggccgccgcgcgcacacaccgggcccggctcctgagggcgccagcgcggccccggggagcgcgaggagccggcgaagcgcgcggcctgccgttggcggcctggtccgcagcgccctgcgcccacccgccccggacgtggggcccaagcccccgtgaagatggtgtcctggatgatctccagagccgtggtgctggtgtttggaatgctttatcctgcatattattcatacaaagctgtgaaaacaaaaaacgtgaaggaatatgttcgatggatgatgtactggattgtttttgctctctatactgtgattgaaacagtagccgatcaaacagttgcttggtttcccctgtactatgagctgaagattgcttttgtcatatggctgctttctccctataccaaaggagcaagtttaatatatagaaaattccttcatccacttctttcttcaaaggaaagggagattgatgattatattgtacaagcaaaggaacgaggctatgaaaccatggtaaactttggacggcaaggtttaaaccttgcagctactgctgctgttactgcagcagtaaagagccaaggagcaataactgaacgtttaagaagcttcagtatgcatgatttaacaactatccaaggtgatgagcctgtgggacaaagaccataccaacctctaccagaagcaaaaaagaaaagtaaaccagcccccagtgaatcagcaggttatggaattccactgaaagacggagatgagaaaacagatgaagaagcagaggggccatattcagataatgagatgttaacacacaaagggcttcgaagatcgcaaagcatgaaatctgtgaaaaccaccaaaggccgcaaagaggtgcggtacgggtcactaaaatacaaagtgaagaaacgaccacaagtgtatttttagtcatctacacgtcaaatatcccaagacagattatgctaaatacatcgacttcatcttctaacatgatatattcaggatttacacattaaaatgattatttaaattgtggcagtgatggggtttactttcatgaatttaaattgtttttatttctgtaacaattgcttccaaatattgactactaaaggcagttctgcaagatgtactaaatatgtatattagaaattatagaaaatcatgttgtccgttttcaaattcatcaacagcctagagtgcctgagatataagatgaaacacaaatccacagtatacttgaaaggagcctttttacggttcaggataaatcagcctttgtgatgtactgtgtttacctccttttgtgttgtatctggtaattaaataggcctcagattcagcagtgacataacaaggacataatgtaagataataaagtaggttttatatattctttaaatttttacttatataatactttctagtttttccaccatcagctgaaagtttttgaaacaaatatttgaaaaccaggtatccacacatagcacttttattcctgactagttttgcacacttgaaaattgtttacttattttacaactgttttactgatgctatctttattgtttttgccgtattctgacatgtcaaatctatgccttgaattatatcatctcttttcctgtgggtttcatttgttaaattcattggattttaataatataaaagtatagctaattgttcagttttaactatttttaattatcttcttaacaaataagaagttgctttaaacattaaccaattttctatatttagctatacagagtaattgaacttaacatgtttttgtcaacaccaattacattttcagcttttaaaaatggtagcttttgtgaaatagaatcagtgaccagtatagcacttagatcccttctaactcatataatttttctcagccaatccattcacaagcttggcattgacatgtgctgctagtttataaactggcattgacgaaaatcatttgaatctcttctggctgagataatttgccaatgcaaaatacagttgtcattaatcctgcacattagaaattattagaaacatattactttttaactttaaatctcaaagagattttgagttattgaattcttaaggctttcttagcttgaactgataactatgcattatgaaccctaagtcaatatatttttggtggttttagtgatcagtaatcaaatttgtacttattatgcttgttcaggtaatttacttgactgttctatttgtttgtccaaaagataaaatgatgagagagattcgagaggtctttgatctgtctcccttttaagaaatgaagccagctggtaatgtatattcaggacttcctcagagtattggccaagaacataatgtttacacaggagtaccttggtataatgcatacattgtctcatgatactagtcataaaatattttatggattatttcacattcttcatatataacaagtaaaattaattcagttttcttctcccaacgtttaattctgaataactctatctactttaccctaatttttagcctcttaatttctggaaggactctaatttctattccaaatttctatgaattctaattgtaaattatcggaacagagttttatttatatgacctggtactagacttcttaatataactgttacactgtccttgtctttcctactcaaagacagtatcatctgaagttgcctaataaggtcatgtgagtcaagaactttatctgtgggagctgatttgcaccattttaccttttttttttttttttttttgagacggagtcttgctctgtcaccaggctggagtgcagtggcgcgatctcggctcactacaacctctgcctcccgggttcgagcgattctcctgcctcggcctcccgagtaactgggtctacaggcccgtgctaccacgcccagctaatttttgtctttttagtagagacagggtttaaccatgttgcccaggatggtctccatctcttgacctcgtgatccgcccgcctcggcctcccaaacttctgggattacaggcgtgagccaccgcacccagccaccattttatctctctaaagtctggtcccagtattaaacctattctttagtaaactcatattactgttctaaattgaagaaattatttattactctgtacttctagactcaaaattctttatcaaagatagtctcaaagaggtagtacaagtcctgtttaactgcactttttcacattcacagtgcttcctctgatatctttccttacatcattatacactgttgatatcattttactcttctttctcttctacatttcttaaattttggttcttttcctgtacatgtgttttagcggggcccttttctttgaactttgtctaattagcctgtacatttttgtttcttttaaggtagaacagatctttttttgtttctccttttaagtctactggttttaaaagaggtaaatgtatccatagaccacagtgccttgctttttcctctgccagcacatggagcacgggattagatgcacaaacctatttagggaactattttggtagatgtttgagtttatacagaaattgcagctggtattttattttgctgtacatttactcaacttgtccattagtatttaactatttccagagtttgtttaggagtaagaattgacccattcgttagtttaccatattttttcctggtataaaaaggagccagaaataagccttattgctaaataattaattatgtaagcccacctaggtcctgcataagatccccctcacatacttcacaatatatatgtgtgtgtgtgtgtgtgtgtgtgtgtgtgtgtgtgtgtgtgtatttggctaaaaaattatactgccaaaattactgattataaatacttgactacactgattgatgggacaaaatgattaaagtattttcagggatcttattccatatgtcaccaccaaagatttctacagtgttataaagtatataaatattccaaatttctgtggttaaatatttttttcttttttttccttttttagaataacacagtctgtgctttccaaaaatgcttgaacttttatgttgttaagaaatatataatgatatcttacattaagcatgagtctaatttgtattaattgggatggactaaattttcatttgattatcaggaaaattaaggagttatatatttaaaagcaattttctgtgttttcttctttgtaagttgactcatttgtgaagcaattaggcaaattttgagaagatcattgttattgtggtttgcagtatatatttcttagtaaatatcacttaagattaaatttttcagaaagaaaattatagcttttttcccaaaatatttttaagatttaatctttttgtagtatgctacagatttaattatattaactcttttttaagacattgaccatgacttaacattttgccttctaacaccttttaaatctatgtactttaatagttaagagaaaataagtttgcagatttttaataatctgtttgtaaaaggctatctctaagcctagtatgtgggtaattttacaggtgtgttttttgataactttaatataaaataaactcattttatttgtggcaattcgcgtttctttttttatgccagagtacatatgttggattccatgaattggtattacttattattatgtgttgattaaatatatgcacacacttaggattacagatcacagagcaaattatgaaaatcataaacattctggtatggtcatccataggattatgaaaaagaaatactgaattgttaaatttggatgttagaaaggaaagataggaaaaacaatgagtacagaaatcctcaccatcaatttggatgggttagctgtctcaggcataaaatgtaacacaaaattcagatttatgtatcctggaaatgttctggggttccatctgttttaaagttagacgtctgtctgcctcacatttaagctttagagagaaatcctatgttttaagaagtttctttgtgttacttcattatgacacataatgcgtgttaaggtctttctagatagcattttaaatggaattattttcattttcattatgaggtatatacttgtaatgatctaaagaggttagaaatataaataaaaattcaaaagaa

SEQ ID NO: 174543 - DNA, 560 bp, Homo sapiens
  Payload ID: 14272
  Gene Symbol: REEP3
  Gene Name: receptor accessory protein 3
  ENST ID: ENST00000634963
  CDS Start-End: 1-255
aagattgcttttgtcatatggctgctttctccctataccaaaggagcaagtttaatatatagaaaattccttcatccacttctttcttcaaaggaaagggagattgatgattatattgtacaagcaaaggaacgaggctatgaaaccatggtaaactttggacggcaaggtttaaaccttgcagctactgctgctgttactgcagcagtaaaggatttctggcttacttctgcacctctacttcaatcaatttgagagccaaggagcaataactgaacgtttaagaagcttcagtatgcatgatttaacaactatccaaggtgatgagcctgtgggacaaagaccataccaacctctaccagaagcaaaaaagaaaagtaaaccagcccccagtgaatcagcaggttatggaattccactgaaagacggagatgagaaaacagatgaagaagcagaggggccatattcagataatgagatgttaacacacaaagggcttcgaagatcgcaaagcatgaaatctgtgaaaaccaccaaaggccgcaaagaggtgcggtacg

SEQ ID NO: 174544 - DNA, 1710 bp, Homo sapiens
  Payload ID: 14273
  Gene Symbol: REEP4
  Gene Name: receptor accessory protein 4
  Uniprot ID: Q9H6H4
  ENST ID: ENST00000306306
  CDS Start-End: 470-1243
acactgcgcctgcgtggcaagccggagccctggggttgggcagcactcggttccgtgcaactttcaagtgagttgcgaactccgccctgtaggccggtgctggtggcccggcgcgctggaaccgcggcgacccgctccagcgcgggaccagcagcaagggccgagcgccaggttctccgcggcagaaagggcgggtgggagctgtaactgccccggccgcggggcgcgcccgctcccaagtcggcttcctccccgccggggccgctttgcctcgggtctccccattctccaggtcccctgaactgcacagtcggaggccgtgggcggcgggctctgcctccgccgagggacagccggatcgcccctctgcttcccgcaactgccctgatcaccccccgtcccagcccttgagtgaacgtccttctgagcggcttcctggggtcctccccacgtcccaaaggccggcaagatggtgtcctggatgatctgtcgcctggtggtgctggtgtttgggatgctgtgtccagcttatgcttcctataaggctgtgaagaccaagaacattcgtgaatatgtgcggtggatgatgtactggattgtttttgcactcttcatggcagcagagatcgttacagacatttttatctcctggttccctttctactatgagatcaagatggccttcgtgctgtggctgctctcaccctacaccaagggcgccagcctgctttaccgcaagtttgtccacccgtccctgtcccgccatgagaaggagatcgacgcgtacatcgtgcaggccaaggagcgcagctacgagaccgtgctcagcttcgggaagcggggcctcaacattgccgcctccgctgctgtgcaggctgccaccaagagtcagggggcgctggccggcaggctgcggagcttctccatgcaggacctgcgctccatctctgacgcacctgcccctgcctaccatgaccccctctacctggaggaccaggtgtcccaccggaggccacccattgggtaccgggccgggggcctgcaggacagcgacaccgaggatgagtgttggtcagatactgaggcagtcccccgggcgccagcccggccccgagagaagcccctaatccgcagccagagcctgcgtgtggtcaagaggaagccaccggtgcgggagggcacctcgcgctccctgaaggttcggacgaggaaaaagactgtgccctcagacgtggacagctagggtctgctgcatctgcccccttcttacctcgtgccctgcagggctccagggctatttggagggaccttgggctgcacatctggcctgcctgcaccagctgcctgggccccaccctcctgactcctgctgatggttaagggccgggagcagatgctgccaaggccacatgcagggatgcacccacaatgtaccaaagcaggctgggcccagggttctatttattgccttgctctgccctctcccttccccggttgtgggacaagagccctccctgaacccctgcaaccctccctgaacccctgcaaatgaaaccaaacgtccacctgggtgtgttcattccttcctgtccttcaaagtacttgatagcctttcataaggcctggcacatgtgtcctggttgtgtgtgtgtgtgttggtgagtgaggtcaggtttgcgagtgttttgataaataaatacataaaggggc

SEQ ID NO: 174545 - DNA, 1476 bp, Homo sapiens
  Payload ID: 14273
  Gene Symbol: REEP4
  Gene Name: receptor accessory protein 4
  Uniprot ID: Q9H6H4
  ENST ID: ENST00000334530
  CDS Start-End: 372-893
gctggtggcccggcgcgctggaaccgcggcgacccgctccagcgcgggaccagcagcaagggccgagcgccaggttctccgcggcagaaagggcgggtgggagctgtaactgccccggccgcggggcgcgcccgctcccaagtcggcttcctccccgccggggccgctttgcctcgggtctccccattctccaggtcccctgaactgcacagtcggaggccgtgggcggcgggctctgcctccgccgagggacagccggatcgcccctctgcttcccgcaactgccctgatcaccccccgtcccagcccttgagtgaacgtccttctgagcggcttcctggggtcctccccacgtcccaaaggccggcaagatggtgtcctggatgatctgtcgcctggtggtgctggtgtttgggatgctgtgtccagcttatgcttcctataaggctgtgaagaccaagaacattcgtgaatatgtgcggtggatgatgtactggattgtttttgcactcttcatggcagcagagatcgttacagacatttttatctcctggttccctttctactatgagatcaagatggccttcgtgctgtggctgctctcaccctacaccaagggcgccagcctgctttaccgcaagtttgtccacccgtccctgtcccgccatgagaaggagatcgacgcgtacatcgtgcaggccaaggagcgcagctacgagaccgtgctcagcttcgggaagcggggcctcaacattgccgcctccgctgctgtgcaggctgccaccaagggtaccgggccgggggcctgcaggacagcgacaccgaggatgagtgttggtcagatactgaggcagtcccccgggcgccagcccggccccgagagaagcccctaatccgcagccagagcctgcgtgtggtcaagaggaagccaccggtgcgggagggcacctcgcgctccctgaaggttcggacgaggaaaaagactgtgccctcagacgtggacagctagggtctgctgcatctgcccccttcttacctcgtgccctgcagggctccagggctatttggagggaccttgggctgcacatctggcctgcctgcaccagctgcctgggccccaccctcctgactcctgctgatggttaagggccgggagcagatgctgccaaggccacatgcagggatgcacccacaatgtaccaaagcaggctgggcccagggttctatttattgccttgctctgccctctcccttccccggttgtgggacaagagccctccctgaacccctgcaaccctccctgaacccctgcaaatgaaaccaaacgtccacctgggtgtgttcattccttcctgtccttcaaagtacttgatagcctttcataaggcctggcacatgtgtcctggttgtgtgtgtgtgtgttggtgagtgaggtcaggtttgcgagtgttttgataaataaatacataaaggggc

SEQ ID NO: 174546 - DNA, 913 bp, Homo sapiens
  Payload ID: 14273
  Gene Symbol: REEP4
  Gene Name: receptor accessory protein 4
  ENST ID: ENST00000523293
  CDS Start-End: 59-814
gtgaacgtccttctgagcggcttcctggggtcctccccacgtcccaaaggccggcaagatggtgtcctggatgatctgtcgcctggtggtgctggtgtttgggatgctgtgtccagcttatgcttcctataaggctgtgaagaccaagaacattcgtgaatatgtgcggtggatgatgtactggattgtttttgcactcttcatggcagcagagatcgttacagacatttttatctcctggttccctttctactatgagatcaagatggccttcgtgctgtggctgctctcaccctacaccaagggcgccagcctgctttaccgcaagtttgtccacccgtccctgtcccgccatgagaaggagatcgacgcgtacatcgtgcaggccaaggagcgcagctacgagaccgtgctcagcttcgggaagcggggcctcaacattgccgcctccgctgctgtgcaggctgccaccaagagtcagggggcgctggccggcaggctgcggagcttctccatgcaggacctgcgctccatctctgacgcacctgcccctgcctaccatgaccccctctacctggaggaccaggtgtcccaccggaggccacccattgggcacctcgcgctccctgaaggttcggacgaggaaaaagactgtgccctcagacgtggacagctagggtctgctgcatctgcccccttcttacctcgtgccctgcagggctccagggctatttggagggaccttgggctgcacatctggcctgcctgcaccagctgcctgggccccaccctcctgactcctgctgatggttaagggccgggagcagatgctgccaaggccacatgcagggatgcacccacaatgtaccaaagcaggctgggcccagggttctatttattgccttgctctgcc

SEQ ID NO: 174547 - DNA, 635 bp, Homo sapiens
  Payload ID: 14273
  Gene Symbol: REEP4
  Gene Name: receptor accessory protein 4
  ENST ID: ENST00000521744
  CDS Start-End: 470-635
acactgcgcctgcgtggcaagccggagccctggggttgggcagcactcggttccgtgcaactttcaagtgagttgcgaactccgccctgtaggccggtgctggtggcccggcgcgctggaaccgcggcgacccgctccagcgcgggaccagcagcaagggccgagcgccaggttctccgcggcagaaagggcgggtgggagctgtaactgccccggccgcggggcgcgcccgctcccaagtcggcttcctccccgccggggccgctttgcctcgggtctccccattctccaggtcccctgaactgcacagtcggaggccgtgggcggcgggctctgcctccgccgagggacagccggatcgcccctctgcttcccgcaactgccctgatcaccccccgtcccagcccttgagtgaacgtccttctgagcggcttcctggggtcctccccacgtcccaaaggccggcaagatggtgtcctggatgatctgtcgcctggtggtgctggtgtttgggatgctgtgtccagcttatgcttcctataaggctgtgaagaccaagaacattcgtgaatatgtgagcgtgggggtttgggtgcggtggatgatgtactggattgtttttgcactcttcatgg

SEQ ID NO: 174548 - DNA, 683 bp, Homo sapiens
  Payload ID: 14274
  Gene Symbol: REEP5
  Gene Name: receptor accessory protein 5
  ENST ID: ENST00000261482
  CDS Start-End: 188-683
gggagaggactcgggaaaggtggagtcggagacagacgggacaagcagcatattcagggatcaggctggcctcccggaaagcgtgggcatcggaggaccccgcgggggctgcccaggctgagggtcgcggggctggagggcagctgcggcgccgggcgctggcagctggaagggccagcgctgacgtatgtctgccccgcggcccggcgccctattcctgctgtcctgcgcggtgggcgcggacggcggggcccctgcgggcgggcgcgttgacggaggtgtcatcggactggtggccttgtacctggtgttcggttatggagcctctctcctctgcaacctgataggatttggctacccagcctacatctcaattaaagctatagagagtcccaacaaagaagatgatacccagtggctgacctactgggtagtgtatggtgtgttcagcattgctgaattcttctctgatatcttcctgtcatggttccccttctactacatgctgaagtgtggcttcctgttgtggtgcatggccccgagcccttctaatggggctgaactgctctacaagcgcatcatccgtcctttcttcctgaagcacgagtcccagatggacagtgtggtcaaggaccttaaagacaaggccaaagagactgcagatgccatcactaaagaagcga

SEQ ID NO: 174549 - DNA, 3326 bp, Homo sapiens
  Payload ID: 14274
  Gene Symbol: REEP5
  Gene Name: receptor accessory protein 5
  Uniprot ID: Q00765
  ENST ID: ENST00000379638
  CDS Start-End: 350-919
gtccgatttgagaaggggacccacgagagacacaaaatgcacgcccccacgccacatcctttttaccccgcaatgggttaagactgtcaacaggcaggccacctcgcagcgtccgcggagttgcaggcccgcccccgccagggtgtggcgctgtccccctggcgctgggcgggggaggaggggcgcgcggcggccgaggaggggcgcgcggcggccgggcggggcgagcggaggcgagtggaggacgcgtagacgcgccgcggtccccgcctgccgctgctccgccgcagtcgccgctccagtctatccggcactaggaacagccccgagcggcgagacggtccccgccatgtctgcggccatgagggagaggttcgaccggttcctgcacgagaagaactgcatgactgaccttctggccaagctcgaggccaaaaccggcgtgaacaggagcttcatcgctcttggtgtcatcggactggtggccttgtacctggtgttcggttatggagcctctctcctctgcaacctgataggatttggctacccagcctacatctcaattaaagctatagagagtcccaacaaagaagatgatacccagtggctgacctactgggtagtgtatggtgtgttcagcattgctgaattcttctctgatatcttcctgtcatggttccccttctactacatgctgaagtgtggcttcctgttgtggtgcatggccccgagcccttctaatggggctgaactgctctacaagcgcatcatccgtcctttcttcctgaagcacgagtcccagatggacagtgtggtcaaggaccttaaagacaaggccaaagagactgcagatgccatcactaaagaagcgaagaaagctaccgtgaatttactgggtgaagaaaagaagagcacctaaaccagactggatggaaacttcctgccctctctgtaccttcctactggagcttgatgttatattagggactgtggtataattattttaataatgttgccttggaaacatttttgagatattaaagattggaatgtgttgtaagtttctttgcttacttttactgtctatatatatagggagcactttaaacttaatgcagtgggcagtgtccacgtttttggaaaatgtattttgcctctgggtaggaaaagatgtatgttgctatcctgcaggaaatataaacttaaaataaaattatataccccacaggctgtgtactttactgggctctccctgcacgcattttctctgtagttacatttaggataatctttatggttctacttcctgtaatgtacaattttatataattctgaaatgtttttaatgtatttgtgcacatgtacatatggaaatgttactgtctgactacaacatgcatcatgctcatggggagggagcaggggaaggttgtatgtgtcatttataacttctgtacagtaagaccacctgccaaaagctggaggaaccattgtgctggtgtggtctactaaataatactttaggaaatacgtgattaatatgcaagtgaacaaagtgagaaatgaaatcgaatggagattggcctggttgtttccgtagtatatggcatatgaataccaggatagctttataaagcagttagttagttagttactcactctagtgataaatcgggaaatttacacacacacacacacacacacacacacacacacacacacagagtaacctgtaactctcaattccctgaaaaactagtaatactgtcttatctgctataaactttacatatttgtctattgtcaagatgctacaatggaaaccatttctggttttatcttcaaagcggagaaacatgttgatttagtcttctttcccaatcttcttttttaaaccagtttaaggaacttctgaagatttgtccacctctgattacatgtatgttcttgtttgtatcattagcaacaacatgctaatgacgacacctagctctaagagcaattctgggagaatgaaaggaagtataaagtaacccataatctgcttggcaatagttaagtcaatctatcttcagtttttctctggcctttaaggtcaaacacaagaggcttccctagtttacaagtcagagtcacttgtagtccatttaaatgccctcatccgtattctttgtgttgataagctgcacatgactacatagtaagtacagaacagtaaagttaaaacggatgtctccattgatctgccaaatcgttatagagagcaatttgtctggactagaaaatctgagttttacaccatactgttaagagtccttttgaattaaactcgactaaaacaagtgtataactaaactaacaagattaaatatccagccagtacagtattttttaaggcaaataaagatgattagctcaccttgagataacaatcaggtaagatcataacaatgtctcatgatgtaaaaaatattaaagatatcaatactaagtgacagtatcactctaatataatatggatcagagcatttattttggggaggaaaacagtggtgattaccggcattttattaaacttaaaactttgtagaaagcaaacaaaattgttcttgggagaaaatcaacttttagattaaaaaaattttaagtatctaggagtatttaaatccttttcccataaataaaagtacagttttcttggtggcagaatgaaaatcagcaacttctagcatatagactatataatcagattgacagcatatagaatatattatcagacaagatgaggaggtacaaaagttactattgctcataatgacttacaggctaaaattagttttaaaatactatattaaattctgaatgcaatttttttttgttcccttgagaccaaaatttaagttaactgttgctggcagtctaagtgtaaatgttaacagcaggagaagttaagaattgagcagttctgttgcatgatttcccaaatgaaatactgccttggctagagtttgaaaaactaattgagcctgtgcctggctagaaaacaagcgtttatttgaatgtgaatagtgtttcaaaggtatgtagttacagaattcctaccaaacagcttaaattcttcaagaaagaattcctgcagcagttattcccttacctgaaggcttcaatcatttggatcaacaactgctactctcgggaagactcctctactcacagctgaagaaaatgagcacacccttcacactgttatcacctatcctgaagatgtgatacactgaatggaaataaatagatgtaaataaaattgagttctcatttaactgtta

SEQ ID NO: 174550 - DNA, 1187 bp, Homo sapiens
  Payload ID: 14274
  Gene Symbol: REEP5
  Gene Name: receptor accessory protein 5
  ENST ID: ENST00000511865
  CDS Start-End: 1-436
ggcactaggaacagccccgagcggcgagacggtccccgccatgtctgcggccatgagggagaggttcgaccggttcctgcacgagaagaactgcatgactgaccttctggccaagctcgaggccaaaaccggcgtgaacaggagcttcatcgctcttggtgtcatcggactggtggccttgtacctggtgttcggttatggagcctctctcctctgcaacctgataggatttggctacccagcctacatctcaattaaagctatagagagtcccaacaaagaagatgatacccagtggctgacctactgggtagtgtatggtgtgttcagcattgctgaattcttctctgatatcttcctgtcatggttccccttctactacatgctgaaggtgtggtctggactagggtttctccttccccgctgcctgctgtagtagtggtcgtggtggcccatcttctccctcctctcggagttcttgccaaaggaggagccagtctgatctgaagacaagtagatgtctctattagcttcccagaattcattgttgggatttctgaacacatgaagaaagttgcagtgttttcctcttggacattgttgtatttcaaataaaccacaaatcgccattttccaccgggtcactgggcagaattcacattgcagctgtcgtcctgcataccatcgtccgttaaacagagaaagggctgcttggcattcttcttccgactggtactgaacatatacattgcccctcagtgtggcttcctgttgtggtgcatggccccgagcccttctaatggggctgaactgctctacaagcgcatcatccgtcctttcttcctgaagcacgagtcccagatggacagtgtggtcaaggaccttaaagacaaggccaaagagactgcagatgccatcactaaagaagcgaagaaagctaccgtgaatttactgggtgaagaaaagaagagcacctaaaccagactggatggaaacttcctgccctctctgtaccttcctactggagcttgatgttatattagggactgtggtataattattttaataatgttgccttggaaacatttttgagatattaaagattggaatgtgttgtaagtttctttgcttacttttactgtctatatatatagggagcactttaaacttaatgcagtgggcagtgt

SEQ ID NO: 174551 - DNA, 480 bp, Homo sapiens
  Payload ID: 14274
  Gene Symbol: REEP5
  Gene Name: receptor accessory protein 5
  ENST ID: ENST00000504247
  CDS Start-End: 100-399
agacgcgccgcggtccccgcctgccgctgctccgccgcagtcgccgctccagtctatccggcactaggaacagccccgagcggcgagacggtccccgccatgtctgcggccatgagggagaggttcgaccggttcctgcacgagaagaactgcatgactgaccttctggccaagctcgaggccaaaaccggcgtgaacaggagcttcatcgctcttggtgtcatcggactggtggccttgtacctggtgttcggttatggagcctctctcctctgcaacctgataggatttggctacccagcctacatctctgtggcttcctgttgtggtgcatggccccgagcccttctaatggggctgaactgctctacaagcgcatcatccgtcctttcttcctgaagcacgagtcccagatggacagtgtggtcaaggaccttaaagacaaggccaaagagactgcagatgccatcactaaagaag

SEQ ID NO: 174552 - DNA, 1139 bp, Homo sapiens
  Payload ID: 14274
  Gene Symbol: REEP5
  Gene Name: receptor accessory protein 5
  ENST ID: ENST00000513339
  CDS Start-End: 38-406
actaggaacagccccgagcggcgagacggtccccgccatgtctgcggccatgagggagaggttcgaccggttcctgcacgagaagaactgcatgactgaccttctggccaagctcgaggccaaaaccggcgtgaacaggagcttcatcgctcttggtgtcatcggactggtggccttgtacctggtgttcggttatggagcctctctcctctgcaacctgataggatttggctacccagcctacatctcaattaaagctatagagagtcccaacaaagaagatgatacccagtggctgacctactgggtagtgtatggtgtgttcagcattgctgaattcttctctgatatcttcctgtcatggttccccttctactacatgctgaagcgaagaaagctaccgtgaatttactgggtgaagaaaagaagagcacctaaaccagactggatggaaacttcctgccctctctgtaccttcctactggagcttgatgttatattagggactgtggtataattattttaataatgttgccttggaaacatttttgagatattaaagattggaatgtgttgtaagtttctttgcttacttttactgtctatatatatagggagcactttaaacttaatgcagtgggcagtgtccacgtttttggaaaatgtattttgcctctgggtaggaaaagatgtatgttgctatcctgcaggaaatataaacttaaaataaaattatataccccacaggctgtgtactttactgggctctccctgcacgcattttctctgtagttacatttaggataatctttatggttctacttcctgtaatgtacaattttatataattctgaaatgtttttaatgtatttgtgcacatgtacatatggaaatgttactgtctgactacaacatgcatcatgctcatggggagggagcaggggaaggttgtatgtgtcatttataacttctgtacagtaagaccacctgccaaaagctggaggaaccattgtgctggtgtggtctactaaataatactttaggaaatacgtgattaatatgcaagtgaacaaagtgagaaatgaaatcgaatggagattggcctggttgtttccgtagtatatggcatatgaatacca

SEQ ID NO: 174553 - DNA, 1794 bp, Homo sapiens
  Payload ID: 14275
  Gene Symbol: REEP6
  Gene Name: receptor accessory protein 6
  Uniprot ID: Q96HR9
  ENST ID: ENST00000233596
  CDS Start-End: 524-1078
tccgataagcctcgccccgttcccgcccctaccattccgccctgcctcctttgtgatcagccccgccctccactggtctcgccaatgaatcgcgtcccgtttctccaatcggctcggatgtttctttagcccctccccccggttccgcccccccacgcctctcctcgccctggctccacccttcagccaataatcccatcctctgacaccgcccttccaatcagctacgtctcgctccggcccggccaatcggtgccctgggccgccgcgccccgccctctcccggcggggtctgggcagcggcggccgtggcggagggctatgcggcgggggagacggggcaggcccctcctcctttgtccgccctgccctcccattggtcctagcggggggccgggggcggacaccggcgcggggccggagcatcgcggctcaggctgcgggaaagcggtgcgcgtgcagcggggtgggtgccctggtccgcgggcgagctcgagcagccaaccccgggcgcgtcggggccatggacggcctgaggcagcgcgtggagcacttcctggagcaaaggaacctggtcaccgaagtgctgggggcgctggaggccaagaccggggtggagaagcggtatctggctgcaggagccgtcactctgctaagcctgtatctgctgttcggctacggagcgtctctgctgtgcaatctcatcggatttgtgtaccccgcatatgcctcaatcaaagctatcgagagcccaagcaaggacgacgacactgtgtggctcacctactgggtggtgtacgccctgtttgggctggccgagttcttcagcgatctactcctgtcctggttccctttctactacgtgggcaagtgcgccttcctgttgttctgcatggctcccaggccctggaacggggctctcatgctgtatcagcgcgtcgtgcgtccgctgttcctaaggcaccacggggccgtagacagaatcatgaacgacctcagcgggcgagccctggacgcggcggccggaataaccaggaacgtcaagccaagccagaccccgcagccgaaggacaagtgaagcagccccctgagcctcacaaggacctcctggctggtgaggagggggccgcgccaggctcccaggcctccacagagtcttcagcgcatcccccaacagcagcccctgccagtccctcgggtccaggcaaggccctgggggtctccttaaatgccacctcgggcaagtcccagtcccagtcctcggccacccccagctctggatcccagggccagctgccctctggctctggctgtggctcccgcctgtccggcagggcccagggccagcgtcgggcacagggcagctcccactggtctcggcaacacacccagccgcctggtacttcctccagcccctcccagtcagccctcccgtcctcggggcccctgcagccacccaacgtcacctccagcccggtctcacccatggtccagtctcccagcagcagcaacatccccacgcagccccccagcaagtcctctggcaagccggaggacgcagcccccaagaccagcggacagcgccagaaggaatcgtcgaaacagcctgccagcagcgcctcagtgcccgagctggtcccctgccattccgggacctctctggagtacacttcggagtccaccaccgagatcacctgcagctggccacaccacaggcccccgtgcctgcagcactactggtgcctgaaacacctggcctgctaggaggctccaataaagctaacccggaccaga

SEQ ID NO: 174554 - DNA, 739 bp, Homo sapiens
  Payload ID: 14275
  Gene Symbol: REEP6
  Gene Name: receptor accessory protein 6
  ENST ID: ENST00000395479
  CDS Start-End: 1-452
gatttgtgtaccccgcatatgcctcaatcaaagctatcgagagcccaagcaaggacgacgacactgtgtggctcacctactgggtggtgtacgccctgtttgggctggccgagttcttcagcgatctactcctgtcctggttccctttctactacgtgggcaagtgcgccttcctgttgttctgcatggctcccaggccctggaacggggctctcatgctgtatcagcgcgtcgtgcgtccgctgttcctaaggcaccacggggccgtagacagaatcatgaacgacctcagcgggcgagccctggacgcggcggccggaataaccaggaacgtcttgcaggtcctggcccgtagccgggcaggcatcaccccggtggctgtggccgggccctccactcccctggaagctgacctcaagccaagccagaccccgcagccgaaggacaagtgaagcagccccctgagcctcacaaggacctcctggctggtgaggagggggccgcgccaggctcccaggcctccacagagtcttcagcgcatcccccaacagcagcccctgccagtccctcgggtccaggcaaggccctgggggtctccttaaatgccacctcgggcaagtcccagtcccagtcctcggccacccccagctctggatcccagggccagctgccctctggctctggctgtggctcccgcctgtccggcagggcccagggccagcgtcgggcacagggcagc

SEQ ID NO: 174555 - DNA, 611 bp, Homo sapiens
  Payload ID: 14275
  Gene Symbol: REEP6
  Gene Name: receptor accessory protein 6
  ENST ID: ENST00000395484
  CDS Start-End: 1-420
gctatcgagagcccaagcaaggacgacgacactgtgtggctcacctactgggtggtgtacgccctgtttgggctggccgagttcttcagcgatctactcctgtcctggttccctttctactacgtgggcaagtgcgccttcctgttgttctgcatggctcccaggccctggaacggggctctcatgctgtatcagcgcgtcgtgcgtccgctgttcctaaggcaccacggggccgtagacagaatcatgaacgacctcagcgggcgagccctggacgcggcggccggaataaccaggaacgtcttgcaggtcctggcccgtagccgggcaggcatcaccccggtggctgtggccgggccctccactcccctggaagctgacctcaagccaagccagaccccgcagccgaaggacaagtgaagcagccccctgagcctcacaaggacctcctggctggtgaggagggggccgcgccaggctcccaggcctccacagagtcttcagcgcatcccccaacagcagcccctgccacaacatccccacgcagccccccagcaagtcctctggcaagccggaggacgcagcccccaagaccagcggacagcgccaga

SEQ ID NO: 174556 - DNA, 5832 bp, Homo sapiens
  Payload ID: 14276
  Gene Symbol: ROR1
  Gene Name: receptor tyrosine kinase-like orphan receptor 1
  Uniprot ID: Q01973
  ENST ID: ENST00000371079
  CDS Start-End: 376-3189
gagctggagcagccgccaccgccgccgccgagggagccccgggacggcagcccctgggcgcagggtgcgctgttctcggagtccgacccagggcgactcacgcccactggtgcgacccggacagcctgggactgacccgccggcccaggcgaggctgcagccagagggctgggaagggatcgcgctcgcggcatccagaggcggccaggcggaggcgagggagcaggttagagggacaaagagctttgcagacgtccccggcgtcctgcgagcgccagcggccgggacgaggcggccgggagcccgggaagagcccgtggatgttctgcgcgcggcctgggagccgccgccgccgccgcctcagcgagaggaggaatgcaccggccgcgccgccgcgggacgcgcccgccgctcctggcgctgctggccgcgctgctgctggccgcacgcggggctgctgcccaagaaacagagctgtcagtcagtgctgaattagtgcctacctcatcatggaacatctcaagtgaactcaacaaagattcttacctgaccctcgatgaaccaatgaataacatcaccacgtctctgggccagacagcagaactgcactgcaaagtctctgggaatccacctcccaccatccgctggttcaaaaatgatgctcctgtggtccaggagccccggaggctctcctttcggtccaccatctatggctctcggctgcggattagaaacctcgacaccacagacacaggctacttccagtgcgtggcaacaaacggcaaggaggtggtttcttccactggagtcttgtttgtcaagtttggcccccctcccactgcaagtccaggatactcagatgagtatgaagaagatggattctgtcagccatacagagggattgcatgtgcaagatttattggcaaccgcaccgtctatatggagtctttgcacatgcaaggggaaatagaaaatcagatcacagctgccttcactatgattggcacttccagtcacttatctgataagtgttctcagttcgccattccttccctgtgccactatgccttcccgtactgcgatgaaacttcatccgtcccaaagccccgtgacttgtgtcgcgatgaatgtgaaatcctggagaatgtcctgtgtcaaacagagtacatttttgcaagatcaaatcccatgattctgatgaggctgaaactgccaaactgtgaagatctcccccagccagagagcccagaagctgcgaactgtatccggattggaattcccatggcagatcctataaataaaaatcacaagtgttataacagcacaggtgtggactaccgggggaccgtcagtgtgaccaaatcagggcgccagtgccagccatggaattcccagtatccccacacacacactttcaccgcccttcgtttcccagagctgaatggaggccattcctactgccgcaacccagggaatcaaaaggaagctccctggtgcttcaccttggatgaaaactttaagtctgatctgtgtgacatcccagcgtgcgattcaaaggattccaaggagaagaataaaatggaaatcctgtacatactagtgccaagtgtggccattcccctggccattgctttactcttcttcttcatttgcgtctgtcggaataaccagaagtcatcgtcggcaccagtccagaggcaaccaaaacacgtcagaggtcaaaatgtagagatgtcaatgctgaatgcatataaacccaagagcaaggctaaagagctacctctttctgctgtacgctttatggaagaattgggtgagtgtgcctttggaaaaatctataaaggccatctctatctcccaggcatggaccatgctcagctggttgctatcaagaccttgaaagactataacaacccccagcaatggacggaatttcaacaagaagcctccctaatggcagaactgcaccaccccaatattgtctgccttctaggtgccgtcactcaggaacaacctgtgtgcatgctttttgagtatattaatcagggggatctccatgagttcctcatcatgagatccccacactctgatgttggctgcagcagtgatgaagatgggactgtgaaatccagcctggaccacggagattttctgcacattgcaattcagattgcagctggcatggaatacctgtctagtcacttctttgtccacaaggaccttgcagctcgcaatattttaatcggagagcaacttcatgtaaagatttcagacttggggctttccagagaaatttactccgctgattactacagggtccagagtaagtccttgctgcccattcgctggatgccccctgaagccatcatgtatggcaaattctcttctgattcagatatctggtcctttggggttgtcttgtgggagattttcagttttggactccagccatattatggattcagtaaccaggaagtgattgagatggtgagaaaacggcagctcttaccatgctctgaagactgcccacccagaatgtacagcctcatgacagagtgctggaatgagattccttctaggagaccaagatttaaagatattcacgtccggcttcggtcctgggagggactctcaagtcacacaagctctactactccttcagggggaaatgccaccacacagacaacctccctcagtgccagcccagtgagtaatctcagtaaccccagatatcctaattacatgttcccgagccagggtattacaccacagggccagattgctggtttcattggcccgccaatacctcagaaccagcgattcattcccatcaatggatacccaatacctcctggatatgcagcgtttccagctgcccactaccagccaacaggtcctcccagagtgattcagcactgcccacctcccaagagtcggtccccaagcagtgccagtgggtcgactagcactggccatgtgactagcttgccctcatcaggatccaatcaggaagcaaatattcctttactaccacacatgtcaattccaaatcatcctggtggaatgggtatcaccgtttttggcaacaaatctcaaaaaccctacaaaattgactcaaagcaagcatctttactaggagacgccaatattcatggacacaccgaatctatgatttctgcagaactgtaaaatgcacaacttttgtaaatgtggtatacaggacaaactagacggccgtagaaaagatttatattcaaatgtttttattaaagtaaggttctcatttagcagacatcgcaacaagtaccttctgtgaagtttcactgtgtcttaccaagcaggacagacactcggccagaaaaaaaaaaaaaaaaaaaaaacaagcaaacaaaaacattgtgggatgtgcactccattggagtgcatgacatggcattgggattggaacatgtggtttcgagcactgaaagctgcaaaccagtgaagaggaaaagaaccttgtgattaaatataaaaccaaaagtcaaatggtgctttgtgttttagccttcagtcaccatgactggtctctcccccagatgtatatataccatagcatttgtctacctgctgtcttttcttcaggacagatgttcaggaattatattgattgaatttagactctgtgcatgttcttatggaaatgatgttcagaatccatgaagaaacttcaggccaaatttgaaaccctggagggaaatgagccataagggaagtataacaagccctgaagccttttatgtcgttgtgcttctttgggaaggtgtagagtgtgcctttttgtgaatcctcctctgatcatgagggtctttcccacagtttctcacagtgtgtttacactgcccttggaataacacagcgcatcagaccataagaaggctagatgtggatgctagaattgattgttggttgatagttctctttgctggattaggaatgaggcgccaaaggaagcacagccaggaaaatggccccacagcctagatcagcatctgtgggaaaggaaaaagggttcccatggggacagcccccataggagttttctggaaccagtaacactgaaaaataagtgtgtggctacagatgagcacgcccaccccttgcaactccctgtttacaagttgtccgaggcattggagtgcttatggtcaatgggctctagggaagtaggaaactccatcatgatacaaatgtctagtaattttaaagtttctttccctttttttctgtgctggaaatgttcacagatttgattcccgccccaagaattacaacaatgtattcatacagtcagttggaatccaaaggcaattaattctattttgcaaaatatgatggtcttcctaaaaaacaagtactgagttctcatttcaaaagttaccaagaactgaattctttaaactagcaaaccgaagtaacatgaccatttttgccttagtgggaggtttcaaatgtgcagctcatggcatttacctgccgaccatcttttgccaagtttagaattcttatgcgtttcaagttctatatagaaagtaattttacttttgatttttctcttgttaaaaaaaaactcctttattctaagaacaatgtctcaaagtctcatttttactttaaaggtataagagacttctaaagagacttacgggatataaaagtaattcctggaaatgatatttgatgaggagaatgtaagagaatgaaaaacacattgatgttttcatttttaaaaaatacaactagcatgagaaatcaagaaaatatgtttaccaaaatgcattgcaattttcccaaacctgagtcttcaaataacaaacatgaacttataggtactgtgaactagaagaattggttatatccagatttctgggagataaattaaaacatatttttgtggcataaataagctgattcagaagttacatttcttaactttaggtagaggagaatatttgtatccttttgttgctatgcaactgtttaatgatgaagcttcaaaccacaattttgtatatcatatgacaatcaattgttttccaagaatatttattattttaagtacacaatttcagtgaatcttgagtttttctaggagtcccttaaagggaaattagcattccatgagccagtaaaatacctactctggtaaaacattattatggttaaaaagtaaattcaagttagttttttataaagaactataacatttattttaaacattttataataactgaaaacattaaagtgagcaaatgaaatttcaaaaccacttgtaataatgtattttataatcgcactgtgatactatataacacagtctcttttgtattaaaatagtatttttttcacaagctgaaaaatatcttttcctttgttgacaatgttttgtaagatgactttattttcagatctttttctccttttttgcacaaaactatgcttatggtttgtgtcacagaagtgaaaatatatctttgcatttttatatctggtctgtttttcttgtttcctttgtttttaacttgatatagattttcttcaaatatataatggcaattttcagatatctcaccttaccatatctttccttattttcactgcatgcatttaatcactgtattacttaatgtttgatttgttattatgggcatttcaaataggcaagcattgaattgtaatgacaaaaaggctattttatattaaggatatatgcatttgtatttcacacaccagagatgatattaaacactgattattttatgctgctgtttattaaaaatgtttactataaaa

SEQ ID NO: 174557 - DNA, 2305 bp, Homo sapiens
  Payload ID: 14276
  Gene Symbol: ROR1
  Gene Name: receptor tyrosine kinase-like orphan receptor 1
  Uniprot ID: Q01973
  ENST ID: ENST00000371080
  CDS Start-End: 397-1578
gagcgagagagggagcgtggagagctggagcagccgccaccgccgccgccgagggagccccgggacggcagcccctgggcgcagggtgcgctgttctcggagtccgacccagggcgactcacgcccactggtgcgacccggacagcctgggactgacccgccggcccaggcgaggctgcagccagagggctgggaagggatcgcgctcgcggcatccagaggcggccaggcggaggcgagggagcaggttagagggacaaagagctttgcagacgtccccggcgtcctgcgagcgccagcggccgggacgaggcggccgggagcccgggaagagcccgtggatgttctgcgcgcggcctgggagccgccgccgccgccgcctcagcgagaggaggaatgcaccggccgcgccgccgcgggacgcgcccgccgctcctggcgctgctggccgcgctgctgctggccgcacgcggggctgctgcccaagaaacagagctgtcagtcagtgctgaattagtgcctacctcatcatggaacatctcaagtgaactcaacaaagattcttacctgaccctcgatgaaccaatgaataacatcaccacgtctctgggccagacagcagaactgcactgcaaagtctctgggaatccacctcccaccatccgctggttcaaaaatgatgctcctgtggtccaggagccccggaggctctcctttcggtccaccatctatggctctcggctgcggattagaaacctcgacaccacagacacaggctacttccagtgcgtggcaacaaacggcaaggaggtggtttcttccactggagtcttgtttgtcaagtttggcccccctcccactgcaagtccaggatactcagatgagtatgaagaagatggattctgtcagccatacagagggattgcatgtgcaagatttattggcaaccgcaccgtctatatggagtctttgcacatgcaaggggaaatagaaaatcagatcacagctgccttcactatgattggcacttccagtcacttatctgataagtgttctcagttcgccattccttccctgtgccactatgccttcccgtactgcgatgaaacttcatccgtcccaaagccccgtgacttgtgtcgcgatgaatgtgaaatcctggagaatgtcctgtgtcaaacagagtacatttttgcaagatcaaatcccatgattctgatgaggctgaaactgccaaactgtgaagatctcccccagccagagagcccagaagctgcgaactgtatccggattggaattcccatggcagatcctataaataaaaatcacaagtgttataacagcacaggtgtggactaccgggggaccgtcagtgtgaccaaatcagggcgccagtgccagccatggaattcccagtatccccacacacacactttcaccgcccttcgtttcccagagctgaatggaggccattcctactgccgcaacccagggaatcaaaaggaagctccctggtgcttcaccttggatgaaaactttaagtctgatctgtgtgacatcccagcgtgcggtaaatagaagtcattgcccctaatgtattcaatcatctttaaagatccctatcctacccctcttatttaggagaatcctataaggggggcaaagaaaatggacagtatttgcttgatctcaatctggttttagggtaaaccttgccgtttctacataaaacacctcgtaaggtaccaaaacacgttctcaagaagtcaactgcctttatacctgcagccattgcactcatggatgtaacagggacccagcccttcagaggcacagttgagacagtttatcacattgatttttatagaaaaagatgttacccagaatggtctgcgtccaagtggaccttttcagcaaaaaaaggaatattggaagcaggaagaaattgttttctgtatgccttaagaacaccacaaggcaggatgaatctacaaccattactcggtcatccaggacaatctgtgggtaaactgtgtccttcgttatgtctgttaatactgcagaagaagcatataggtatctagtaagaaaatggaattcctgagtcagttaactgttcctttttctagaaaatgtttggagaaaataatgaaaatgggccaagcatggtggcttatacctgtaatcccaacactctaggaaggccgaggcaggaggatcatttgagcccaggggttcaagaccagcccaggcaacatagtgagactccatctctaccaaaaaaaagaaaaaaaaaaaaagaaaa

SEQ ID NO: 174558 - DNA, 5362 bp, Homo sapiens
  Payload ID: 14276
  Gene Symbol: ROR1
  Gene Name: receptor tyrosine kinase-like orphan receptor 1
  ENST ID: ENST00000545203
  CDS Start-End: 77-2725
agaaacagagctgtcagtcagtgctgaattagtgcctacctcatcatggaacatctcaagtgaactcaacaaagattcttacctgaccctcgatgaaccaatgaataacatcaccacgtctctgggccagacagcagaactgcactgcaaagtctctgggaatccacctcccaccatccgctggttcaaaaatgatgctcctgtggtccaggagccccggaggctctcctttcggtccaccatctatggctctcggctgcggattagaaacctcgacaccacagacacaggctacttccagtgcgtggcaacaaacggcaaggaggtggtttcttccactggagtcttgtttgtcaagtttggcccccctcccactgcaagtccaggatactcagatgagtatgaagaagatggattctgtcagccatacagagggattgcatgtgcaagatttattggcaaccgcaccgtctatatggagtctttgcacatgcaaggggaaatagaaaatcagatcacagctgccttcactatgattggcacttccagtcacttatctgataagtgttctcagttcgccattccttccctgtgccactatgccttcccgtactgcgatgaaacttcatccgtcccaaagccccgtgacttgtgtcgcgatgaatgtgaaatcctggagaatgtcctgtgtcaaacagagtacatttttgcaagatcaaatcccatgattctgatgaggctgaaactgccaaactgtgaagatctcccccagccagagagcccagaagctgcgaactgtatccggattggaattcccatggcagatcctataaataaaaatcacaagtgttataacagcacaggtgtggactaccgggggaccgtcagtgtgaccaaatcagggcgccagtgccagccatggaattcccagtatccccacacacacactttcaccgcccttcgtttcccagagctgaatggaggccattcctactgccgcaacccagggaatcaaaaggaagctccctggtgcttcaccttggatgaaaactttaagtctgatctgtgtgacatcccagcgtgcgattcaaaggattccaaggagaagaataaaatggaaatcctgtacatactagtgccaagtgtggccattcccctggccattgctttactcttcttcttcatttgcgtctgtcggaataaccagaagtcatcgtcggcaccagtccagaggcaaccaaaacacgtcagaggtcaaaatgtagagatgtcaatgctgaatgcatataaacccaagagcaaggctaaagagctacctctttctgctgtacgctttatggaagaattgggtgagtgtgcctttggaaaaatctataaaggccatctctatctcccaggcatggaccatgctcagctggttgctatcaagaccttgaaagactataacaacccccagcaatggacggaatttcaacaagaagcctccctaatggcagaactgcaccaccccaatattgtctgccttctaggtgccgtcactcaggaacaacctgtgtgcatgctttttgagtatattaatcagggggatctccatgagttcctcatcatgagatccccacactctgatgttggctgcagcagtgatgaagatgggactgtgaaatccagcctggaccacggagattttctgcacattgcaattcagattgcagctggcatggaatacctgtctagtcacttctttgtccacaaggaccttgcagctcgcaatattttaatcggagagcaacttcatgtaaagatttcagacttggggctttccagagaaatttactccgctgattactacagggtccagagtaagtccttgctgcccattcgctggatgccccctgaagccatcatgtatggcaaattctcttctgattcagatatctggtcctttggggttgtcttgtgggagattttcagttttggactccagccatattatggattcagtaaccaggaagtgattgagatggtgagaaaacggcagctcttaccatgctctgaagactgcccacccagaatgtacagcctcatgacagagtgctggaatgagattccttctaggagaccaagatttaaagatattcacgtccggcttcggtcctgggagggactctcaagtcacacaagctctactactccttcagggggaaatgccaccacacagacaacctccctcagtgccagcccagtgagtaatctcagtaaccccagatatcctaattacatgttcccgagccagggtattacaccacagggccagattgctggtttcattggcccgccaatacctcagaaccagcgattcattcccatcaatggatacccaatacctcctggatatgcagcgtttccagctgcccactaccagccaacaggtcctcccagagtgattcagcactgcccacctcccaagagtcggtccccaagcagtgccagtgggtcgactagcactggccatgtgactagcttgccctcatcaggatccaatcaggaagcaaatattcctttactaccacacatgtcaattccaaatcatcctggtggaatgggtatcaccgtttttggcaacaaatctcaaaaaccctacaaaattgactcaaagcaagcatctttactaggagacgccaatattcatggacacaccgaatctatgatttctgcagaactgtaaaatgcacaacttttgtaaatgtggtatacaggacaaactagacggccgtagaaaagatttatattcaaatgtttttattaaagtaaggttctcatttagcagacatcgcaacaagtaccttctgtgaagtttcactgtgtcttaccaagcaggacagacactcggccagaaaaaaaaaaaaaaaaaaaaaacaagcaaacaaaaacattgtgggatgtgcactccattggagtgcatgacatggcattgggattggaacatgtggtttcgagcactgaaagctgcaaaccagtgaagaggaaaagaaccttgtgattaaatataaaaccaaaagtcaaatggtgctttgtgttttagccttcagtcaccatgactggtctctcccccagatgtatatataccatagcatttgtctacctgctgtcttttcttcaggacagatgttcaggaattatattgattgaatttagactctgtgcatgttcttatggaaatgatgttcagaatccatgaagaaacttcaggccaaatttgaaaccctggagggaaatgagccataagggaagtataacaagccctgaagccttttatgtcgttgtgcttctttgggaaggtgtagagtgtgcctttttgtgaatcctcctctgatcatgagggtctttcccacagtttctcacagtgtgtttacactgcccttggaataacacagcgcatcagaccataagaaggctagatgtggatgctagaattgattgttggttgatagttctctttgctggattaggaatgaggcgccaaaggaagcacagccaggaaaatggccccacagcctagatcagcatctgtgggaaaggaaaaagggttcccatggggacagcccccataggagttttctggaaccagtaacactgaaaaataagtgtgtggctacagatgagcacgcccaccccttgcaactccctgtttacaagttgtccgaggcattggagtgcttatggtcaatgggctctagggaagtaggaaactccatcatgatacaaatgtctagtaattttaaagtttctttccctttttttctgtgctggaaatgttcacagatttgattcccgccccaagaattacaacaatgtattcatacagtcagttggaatccaaaggcaattaattctattttgcaaaatatgatggtcttcctaaaaaacaagtactgagttctcatttcaaaagttaccaagaactgaattctttaaactagcaaaccgaagtaacatgaccatttttgccttagtgggaggtttcaaatgtgcagctcatggcatttacctgccgaccatcttttgccaagtttagaattcttatgcgtttcaagttctatatagaaagtaattttacttttgatttttctcttgttaaaaaaaaactcctttattctaagaacaatgtctcaaagtctcatttttactttaaaggtataagagacttctaaagagacttacgggatataaaagtaattcctggaaatgatatttgatgaggagaatgtaagagaatgaaaaacacattgatgttttcatttttaaaaaatacaactagcatgagaaatcaagaaaatatgtttaccaaaatgcattgcaattttcccaaacctgagtcttcaaataacaaacatgaacttataggtactgtgaactagaagaattggttatatccagatttctgggagataaattaaaacatatttttgtggcataaataagctgattcagaagttacatttcttaactttaggtagaggagaatatttgtatccttttgttgctatgcaactgtttaatgatgaagcttcaaaccacaattttgtatatcatatgacaatcaattgttttccaagaatatttattattttaagtacacaatttcagtgaatcttgagtttttctaggagtcccttaaagggaaattagcattccatgagccagtaaaatacctactctggtaaaacattattatggttaaaaagtaaattcaagttagttttttataaagaactataacatttattttaaacattttataataactgaaaacattaaagtgagcaaatgaaatttcaaaaccacttgtaataatgtattttataatcgcactgtgatactatataacacagtctcttttgtattaaaatagtatttttttcacaagctgaaaaatatcttttcctttgttgacaatgttttgtaagatgactttattttcagatctttttctccttttttgcacaaaactatgcttatggtttgtgtcacagaagtgaaaatatatctttgcatttttatatctggtctgtttttcttgtttcctttgtttttaacttgatatagattttcttcaaatatataatggcaattttcagatatctcaccttaccatatctttccttattttcactgcatgcatttaatcactgtattacttaatgtttgatttgttattatgggcatttcaaataggcaagcattgaattgtaatgacaaaaaggctattttatattaaggatatatgcatttgtatttcacacaccagagatgatattaaacactgattattttatgctgctgtttattaaaaatgtttact

SEQ ID NO: 174559 - DNA, 4096 bp, Homo sapiens
  Payload ID: 14277
  Gene Symbol: ROR2
  Gene Name: receptor tyrosine kinase-like orphan receptor 2
  Uniprot ID: Q01974
  ENST ID: ENST00000375708
  CDS Start-End: 200-3031
agccagcccttgccgtggccggagccgagcggcgcatccgggccggagaagaggacgacgacgaggtcctcgaagtggacccgtttgcgaagcgccagggagaaggaggagcggacgcatcgtagaaaggggtggtggcgcccgaccccgcgccccggcccgaagctctgagggcttcccggcccccactgcctgcggcatggcccggggctcggcgctcccgcggcggccgctgctgtgcatcccggccgtctgggcggccgccgcgcttctgctctcagtgtcccggacttcaggtgaagtggaggttctggatccgaacgaccctttaggaccccttgatgggcaggacggcccgattccaactctgaaaggttactttctgaattttctggagccagtaaacaatatcaccattgtccaaggccagacggcaattctgcactgcaaggtggcaggaaacccaccccctaacgtgcggtggctaaagaatgatgccccggtggtgcaggagccgcggcggatcatcatccggaagacagaatatggttcacgactgcgaatccaggacctggacacgacagacactggctactaccagtgcgtggccaccaacgggatgaagaccattaccgccactggcgtcctgtttgtgcggctgggtccaacgcacagcccaaatcataactttcaggatgattaccacgaggatgggttctgccagccttaccggggaattgcctgtgcacgcttcattggcaaccggaccatttatgtggactcgcttcagatgcagggggagattgaaaaccgaatcacagcggccttcaccatgatcggcacgtctacgcacctgtcggaccagtgctcacagttcgccatcccatccttctgccacttcgtgtttcctctgtgcgacgcgcgctcccggacacccaagccgcgtgagctgtgccgcgacgagtgcgaggtgctggagagcgacctgtgccgccaggagtacaccatcgcccgctccaacccgctcatcctcatgcggcttcagctgcccaagtgtgaggcgctgcccatgcctgagagccccgacgctgccaactgcatgcgcattggcatcccagccgagaggctgggccgctaccatcagtgctataacggctcaggcatggattacagaggaacggcaagcaccaccaagtcaggccaccagtgccagccgtgggccctgcagcacccccacagccaccacctgtccagcacagacttccctgagcttggaggggggcacgcctactgccggaaccccggaggccagatggagggcccctggtgctttacgcagaataaaaacgtacgcatggaactgtgtgacgtaccctcgtgtagtccccgagacagcagcaagatggggattctgtacatcttggtccccagcatcgcaattccactggtcatcgcttgccttttcttcttggtttgcatgtgccggaataagcagaaggcatctgcgtccacaccgcagcggcgacagctgatggcctcgcccagccaagacatggaaatgcccctcattaaccagcacaaacaggccaaactcaaagagatcagcctgtctgcggtgaggttcatggaggagctgggagaggaccggtttgggaaagtctacaaaggtcacctgttcggccctgccccgggggagcagacccaggctgtggccatcaaaacgctgaaggacaaagcggaggggcccctgcgggaggagttccggcatgaggctatgctgcgagcacggctgcaacaccccaacgtcgtctgcctgctgggcgtggtgaccaaggaccagcccctgagcatgatcttcagctactgttcgcacggcgacctccacgaattcctggtcatgcgctcgccgcactcggacgtgggcagcaccgatgatgaccgcacggtgaagtccgccctggagccccccgacttcgtgcaccttgtggcacagatcgcggcggggatggagtacctatccagccaccacgtggttcacaaggacctggccacccgcaatgtgctagtgtacgacaagctgaacgtgaagatctcagacttgggcctcttccgagaggtgtatgccgccgattactacaagctgctggggaactcgctgctgcctatccgctggatggccccagaggccatcatgtacggcaagttctccatcgactcagacatctggtcctacggtgtggtcctgtgggaggtcttcagctacggcctgcagccctactgcgggtactccaaccaggatgtggtggagatgatccggaaccggcaggtgctgccttgccccgatgactgtcccgcctgggtgtatgccctcatgatcgagtgctggaacgagttccccagccggcggccccgcttcaaggacatccacagccggctccgagcctggggcaacctttccaactacaacagctcggcgcagacctcgggggccagcaacaccacgcagaccagctccctgagcaccagcccagtgagcaatgtgagcaacgcccgctacgtggggcccaagcagaaggccccgcccttcccacagccccagttcatccccatgaagggccagatcagacccatggtgcccccgccgcagctctacgtccccgtcaacggctaccagccggtgccggcctatggggcctacctgcccaacttctacccggtgcagatcccaatgcagatggccccgcagcaggtgcctcctcagatggtccccaagcccagctcacaccacagtggcagtggctccaccagcacaggctacgtcaccacggccccctccaacacatccatggcagacagggcagccctgctctcagagggcgctgatgacacacagaacgccccagaagatggggcccagagcaccgtgcaggaagcagaggaggaggaggaaggctctgtcccagagactgagctgctgggggactgtgacactctgcaggtggacgaggcccaagtccagctggaagcttgagtggcaccagggcccggggttcggggatagaagccccgccgagaccccacagggacctcagtcacctttgagaagacaccatactcagcaatcacaagagcccgccggccagtgggcttgtttgcagactgggtgaggtggagccctgctcctctctgtcctctgacacagagagctgccctgcctaggagcacccaagccaggcagggggtctggcagcacggcgtcctggggagcaggacacatggtcatccccagggctgtatacattgattctggtggtagactggtagtgagcagcaaatgcctttcaagaaaataggtggcagcttcactccatgtcatatatggagtgaatatttcaaaacgttgggaataagggcctgcaaaaggcagcgaggaggcacctcgggtcttgaggttcctgacaaccgatctggtctgttggtttgaggatgaaggggctccatttctgctgcctccctgctgagaatattctccctttagcagccaaagattcgctggaacggaggctgccctctgctgcctgttggggtcggaagacaaggggcttctgaaatgggagttcctgagatacaacaaaatgtgtgccttcaaagaaactgacagctttgtatttggtgaaatggttttaattatactccatgtgtattttgcccactttttttgggaattcaagggaaagtgtttcttgggtttggaatgttcagaggaagcagtattgtacagaacacggtattgttatttttgttaagaatcatgtacagagcttaaatgtaatttatatgtttttaatatgccattttcattgaagtattttggtcttaagatgactttagtaatttaactgtttatgttacccacgttgggatccagttggtcttggtttgcttctctctgtaccacgtgcacatgaggtccattcattttacagcccctgttacacacagacccacaggcagccgtctgtgccccgcacacattgttggtcctatttgtaaatcccacacccggtgtatccaataaagtgaaacaaagcatgtg

SEQ ID NO: 174560 - DNA, 2993 bp, Homo sapiens
  Payload ID: 14277
  Gene Symbol: ROR2
  Gene Name: receptor tyrosine kinase-like orphan receptor 2
  ENST ID: ENST00000375715
  CDS Start-End: 598-2712
cgggccggattctcggcaccctgcgggggtggaggagggcgggcggggccttcaggcccaggagcgccagagacctatggggttcgcctgaagcccccggaatgtgtgagacacttcttactagtaaatgggcttcagtatcccccatccctgcactcctgcaggaaggtgagaatcgggacagtcgcaggctgggagacgctctgcttttcctgcgtcctgctgggagctgcgcgctccaggtatcctggcctgccgccctagccggcccaaggtgaagtggaggttctggatccgaacgaccctttaggaccccttgatgggcaggacggcccgattccaactctgaaaggttactttctgaattttctggagccagtaaacaatatcaccattgtccaaggccagacggcaattctgcactgcaaggtggcaggaaacccaccccctaacgtgcggtggctaaagaatgatgccccggtggtgcaggagccgcggcggatcatcatccggaagacagaatatggttcacgactgcgaatccaggacctggacacgacagacactggctactaccagtgcgtggccaccaacgggatgaagaccattaccgccactggcgtcctgtttgtgcggctgggtccaacgcacagcccaaatcataactttcaggatgattaccacgaggatgggttctgccagccttaccggggaattgcctgtgcacgcttcattggcaaccggaccatttatgtggactcgcttcagatgcagggggagattgaaaaccgaatcacagcggccttcaccatgatcggcacgtctacgcacctgtcggaccagtgctcacagttcgccatcccatccttctgccacttcgtgtttcctctgtgcgacgcgcgctcccggacacccaagccgcgtgagctgtgccgcgacgagtgcgaggtgctggagagcgacctgtgccgccaggagtacaccatcgcccgctccaacccgctcatcctcatgcggcttcagctgcccaagtgtgaggcgctgcccatgcctgagagccccgacgctgccaactgcatgcgcattggcatcccagccgagaggctgggccgctaccatcagtgctataacggctcaggcatggattacagaggaacggcaagcaccaccaagtcaggccaccagtgccagccgtgggccctgcagcacccccacagccaccacctgtccagcacagacttccctgagcttggaggggggcacgcctactgccggaaccccggaggccagatggagggcccctggtgctttacgcagaataaaaacgtacgcatggaactgtgtgacgtaccctcgtgtagtccccgagacagcagcaagatggggattctgtacatcttggtccccagcatcgcaattccactggtcatcgcttgccttttcttcttggtttgcatgtgccggaataagcagaaggcatctgcgtccacaccgcagcggcgacagctgatggcctcgcccagccaagacatggaaatgcccctcattaaccagcacaaacaggccaaactcaaagagatcagcctgtctgcggtgaggttcatggaggagctgggagaggaccggtttgggaaagtctacaaaggtcacctgttcggccctgccccgggggagcagacccaggctgtggccatcaaaacgctgaaggacaaagcggaggggcccctgcgggaggagttccggcatgaggctatgctgcgagcacggctgcaacaccccaacgtcgtctgcctgctgggcgtggtgaccaaggaccagcccctgagcatgatcttcagctactgttcgcacggcgacctccacgaattcctggtcatgcgctcgccgcactcggacgtgggcagcaccgatgatgaccgcacggtgaagtccgccctggagccccccgacttcgtgcaccttgtggcacagatcgcggcggggatggagtacctatccagccaccacgtggttcacaaggacctggccacccgcaatgtgctagtgtacgacaagctgaacgtgaagatctcagacttgggcctcttccgagaggtgtatgccgccgattactacaagctgctggggaactcgctgctgcctatccgctggatggccccagaggccatcatgtacggcaagttctccatcgactcagacatctggtcctacggtgtggtcctgtgggaggtcttcagctacggcctgcagccctactgcgggtactccaaccaggatgtggtggagatgatccggaaccggcaggtgctgccttgccccgatgactgtcccgcctgggtgtatgccctcatgatcgagtgctggaacgagttccccagccggcggccccgcttcaaggacatccacagccggctccgagcctggggcaacctttccaactacaacagctcggcgcagacctcgggggccagcaacaccacgcagaccagctccctgagcaccagcccagtgagcaatgttgtaaggatgcgaggcagcgggaggcagtgctggatgacggagacgccaaacgctttgttgtggcataatgtgtctggagttggttcctgccggtgggttcgtggtctcgctgacttcaaggatgaagccaccgactttcgcgttatgccacgggaccccagcctgcactgccatgtgacttcaaccgcatgacagaccctgggcccagagcactcagactcatgaacaaaatagattcagcattcccatatttgaaatgggaagaagtttcatgtccattctggcttcatgtggttggaagaggaagccccatgaatatttttatggatgccccagtgctgttgagtgcctatcaacaccaccacgagcttggccacttcacatcaacagcagatttaatttgggatctctaaacactatttgtggttgtgtagacagaaagaatttttctaataaaataaaaattaaatgtg

SEQ ID NO: 174561 - DNA, 1452 bp, Homo sapiens
  Payload ID: 14278
  Gene Symbol: RAPSN
  Gene Name: receptor-associated protein of the synapse
  Uniprot ID: Q13702
  ENST ID: ENST00000352508
  CDS Start-End: 180-1241
cagctttgttcccagggtggcgcctgctctccatccaggccccattccggctcccacccgacgctgcttttgttcccacgtttcggggggcagctggcactgtgattcctgccccatgagtgcctagaggcacggagccaccagggatcaccccacgtgggacacagggcttggggaggatggggcaggaccagaccaagcagcagatcgagaaggggctccagctgtaccagtccaaccagacagagaaggcattgcaggtgtggacaaaggtgctggagaagagctcggacctcatggggcgcttccgcgtgctgggctgcctggtcacagcccactcggagatgggccgctacaaggagatgctgaagttcgctgtggtccagatcgacacggcccgggagctggaggatgccgacttcctcctggagagctacctgaacctggcacgcagcaacgagaagctgtgcgagtttcacaagaccatctcctactgcaagacctgccttgggctgcctggtaccagggcaggtgcccagctcggaggccaggtcagcctgagcatgggcaatgccttcctgggcctcagcgtcttccagaaggccctggagagcttcgagaaggccctgcgctatgcccacaacaatgatgacgccatgctcgagtgccgcgtgtgctgcagcctgggcagcttctatgcccaggtcaaggactacgagaaagccctgttcttcccctgcaaggcggcagagcttgtcaacaactatggcaaaggctggagcctgaagtaccgggccatgagccagtaccacatggccgtggcctatcgcctgctgggccgcctgggcagtgccatggagtgttgtgaggagtctatgaagatcgcgctgcagcacggggaccggccactgcaggcgctctgcctgctctgcttcgctgacatccaccggagccgtggggacctggagctgagccagctcaagctgcactgtctgagcgagagcatttaccgcagcaaagggctgcagcgggaactgcgggcgcacgttgtgaggttccacgagtgcgtggaggagacggagctctactgcggcctgtgcggcgagtccataggcgagaagaacagccggctgcaggccctaccttgctcccacatcttccacctcaggtgcctgcagaacaacgggacccggagctgtcccaactgccgccgctcatccatgaagcctggctttgtatgactcctggcagcaggcgtgggcttcctcctcgccactcctgctctttctccactgcacgccagaggcccatttactcctggggcagctgccaggtcgtcctcaccatagccaaggccttggggcctgcccagggctgctcccctgggcccagctcccctccctgcctctttgtactttgctctttatagaaaaataaactgtttgtacctgg

SEQ ID NO: 174562 - DNA, 1671 bp, Homo sapiens
  Payload ID: 14278
  Gene Symbol: RAPSN
  Gene Name: receptor-associated protein of the synapse
  Uniprot ID: Q13702
  ENST ID: ENST00000298854
  CDS Start-End: 215-1453
cccaactggcagcgacagctgcagacgggctgaaccagctttgttcccagggtggcgcctgctctccatccaggccccattccggctcccacccgacgctgcttttgttcccacgtttcggggggcagctggcactgtgattcctgccccatgagtgcctagaggcacggagccaccagggatcaccccacgtgggacacagggcttggggaggatggggcaggaccagaccaagcagcagatcgagaaggggctccagctgtaccagtccaaccagacagagaaggcattgcaggtgtggacaaaggtgctggagaagagctcggacctcatggggcgcttccgcgtgctgggctgcctggtcacagcccactcggagatgggccgctacaaggagatgctgaagttcgctgtggtccagatcgacacggcccgggagctggaggatgccgacttcctcctggagagctacctgaacctggcacgcagcaacgagaagctgtgcgagtttcacaagaccatctcctactgcaagacctgccttgggctgcctggtaccagggcaggtgcccagctcggaggccaggtcagcctgagcatgggcaatgccttcctgggcctcagcgtcttccagaaggccctggagagcttcgagaaggccctgcgctatgcccacaacaatgatgacgccatgctcgagtgccgcgtgtgctgcagcctgggcagcttctatgcccaggtcaaggactacgagaaagccctgttcttcccctgcaaggcggcagagcttgtcaacaactatggcaaaggctggagcctgaagtaccgggccatgagccagtaccacatggccgtggcctatcgcctgctgggccgcctgggcagtgccatggagtgttgtgaggagtctatgaagatcgcgctgcagcacggggaccggccactgcaggcgctctgcctgctctgcttcgctgacatccaccggagccgtggggacctggagacagccttccccaggtacgactccgccatgagcatcatgaccgagatcggaaaccgcctggggcaggtgcaggcgctgctgggtgtggccaagtgctgggtggccaggaaggcgctggacaaggctctggatgccatcgagagagcccaggatctggccgaggaggtggggaacaagctgagccagctcaagctgcactgtctgagcgagagcatttaccgcagcaaagggctgcagcgggaactgcgggcgcacgttgtgaggttccacgagtgcgtggaggagacggagctctactgcggcctgtgcggcgagtccataggcgagaagaacagccggctgcaggccctaccttgctcccacatcttccacctcaggtgcctgcagaacaacgggacccggagctgtcccaactgccgccgctcatccatgaagcctggctttgtatgactcctggcagcaggcgtgggcttcctcctcgccactcctgctctttctccactgcacgccagaggcccatttactcctggggcagctgccaggtcgtcctcaccatagccaaggccttggggcctgcccagggctgctcccctgggcccagctcccctccctgcctctttgtactttgctctttatagaaaaataaactgtttgtacctggtcccagg

SEQ ID NO: 174563 - DNA, 1408 bp, Homo sapiens
  Payload ID: 14278
  Gene Symbol: RAPSN
  Gene Name: receptor-associated protein of the synapse
  ENST ID: ENST00000529341
  CDS Start-End: 173-1234
gttcccagggtggcgcctgctctccatccaggccccattccggctcccacccgacgctgcttttgttcccacgtttcggggggcagctggcactgtgattcctgccccatgagtgcctagaggcacggagccaccagggatcaccccacgtgggacacagggcttggggaggatggggcaggaccagaccaagcagcagatcgagaaggggctccagctgtaccagtccaaccagacagagaaggcattgcaggtgtggacaaaggtgctggagaagagctcggacctcatggggcgcttccgcgtgctgggctgcctggtcacagcccactcggagatgggccgctacaaggagatgctgaagttcgctgtggtccagatcgacacggcccgggagctggaggatgccgacttcctcctggagagctacctgaacctggcacgcagcaacgagaagctgtgcgagtttcacaagaccatctcctactgcaagacctgccttgggctgcctggtaccagggcaggtgcccagctcggaggccaggtcagcctgagcatgggcaatgccttcctgggcctcagcgtcttccagaaggccctggagagcttcgagaaggccctgcgctatgcccacaacaatgatgacgccatgctcgagtgccgcgtgtgctgcagcctgggcagcttctatgcccaggtcaaggactacgagaaagccctgttcttcccctgcaaggcggcagagcttgtcaacaactatggcaaaggctggagcctgaagtaccgggccatgagccagtaccacatggccgtggcctatcgcctgctgggccgcctgggcagtgccatggagtgttgtgaggagtctatgaagatcgcgctgcagcacggggaccggccactgcaggcgctctgcctgctctgcttcgctgacatccaccggagccgtggggacctggagctgagccagctcaagctgcactgtctgagcgagagcatttaccgcagcaaagggctgcagcgggaactgcgggcgcacgttgtgaggttccacgagtgcgtggaggagacggagctctactgcggcctgtgcggcgagtccataggcgagaagaacagccggctgcaggccctaccttgctcccacatcttccacctcaggtgggggctcctgggggggtggacaggggtgggcaggatctcttcggggcactctagggcccagctggcttaatcacagcaataatactaatagcaaacacttaaccttggccaggcgtggtgcctcacgtctgtctcgcaagcactttgggaggccgaggcgggctgatcacttgagccccggggttcaagatcatcttggccaacatggtgaaaccccgtctctactaaaaatacaaaaattacc

SEQ ID NO: 174564 - DNA, 1462 bp, Homo sapiens
  Payload ID: 14278
  Gene Symbol: RAPSN
  Gene Name: receptor-associated protein of the synapse
  ENST ID: ENST00000524487
  CDS Start-End: 173-1252
gttcccagggtggcgcctgctctccatccaggccccattccggctcccacccgacgctgcttttgttcccacgtttcggggggcagctggcactgtgattcctgccccatgagtgcctagaggcacggagccaccagggatcaccccacgtgggacacagggcttggggaggatggggcaggaccagaccaagcagcagatcgagaaggggctccagctgtaccagtccaaccagacagagaaggcattgcaggtgtggacaaaggtgctggagaagagctcggacctcatggggcgcttccgcgtgctgggctgcctggtcacagcccactcggagatgggccgctacaaggagatgctgaagttcgctgtggtccagatcgacacggcccgggagctggaggatgccgacttcctcctggagagctacctgaacctggcacgcagcaacgagaagctgtgcgagtttcacaagaccatctcctactgcaagacctgccttgggctgcctggtaccagggcaggtgcccagctcggaggccaggtcagcctgagcatgggcaatgccttcctgggcctcagcgtcttccagaaggccctggagagcttcgagaaggccctgcgctatgcccacaacaatgatgacgccatgctcgagtgccgcgtgtgctgcagcctgggcagcttctatgcccaggtcaaggagtctatgaagatcgcgctgcagcacggggaccggccactgcaggcgctctgcctgctctgcttcgctgacatccaccggagccgtggggacctggagacagccttccccaggtacgactccgccatgagcatcatgaccgagatcggaaaccgcctggggcaggtgcaggcgctgctgggtgtggccaagtgctgggtggccaggaaggcgctggacaaggctctggatgccatcgagagagcccaggatctggccgaggaggtggggaacaagctgagccagctcaagctgcactgtctgagcgagagcatttaccgcagcaaagggctgcagcgggaactgcgggcgcacgttgtgaggttccacgagtgcgtggaggagacggagctctactgcggcctgtgcggcgagtccataggcgagaagaacagccggctgcaggccctaccttgctcccacatcttccacctcaggtgcctgcagaacaacgggacccggagctgtcccaactgccgccgctcatccatgaagcctggctttgtatgactcctggcagcaggcgtgggcttcctcctcgccactcctgctctttctccactgcacgccagaggcccatttactcctggggcagctgccaggtcgtcctcaccatagccaaggccttggggcctgcccagggctgctcccctgggcccagctcccctccctgcctctttgtactttgctctttatagaaaaataaactgtttgtacctg

SEQ ID NO: 174565 - DNA, 2584 bp, Homo sapiens
  Payload ID: 14279
  Gene Symbol: RIPK2
  Gene Name: receptor-interacting serine-threonine kinase 2
  Uniprot ID: O43353
  ENST ID: ENST00000220751
  CDS Start-End: 315-1937
gagctcgggcggccggagctggtcgctgcgcgcgccggggggagggccggggctgcgagagaggaagctctttcgcggcgctacggcgttggcaccagtctctagaaaagaagtcagctctggttcggagaagcagcggctggcgtgggccatccggggaatgggcgccctcgtgacctagtgttgcggggcaaaaagggtcttgccggcctcgctcgtgcaggggcgtatctgggcgcctgagcgcggcgtgggagccttgggagccgccgcagcagggggcacacccggaaccggcctgagcgcccgggaccatgaacggggaggccatctgcagcgccctgcccaccattccctaccacaaactcgccgacctgcgctacctgagccgcggcgcctctggcactgtgtcgtccgcccgccacgcagactggcgcgtccaggtggccgtgaagcacctgcacatccacactccgctgctcgacagtgaaagaaaggatgtcttaagagaagctgaaattttacacaaagctagatttagttacattcttccaattttgggaatttgcaatgagcctgaatttttgggaatagttactgaatacatgccaaatggatcattaaatgaactcctacataggaaaactgaatatcctgatgttgcttggccattgagatttcgcatcctgcatgaaattgcccttggtgtaaattacctgcacaatatgactcctcctttacttcatcatgacttgaagactcagaatatcttattggacaatgaatttcatgttaagattgcagattttggtttatcaaagtggcgcatgatgtccctctcacagtcacgaagtagcaaatctgcaccagaaggagggacaattatctatatgccacctgaaaactatgaacctggacaaaaatcaagggccagtatcaagcacgatatatatagctatgcagttatcacatgggaagtgttatccagaaaacagccttttgaagatgtcaccaatcctttgcagataatgtatagtgtgtcacaaggacatcgacctgttattaatgaagaaagtttgccatatgatatacctcaccgagcacgtatgatctctctaatagaaagtggatgggcacaaaatccagatgaaagaccatctttcttaaaatgtttaatagaacttgaaccagttttgagaacatttgaagagataacttttcttgaagctgttattcagctaaagaaaacaaagttacagagtgtttcaagtgccattcacctatgtgacaagaagaaaatggaattatctctgaacatacctgtaaatcatggtccacaagaggaatcatgtggatcctctcagctccatgaaaatagtggttctcctgaaacttcaaggtccctgccagctcctcaagacaatgattttttatctagaaaagctcaagactgttattttatgaagctgcatcactgtcctggaaatcacagttgggatagcaccatttctggatctcaaagggctgcattctgtgatcacaagaccactccatgctcttcagcaataataaatccactctcaactgcaggaaactcagaacgtctgcagcctggtatagcccagcagtggatccagagcaaaagggaagacattgtgaaccaaatgacagaagcctgccttaaccagtcgctagatgcccttctgtccagggacttgatcatgaaagaggactatgaacttgttagtaccaagcctacaaggacctcaaaagtcagacaattactagacactactgacatccaaggagaagaatttgccaaagttatagtacaaaaattgaaagataacaaacaaatgggtcttcagccttacccggaaatacttgtggtttctagatcaccatctttaaatttacttcaaaataaaagcatgtaagtgactgtttttcaagaagaaatgtgtttcataaaaggatatttatatctctgttgctttgactttttttatataaaatccgtgagtattaaagctttattgaaggttctttgggtaaatattagtctccctccatgacactgcagtattttttttaattaatacaagtaaaaagtttgaattttgctacatagttcaatttttatgtctcttttgttaacagaaaccacttttaaaggatagtaattattcttgtttataacagtgccttaaggtatgatgtatttctgatggaagccattttcacattcatgttcttcatggattatttgttacttgtctaagatgcaatttgattttatgaagtatataccctttacccaccagagacagtacagaatccctgccctaaaatcccaggcttaattgccctacaaagggttattaatttaaaactccattattaggattacattttaaagttttatttatgaattccctttaaaaatgatatttcaaaggtaaaacaatacaatataaagaaaaaaataaatatattaataccggcttcctgtccccatttttaacctcagccttccctactgtcaccaacaaccaagctaaataaagtcaacagcctgatgtgt

SEQ ID NO: 174566 - DNA, 572 bp, Homo sapiens
  Payload ID: 14279
  Gene Symbol: RIPK2
  Gene Name: receptor-interacting serine-threonine kinase 2
  ENST ID: ENST00000517696
  CDS Start-End: 245-457
tttcgcggcgctacggcgttggcaccagtctctagaaaagaagtcagctctggttcggagaagcagcggctggcgtgggccatccggggaatgggcgccctcgtgacctagtgttgcggggcaaaaagggtcttgccggcctcgctcgtgcaggggcgtatctgggcgcctgagcgcggcgtgggagccttgggagccgccgcagcagggggcacacccggaaccggcctgagcgcccgggaccatgaacggggaggccatctgcagcgccctgcccaccattccctaccacaaactcgccgacctgcgctacctgagccgcggcgcctctggcactgtgtcgtccgcccgccacgcagactggcgcgtccaggtggccgtgaagcacctgcacatccacactccgctgctcgacagggatttaactaggcccagcattcagttcttagtgagttaacatccatgattacaacattctcttctcctcctcctatatctaatgtgaaaatacgtcatccccgatgcctgattggccagaagcttgaaagaaaggatgtcttaagagaagctga

SEQ ID NO: 174567 - DNA, 1916 bp, Homo sapiens
  Payload ID: 14279
  Gene Symbol: RIPK2
  Gene Name: receptor-interacting serine-threonine kinase 2
  ENST ID: ENST00000522965
  CDS Start-End: 256-462
agaggaagctctttcgcggcgctacggcgttggcaccagtctctagaaaagaagtcagctctggttcggagaagcagcggctggcgtgggccatccggggaatgggcgccctcgtgacctagtgttgcggggcaaaaagggtcttgccggcctcgctcgtgcaggggcgtatctgggcgcctgagcgcggcgtgggagccttgggagccgccgcagcagggggcacacccggaaccggcctgagcgcccgggaccatgaacggggaggccatctgcagcgccctgcccaccattccctaccacaaactcgccgacctgcgctacctgagccgcggcgcctctggcactgtgtcgtccgcccgccacgcagactggcgcgtccaggtggccgtgaagcacctgcacatccacactccgctgctcgacagaaaactgaatatcctgatgttgcttggccattgagatttcgcatcctgcatgaaattgcccttggtgtaaattacctgcacaatatgactcctcctttacttcatcatgacttgaagactcagaatatcttattggacaatgaatttcatgttaagattgcagattttggtttatcaaagtggcgcatgatgtccctctcacagtcacgaagtagcaaatctgcaccagaaggagggacaattatctatatgccacctgaaaactatgaacctggacaaaaatcaagggccagtatcaagcacgatatatatagctatgcagttatcacatgggaagtgttatccagaaaacagccttttgaagatgtcaccaatcctttgcagataatgtatagtgtgtcacaaggacatcgacctgttattaatgaagaaagtttgccatatgatatacctcaccgagcacgtatgatctctctaatagaaagtggatgggcacaaaatccagatgaaagaccatctttcttaaaatgtttaatagaacttgaaccagttttgagaacatttgaagagataacttttcttgaagctgttattcagctaaagaaaacaaagttacagagtgtttcaagtgccattcacctatgtgacaagaagaaaatggaattatctctgaacatacctgtaaatcatggtccacaagaggaatcatgtggatcctctcagctccatgaaaatagtggttctcctgaaacttcaaggtccctgccagctcctcaagacaatgattttttatctagaaaagctcaagactgttattttatgaagctgcatcactgtcctggaaatcacagttgggatagcaccatttctggatctcaaagggctgcattctgtgatcacaagaccactccatgctcttcagcaataataaatccactctcaactgcaggaaactcagaacgtctgcagcctggtatagcccagcagtggatccagagcaaaagggaagacattgtgaaccaaatgacagaagcctgccttaaccagtcgctagatgcccttctgtccagggacttgatcatgaaagaggactatgaacttgttagtaccaagcctacaaggacctcaaaagtcagacaattactagacactactgacatccaaggagaagaatttgccaaagttatagtacaaaaattgaaagataacaaacaaatgggtcttcagccttacccggaaatacttgtggtttctagatcaccatctttaaatttacttcaaaataaaagcatgtaagtgactgtttttcaagaagaaatgtgtttcataaaaggatatttatatctctgttgctttgactttttttatataaaatccgtgagtattaaagctttattgaaggttctttgggtaaatattagtctccctccatgacactgcagtattttttttaattaatacaagtaaaaagtttgaattttgctacat

SEQ ID NO: 174568 - DNA, 1930 bp, Homo sapiens
  Payload ID: 14280
  Gene Symbol: RIPK3
  Gene Name: receptor-interacting serine-threonine kinase 3
  Uniprot ID: Q9Y572
  ENST ID: ENST00000216274
  CDS Start-End: 220-1776
accccaggggcgggactgtagaggcgcctataagggaagttgttcagtcaactcggaaaaagggtaacaacccggaaagtagactcaccgtcttggtctagagactgacccctgcacagacagaccccttcccctctctgcgaaaggaccaagccccagaagtcactccatctcctacggctcgcaatttccagaggccccctggcaccttccagcctgatgtcgtgcgtcaagttatggcccagcggtgcccccgcccccttggtgtccatcgaggaactggagaaccaggagctcgtcggcaaaggcgggttcggcacagtgttccgggcgcaacataggaagtggggctacgatgtggcggtcaagatcgtaaactcgaaggcgatatccagggaggtcaaggccatggcaagtctggataacgaattcgtgctgcgcctagaaggggttatcgagaaggtgaactgggaccaagatcccaagccggctctggtgactaaattcatggagaacggctccttgtcggggctgctgcagtcccagtgccctcggccctggccgctcctttgccgcctgctgaaagaagtggtgcttgggatgttttacctgcacgaccagaacccggtgctcctgcaccgggacctcaagccatccaacgtcctgctggacccagagctgcacgtcaagctggcagattttggcctgtccacatttcagggaggctcacagtcagggacagggtccggggagccagggggcaccctgggctacttggccccagaactgtttgttaacgtaaaccggaaggcctccacagccagtgacgtctacagcttcgggatcctaatgtgggcagtgcttgctggaagagaagttgagttgccaaccgaaccatcactcgtgtacgaagcagtgtgcaacaggcagaaccggccttcattggctgagctgccccaagccgggcctgagactcccggcttagaaggactgaaggagctaatgcagctctgctggagcagtgagcccaaggacagaccctccttccaggaatgcctaccaaaaactgatgaagtcttccagatggtggagaacaatatgaatgctgctgtctccacggtaaaggatttcctgtctcagctcaggagcagcaataggagattttctatcccagagtcaggccaaggagggacagaaatggatggctttaggagaaccatagaaaaccagcactctcgtaatgatgtcatggtttctgagtggctaaacaaactgaatctagaggagcctcccagctctgttcctaaaaaatgcccgagccttaccaagaggagcagggcacaagaggagcaggttccacaagcctggacagcaggcacatcttcagattcgatggcccaacctccccagactccagagacctcaactttcagaaaccagatgcccagccctacctcaactggaacaccaagtcctggaccccgagggaatcagggggctgagagacaaggcatgaactggtcctgcaggaccccggagccaaatccagtaacagggcgaccgctcgttaacatatacaactgctctggggtgcaagttggagacaacaactacttgactatgcaacagacaactgccttgcccacatggggcttggcaccttcgggcaaggggaggggcttgcagcaccccccaccagtaggttcgcaagaaggccctaaagatcctgaagcctggagcaggccacagggttggtataatcatagcgggaaataaagcaccttccaagcttgcctccaagagttacgagttaaggaagagtgccaccccttgaggcccctgacttccttctagggcagtctggcctgcccacaaactgactttgtgacctgtcccccaggagtcaataaacatgatggaatgctagtca

SEQ ID NO: 174569 - DNA, 587 bp, Homo sapiens
  Payload ID: 14280
  Gene Symbol: RIPK3
  Gene Name: receptor-interacting serine-threonine kinase 3
  ENST ID: ENST00000554569
  CDS Start-End: 1-488
caggccaaggagggacagaaatggatggctttaggagaaccatagaaaaccagcactctcgtaatgatgtcatggtttctgagtggctaaacaaactgaatctagaggagcctcccagctctgttcctaaaaaatgcccgagccttaccaagaggagcagggcacaagaggagcaggttccacaagcctggacagcaggcacatcttcagattcgatggcccaacctccccagactccagagacctcaactttcagaaaccagatgcccagccctacctcaactggaacaccaagtcctggaccccgagggaatcagggggctgagagacaaggcatgaactggtcctgcaggaccccggagccaaatccagtaacaggtacccattctctacctctttcttttccctgttcaattcttccaccagactcctcctccagacctatatctagattcagggtactttgtggaggggaggggagaagatgatctaactcaaccttctcatttcataaatgggaaaaccgacaccccctgagaaaggagccctctgaggtcacacaacaaagcttggatttgtccctgaat

SEQ ID NO: 174570 - DNA, 1758 bp, Homo sapiens
  Payload ID: 14280
  Gene Symbol: RIPK3
  Gene Name: receptor-interacting serine-threonine kinase 3
  Uniprot ID: Q9Y572
  ENST ID: ENST00000554756
  CDS Start-End: 164-859
aaaaagggtaacaacccggaaagtagactcaccgtcttggtctagagactgacccctgcacagacagaccccttcccctctctgcgaaaggaccaagccccagaagtcactccatctcctacggctcgcaatttccagaggccccctggcaccttccagcctgatgtcgtgcgtcaagttatggcccagcggtgcccccgcccccttggtgtccatcgaggaactggagaaccaggagctcgtcggcaaaggcgggttcggcacagtgttccgggcgcaacataggaagtggggctacgatgtggcggtcaagatcgtaaactcgaaggcgatatccagggaggtcaaggccatggcaagtctggataacgaattcgtgctgcgcctagaaggggttatcgagaaggtgaactgggaccaagatcccaagccggctctggtgactaaattcatggagaacggctccttgtcggggctgctgcagtcccagtgccctcggccctggccgctcctttgccgcctgctgaaagaagtggtgcttgggatgttttacctgcacgaccagaacccggtgctcctgcaccgggacctcaagccatccaacgtcctgctggacccagagctgcacgtcaagctggcagattttggcctgtccacatttcagggaggctcacagtcagggacagggtccggggagccagggggcaccctgggctacttggccccagaactgtttgttaacgtaaaccggaaggcctccacagccagtgacgtctacagcttcgggatcctaatgtgggcagtgcttgctggaagagaagttgagtgtaagactctaggaggattctgggatccttaaccccagtgccaaccgaaccatcactcgtgtacgaagcagtgtgcaacaggcagaaccggccttcattggctgagctgccccaagccgggcctgagactcccggcttagaaggactgaaggagctaatgcagctctgctggagcagtgagcccaaggacagaccctccttccaggaatgcctaccaaaaactgatgaagtcttccagatggtggagaacaatatgaatgctgctgtctccacggtaaaggatttcctgtctcagctcaggagcagcaataggagattttctatcccagagtcaggccaaggagggacagaaatggatggctttaggagaaccatagaaaaccagcactctcgtaatgatgtcatggtttctgagtggctaaacaaactgaatctagaggagcctcccagctctgttcctaaaaaatgcccgagccttaccaagaggagcagggcacaagaggagcaggttccacaagcctggacagcaggcacatcttcagattcgatggcccaacctccccagactccagagacctcaactttcagaaaccagatgcccagccctacctcaactggaacaccaagtcctggaccccgagggaatcagggggctgagagacaaggcatgaactggtcctgcaggaccccggagccaaatccagtaacagggcgaccgctcgttaacatatacaactgctctggggtgcaagttggagacaacaactacttgactatgcaacagacaactgccttgcccacatggggcttggcaccttcgggcaaggggaggggcttgcagcaccccccaccagtaggttcgcaagaaggccctaaagatcctgaagcctggagcaggccacagggttggtataatcatagcgggaaataa

SEQ ID NO: 174571 - DNA, 4016 bp, Homo sapiens
  Payload ID: 14281
  Gene Symbol: RIPK4
  Gene Name: receptor-interacting serine-threonine kinase 4
  Uniprot ID: P57078
  ENST ID: ENST00000352483
  CDS Start-End: 49-2547
gcacctgggcacctgggcagccgccgcggcgctggctagacgtgcgcgatggagggcgacggcgggaccccatgggccctggcgctgctgcgcaccttcgacgcgggcgagttcacgggctgggagaaggtgggctcgggcggcttcgggcaggtgtacaaggtgcgccatgtccactggaagacctggctggccatcaagtgctcgcccagcctgcacgtcgacgacagggagcgcatggagcttttggaagaagccaagaagatggagatggccaagtttcgctacatcctgcctgtgtatggcatctgccgcgaacctgtcggcctggtcatggagtacatggagacgggctccctggaaaagctgctggcttcggagccattgccatgggatctccggttccgaatcatccacgagacggcggtgggcatgaacttcctgcactgcatggccccgccactcctgcacctggacctcaagcccgcgaacatcctgctggatgcccactaccacgtcaagatttctgattttggtctggccaagtgcaacgggctgtcccactcgcatgacctcagcatggatggcctgtttggcacaatcgcctacctccctccagagcgcatcagggagaagagccggctcttcgacaccaagcacgatgtatacagctttgcgatcgtcatctggggcgtgctcacacagaagaagccgtttgcagatgagaagaacatcctgcacatcatggtgaaggtggtgaagggccaccgccccgagctgccgcccgtgtgcagagcccggccgcgcgcctgcagccacctgatacgcctcatgcagcggtgctggcagggggatccgcgagttaggcccaccttccaaggaaacgggctgaatggggagctcatccgccaggtgctggcagctctgctccctgtgactggcaggtggcgctcccccggggaaggcttccgccttgagtctgaagtcatcatccgagtgacatgtcccctttcttccccacaagaaattacttctgaaaccgaggacctgtgtgaaaagcctgatgacgaagtgaaagaaactgctcatgatctggacgtgaaaagccccccggagcccaggagcgaggtggtgcctgcgaggctcaagcgggcctctgcccccaccttcgataacgactacagcctctccgagctgctctcacagctggactctggagtttcccaggctgtcgagggccccgaggagctcagccgcagctcctctgagtccaagctgccatcgtccggcagtgggaagaggctctcgggggtgtcctcggtggactccgccttctcttccagaggatcactgtcgctgtcctttgagcgggaaccttcaaccagcgatctgggcaccacagacgtccagaagaagaagcttgtggatgccatcgtgtccggggacaccagcaaactgatgaagatcctgcagccgcaggacgtggacctggcactggacagcggtgccagcctgctgcacctggcggtggaggccgggcaagaggagtgcgccaagtggctgctgctcaacaatgccaaccccaacctgagcaaccgtaggggctccaccccgttgcacatggccgtggagaggagggtgcggggtgtcgtggagctcctgctggcgcggaagatcagtgtcaacgccaaggatgaggaccagtggacagccctccactttgcagcccagaacggggacgagtctagcacacggctgctgttggagaagaacgcctcggtcaacgaggtggactttgagggccggacgcccatgcacgtggcctgccagcacgggcaggagaatatcgtgcgcatcctgctgcgccgaggcgtggacgtgagcctgcagggcaaggatgcctggctgccactgcactacgctgcctggcagggccacctgcccatcgtcaagctgctggccaagcagccgggggtgagtgtgaacgcccagacgctggatgggaggacgccattgcacctggccgcacagcgcgggcactaccgcgtggcccgcatcctcatcgacctgtgctccgacgtcaacgtctgcagcctgctggcacagacacccctgcacgtggccgcggagacggggcacacgagcactgccaggctgctcctgcatcggggcgctggcaaggaggccatgacctcagacggctacaccgctctgcacctggctgcccgcaacggacacctggccactgtcaagctgcttgtcgaggagaaggccgatgtgctggcccggggacccctgaaccagacggcgctgcacctggctgccgcccacgggcactcggaggtggtggaggagttggtcagcgccgatgtcattgacctgttcgacgagcaggggctcagcgcgctgcacctggccgcccagggccggcacgcacagacggtggagactctgctcaggcatggggcccacatcaacctgcagagcctcaagttccagggcggccatggccccgccgccacgctcctgcggcgaagcaagacctagctggctgcctgcggagaccgggggtccacgtggggctcttgtcctgtcctgtgttcctcgtggggatggaacgatcctgcgtggggccctgttgtggcttacctaaatgttaaccaagcagaggtgacatggtgccatcaggaggcggctgctgctgaccggagtgtcccctccaggtgaagctggctcaggtgcacatgcccgctccatcatcgatctaggcacctgctgtctgaagggaccgtgggtcagaatcatttcgttgtgctcctaatgggtcgctgaggctggtctctcagtgatgaagccccaggcgtggaagcatccactctctcctgaggcgagccaccttgggttgctggagctcaccagtcttgagggaggtgcaggggaaactgtgttttttatcttcatacatgacggtgggcagagaggcctgtcttaaagtttccatggaattgttttataaaatatcttaagagatgaataccttatcagctgttgcttgaaacctgttaaaaatgttcataacattggatagtctagtctctaaatgatgactaagtagtggggttggctttgaaaacaatgttttatgcaacaaggaacgaatggtagcagccagctttgcggggcgtatgtgtggccagctcttaaccattccagtctattacttgggtgagtccttgtggacaaccacacacacgtgcccacatggtactagctgccgttcgtttctcgttgcctaagatgttttggcaactctagagccacaggcctaagtcattaaaaaattctccctttgtaacctcagtgctggggactgaggcgagccccctcaggtcgctggagtgcaccagtcttggggaagaggtgcaggagaagctgtgttttttatctccacacgcagtatgaagataaaattacatagtattacctagacatagacagtattacctaggtagatgcactgctcacctgcgcccttcccagctctcatttttgttaggtgatttgggatagggatagtgttttggggtatggggggagtgtttctgacctgctttgcagacgtgcctccgcacctcagcagtttggggtgtggccccagggcggttcttggatgtaaaagatgtggccatctagcctcgtaacttcactgtcacctgtgtcccatagggtgccttctgaatactgttattagaataagtttgttgcagaacgtgaccctgcgtgcaaacatgtaccgtggcctggtatatgatagagattgatattaatgtaccatgtatgttaatgtgaatctgtgggcaggatacttttccatggcaggaaatatccaagctgttgaaactggctatgttttaatatgcctcattgtgcctttactgttgtgtggactgcgtgagggacaagaagttccatttgatgtcaataaagcaaagtacttgcctacttttttgaagctg

SEQ ID NO: 174572 - DNA, 3889 bp, Homo sapiens
  Payload ID: 14281
  Gene Symbol: RIPK4
  Gene Name: receptor-interacting serine-threonine kinase 4
  Uniprot ID: P57078
  ENST ID: ENST00000332512
  CDS Start-End: 66-2420
gtaacagggcggagcgcgcacctgggcacctgggcagccgccgcggcgctggctagacgtgcgcgatggagggcgacggcgggaccccatgggccctggcgctgctgcgcaccttcgacgcgggcgagttcacgggctgggagaaggtgggctcgggcggcttcgggcaggtgtacaaggtgcgccatgtccactggaagacctggctggccatcaagtgctcgcccagcctgcacgtcgacgacagggagcgcatggagcttttggaagaagccaagaagatggagatggccaagtttcgctacatcctgcctgtgtatggcatctgccgcgaacctgtcggcctggtcatggagtacatggagacgggctccctggaaaagctgctggcttcggagccattgccatgggatctccggttccgaatcatccacgagacggcggtgggcatgaacttcctgcactgcatggccccgccactcctgcacctggacctcaagcccgcgaacatcctgctggatgcccactaccacgtcaagatttctgattttggtctggccaagtgcaacgggctgtcccactcgcatgacctcagcatggatggcctgtttggcacaatcgcctacctccctccagagcgcatcagggagaagagccggctcttcgacaccaagcacgatgtatacagctttgcgatcgtcatctggggcgtgctcacacagaagaagccgtttgcagatgagaagaacatcctgcacatcatggtgaaggtggtgaagggccaccgccccgagctgccgcccgtgtgcagagcccggccgcgcgcctgcagccacctgatacgcctcatgcagcggtgctggcagggggatccgcgagttaggcccaccttccaagaaattacttctgaaaccgaggacctgtgtgaaaagcctgatgacgaagtgaaagaaactgctcatgatctggacgtgaaaagccccccggagcccaggagcgaggtggtgcctgcgaggctcaagcgggcctctgcccccaccttcgataacgactacagcctctccgagctgctctcacagctggactctggagtttcccaggctgtcgagggccccgaggagctcagccgcagctcctctgagtccaagctgccatcgtccggcagtgggaagaggctctcgggggtgtcctcggtggactccgccttctcttccagaggatcactgtcgctgtcctttgagcgggaaccttcaaccagcgatctgggcaccacagacgtccagaagaagaagcttgtggatgccatcgtgtccggggacaccagcaaactgatgaagatcctgcagccgcaggacgtggacctggcactggacagcggtgccagcctgctgcacctggcggtggaggccgggcaagaggagtgcgccaagtggctgctgctcaacaatgccaaccccaacctgagcaaccgtaggggctccaccccgttgcacatggccgtggagaggagggtgcggggtgtcgtggagctcctgctggcgcggaagatcagtgtcaacgccaaggatgaggaccagtggacagccctccactttgcagcccagaacggggacgagtctagcacacggctgctgttggagaagaacgcctcggtcaacgaggtggactttgagggccggacgcccatgcacgtggcctgccagcacgggcaggagaatatcgtgcgcatcctgctgcgccgaggcgtggacgtgagcctgcagggcaaggatgcctggctgccactgcactacgctgcctggcagggccacctgcccatcgtcaagctgctggccaagcagccgggggtgagtgtgaacgcccagacgctggatgggaggacgccattgcacctggccgcacagcgcgggcactaccgcgtggcccgcatcctcatcgacctgtgctccgacgtcaacgtctgcagcctgctggcacagacacccctgcacgtggccgcggagacggggcacacgagcactgccaggctgctcctgcatcggggcgctggcaaggaggccatgacctcagacggctacaccgctctgcacctggctgcccgcaacggacacctggccactgtcaagctgcttgtcgaggagaaggccgatgtgctggcccggggacccctgaaccagacggcgctgcacctggctgccgcccacgggcactcggaggtggtggaggagttggtcagcgccgatgtcattgacctgttcgacgagcaggggctcagcgcgctgcacctggccgcccagggccggcacgcacagacggtggagactctgctcaggcatggggcccacatcaacctgcagagcctcaagttccagggcggccatggccccgccgccacgctcctgcggcgaagcaagacctagctggctgcctgcggagaccgggggtccacgtggggctcttgtcctgtcctgtgttcctcgtggggatggaacgatcctgcgtggggccctgttgtggcttacctaaatgttaaccaagcagaggtgacatggtgccatcaggaggcggctgctgctgaccggagtgtcccctccaggtgaagctggctcaggtgcacatgcccgctccatcatcgatctaggcacctgctgtctgaagggaccgtgggtcagaatcatttcgttgtgctcctaatgggtcgctgaggctggtctctcagtgatgaagccccaggcgtggaagcatccactctctcctgaggcgagccaccttgggttgctggagctcaccagtcttgagggaggtgcaggggaaactgtgttttttatcttcatacatgacggtgggcagagaggcctgtcttaaagtttccatggaattgttttataaaatatcttaagagatgaataccttatcagctgttgcttgaaacctgttaaaaatgttcataacattggatagtctagtctctaaatgatgactaagtagtggggttggctttgaaaacaatgttttatgcaacaaggaacgaatggtagcagccagctttgcggggcgtatgtgtggccagctcttaaccattccagtctattacttgggtgagtccttgtggacaaccacacacacgtgcccacatggtactagctgccgttcgtttctcgttgcctaagatgttttggcaactctagagccacaggcctaagtcattaaaaaattctccctttgtaacctcagtgctggggactgaggcgagccccctcaggtcgctggagtgcaccagtcttggggaagaggtgcaggagaagctgtgttttttatctccacacgcagtatgaagataaaattacatagtattacctagacatagacagtattacctaggtagatgcactgctcacctgcgcccttcccagctctcatttttgttaggtgatttgggatagggatagtgttttggggtatggggggagtgtttctgacctgctttgcagacgtgcctccgcacctcagcagtttggggtgtggccccagggcggttcttggatgtaaaagatgtggccatctagcctcgtaacttcactgtcacctgtgtcccatagggtgccttctgaatactgttattagaataagtttgttgcagaacgtgaccctgcgtgcaaacatgtaccgtggcctggtatatgatagagattgatattaatgtaccatgtatgttaatgtgaatctgtgggcaggatacttttccatggcaggaaatatccaagctgttgaaactggctatgttttaatatgcctcattgtgcctttactgttgtgtggactgcgtgagggacaagaagttccatttgatgtcaataaagcaaagtacttgcctacttttttgaagctg

SEQ ID NO: 174573 - DNA, 586 bp, Homo sapiens
  Payload ID: 14282
  Gene Symbol: RYK
  Gene Name: receptor-like tyrosine kinase
  ENST ID: ENST00000486725
  CDS Start-End: 1-280
caaaggcaaggtgaaggatatagcaatatccagagagaggataactctaaaagatgtactccaagaaggtacttttgggcgtattttccatgggattttaatagatgaaaaagatccaaataaagaaaaacaagcatttgtcaaaacagttaaagatcaagcttctgaaattcaggtgacaatgatgctcactgaaagttgtaagctgcgaggtcttcatcacaggcaatttctcagcaagacctggtacacatggctattcagattgcctgtggaatgagctacctggccagaagggaagtcatccacaaagacctggctgccaggaactgtgtcattgatgacacacttcaagttaagatcacagacaatgccctctccagagacttgttccccatggactatcactgtctgggggacaatgaaaacaggccagttcgttggatggctcttgaaagtctggttaataacgagttctctagcgctagtgatgtgtgggcctttggagtgacgctgtgggaactcatgactctgggccagactccctacgtggacattgaccccttcgagatggccgcatacctga

SEQ ID NO: 174574 - DNA, 2667 bp, Homo sapiens
  Payload ID: 14282
  Gene Symbol: RYK
  Gene Name: receptor-like tyrosine kinase
  ENST ID: ENST00000460933
  CDS Start-End: 1-1647
agcgtgagtctctacctgagcgaggacgaggtgcgccggctgatcggtcttgatgcagaactttattatgtgagaaatgaccttattagtcactacgctctatcctttagtctgttagtacccagtgagacaaatttcctgcacttcacctggcatgcgaagtccaaggttgaatataagctgggattccaagtggacaatgttttggcaatggatatgccccaggtcaacatttctgttcagggggaagttccacgcactttatcagtgtttcgggtagagctttcctgtactggcaaagtagattctgaagttatgatactaatgcagctcaacttgacagtaaattcttcaaaaaattttaccgtcttaaattttaaacgaaggaaaatgtgctacaaaaaacttgaagaagtaaaaacttcagccttggacaaaaacactagcagaactatttatgatcctgtacatgcagctccaaccacttctacgcgtgtgttttatattagtgtaggggtttgttgtgcagtaatatttctcgtagcaataatattagctgttttgcaccttcatagtatgaaaaggattgaactggatgacagcattagtgccagcagtagttcccaagggctgtctcagccatccacccagacgactcagtatctgagagcagacacgcccaacaatgcaactcctatcaccagctccttaggttatcctaccttgcggatagagaagaacgacttgagaagtgtcactcttttggaggccaaaggcaaggtgaaggatatagcaatatccagagagaggataactctaaaagatgtactccaagaaggtacttttgggcgtattttccatgggattttaatagatgaaaaagatccaaataaagaaaaacaagcatttgtcaaaacagttaaagatcaagcttctgaaattcaggtgacaatgatgctcactgaaagttgtaagctgcgaggtcttcatcacagaaatcttcttcctattactcatgtgtgtatagaagaaggagaaaagcccatggtgatattgccttacatgaattgggggaatcttaaattgtttttacgacagtgcaagttagtagaggccaataatccacaggcaatttctcagcaagacctggtacacatggctattcagattgcctgtggaatgagctacctggccagaagggaagtcatccacaaagacctggctgccaggaactgtgtcattgatgacacacttcaagttaagatcacagacaatgccctctccagagacttgttccccatggactatcactgtctgggggacaatgaaaacaggccagttcgttggatggctcttgaaagtctggttaataacgagttctctagcgctagtgatgtgtgggcctttggagtgacgctgtgggaactcatgactctgggccagactccctacgtggacattgaccccttcgagatggccgcatacctgaaagatggttaccgaatagcccagccaatcaactgtcctgatgaattatttgctgtgatggcctgttgctgggccttagatccagaggagaggcccaagtttcagcagctggtacagtgcctaacagagtttcatgcagccctgggggcctacgtctgactcctctccaatcccacaccatcaggaagaaggtgcctgtcggggctcacttgaagcctgtcagggatgctttgtatctaacacaacgccaacagaagcacatttgtcttccagaacaccgtgccttagaaatgctttagaatctgaactttttaagacagacttaataatgtggcatattttctagatatcacttttattaggttgaactgaaagggtttttgtaaattttttggccaaaattttttaaaacatacttactttggactaggggtacattcttacaaaataaataaacagtttttaaaattgtttagacacagatatttggaattagctatcttagtgccaactgctttttatttttttacttcatcaaggtgatgtaagtgactcacctttaaagtttttttagtgttattttttatcactactctgggaaatggtttgtcttcaagatgcaatacttttcttagtaaaggaaaaacagcataaaaagatacctggtctgccttgtacaagaaaaggcaatattagaggaagaaaatttaaagaaaagctagaggaaaaaaaaatttttttaaaaatacttattagaagcaaactgcccttgcatggaaaactgtttatttttttcagtgaaaaggaattctgctttcgtgtttttgggaaagcaggaactgagttcattacatctttaatttggcagaaattagcctttctgtgaaccagatgtggtttggggcagatctgtagtaaacaatggtgattttatttatttttactctctggaaaaggagataatacaattccagaaagtgaactcatatttctaaggttaagattcccttttattgcacctagaatagtgctatgcacagagcgggtgcttgagttgttgtcgttttttgtttgttttttaaatgtaaactggtaaattttgtgcttatcttcaaggctggcttaagtataaaattgttttttaaacacttgaaaaattaaaggatttgttttatatta

SEQ ID NO: 174575 - DNA, 2942 bp, Homo sapiens
  Payload ID: 14282
  Gene Symbol: RYK
  Gene Name: receptor-like tyrosine kinase
  ENST ID: ENST00000620660
  CDS Start-End: 91-1923
cggctcggggctgtgagcggctcggggccgggggtgggcggcggtgcggcgggcggccgacgctcctcttcggcggcggcggcggcggccatgcgtggggcggcgcggctggggcggccgggccggagttgcctcccgggggcccgcggcctgagggccccgccgccgccgccgctgctgcttctgcttgcgctgttgccgctgctgcccgcgcctggcgctgccgccgcccccgccccgcggcccccggagctgcagtcggcttccgcggggcccagcgtgagtctctacctgagcgaggacgaggtgcgccggctgatcggtcttgatgcagaactttattatgtgagaaatgaccttattagtcactacgctctatcctttagtctgttagtacccagtgagacaaatttcctgcacttcacctggcatgcgaagtccaaggttgaatataagctgggattccaagtggacaatgttttggcaatggatatgccccaggtcaacatttctgttcagggggaagttccacgcactttatcagtgtttcgggtagagctttcctgtactggcaaagtagattctgaagttatgatactaatgcagctcaacttgacagtaaattcttcaaaaaattttaccgtcttaaattttaaacgaaggaaaatgtgctacaaaaaacttgaagaagtaaaaacttcagccttggacaaaaacactagcagaactatttatgatcctgtacatgcagctccaaccacttctacgcgtgtgttttatattagtgtaggggtttgttgtgcagtaatatttctcgtagcaataatattagctgttttgcaccttcatagtatgaaaaggattgaactggatgacagcattagtgccagcagtagttcccaagggctgtctcagccatccacccagacgactcagtatctgagagcagacacgcccaacaatgcaactcctatcaccagctccttaggttatcctaccttgcggatagagaagaacgacttgagaagtgtcactcttttggaggccaaaggcaaggtgaaggatatagcaatatccagagagaggataactctaaaagatgtactccaagaaggtacttttgggcgtattttccatgggattttaatagatgaaaaagatccaaataaagaaaaacaagcatttgtcaaaacagttaaagatcaagcttctgaaattcaggtgacaatgatgctcactgaaagttgtaagctgcgaggtcttcatcacagaaatcttcttcctattactcatgtgtgtatagaagaaggagaaaagcccatggtgatattgccttacatgaattgggggaatcttaaattgtttttacgacagtgcaagttagtagaggccaataatccacaggcaatttctcagcaagacctggtacacatggctattcagattgcctgtggaatgagctacctggccagaagggaagtcatccacaaagacctggctgccaggaactgtgtcattgatgacacacttcaagttaagatcacagacaatgccctctccagagacttgttccccatggactatcactgtctgggggacaatgaaaacaggccagttcgttggatggctcttgaaagtctggttaataacgagttctctagcgctagtgatgtgtgggcctttggagtgacgctgtgggaactcatgactctgggccagactccctacgtggacattgaccccttcgagatggccgcatacctgaaagatggttaccgaatagcccagccaatcaactgtcctgatgaattatttgctgtgatggcctgttgctgggccttagatccagaggagaggcccaagtttcagcagctggtacagtgcctaacagagtttcatgcagccctgggggcctacgtctgactcctctccaatcccacaccatcaggaagaaggtgcctgtcggggctcacttgaagcctgtcagggatgctttgtatctaacacaacgccaacagaagcacatttgtcttccagaacaccgtgccttagaaatgctttagaatctgaactttttaagacagacttaataatgtggcatattttctagatatcacttttattaggttgaactgaaagggtttttgtaaattttttggccaaaattttttaaaacatacttactttggactaggggtacattcttacaaaataaataaacagtttttaaaattgtttagacacagatatttggaattagctatcttagtgccaactgctttttatttttttacttcatcaaggtgatgtaagtgactcacctttaaagtttttttagtgttattttttatcactactctgggaaatggtttgtcttcaagatgcaatacttttcttagtaaaggaaaaacagcataaaaagatacctggtctgccttgtacaagaaaaggcaatattagaggaagaaaatttaaagaaaagctagaggaaaaaaaaatttttttaaaaatacttattagaagcaaactgcccttgcatggaaaactgtttatttttttcagtgaaaaggaattctgctttcgtgtttttgggaaagcaggaactgagttcattacatctttaatttggcagaaattagcctttctgtgaaccagatgtggtttggggcagatctgtagtaaacaatggtgattttatttatttttactctctggaaaaggagataatacaattccagaaagtgaactcatatttctaaggttaagattcccttttattgcacctagaatagtgctatgcacagagcgggtgcttgagttgttgtcgttttttgtttgttttttaaatgtaaactggtaaattttgtgcttatcttcaaggctggcttaagtataaaattgttttttaaacacttgaaaaattaaaggatttgttttatatt

SEQ ID NO: 174576 - DNA, 2934 bp, Homo sapiens
  Payload ID: 14282
  Gene Symbol: RYK
  Gene Name: receptor-like tyrosine kinase
  ENST ID: ENST00000623711
  CDS Start-End: 91-1914
cggctcggggctgtgagcggctcggggccgggggtgggcggcggtgcggcgggcggccgacgctcctcttcggcggcggcggcggcggccatgcgtggggcggcgcggctggggcggccgggccggagttgcctcccgggggcccgcggcctgagggccccgccgccgccgccgctgctgcttctgcttgcgctgttgccgctgctgcccgcgcctggcgctgccgccgcccccgccccgcggcccccggagctgcagtcggcttccgcggggcccagcgtgagtctctacctgagcgaggacgaggtgcgccggctgatcggtcttgatgcagaactttattatgtgagaaatgaccttattagtcactacgctctatcctttagtctgttagtacccagtgagacaaatttcctgcacttcacctggcatgcgaagtccaaggttgaatataagctgggattccaagtggacaatgttttggcaatggatatgccccaggtcaacatttctgttcagggggaagttccacgcactttatcagtgtttcgggtagagctttcctgtactggcaaagtagattctgaagttatgatactaatgcagctcaacttgacagtaaattcttcaaaaaattttaccgtcttaaattttaaacgaaggaaaatgtgctacaaaaaacttgaagaagtaaaaacttcagccttggacaaaaacactagcagaactatttatgatcctgtacatgcagctccaaccacttctacgcgtgtgttttatattagtgtaggggtttgttgtgcagtaatatttctcgtagcaataatattagctgttttgcaccttcatagtatgaaaaggattgaactggatgacagcattagtgccagcagtagttcccaagggctgtctcagccatccacccagacgactcagtatctgagagcagacacgcccaacaatgcaactcctatcaccagttatcctaccttgcggatagagaagaacgacttgagaagtgtcactcttttggaggccaaaggcaaggtgaaggatatagcaatatccagagagaggataactctaaaagatgtactccaagaaggtacttttgggcgtattttccatgggattttaatagatgaaaaagatccaaataaagaaaaacaagcatttgtcaaaacagttaaagatcaagcttctgaaattcaggtgacaatgatgctcactgaaagttgtaagctgcgaggtcttcatcacagaaatcttcttcctattactcatgtgtgtatagaagaaggagaaaagcccatggtgatattgccttacatgaattgggggaatcttaaattgtttttacgacagtgcaagttagtagaggccaataatccacaggcaatttctcagcaagacctggtacacatggctattcagattgcctgtggaatgagctacctggccagaagggaagtcatccacaaagacctggctgccaggaactgtgtcattgatgacacacttcaagttaagatcacagacaatgccctctccagagacttgttccccatggactatcactgtctgggggacaatgaaaacaggccagttcgttggatggctcttgaaagtctggttaataacgagttctctagcgctagtgatgtgtgggcctttggagtgacgctgtgggaactcatgactctgggccagactccctacgtggacattgaccccttcgagatggccgcatacctgaaagatggttaccgaatagcccagccaatcaactgtcctgatgaattatttgctgtgatggcctgttgctgggccttagatccagaggagaggcccaagtttcagcagctggtacagtgcctaacagagtttcatgcagccctgggggcctacgtctgactcctctccaatcccacaccatcaggaagaaggtgcctgtcggggctcacttgaagcctgtcagggatgctttgtatctaacacaacgccaacagaagcacatttgtcttccagaacaccgtgccttagaaatgctttagaatctgaactttttaagacagacttaataatgtggcatattttctagatatcacttttattaggttgaactgaaagggtttttgtaaattttttggccaaaattttttaaaacatacttactttggactaggggtacattcttacaaaataaataaacagtttttaaaattgtttagacacagatatttggaattagctatcttagtgccaactgctttttatttttttacttcatcaaggtgatgtaagtgactcacctttaaagtttttttagtgttattttttatcactactctgggaaatggtttgtcttcaagatgcaatacttttcttagtaaaggaaaaacagcataaaaagatacctggtctgccttgtacaagaaaaggcaatattagaggaagaaaatttaaagaaaagctagaggaaaaaaaaatttttttaaaaatacttattagaagcaaactgcccttgcatggaaaactgtttatttttttcagtgaaaaggaattctgctttcgtgtttttgggaaagcaggaactgagttcattacatctttaatttggcagaaattagcctttctgtgaaccagatgtggtttggggcagatctgtagtaaacaatggtgattttatttatttttactctctggaaaaggagataatacaattccagaaagtgaactcatatttctaaggttaagattcccttttattgcacctagaatagtgctatgcacagagcgggtgcttgagttgttgtcgttttttgtttgttttttaaatgtaaactggtaaattttgtgcttatcttcaaggctggcttaagtataaaattgttttttaaacacttgaaaaattaaaggatttgttttatatta

SEQ ID NO: 174577 - DNA, 1258 bp, Homo sapiens
  Payload ID: 14282
  Gene Symbol: RYK
  Gene Name: receptor-like tyrosine kinase
  ENST ID: ENST00000484106
  CDS Start-End: 1-474
gaaagttgtaagctgcgaggtcttcatcacagaaatcttcttcctattactcatgtgtgtatagaagaaggagaaaagcccatggtgatattgccttacatgaattgggggaatcttaaattgtttttacgacagtgcaagttagtagaggccaataatccacaggcaatttctcagcaagacctggtacacatggctattcagattgcctgtggaatgagctacctggccagaagggaagtcatccacaaagacctggctgccaggaactgtgtcattgatgacacacttcaagttaagatcacagacaatgccctctccagagacttgttccccatggactatcactgtctgggggacaatgaaaacaggccagttcgttggatggctcttgaaagtctggttaataacgagttctctagcgctagtgatgtggctccaccatgcggtgccgctctctttggagtctcctgaaggggaggagggccctcttggctgctcttctgactccaacagctggatgaagcctattcttgtcctacaggagccccactggaagtgaataagctcagttgccatatttggaccaaaattctcacatttgatactggaaggggtgaaaagagacctgttcaggggcagtgcccagtgaggagaccctcaaacgagaggcagagtccctcaagcctttgtacaatgccaccaagggtgctgccccttcttcaacagaacgtcctccttgcagggaggctgcagtgatgtcagagatgaatcacaggccagaggtgagagctggagaaagggaaactctcccagtccctgggagtggtcattacagactgggaaatcgctctccagctgatggtaaaggactgcaaatcctattcatgtgactcagggcctggtgtgccttctgggaagaaagcagaagagggttcctaactgtagaagggaaaagtttccctttattcttccagccacgtggttcaataagcatgtacaagctcttaccagggccaggcactgtgcgggcaccagaaacattaagatggaatgacacaggtctgccctggaagaaacattaagatggaatgacacaggtctgccctggaagggctcctttccagggctcagggactctgtgactccttttggggagcagagttgtggacaagagtgcatttttctagagagatggtccacaagccatccagagccaggctctgtctccaggtacccttgatccttggagacctcc

SEQ ID NO: 174578 - DNA, 6564 bp, Homo sapiens
  Payload ID: 14283
  Gene Symbol: RAG1
  Gene Name: recombination activating gene 1
  Uniprot ID: P15918
  ENST ID: ENST00000299440
  CDS Start-End: 113-3244
gagagcagagaacacactttgccttctctttggtattgagtaatatcaaccaaattgcagacatctcaacactttggccaggcagcctgctgagcaaggtacctcagccagcatggcagcctctttcccacccaccttgggactcagttctgccccagatgaaattcagcacccacatattaaattttcagaatggaaatttaagctgttccgggtgagatcctttgaaaagacacctgaagaagctcaaaaggaaaagaaggattcctttgaggggaaaccctctctggagcaatctccagcagtcctggacaaggctgatggtcagaagccagtcccaactcagccattgttaaaagcccaccctaagttttcaaagaaatttcacgacaacgagaaagcaagaggcaaagcgatccatcaagccaaccttcgacatctctgccgcatctgtgggaattcttttagagctgatgagcacaacaggagatatccagtccatggtcctgtggatggtaaaaccctaggccttttacgaaagaaggaaaagagagctacttcctggccggacctcattgccaaggttttccggatcgatgtgaaggcagatgttgactcgatccaccccactgagttctgccataactgctggagcatcatgcacaggaagtttagcagtgccccatgtgaggtttacttcccgaggaacgtgaccatggagtggcacccccacacaccatcctgtgacatctgcaacactgcccgtcggggactcaagaggaagagtcttcagccaaacttgcagctcagcaaaaaactcaaaactgtgcttgaccaagcaagacaagcccgtcagcacaagagaagagctcaggcaaggatcagcagcaaggatgtcatgaagaagatcgccaactgcagtaagatacatcttagtaccaagctccttgcagtggacttcccagagcactttgtgaaatccatctcctgccagatctgtgaacacattctggctgaccctgtggagaccaactgtaagcatgtcttttgccgggtctgcattctcagatgcctcaaagtcatgggcagctattgtccctcttgccgatatccatgcttccctactgacctggagagtccagtgaagtcctttctgagcgtcttgaattccctgatggtgaaatgtccagcaaaagagtgcaatgaggaggtcagtttggaaaaatataatcaccacatctcaagtcacaaggaatcaaaagagatttttgtgcacattaataaagggggccggccccgccaacatcttctgtcgctgactcggagagctcagaagcaccggctgagggagctcaagctgcaagtcaaagcctttgctgacaaagaagaaggtggagatgtgaagtccgtgtgcatgaccttgttcctgctggctctgagggcgaggaatgagcacaggcaagctgatgagctggaggccatcatgcagggaaagggctctggcctgcagccagctgtttgcttggccatccgtgtcaacaccttcctcagctgcagtcagtaccacaagatgtacaggactgtgaaagccatcacagggagacagatttttcagcctttgcatgcccttcggaatgctgagaaggtacttctgccaggctaccaccactttgagtggcagccacctctgaagaatgtgtcttccagcactgatgttggcattattgatgggctgtctggactatcatcctctgtggatgattacccagtggacaccattgcaaagaggttccgctatgattcagctttggtgtctgctttgatggacatggaagaagacatcttggaaggcatgagatcccaagaccttgatgattacctgaatggccccttcactgtggtggtgaaggagtcttgtgatggaatgggagacgtgagtgagaagcatgggagtgggcctgtagttccagaaaaggcagtccgtttttcattcacaatcatgaaaattactattgcccacagctctcagaatgtgaaagtatttgaagaagccaaacctaactctgaactgtgttgcaagccattgtgccttatgctggcagatgagtctgaccacgagacgctgactgccatcctgagtcctctcattgctgagagggaggccatgaagagcagtgaattaatgcttgagctgggaggcattctccggactttcaagttcatcttcaggggcaccggctatgatgaaaaacttgtgcgggaagtggaaggcctcgaggcttctggctcagtctacatttgtactctttgtgatgccacccgtctggaagcctctcaaaatcttgtcttccactctataaccagaagccatgctgagaacctggaacgttatgaggtctggcgttccaacccttaccatgagtctgtggaagaactgcgggatcgggtgaaaggggtctcagctaaacctttcattgagacagtcccttccatagatgcactccactgtgacattggcaatgcagctgagttctacaagatcttccagctagagataggggaagtgtataagaatcccaatgcttccaaagaggaaaggaaaaggtggcaggccacactggacaagcatctccggaagaagatgaacctcaaaccaatcatgaggatgaatggcaactttgccaggaagctcatgaccaaagagactgtggatgcagtttgtgagttaattccttccgaggagaggcacgaggctctgagggagctgatggatctttacctgaagatgaaaccagtatggcgatcatcatgccctgctaaagagtgcccagaatccctctgccagtacagtttcaattcacagcgttttgctgagctcctttctacgaagttcaagtataggtatgagggaaaaatcaccaattattttcacaaaaccctggcccatgttcctgaaattattgagagggatggctccattggggcatgggcaagtgagggaaatgagtctggtaacaaactgtttaggcgcttccggaaaatgaatgccaggcagtccaaatgctatgagatggaagatgtcctgaaacaccactggttgtacacctccaaatacctccagaagtttatgaatgctcataatgcattaaaaacctctgggtttaccatgaaccctcaggcaagcttaggggacccattaggcatagaggactctctggaaagccaagattcaatggaattttaagtagggcaaccacttatgagttggtttttgcaattgagtttccctctgggttgcattgagggcttctcctagcaccctttactgctgtgtatggggcttcaccatccaagaggtggtaggttggagtaagatgctacagatgctctcaagtcaggaatagaaactgatgagctgattgcttgaggcttttagtgagttccgaaaagcaacaggaaaaatcagttatctgaaagctcagtaactcagaacaggagtaactgcaggggaccagagatgagcaaagatctgtgtgtgttggggagctgtcatgtaaatcaaagccaaggttgtcaaagaacagccagtgaggccaggaaagaaattggtcttgtggttttcatttttttcccccttgattgattatattttgtattgagatatgataagtgccttctatttcatttttgaataattcttcatttttataattttacatatcttggcttgctatataagattcaaaagagctttttaaatttttctaataatatcttacatttgtacagcatgatgacctttacaaagtgctctcaatgcatttacccattcgttatataaatatgttacatcaggacaactttgagaaaatcagtccttttttatgtttaaattatgtatctattgtaaccttcagagtttaggaggtcatctgctgtcatggatttttcaataatgaatttagaatacacctgttagctacagttagttattaaatcttctgataatatatgtttacttagctatcagaagccaagtatgattctttatttttactttttcatttcaagaaatttagagtttccaaatttagagcttctgcatacagtcttaaagccacagaggcttgtaaaaatataggttagcttgatgtctaaaaatatatttcatgtcttactgaaacattttgccagactttctccaaatgaaacctgaatcaatttttctaaatctaggtttcatagagtcctctcctctgcaatgtgttattctttctataatgatcagtttactttcagtggattcagaattgtgtagcaggataaccttgtatttttccatccgctaagtttagatggagtccaaacgcagtacagcagaagagttaacatttacacagtgctttttaccactgtggaatgttttcacactcatttttccttacaacaattctgaggagtaggtgttgttattatctccatttgatgggggtttaaatgatttgctcaaagtcatttaggggtaataaatacttggcttggaaatttaacacagtccttttgtctccaaagcccttcttctttccaccacaaattaatcactatgtttataaggtagtatcagaatttttttaggattcacaactaatcactatagcacatgaccttgggattacatttttatggggcaggggtaagcaagtttttaaatcatttgtgtgctctggctcttttgatagaagaaagcaacacaaaagctccaaagggccccctaaccctcttgtggctccagttatttggaaactatgatctgcatccttaggaatctgggatttgccagttgctggcaatgtagagcaggcatggaattttatatgctagtgagtcataatgatatgttagtgttaattagttttttcttcctttgattttattggccataattgctactcttcatacacagtatatcaaagagcttgataatttagttgtcaaaagtgcatcggcgacattatctttaattgtatgtatttggtgcttcttcagggattgaactcagtatctttcattaaaaaacacagcagttttccttgctttttatatgcagaatatcaaagtcatttctaatttagttgtcaaaaacatatacatattttaacattagtttttttgaaaactcttggttttgtttttttggaaatgagtgggccactaagccacactttcccttcatcctgcttaatccttccagcatgtctctgcactaataaacagctaaattcacataatcatcctatttactgaagcatggtcatgctggtttatagattttttacccatttctactctttttctctattggtggcactgtaaatactttccagtattaaattatccttttctaacactgtaggaactattttgaatgcatgtgactaagagcatgatttatagcacaacctttccaataatcccttaatcagatcacattttgataaaccctgggaacatctggctgcaggaatttcaatatgtagaaacgctgcctatggttttttgcccttactgttgagactgcaatatcctagaccctagttttatactagagttttatttttagcaatgcctattgcaagtgcaattatatactccagggaaattcaccacactgaatcgagcatttgtgtgtgtatgtgtgaagtatatactgggacttcagaagtgcaatgtatttttctcctgtgaaacctgaatctacaagttttcctgccaagccactcaggtgcattgcagggaccagtgataatggctgatgaaaattgatgattggtcagtgaggtcaaaaggagccttgggattaataaacatgcactgagaagcaagaggaggagaaaaagatgtctttttcttccaggtgaactggaatttagttttgcctcagatttttttcccacaagatacagaagaagataaagatttttttggttgagagtgtgggtcttgcattacatcaaacagagttcaaattccacacagataagaggcaggatatataagcgccagtggtagttgggaggaataaaccattatttggatgcaggtggtttttgattgcaaatatgtgtgtgtcttcagtgattgtatgacagatgatgtattcttttgatgttaaaagattttaagtaagagtagatacattgtacccattttacattttcttattttaactacagtaatctacataaatatacctcagaaatcatttttggtgattattttttgttttgtagaattgcacttcagtttattttcttacaaataaccttacattttgtttaatggcttccaagagccttttttttttttgtatttcagagaaaattcaggtaccaggatgcaatggatttatttgattcaggggacctgtgtttccatgtcaaatgttttcaaataaaatgaaatatgagtttcaatactttttatattttaatatttccattcattaatattatggttattgtcagcaattttatgtttgaatatttgaaataaaagtttaagatt

SEQ ID NO: 174579 - DNA, 3707 bp, Homo sapiens
  Payload ID: 14283
  Gene Symbol: RAG1
  Gene Name: recombination activating gene 1
  Uniprot ID: P15918
  ENST ID: ENST00000534663
  CDS Start-End: 637-3432
gttaatgaagccaaagaagcacatgaaaggatatttctgaatacaggattctggccttaaaatacactgagtgcaatctgaagccacttcaaagaatcaccttgttttcttgctgacattgcagtggggacgatgagacccaaggacattcagccaagagggaaatatctgctagaccaggtggatatctatcaagttctctttctttcctgcagagttaactagacatccgtgttcctggatctcaggacttcgggcttggactgaattacactacggattttcctggttctccagcttgaagacagcagattgtgggacttcttgacctccataattgtgatccaagggaggtcttacttctcaataggagacaagtgacttgatttcaacacggatgggagaaattgggaggtgaaattgggagaaacatggaaatactggggaagcatgaacatctggccttttctttttcttcctgtaagtccattggagatgcaagattttaaggagcaggaggatggggggggaaggacaccctcttgcatgttgcaggtgatgagattgaagttcctaaagtttaagtaatgaatcaaaggcctgagtcaagatttaaatccaggtacctcagccagcatggcagcctctttcccacccaccttgggactcagttctgccccagatgaaattcagcacccacatattaaattttcagaatggaaatttaagctgttccgggtgagatcctttgaaaagacacctgaagaagctcaaaaggaaaagaaggattcctttgaggggaaaccctctctggagcaatctccagcagtcctggacaaggctgatggtcagaagccagtcccaactcagccattgttaaaagcccaccctaagttttcaaagaaatttcacgacaacgagaaagcaagaggcaaagcgatccatcaagccaaccttcgacatctctgccgcatctgtgggaattcttttagagctgatgagcacaacaggagatatccagtccatggtcctgtggatggtaaaaccctaggccttttacgaaagaaggaaaagagagctacttcctggccggacctcattgccaaggttttccggatcgatgtgaaggcagatgttgactcgatccaccccactgagttctgccataactgctggagcatcatgcacaggaagtttagcagtgccccatgtgaggtttacttcccgaggaacgtgaccatggagtggcacccccacacaccatcctgtgacatctgcaacactgcccgtcggggactcaagaggaagagtcttcagccaaacttgcagctcagcaaaaaactcaaaactgtgcttgaccaagcaagacaagcccgtcagcacaagagaagagctcaggcaaggatcagcagcaaggatgtcatgaagaagatcgccaactgcagtaagatacatcttagtaccaagctccttgcagtggacttcccagagcactttgtgaaatccatctcctgccagatctgtgaacacattctggctgaccctgtggagaccaactgtaagcatgtcttttgccgggtctgcattctcagatgcctcaaagtcatgggcagctattgtccctcttgccgatatccatgcttccctactgacctggagagtccagtgaagtcctttctgagcgtcttgaattccctgatggtgaaatgtccagcaaaagagtgcaatgaggaggtcagtttggaaaaatataatcaccacatctcaagtcacaaggaatcaaaagagatttttgtgcacattaataaagggggccggccccgccaacatcttctgtcgctgactcggagagctcagaagcaccggctgagggagctcaagctgcaagtcaaagcctttgctgacaaagaagaaggtggagatgtgaagtccgtgtgcatgaccttgttcctgctggctctgagggcgaggaatgagcacaggcaagctgatgagctggaggccatcatgcagggaaagggctctggcctgcagccagctgtttgcttggccatccgtgtcaacaccttcctcagctgcagtcagtaccacaagatgtacaggactgtgaaagccatcacagggagacagatttttcagcctttgcatgcccttcggaatgctgagaaggtacttctgccaggctaccaccactttgagtggcagccacctctgaagaatgtgtcttccagcactgatgttggcattattgatgggctgtctggactatcatcctctgtggatgattacccagtggacaccattgcaaagaggttccgctatgattcagctttggtgtctgctttgatggacatggaagaagacatcttggaaggcatgagatcccaagaccttgatgattacctgaatggccccttcactgtggtggtgaaggagtcttgtgatggaatgggagacgtgagtgagaagcatgggagtgggcctgtagttccagaaaaggcagtccgtttttcattcacaatcatgaaaattactattgcccacagctctcagaatgtgaaagtatttgaagaagccaaacctaactctgaactgtgttgcaagccattgtgccttatgctggcagatgagtctgaccacgagacgctgactgccatcctgagtcctctcattgctgagagggaggccatgaagagcagtgaattaatgcttgagctgggaggcattctccggactttcaagttcatcttcaggggcaccggctatgatgaaaaacttgtgcgggaagtggaaggcctcgaggcttctggctcagtctacatttgtactctttgtgatgccacccgtctggaagcctctcaaaatcttgtcttccactctataaccagaagccatgctgagaacctggaacgttatgaggtctggcgttccaacccttaccatgagtctgtggaagaactgcgggatcgggtgaaaggggtctcagctaaacctttcattgagacagtcccttccatagatgcactccactgtgacattggcaatgcagctgagttctacaagatcttccagctagagataggggaagtgtataagaatcccaatgcttccaaagaggaaaggaaaaggtggcaggccacactggacaagcatctccggaagaagatgaacctcaaaccaatcatgaggatgaatggcaactttgccaggaagctcatgaccaaagagactgtggatgcagtttgtgagttaattccttccgaggagaggcacgaggctctgagggagctgatggatctttacctgaagatgaaaccagtatggcgatcatcatgccctgctaaagagtgcccagaatccctctgccagtacagtttcaattcacagcgttttgctgagctcctttctacgaagttcaagtatagaaattaaatccatctttaatgaagaaagaggtacagctgttgaacatcttcaagggaatgaatcatggattctgaaggtgattgattgaaatgtgtcaaattcatcatcaccatcaaaactatttgcttctgcactgaaacaaaattcttcagagtcttcaaagggagtggaatcccctggatcttctgttgatgtttgactgtttgtgaatgttgtctgctcttcattagtatcatcttcagcacatttcaacatatagaaatagaatccttctgaaacaa

SEQ ID NO: 174580 - DNA, 2388 bp, Homo sapiens
  Payload ID: 14284
  Gene Symbol: RAG2
  Gene Name: recombination activating gene 2
  Uniprot ID: P55895
  ENST ID: ENST00000311485
  CDS Start-End: 163-1746
actctctttacagtcagccttctgcttgccacagtcatagtgggcagtcagtgaatcttccccaagtgctgacaattaatacctggtttagcggcaaagattcagagaggcgtgagcagcccctctggccttcagacaaaaatctacgtaccatcagaaactatgtctctgcagatggtaacagtcagtaataacatagccttaattcagccaggcttctcactgatgaattttgatggacaagttttcttctttggacaaaaaggctggcccaaaagatcctgccccactggagttttccatctggatgtaaagcataaccatgtcaaactgaagcctacaattttctctaaggattcctgctacctccctcctcttcgctacccagccacttgcacattcaaaggcagcttggagtctgaaaagcatcaatacatcatccatggagggaaaacaccaaacaatgaggtttcagataagatttatgtcatgtctattgtttgcaagaacaacaaaaaggttacttttcgctgcacagagaaagacttggtaggagatgttcctgaagccagatatggtcattccattaatgtggtgtacagccgagggaaaagtatgggtgttctctttggaggacgctcatacatgccttctacccacagaaccacagaaaaatggaatagtgtagctgactgcctgccctgtgttttcctggtggattttgaatttgggtgtgctacatcatacattcttccagaacttcaggatgggctatcttttcatgtctctattgccaaaaatgacaccatctatattttaggaggacattcacttgccaataatatccggcctgccaacctgtacagaataagggttgatcttcccctgggtagcccagctgtgaattgcacagtcttgccaggaggaatctctgtctccagtgcaatcctgactcaaactaacaatgatgaatttgttattgttggtggctatcagcttgaaaatcaaaaaagaatgatctgcaacatcatctctttagaggacaacaagatagaaattcgtgagatggagaccccagattggaccccagacattaagcacagcaagatatggtttggaagcaacatgggaaatggaactgtttttcttggcataccaggagacaataaacaagttgtttcagaaggattctatttctatatgttgaaatgtgctgaagatgatactaatgaagagcagacaacattcacaaacagtcaaacatcaacagaagatccaggggattccactccctttgaagactctgaagaattttgtttcagtgcagaagcaaatagttttgatggtgatgatgaatttgacacctataatgaagatgatgaagaagatgagtctgagacaggctactggattacatgctgccctacttgtgatgtggatatcaacacttgggtaccattctattcaactgagctcaacaaacccgccatgatctactgctctcatggggatgggcactgggtccatgctcagtgcatggatctggcagaacgcacactcatccatctgtcagcaggaagcaacaagtattactgcaatgagcatgtggagatagcaagagctctacacactccccaaagagtcctacccttaaaaaagcctccaatgaaatccctccgtaaaaaaggttctggaaaaatcttgactcctgccaagaaatcctttcttagaaggttgtttgattagttttgcaaaagcctttcagattcaggtgtatggaatttttgaatctatttttaaaatcataacattgattttaaaaatacatttttgtttatttaaaatgcctatgttttcttttagttacatgaattaagggccagaaaaaagtgtttataatgcaatgataaataaagtcattctagaccctatacattttgaaaatattttacccaaatactcaatttactaatttattcttcactgaggatttctgatctgattttttattcaacaaaccttaaacacccagaagcagtaataatcatcgaggtatgtttatatttattatataagtcttggtaacaaataacctataaagtgtttatgacaaatttagccaataaagaaattaacacccaaaagaattaaattgattattttgtgcaacataacaattcggcagttggccaaaacttaaaagcaagatctactacatcccacattagtgttctttatataccttcaagcaaccctttggattatgcccatgaacaagttagtttctcatagctttacagatgtagatataaatataaatatatgtatacatatagatagataatgttctccactgacacaaaagaagaaataaataatctacatcaa

SEQ ID NO: 174581 - DNA, 554 bp, Homo sapiens
  Payload ID: 14284
  Gene Symbol: RAG2
  Gene Name: recombination activating gene 2
  ENST ID: ENST00000532616
  CDS Start-End: 137-139
actctctttacagtcagccttctgcttgccacagtcatagtgggcagtcagtgaatcttccccaagtgctgacaattaatacctggtttagcggcaaagattcagagaggcgtgagcagcccctctggccttcagaatgaagatgaaaagaagatgtgtttaggaaccttctctgcttccctaaaagaaccctaaaaacaggagtaaaaacagtgaagaaaacaaaggaccttcaaagtgcactcgttaaaacctaataactgtatttctattactaaatgtagaagtggtaaacatctttaacaggcaatgtctcccctgcactctagggattcaaagatccatctttcggttctgtaagacagtcacggcttttgtaacctcggtgcccccttcaacctcccgccccaagcacctccagggtcgtcaggggtgtagttttgagtcgcgctcctaagcatccagacaggcaggacaccgtaacgacatctctgccgggagtcccttcagactgcggtctccagacaaaaatctacgtaccatcagaaactatg

SEQ ID NO: 174582 - DNA, 572 bp, Homo sapiens
  Payload ID: 14284
  Gene Symbol: RAG2
  Gene Name: recombination activating gene 2
  ENST ID: ENST00000529083
  CDS Start-End: 121-572
aaaagtccccaggagaggctccagcaataccagggtagcggtttgcccgacaccgctccgggcgctgcagccttccggcaacccggacgttggacaaaaatctacgtaccatcagaaactatgtctctgcagatggtaacagtcagtaataacatagccttaattcagccaggcttctcactgatgaattttgatggacaagttttcttctttggacaaaaaggctggcccaaaagatcctgccccactggagttttccatctggatgtaaagcataaccatgtcaaactgaagcctacaattttctctaaggattcctgctacctccctcctcttcgctacccagccacttgcacattcaaaggcagcttggagtctgaaaagcatcaatacatcatccatggagggaaaacaccaaacaatgaggtttcagataagatttatgtcatgtctattgtttgcaagaacaacaaaaaggttacttttcgctgcacagagaaagacttggtaggagatgttcctgaagccagatatggtcattccattaatgtggtgtacagccgagggaaaag

SEQ ID NO: 174583 - DNA, 569 bp, Homo sapiens
  Payload ID: 14284
  Gene Symbol: RAG2
  Gene Name: recombination activating gene 2
  ENST ID: ENST00000527033
  CDS Start-End: 358-569
actctctttacagtcagccttctgcttgccacagtcatagtgggcagtcagtgaatcttccccaagtgctgacaattaatacctggtttagcggcaaagattcagagaggcgtgagcagcccctctggccttcagggattcaaagatccatctttcggttctgtaagacagtcacggcttttgtaacctcggtgcccccttcaacctcccgccccaagcacctccagggtcgtcaggggtgtagttttgagtcgcgctcctaagcatccagacaggcaggacaccgtaacgacatctctgccgggagtcccttcagactgcggtctccagacaaaaatctacgtaccatcagaaactatgtctctgcagatggtaacagtcagtaataacatagccttaattcagccaggcttctcactgatgaattttgatggacaagttttcttctttggacaaaaaggctggcccaaaagatcctgccccactggagttttccatctggatgtaaagcataaccatgtcaaactgaagcctacaattttctctaaggattcctgctacctccctcc

SEQ ID NO: 174584 - DNA, 2818 bp, Homo sapiens
  Payload ID: 14284
  Gene Symbol: RAG2
  Gene Name: recombination activating gene 2
  Uniprot ID: P55895
  ENST ID: ENST00000618712
  CDS Start-End: 595-2178
attagatcagtgttcataagaacatctgtaggcacacatacacactctctttacagtcagccttctgcttgccacagtcatagtgggcagtcagtgaatcttccccaagtgctgacaattaatacctggtttagcggcaaagattcagagaggcgtgagcagcccctctggccttcagaatgaagatgaaaagaagatgtgtttaggaaccttctctgcttccctaaaagaaccctaaaaacaggagtaaaaacagtgaagaaaacaaaggaccttcaaagtgcactcgttaaaacctaataactgtatttctattactaaatgtagaagtggtaaacatctttaacaggcaatgtctcccctgcactctagggattcaaagatccatctttcggttctgtaagacagtcacggcttttgtaacctcggtgcccccttcaacctcccgccccaagcacctccagggtcgtcaggggtgtagttttgagtcgcgctcctaagcatccagacaggcaggacaccgtaacgacatctctgccgggagtcccttcagactgcggtctccagacaaaaatctacgtaccatcagaaactatgtctctgcagatggtaacagtcagtaataacatagccttaattcagccaggcttctcactgatgaattttgatggacaagttttcttctttggacaaaaaggctggcccaaaagatcctgccccactggagttttccatctggatgtaaagcataaccatgtcaaactgaagcctacaattttctctaaggattcctgctacctccctcctcttcgctacccagccacttgcacattcaaaggcagcttggagtctgaaaagcatcaatacatcatccatggagggaaaacaccaaacaatgaggtttcagataagatttatgtcatgtctattgtttgcaagaacaacaaaaaggttacttttcgctgcacagagaaagacttggtaggagatgttcctgaagccagatatggtcattccattaatgtggtgtacagccgagggaaaagtatgggtgttctctttggaggacgctcatacatgccttctacccacagaaccacagaaaaatggaatagtgtagctgactgcctgccctgtgttttcctggtggattttgaatttgggtgtgctacatcatacattcttccagaacttcaggatgggctatcttttcatgtctctattgccaaaaatgacaccatctatattttaggaggacattcacttgccaataatatccggcctgccaacctgtacagaataagggttgatcttcccctgggtagcccagctgtgaattgcacagtcttgccaggaggaatctctgtctccagtgcaatcctgactcaaactaacaatgatgaatttgttattgttggtggctatcagcttgaaaatcaaaaaagaatgatctgcaacatcatctctttagaggacaacaagatagaaattcgtgagatggagaccccagattggaccccagacattaagcacagcaagatatggtttggaagcaacatgggaaatggaactgtttttcttggcataccaggagacaataaacaagttgtttcagaaggattctatttctatatgttgaaatgtgctgaagatgatactaatgaagagcagacaacattcacaaacagtcaaacatcaacagaagatccaggggattccactccctttgaagactctgaagaattttgtttcagtgcagaagcaaatagttttgatggtgatgatgaatttgacacctataatgaagatgatgaagaagatgagtctgagacaggctactggattacatgctgccctacttgtgatgtggatatcaacacttgggtaccattctattcaactgagctcaacaaacccgccatgatctactgctctcatggggatgggcactgggtccatgctcagtgcatggatctggcagaacgcacactcatccatctgtcagcaggaagcaacaagtattactgcaatgagcatgtggagatagcaagagctctacacactccccaaagagtcctacccttaaaaaagcctccaatgaaatccctccgtaaaaaaggttctggaaaaatcttgactcctgccaagaaatcctttcttagaaggttgtttgattagttttgcaaaagcctttcagattcaggtgtatggaatttttgaatctatttttaaaatcataacattgattttaaaaatacatttttgtttatttaaaatgcctatgttttcttttagttacatgaattaagggccagaaaaaagtgtttataatgcaatgataaataaagtcattctagaccctatacattttgaaaatattttacccaaatactcaatttactaatttattcttcactgaggatttctgatctgattttttattcaacaaaccttaaacacccagaagcagtaataatcatcgaggtatgtttatatttattatataagtcttggtaacaaataacctataaagtgtttatgacaaatttagccaataaagaaattaacacccaaaagaattaaattgattattttgtgcaacataacaattcggcagttggccaaaacttaaaagcaagatctactacatcccacattagtgttctttatataccttcaagcaaccctttggattatgcccatgaacaagttagtttctcatagctttacagatgtagatataaatataaatatatgtatacatatagatagataatgttctccactgacacaaaagaagaaataaataatctacatc

SEQ ID NO: 174585 - DNA, 1682 bp, Homo sapiens
  Payload ID: 14285
  Gene Symbol: RBPJ
  Gene Name: recombination signal binding protein for immunoglobulin kappa J region
  Uniprot ID: Q06330
  ENST ID: ENST00000345843
  CDS Start-End: 166-1623
attgggtacatgcgcagtgccgctcgcgcgggccgcgccaatcctgcagcgccttcaacaggtttcgggcggcgaattccagttctccgggttttggggctccctgcgggaggcagtgctggatctgggaatctctaggaaaggaaagagcaaaggaggggaaagatggggggctgcaggaaatttggtgagcggcctccacctaaacgacttactagggaagctatgcgaaattatttaaaagagcgaggggatcaaacagtacttattcttcatgcaaaagttgcacagaagtcatatggaaatgaaaaaaggtttttttgcccacctccttgtgtatatcttatgggcagtggatggaagaaaaaaaaagaacaaatggaacgcgatggttgttctgaacaagagtctcaaccgtgtgcatttattgggataggaaatagtgaccaagaaatgcagcagctaaacttggaaggaaagaactattgcacagccaaaacattgtatatatctgactcagacaagcgaaagcacttcatgttgtctgtaaagatgttctatggcaacagtgatgacattggtgtgttcctcagcaagcggataaaagtcatctccaaaccttccaaaaagaagcagtcattgaaaaatgctgacttatgcattgcctcaggaacaaaggtggctctgtttaatcgactacgatcccagacagttagtaccagatacttgcatgtagaaggaggtaattttcatgccagttcacagcagtggggagccttttttattcatctcttggatgatgatgaatcagaaggagaagaattcacagtccgagatggctacatccattatggacaaacagtcaaacttgtgtgctcagttactggcatggcactcccaagattgataattaggaaagttgataagcagaccgcattattggatgcagatgatcctgtgtcacaactccataaatgtgcattttaccttaaggatacagaaagaatgtatttgtgcctttctcaagaaagaataattcaatttcaggccactccatgtccaaaagaaccaaataaagagatgataaatgatggcgcttcctggacaatcattagcacagataaggcagagtatacattttatgagggaatgggccctgtccttgccccagtcactcctgtgcctgtggtagagagccttcagttgaatggcggtggggacgtagcaatgcttgaacttacaggacagaatttcactccaaatttacgagtgtggtttggggatgtagaagctgaaactatgtacaggtgtggagagagtatgctctgtgtcgtcccagacatttctgcattccgagaaggttggagatgggtccggcaaccagtccaggttccagtaactttggtccgaaatgatggaatcatttattccaccagccttacctttacctacacaccagaaccagggccgcggccacattgcagtgcagcaggagcaatccttcgagccaattcaagccaggtgccccctaacgaatcaaacacaaacagcgagggaagttacacaaacgccagcacaaattcaaccagtgtcacatcatctacagccacagtggtatcctaactaccgtctttttgctaggacttaaactgacttgagtgtggcaaaaagttaacaaaaaa

SEQ ID NO: 174586 - DNA, 1752 bp, Homo sapiens
  Payload ID: 14285
  Gene Symbol: RBPJ
  Gene Name: recombination signal binding protein for immunoglobulin kappa J region
  Uniprot ID: Q06330
  ENST ID: ENST00000348160
  CDS Start-End: 230-1693
atgctccatcgcctgggtaggtttccagggaaggcagcgagcaggatcccctactctgcgggcggcgcgaggcgtctggctcttcgcggcggcggcgaggggaaagggagcgcgggggctgggtggaatcgaggagtgaggaaaaagggaaggggcgggggagagggaccagggaaggcgtcggggggaatctcgcgagggttggagttttggcgagagtttgtggaagatggcgcctgttgtgacagggaaatttggtgagcggcctccacctaaacgacttactagggaagctatgcgaaattatttaaaagagcgaggggatcaaacagtacttattcttcatgcaaaagttgcacagaagtcatatggaaatgaaaaaaggtttttttgcccacctccttgtgtatatcttatgggcagtggatggaagaaaaaaaaagaacaaatggaacgcgatggttgttctgaacaagagtctcaaccgtgtgcatttattgggataggaaatagtgaccaagaaatgcagcagctaaacttggaaggaaagaactattgcacagccaaaacattgtatatatctgactcagacaagcgaaagcacttcatgttgtctgtaaagatgttctatggcaacagtgatgacattggtgtgttcctcagcaagcggataaaagtcatctccaaaccttccaaaaagaagcagtcattgaaaaatgctgacttatgcattgcctcaggaacaaaggtggctctgtttaatcgactacgatcccagacagttagtaccagatacttgcatgtagaaggaggtaattttcatgccagttcacagcagtggggagccttttttattcatctcttggatgatgatgaatcagaaggagaagaattcacagtccgagatggctacatccattatggacaaacagtcaaacttgtgtgctcagttactggcatggcactcccaagattgataattaggaaagttgataagcagaccgcattattggatgcagatgatcctgtgtcacaactccataaatgtgcattttaccttaaggatacagaaagaatgtatttgtgcctttctcaagaaagaataattcaatttcaggccactccatgtccaaaagaaccaaataaagagatgataaatgatggcgcttcctggacaatcattagcacagataaggcagagtatacattttatgagggaatgggccctgtccttgccccagtcactcctgtgcctgtggtagagagccttcagttgaatggcggtggggacgtagcaatgcttgaacttacaggacagaatttcactccaaatttacgagtgtggtttggggatgtagaagctgaaactatgtacaggtgtggagagagtatgctctgtgtcgtcccagacatttctgcattccgagaaggttggagatgggtccggcaaccagtccaggttccagtaactttggtccgaaatgatggaatcatttattccaccagccttacctttacctacacaccagaaccagggccgcggccacattgcagtgcagcaggagcaatccttcgagccaattcaagccaggtgccccctaacgaatcaaacacaaacagcgagggaagttacacaaacgccagcacaaattcaaccagtgtcacatcatctacagccacagtggtatcctaactaccgtctttttgctaggacttaaactgacttgagtgtggcaaaaagttaacaaaaaa

SEQ ID NO: 174587 - DNA, 5761 bp, Homo sapiens
  Payload ID: 14285
  Gene Symbol: RBPJ
  Gene Name: recombination signal binding protein for immunoglobulin kappa J region
  Uniprot ID: Q06330
  ENST ID: ENST00000342320
  CDS Start-End: 177-1637
tgtttttaagtcattgaaattatgagactatcattcaaatggaagcattatagttcttcggaaccattatgatctcaaaacgaaaggagaatgatacagatacactggctgaggtgttttgaggtgcatcgaagtgttccaagctgtgacttaccttaacatgttcttgaagtaccatggcgtggattaaaaggaaatttggtgagcggcctccacctaaacgacttactagggaagctatgcgaaattatttaaaagagcgaggggatcaaacagtacttattcttcatgcaaaagttgcacagaagtcatatggaaatgaaaaaaggtttttttgcccacctccttgtgtatatcttatgggcagtggatggaagaaaaaaaaagaacaaatggaacgcgatggttgttctgaacaagagtctcaaccgtgtgcatttattgggataggaaatagtgaccaagaaatgcagcagctaaacttggaaggaaagaactattgcacagccaaaacattgtatatatctgactcagacaagcgaaagcacttcatgttgtctgtaaagatgttctatggcaacagtgatgacattggtgtgttcctcagcaagcggataaaagtcatctccaaaccttccaaaaagaagcagtcattgaaaaatgctgacttatgcattgcctcaggaacaaaggtggctctgtttaatcgactacgatcccagacagttagtaccagatacttgcatgtagaaggaggtaattttcatgccagttcacagcagtggggagccttttttattcatctcttggatgatgatgaatcagaaggagaagaattcacagtccgagatggctacatccattatggacaaacagtcaaacttgtgtgctcagttactggcatggcactcccaagattgataattaggaaagttgataagcagaccgcattattggatgcagatgatcctgtgtcacaactccataaatgtgcattttaccttaaggatacagaaagaatgtatttgtgcctttctcaagaaagaataattcaatttcaggccactccatgtccaaaagaaccaaataaagagatgataaatgatggcgcttcctggacaatcattagcacagataaggcagagtatacattttatgagggaatgggccctgtccttgccccagtcactcctgtgcctgtggtagagagccttcagttgaatggcggtggggacgtagcaatgcttgaacttacaggacagaatttcactccaaatttacgagtgtggtttggggatgtagaagctgaaactatgtacaggtgtggagagagtatgctctgtgtcgtcccagacatttctgcattccgagaaggttggagatgggtccggcaaccagtccaggttccagtaactttggtccgaaatgatggaatcatttattccaccagccttacctttacctacacaccagaaccagggccgcggccacattgcagtgcagcaggagcaatccttcgagccaattcaagccaggtgccccctaacgaatcaaacacaaacagcgagggaagttacacaaacgccagcacaaattcaaccagtgtcacatcatctacagccacagtggtatcctaactaccgtctttttgctaggacttaaactgacttgagtgtggcaaaaagttaacaaaaaaggagaaaaaatgaacaatcgtttgtggtttcttgggaaaacttttcataccaggtgatactattcaaaaaccccgttgtctccctgcaagtgctgatttgaaatgcagaagccacagtaaaaaaaaaaaaaaaaaaaaaaaaaaagaaaaaaaaatcaaaatgtataaatattggaaatcaagtttttcagctgttttgttggttggttggttggtttttgtttggttttgtttaaatgggcaagaagtaaataatgtggctggaatacaagttgaacaaactagaagacacaaatctaacatagtttttatggaccaaggaacttgtatattgtataagctttagtaaaaggtacattttcaccatacctttttttatatcacggtattatagtacaccttgttaccaaataggttgttctcttccccacccacctttgagcttttgctctaaaatacattcaggttccaagcctgaccatccttgtttaatctatcatactcttccaggttttttttttttggtctaaggctggaacttttttcttttttttcagctgaagtcttatgacttttcatgagtcaaaattgtttggatttcagcaagtcaaatcttgcaaaggcctgcatattttttttaagattatatgaagtctgtgcaaaagctttaaaaaaatgcctctgccttgcctgcaatacatgcaatgtatgttaacttagtctctcttctcagacactgttggtagttatttctgtgttttcctttttttaaaaaaaaatatggacttattgtggttatctgagaggttctaacattcacatgcaatttggtgtggccatttagctattaatgagttaatggcgcagaacttgttgatatttgaagtgttctctccccttttcccatgacgtaaatacataggtgtgttccaggatttgttcaggtttttcccccctcctaatcttgtacataacttgtattatgtgtaagttaaacattttattttgaacttggaatgttcccagtgatttcattcagcagggtattttctgccttgttggcaagtgacaaaaaatatgggaagtatttgctaccagttggtagatggtgcccttaatggtagaatgaggaaaatgtccgcaaaagcatgttttattatctttacttttttggggggttggagggggtagcctagccagaacatcattgtaatcttaaaacataagatgcttttattagatgatcaactaaaatagctggaagacagtactttagaaacagatagttgtaagattataaaatgcaaatgtaacttatgttttcatttttttctctgccttttttgtttgtttgttttctcttttccagtactgagcatctccacaaatgtctcctaactcagaaaatgtttcttttcttttcagttgagatttggttgcattcagggttgtaggttggccttgcttgctaaccccgccggttttaccgtgctttcattcctgaactttgtttatgcctttgtttggtttcttcgaaattgcagcagactcattgggctacatttagtacaggaaccacgtgtgtaatgttatacaacacagtctagtaatacaatcatccctcttagagtaaaaactacctctagattgtggtaagcttttactgtcccataaaacaggagccacagtaccttatgaatgcaaaactgtaacttcctacagtgtttccctacagaacattgtctttctggtgtcctgggctgttttgaaaaagtttccattaatagactttttagaaattattattagtagcattttttttccagctttgctgtcttcatcactcactctatgctcagactatgccactgtaaatattcttcctaacatctttaaatcgccttttcctcagttttcaaggggaaggtcatttgtaaagcacgttaggtggttaaatcagttattgcggttttctcttactgcaagcctttttaatcacccccaggctgcattttattctatatcgccttttttcttcaaatctgctccaatcactcacttctctcttataagctaatcctgcctcacaccttaaatctgtttcagtgatcaagggcagaactcattgtggccttatctttctttgttgtaattgttcactgtctctttcttacagaccacttatttctgagtagtagttattcctctctatggagtcatggcaggaatcattacacagtgcttttgttcagagcatggacatgttcctagtgctgctttgctttaacggccacaagtttcctccacttcctaggtttggtatttagttaaggaatcatattaaattaaccaataacaaaagagatacttttgaagaacaaactattccttacccatttttgtagctcaaaaataatttttcaagttcatgaccttattaaaatgaacttgtgtttttttaacaaacatgtatgttttattttgatagtttctttccgtaagataattgaaatattatactgtaaacccttttcttttctttttttgaaaagtccaagaatgtacttatacaggcatttttccccacctatttttggccattctcataccacagactaaagagtgaaatgatttgtccattgtagcttattgtttatcagtagttcttttgtcagctgcttacattttttctttcatggttttgtgaatcattttcagtatgtaatttataggaaccttgtcctctggttatagtagactgtgtgccctcctccagtgatggcattattagacatgctggtcatttaccctcagaaagactctcttattagaatggtgagtgcttcagttatagtatgtttgaatttttaaaaaattctgttttagaaatgtatcttatgctctcatgactatgcagtttctaaacatacacatagaagctgagtctctgatccaatatgtttttatttgttccatttaatttatcacatagattgggaaggcaagctaaaagccttaaaaatgccctttatattttgagtgatttcagcgttgaacactagtatactatctaaatttgctgctcactttctttaaactgtggcaattaaaggcatgtttatacatgacttaatcgtgaaatgtttgtcactcttactgcacagacttatctgcaatcataactggttagtttttttgttttgttttgttttattgtttttaatgaaactggtaccatctgtgctttcacaaaaaacttccaatgccatttttgagaactaacctaactagtcatgctaaccagaaaatccactggggaggaggttccttttgaaacaaaatgctgttcagttagtaaccaagttactttgattgcaaaagcagctgtgtttctgataagtactgaacaaatgtgtgtaattttctgtgccagacttatgactttgttttcaagcactgtaatgtgggatggatggttagaaacaataatatattagggtttctgtttaaccctttcaggactgaactgtatctccttttgttaattttcccctgtgttgtgataaatgtttgccagcattcagtactgtgttggtccagatgtaggtttatatgctcatttttagcttatttcttgtaccttgcagcatgctctacgcattcagtccttaaggggtttattttacaaactgtgcgcctgtaaggtttattagcaataagatagaaaattgagcaagtttataccataattttgtagaaaaaaagaatctgctcagttccatatttcatccgtgaaaaacttgcaatacgagcagtttcaaggaataaataaaaaggaaatgtaaaccattgtaaaagtcttctgtcgaatgtgcctgatgcatgtattatcgtcttttatttcagaatacttcataaagataaaattaaattctatattatagttggtgtatttacaatcttaccatgtacatcacatcaaagtgatagctctactaatttaatttccttgtcaatgtttttaactatatagtgctttaaagagattttttttccctgtgtaaa

SEQ ID NO: 174588 - DNA, 5860 bp, Homo sapiens
  Payload ID: 14285
  Gene Symbol: RBPJ
  Gene Name: recombination signal binding protein for immunoglobulin kappa J region
  Uniprot ID: Q06330
  ENST ID: ENST00000342295
  CDS Start-End: 237-1739
attgggtacatgcgcagtgccgctcgcgcgggccgcgccaatcctgcagcgccttcaacaggtttcgggcggcgaattccagttctccgggttttggggctccctgcgggaggcagtgctggatctgggaatctctaggaaaggaaagagcaaaggaggggaaagatggggggctgcagtctccacgtacgtccctcaaagcgcgtcctaaaacccggataaccggagcgctccccatggaccacacggagggctcgcccgcggaggagccgcctgcgcatgctccatcgcctgggaaatttggtgagcggcctccacctaaacgacttactagggaagctatgcgaaattatttaaaagagcgaggggatcaaacagtacttattcttcatgcaaaagttgcacagaagtcatatggaaatgaaaaaaggtttttttgcccacctccttgtgtatatcttatgggcagtggatggaagaaaaaaaaagaacaaatggaacgcgatggttgttctgaacaagagtctcaaccgtgtgcatttattgggataggaaatagtgaccaagaaatgcagcagctaaacttggaaggaaagaactattgcacagccaaaacattgtatatatctgactcagacaagcgaaagcacttcatgttgtctgtaaagatgttctatggcaacagtgatgacattggtgtgttcctcagcaagcggataaaagtcatctccaaaccttccaaaaagaagcagtcattgaaaaatgctgacttatgcattgcctcaggaacaaaggtggctctgtttaatcgactacgatcccagacagttagtaccagatacttgcatgtagaaggaggtaattttcatgccagttcacagcagtggggagccttttttattcatctcttggatgatgatgaatcagaaggagaagaattcacagtccgagatggctacatccattatggacaaacagtcaaacttgtgtgctcagttactggcatggcactcccaagattgataattaggaaagttgataagcagaccgcattattggatgcagatgatcctgtgtcacaactccataaatgtgcattttaccttaaggatacagaaagaatgtatttgtgcctttctcaagaaagaataattcaatttcaggccactccatgtccaaaagaaccaaataaagagatgataaatgatggcgcttcctggacaatcattagcacagataaggcagagtatacattttatgagggaatgggccctgtccttgccccagtcactcctgtgcctgtggtagagagccttcagttgaatggcggtggggacgtagcaatgcttgaacttacaggacagaatttcactccaaatttacgagtgtggtttggggatgtagaagctgaaactatgtacaggtgtggagagagtatgctctgtgtcgtcccagacatttctgcattccgagaaggttggagatgggtccggcaaccagtccaggttccagtaactttggtccgaaatgatggaatcatttattccaccagccttacctttacctacacaccagaaccagggccgcggccacattgcagtgcagcaggagcaatccttcgagccaattcaagccaggtgccccctaacgaatcaaacacaaacagcgagggaagttacacaaacgccagcacaaattcaaccagtgtcacatcatctacagccacagtggtatcctaactaccgtctttttgctaggacttaaactgacttgagtgtggcaaaaagttaacaaaaaaggagaaaaaatgaacaatcgtttgtggtttcttgggaaaacttttcataccaggtgatactattcaaaaaccccgttgtctccctgcaagtgctgatttgaaatgcagaagccacagtaaaaaaaaaaaaaaaaaaaaaaaaaaagaaaaaaaaatcaaaatgtataaatattggaaatcaagtttttcagctgttttgttggttggttggttggtttttgtttggttttgtttaaatgggcaagaagtaaataatgtggctggaatacaagttgaacaaactagaagacacaaatctaacatagtttttatggaccaaggaacttgtatattgtataagctttagtaaaaggtacattttcaccatacctttttttatatcacggtattatagtacaccttgttaccaaataggttgttctcttccccacccacctttgagcttttgctctaaaatacattcaggttccaagcctgaccatccttgtttaatctatcatactcttccaggttttttttttttggtctaaggctggaacttttttcttttttttcagctgaagtcttatgacttttcatgagtcaaaattgtttggatttcagcaagtcaaatcttgcaaaggcctgcatattttttttaagattatatgaagtctgtgcaaaagctttaaaaaaatgcctctgccttgcctgcaatacatgcaatgtatgttaacttagtctctcttctcagacactgttggtagttatttctgtgttttcctttttttaaaaaaaaatatggacttattgtggttatctgagaggttctaacattcacatgcaatttggtgtggccatttagctattaatgagttaatggcgcagaacttgttgatatttgaagtgttctctccccttttcccatgacgtaaatacataggtgtgttccaggatttgttcaggtttttcccccctcctaatcttgtacataacttgtattatgtgtaagttaaacattttattttgaacttggaatgttcccagtgatttcattcagcagggtattttctgccttgttggcaagtgacaaaaaatatgggaagtatttgctaccagttggtagatggtgcccttaatggtagaatgaggaaaatgtccgcaaaagcatgttttattatctttacttttttggggggttggagggggtagcctagccagaacatcattgtaatcttaaaacataagatgcttttattagatgatcaactaaaatagctggaagacagtactttagaaacagatagttgtaagattataaaatgcaaatgtaacttatgttttcatttttttctctgccttttttgtttgtttgttttctcttttccagtactgagcatctccacaaatgtctcctaactcagaaaatgtttcttttcttttcagttgagatttggttgcattcagggttgtaggttggccttgcttgctaaccccgccggttttaccgtgctttcattcctgaactttgtttatgcctttgtttggtttcttcgaaattgcagcagactcattgggctacatttagtacaggaaccacgtgtgtaatgttatacaacacagtctagtaatacaatcatccctcttagagtaaaaactacctctagattgtggtaagcttttactgtcccataaaacaggagccacagtaccttatgaatgcaaaactgtaacttcctacagtgtttccctacagaacattgtctttctggtgtcctgggctgttttgaaaaagtttccattaatagactttttagaaattattattagtagcattttttttccagctttgctgtcttcatcactcactctatgctcagactatgccactgtaaatattcttcctaacatctttaaatcgccttttcctcagttttcaaggggaaggtcatttgtaaagcacgttaggtggttaaatcagttattgcggttttctcttactgcaagcctttttaatcacccccaggctgcattttattctatatcgccttttttcttcaaatctgctccaatcactcacttctctcttataagctaatcctgcctcacaccttaaatctgtttcagtgatcaagggcagaactcattgtggccttatctttctttgttgtaattgttcactgtctctttcttacagaccacttatttctgagtagtagttattcctctctatggagtcatggcaggaatcattacacagtgcttttgttcagagcatggacatgttcctagtgctgctttgctttaacggccacaagtttcctccacttcctaggtttggtatttagttaaggaatcatattaaattaaccaataacaaaagagatacttttgaagaacaaactattccttacccatttttgtagctcaaaaataatttttcaagttcatgaccttattaaaatgaacttgtgtttttttaacaaacatgtatgttttattttgatagtttctttccgtaagataattgaaatattatactgtaaacccttttcttttctttttttgaaaagtccaagaatgtacttatacaggcatttttccccacctatttttggccattctcataccacagactaaagagtgaaatgatttgtccattgtagcttattgtttatcagtagttcttttgtcagctgcttacattttttctttcatggttttgtgaatcattttcagtatgtaatttataggaaccttgtcctctggttatagtagactgtgtgccctcctccagtgatggcattattagacatgctggtcatttaccctcagaaagactctcttattagaatggtgagtgcttcagttatagtatgtttgaatttttaaaaaattctgttttagaaatgtatcttatgctctcatgactatgcagtttctaaacatacacatagaagctgagtctctgatccaatatgtttttatttgttccatttaatttatcacatagattgggaaggcaagctaaaagccttaaaaatgccctttatattttgagtgatttcagcgttgaacactagtatactatctaaatttgctgctcactttctttaaactgtggcaattaaaggcatgtttatacatgacttaatcgtgaaatgtttgtcactcttactgcacagacttatctgcaatcataactggttagtttttttgttttgttttgttttattgtttttaatgaaactggtaccatctgtgctttcacaaaaaacttccaatgccatttttgagaactaacctaactagtcatgctaaccagaaaatccactggggaggaggttccttttgaaacaaaatgctgttcagttagtaaccaagttactttgattgcaaaagcagctgtgtttctgataagtactgaacaaatgtgtgtaattttctgtgccagacttatgactttgttttcaagcactgtaatgtgggatggatggttagaaacaataatatattagggtttctgtttaaccctttcaggactgaactgtatctccttttgttaattttcccctgtgttgtgataaatgtttgccagcattcagtactgtgttggtccagatgtaggtttatatgctcatttttagcttatttcttgtaccttgcagcatgctctacgcattcagtccttaaggggtttattttacaaactgtgcgcctgtaaggtttattagcaataagatagaaaattgagcaagtttataccataattttgtagaaaaaaagaatctgctcagttccatatttcatccgtgaaaaacttgcaatacgagcagtttcaaggaataaataaaaaggaaatgtaaaccattgtaaaagtcttctgtcgaatgtgcctgatgcatgtattatcgtcttttatttcagaatacttcataaagataaaattaaattctatattatagttggtgtatttacaatcttaccatgtacatcacatcaaagtgatagctctactaatttaatttccttgtcaatgtttttaactatatagtgctttaaagagattttttttccctgtgt

SEQ ID NO: 174589 - DNA, 5990 bp, Homo sapiens
  Payload ID: 14285
  Gene Symbol: RBPJ
  Gene Name: recombination signal binding protein for immunoglobulin kappa J region
  Uniprot ID: Q06330
  ENST ID: ENST00000355476
  CDS Start-End: 409-1869
atcgcctgggtaggtttccagggaaggcagcgagcaggatcccctactctgcgggcggcgcgaggcgtctggctcttcgcggcggcggcgaggggaaagggagcgcgggggctgggtggaatcgaggagtgaggaaaaagggaaggggcgggggagagggaccagggaaggcgtcggggggaatctcgcgagggttggagttttggcgagagtttgtggaagatggcgcctgttgtgacaggtcattgaaattatgagactatcattcaaatggaagcattatagttcttcggaaccattatgatctcaaaacgaaaggagaatgatacagatacactggctgaggtgttttgaggtgcatcgaagtgttccaagctgtgacttaccttaacatgttcttgaagtaccatggcgtggattaaaaggaaatttggtgagcggcctccacctaaacgacttactagggaagctatgcgaaattatttaaaagagcgaggggatcaaacagtacttattcttcatgcaaaagttgcacagaagtcatatggaaatgaaaaaaggtttttttgcccacctccttgtgtatatcttatgggcagtggatggaagaaaaaaaaagaacaaatggaacgcgatggttgttctgaacaagagtctcaaccgtgtgcatttattgggataggaaatagtgaccaagaaatgcagcagctaaacttggaaggaaagaactattgcacagccaaaacattgtatatatctgactcagacaagcgaaagcacttcatgttgtctgtaaagatgttctatggcaacagtgatgacattggtgtgttcctcagcaagcggataaaagtcatctccaaaccttccaaaaagaagcagtcattgaaaaatgctgacttatgcattgcctcaggaacaaaggtggctctgtttaatcgactacgatcccagacagttagtaccagatacttgcatgtagaaggaggtaattttcatgccagttcacagcagtggggagccttttttattcatctcttggatgatgatgaatcagaaggagaagaattcacagtccgagatggctacatccattatggacaaacagtcaaacttgtgtgctcagttactggcatggcactcccaagattgataattaggaaagttgataagcagaccgcattattggatgcagatgatcctgtgtcacaactccataaatgtgcattttaccttaaggatacagaaagaatgtatttgtgcctttctcaagaaagaataattcaatttcaggccactccatgtccaaaagaaccaaataaagagatgataaatgatggcgcttcctggacaatcattagcacagataaggcagagtatacattttatgagggaatgggccctgtccttgccccagtcactcctgtgcctgtggtagagagccttcagttgaatggcggtggggacgtagcaatgcttgaacttacaggacagaatttcactccaaatttacgagtgtggtttggggatgtagaagctgaaactatgtacaggtgtggagagagtatgctctgtgtcgtcccagacatttctgcattccgagaaggttggagatgggtccggcaaccagtccaggttccagtaactttggtccgaaatgatggaatcatttattccaccagccttacctttacctacacaccagaaccagggccgcggccacattgcagtgcagcaggagcaatccttcgagccaattcaagccaggtgccccctaacgaatcaaacacaaacagcgagggaagttacacaaacgccagcacaaattcaaccagtgtcacatcatctacagccacagtggtatcctaactaccgtctttttgctaggacttaaactgacttgagtgtggcaaaaagttaacaaaaaaggagaaaaaatgaacaatcgtttgtggtttcttgggaaaacttttcataccaggtgatactattcaaaaaccccgttgtctccctgcaagtgctgatttgaaatgcagaagccacagtaaaaaaaaaaaaaaaaaaaaaaaaaaagaaaaaaaaatcaaaatgtataaatattggaaatcaagtttttcagctgttttgttggttggttggttggtttttgtttggttttgtttaaatgggcaagaagtaaataatgtggctggaatacaagttgaacaaactagaagacacaaatctaacatagtttttatggaccaaggaacttgtatattgtataagctttagtaaaaggtacattttcaccatacctttttttatatcacggtattatagtacaccttgttaccaaataggttgttctcttccccacccacctttgagcttttgctctaaaatacattcaggttccaagcctgaccatccttgtttaatctatcatactcttccaggttttttttttttggtctaaggctggaacttttttcttttttttcagctgaagtcttatgacttttcatgagtcaaaattgtttggatttcagcaagtcaaatcttgcaaaggcctgcatattttttttaagattatatgaagtctgtgcaaaagctttaaaaaaatgcctctgccttgcctgcaatacatgcaatgtatgttaacttagtctctcttctcagacactgttggtagttatttctgtgttttcctttttttaaaaaaaaatatggacttattgtggttatctgagaggttctaacattcacatgcaatttggtgtggccatttagctattaatgagttaatggcgcagaacttgttgatatttgaagtgttctctccccttttcccatgacgtaaatacataggtgtgttccaggatttgttcaggtttttcccccctcctaatcttgtacataacttgtattatgtgtaagttaaacattttattttgaacttggaatgttcccagtgatttcattcagcagggtattttctgccttgttggcaagtgacaaaaaatatgggaagtatttgctaccagttggtagatggtgcccttaatggtagaatgaggaaaatgtccgcaaaagcatgttttattatctttacttttttggggggttggagggggtagcctagccagaacatcattgtaatcttaaaacataagatgcttttattagatgatcaactaaaatagctggaagacagtactttagaaacagatagttgtaagattataaaatgcaaatgtaacttatgttttcatttttttctctgccttttttgtttgtttgttttctcttttccagtactgagcatctccacaaatgtctcctaactcagaaaatgtttcttttcttttcagttgagatttggttgcattcagggttgtaggttggccttgcttgctaaccccgccggttttaccgtgctttcattcctgaactttgtttatgcctttgtttggtttcttcgaaattgcagcagactcattgggctacatttagtacaggaaccacgtgtgtaatgttatacaacacagtctagtaatacaatcatccctcttagagtaaaaactacctctagattgtggtaagcttttactgtcccataaaacaggagccacagtaccttatgaatgcaaaactgtaacttcctacagtgtttccctacagaacattgtctttctggtgtcctgggctgttttgaaaaagtttccattaatagactttttagaaattattattagtagcattttttttccagctttgctgtcttcatcactcactctatgctcagactatgccactgtaaatattcttcctaacatctttaaatcgccttttcctcagttttcaaggggaaggtcatttgtaaagcacgttaggtggttaaatcagttattgcggttttctcttactgcaagcctttttaatcacccccaggctgcattttattctatatcgccttttttcttcaaatctgctccaatcactcacttctctcttataagctaatcctgcctcacaccttaaatctgtttcagtgatcaagggcagaactcattgtggccttatctttctttgttgtaattgttcactgtctctttcttacagaccacttatttctgagtagtagttattcctctctatggagtcatggcaggaatcattacacagtgcttttgttcagagcatggacatgttcctagtgctgctttgctttaacggccacaagtttcctccacttcctaggtttggtatttagttaaggaatcatattaaattaaccaataacaaaagagatacttttgaagaacaaactattccttacccatttttgtagctcaaaaataatttttcaagttcatgaccttattaaaatgaacttgtgtttttttaacaaacatgtatgttttattttgatagtttctttccgtaagataattgaaatattatactgtaaacccttttcttttctttttttgaaaagtccaagaatgtacttatacaggcatttttccccacctatttttggccattctcataccacagactaaagagtgaaatgatttgtccattgtagcttattgtttatcagtagttcttttgtcagctgcttacattttttctttcatggttttgtgaatcattttcagtatgtaatttataggaaccttgtcctctggttatagtagactgtgtgccctcctccagtgatggcattattagacatgctggtcatttaccctcagaaagactctcttattagaatggtgagtgcttcagttatagtatgtttgaatttttaaaaaattctgttttagaaatgtatcttatgctctcatgactatgcagtttctaaacatacacatagaagctgagtctctgatccaatatgtttttatttgttccatttaatttatcacatagattgggaaggcaagctaaaagccttaaaaatgccctttatattttgagtgatttcagcgttgaacactagtatactatctaaatttgctgctcactttctttaaactgtggcaattaaaggcatgtttatacatgacttaatcgtgaaatgtttgtcactcttactgcacagacttatctgcaatcataactggttagtttttttgttttgttttgttttattgtttttaatgaaactggtaccatctgtgctttcacaaaaaacttccaatgccatttttgagaactaacctaactagtcatgctaaccagaaaatccactggggaggaggttccttttgaaacaaaatgctgttcagttagtaaccaagttactttgattgcaaaagcagctgtgtttctgataagtactgaacaaatgtgtgtaattttctgtgccagacttatgactttgttttcaagcactgtaatgtgggatggatggttagaaacaataatatattagggtttctgtttaaccctttcaggactgaactgtatctccttttgttaattttcccctgtgttgtgataaatgtttgccagcattcagtactgtgttggtccagatgtaggtttatatgctcatttttagcttatttcttgtaccttgcagcatgctctacgcattcagtccttaaggggtttattttacaaactgtgcgcctgtaaggtttattagcaataagatagaaaattgagcaagtttataccataattttgtagaaaaaaagaatctgctcagttccatatttcatccgtgaaaaacttgcaatacgagcagtttcaaggaataaataaaaaggaaatgtaaaccattgtaaaagtcttctgtcgaatgtgcctgatgcatgtattatcgtcttttatttcagaatacttcataaagataaaattaaattctatattatagttggtgtatttacaatcttaccatgtacatcacatcaaagtgatagctctactaatttaatttccttgtcaatgtttttaactatatagtgctttaaagagattttttttccctgtgt

SEQ ID NO: 174590 - DNA, 1697 bp, Homo sapiens
  Payload ID: 14285
  Gene Symbol: RBPJ
  Gene Name: recombination signal binding protein for immunoglobulin kappa J region
  Uniprot ID: Q06330
  ENST ID: ENST00000361572
  CDS Start-End: 195-1697
acccattgaggaggtgtttcatctaggcctgtgaaacgcagcccattttcccaggacccctcctcccttctcctcggccccgcctcctgacccctccattcctcgtccccgtagtaatcccctccggttttcctcagtctccacgtacgtccctcaaagcgcgtcctaaaacccggataaccggagcgctccccatggaccacacggagggctcgcccgcggaggagccgcctgcgcatgctccatcgcctgggaaatttggtgagcggcctccacctaaacgacttactagggaagctatgcgaaattatttaaaagagcgaggggatcaaacagtacttattcttcatgcaaaagttgcacagaagtcatatggaaatgaaaaaaggtttttttgcccacctccttgtgtatatcttatgggcagtggatggaagaaaaaaaaagaacaaatggaacgcgatggttgttctgaacaagagtctcaaccgtgtgcatttattgggataggaaatagtgaccaagaaatgcagcagctaaacttggaaggaaagaactattgcacagccaaaacattgtatatatctgactcagacaagcgaaagcacttcatgttgtctgtaaagatgttctatggcaacagtgatgacattggtgtgttcctcagcaagcggataaaagtcatctccaaaccttccaaaaagaagcagtcattgaaaaatgctgacttatgcattgcctcaggaacaaaggtggctctgtttaatcgactacgatcccagacagttagtaccagatacttgcatgtagaaggaggtaattttcatgccagttcacagcagtggggagccttttttattcatctcttggatgatgatgaatcagaaggagaagaattcacagtccgagatggctacatccattatggacaaacagtcaaacttgtgtgctcagttactggcatggcactcccaagattgataattaggaaagttgataagcagaccgcattattggatgcagatgatcctgtgtcacaactccataaatgtgcattttaccttaaggatacagaaagaatgtatttgtgcctttctcaagaaagaataattcaatttcaggccactccatgtccaaaagaaccaaataaagagatgataaatgatggcgcttcctggacaatcattagcacagataaggcagagtatacattttatgagggaatgggccctgtccttgccccagtcactcctgtgcctgtggtagagagccttcagttgaatggcggtggggacgtagcaatgcttgaacttacaggacagaatttcactccaaatttacgagtgtggtttggggatgtagaagctgaaactatgtacaggtgtggagagagtatgctctgtgtcgtcccagacatttctgcattccgagaaggttggagatgggtccggcaaccagtccaggttccagtaactttggtccgaaatgatggaatcatttattccaccagccttacctttacctacacaccagaaccagggccgcggccacattgcagtgcagcaggagcaatccttcgagccaattcaagccaggtgccccctaacgaatcaaacacaaacagcgagggaagttacacaaacgccagcacaaattcaaccagtgtcacatcatctacagccacagtggtatcctaa

SEQ ID NO: 174591 - DNA, 405 bp, Homo sapiens
  Payload ID: 14285
  Gene Symbol: RBPJ
  Gene Name: recombination signal binding protein for immunoglobulin kappa J region
  ENST ID: ENST00000504423
  CDS Start-End: 1-405
ataattaggaaagttgataagcagaccgcattattggatgcagatgatcctgtgtcacaactccataaatgtgcattttaccttaaggatacagaaagaatgtatttgtgcctttctcaagaaagaataattcaatttcagttgaatggcggtggggacgtagcaatgcttgaacttacaggacagaatttcactccaaatttacgagtgtggtttggggatgtagaagctgaaactatgtacaggtgtggagagagtatgctctgtgtcgtcccagacatttctgcattccgagaaggttggagatgggtccggcaaccagtccaggttccagtaactttggtccgaaatgatggaatcatttattccaccagccttacctttacctacacaccagaaccaggg

SEQ ID NO: 174592 - DNA, 607 bp, Homo sapiens
  Payload ID: 14285
  Gene Symbol: RBPJ
  Gene Name: recombination signal binding protein for immunoglobulin kappa J region
  ENST ID: ENST00000507574
  CDS Start-End: 136-607
ttagaaggaggctcaagatgtatatatgtgtttttctgttagtgtttgagaatagtttcagatagccacaatggatattcatttggcgtgaaatttggtgagcggcctccacctaaacgacttactagggaagctatgcgaaattatttaaaagagcgaggggatcaaacagtacttattcttcatgcaaaagttgcacagaagtcatatggaaatgaaaaaaggtttttttgcccacctccttgtgtatatcttatgggcagtggatggaagaaaaaaaaagaacaaatggaacgcgatggttgttctgaacaagagtctcaaccgtgtgcatttattgggataggaaatagtgaccaagaaatgcagcagctaaacttggaaggaaagaactattgcacagccaaaacattgtatatatctgactcagacaagcgaaagcacttcatgttgtctgtaaagatgttctatggcaacagtgatgacattggtgtgttcctcagcaagcggataaaagtcatctccaaaccttccaaaaagaagcagtcattgaaaaatgctgacttatgcattgcctcaggaacaaaggtggctctgtttaatcgac

SEQ ID NO: 174593 - DNA, 572 bp, Homo sapiens
  Payload ID: 14285
  Gene Symbol: RBPJ
  Gene Name: recombination signal binding protein for immunoglobulin kappa J region
  ENST ID: ENST00000511546
  CDS Start-End: 252-572
gagcgggccggggcgggcgtggcgtgggtgtgccaggagctccgcggttgccgcgaagcgagctggagctgaccctcggcgtccctcattgaaattatgagactatcattcaaatggaagcattatagttcttcggaaccattatgatctcaaaacgaaaggagaatgatacagatacactggctgaggtgttttgaggtgcatcgaagtgttccaagctgtgacttaccttaacatgttcttgaagtaccatggcgtggattaaaaggaaatttggtgagcggcctccacctaaacgacttactagggaagctatgcgaaattatttaaaagagcgaggggatcaaacagtacttattcttcatgcaaaagttgcacagaagtcatatggaaatgaaaaaaggtttttttgcccacctccttgtgtatatcttatgggcagtggatggaagaaaaaaaaagaacaaatggaacgcgatggttgttctgaacaagagtctcaaccgtgtgcatttattgggataggaaatagtgaccaagaaatgcagcagctaaacttggaaggaaagaac

SEQ ID NO: 174594 - DNA, 698 bp, Homo sapiens
  Payload ID: 14285
  Gene Symbol: RBPJ
  Gene Name: recombination signal binding protein for immunoglobulin kappa J region
  ENST ID: ENST00000515573
  CDS Start-End: 131-698
gtgtttgttattgtgaatccctaagggtgactgttttttcagcagggcgagttaggacggcacaaactgagagtttctgttctggaaatttggtgagcggcctccacctaaacgacttactagggaagctatgcgaaattatttaaaagagcgaggggatcaaacagtacttattcttcatgcaaaagttgcacagaagtcatatggaaatgaaaaaaggtttttttgcccacctccttgtgtatatcttatgggcagtggatggaagaaaaaaaaagaacaaatggaacgcgatggttgttctgaacaagagtctcaaccgtgtgcatttattgggataggaaatagtgaccaagaaatgcagcagctaaacttggaaggaaagaactattgcacagccaaaacattgtatatatctgactcagacaagcgaaagcacttcatgttgtctgtaaagatgttctatggcaacagtgatgacattggtgtgttcctcagcaagcggataaaagtcatctccaaaccttccaaaaagaagcagtcattgaaaaatgctgacttatgcattgcctcaggaacaaaggtggctctgtttaatcgactacgatcccagacagttagtaccagatacttgcatgtagaaggaggtaattttcatgccagttcacagcagtggggagccttttttattcatctct

SEQ ID NO: 174595 - DNA, 578 bp, Homo sapiens
  Payload ID: 14285
  Gene Symbol: RBPJ
  Gene Name: recombination signal binding protein for immunoglobulin kappa J region
  ENST ID: ENST00000514675
  CDS Start-End: 248-578
tatatttaccaggattactatgctgaaggtattcttcaagagtttgttttttttctactggttgatctctacttttagaagtcattgaaattatgagactatcattcaaatggaagcattatagttcttcggaaccattatgatctcaaaacgaaaggagaatgatacagatacactggctgaggtgttttgaggtgcatcgaagtgttccaagctgtgacttaccttaacatgttcttgaagtaccatggcgtggattaaaaggaaatttggtgagcggcctccacctaaacgacttactagggaagctatgcgaaattatttaaaagagcgaggggatcaaacagtacttattcttcatgcaaaagttgcacagaagtcatatggaaatgaaaaaaggtttttttgcccacctccttgtgtatatcttatgggcagtggatggaagaaaaaaaaagaacaaatggaacgcgatggttgttctgaacaagagtctcaaccgtgtgcatttattgggataggaaatagtgaccaagaaatgcagcagctaaacttggaaggaaagaactattgcacag

SEQ ID NO: 174596 - DNA, 795 bp, Homo sapiens
  Payload ID: 14285
  Gene Symbol: RBPJ
  Gene Name: recombination signal binding protein for immunoglobulin kappa J region
  ENST ID: ENST00000512671
  CDS Start-End: 261-795
gtagcgtgagactggactgcccgcattgggtacatgcgcagtgccgctcgcgcgggccgcgccaatcctgcagcgccttcaacaggtttcgggcggcgaattccagttctccgggttttggggctccctgcgggaggcagtgctggatctgggaatctctaggaaaggaaagagcaaaggaggggaaagatggggggctgcagtctccacgtacgtccctcaaagcgcgtcctaaaacccggataaccggagcgctccccatggaccacacggagggctcgcccgcggaggagccgcctgcgcatgctccatcgcctgggaaatttggtgagcggcctccacctaaacgacttactagggaagctatgcgaaattatttaaaagagcgaggggatcaaacagtacttattcttcatgcaaaagttgcacagaagtcatatggaaatgaaaaaaggtttttttgcccacctccttgtgtatatcttatgggcagtggatggaagaaaaaaaaagaacaaatggaacgcgatggttgttctgaacaagagtctcaaccgtgtgcatttattgggataggaaatagtgaccaagaaatgcagcagctaaacttggaaggaaagaactattgcacagccaaaacattgtatatatctgactcagacaagcgaaagcacttcatgttgtctgtaaagatgttctatggcaacagtgatgacattggtgtgttcctcagcaagcggataaaagtcatctccaaaccttccaaaaagaagcagtcattgaaaaatgctgact

SEQ ID NO: 174597 - DNA, 1682 bp, Homo sapiens
  Payload ID: 14285
  Gene Symbol: RBPJ
  Gene Name: recombination signal binding protein for immunoglobulin kappa J region
  ENST ID: ENST00000504907
  CDS Start-End: 177-1325
tgtttttaagtcattgaaattatgagactatcattcaaatggaagcattatagttcttcggaaccattatgatctcaaaacgaaaggagaatgatacagatacactggctgaggtgttttgaggtgcatcgaagtgttccaagctgtgacttaccttaacatgttcttgaagtaccatggcgtggattaaaaggaaatttggtgagcggcctccacctaaacgacttactagggaagctatgcgaaattatttaaaagagcgaggggatcaaacagtacttattcttcatgcaaaagttgcacagaagtcatatggaaatgaaaaaaggtttttttgcccacctccttgtgtatatcttatgggcagtggatggaagaaaaaaaaagaacaaatggaacgcgatggttgttctgaacaagagtctcaaccgtgtgcatttattgggataggaaatagtgaccaagaaatgcagcagctaaacttggaaggaaagaactattgcacagccaaaacattgtatatatctgactcagacaagcgaaagcacttcatgttgtctgtaaagatgttctatggcaacagtgatgacattggtgtgttcctcagcaagcggataaaagtcatctccaaaccttccaaaaagaagcagtcattgaaaaatgctgacttatgcattgcctcaggaacaaaggtggctctgtttaatcgactacgatcccagacagttagtaccagatacttgcatgtagaaggaggtaattttcatgccagttcacagcagtggggagccttttttattcatctcttggatgatgatgaatcagaaggagaagaattcacagtccgagatggctacatccattatggacaaacagtcaaacttgtgtgctcagttactggcatggcactcccaagattgataattaggaaagttgataagcagaccgcattattggatgcagatgatcctgtgtcacaactccataaatgtgcattttaccttaaggatacagaaagaatgtatttgtgcctttctcaagaaagaataattcaatttcaggccactccatgtccaaaagaaccaaataaagagatgataaatgatggcgcttcctggacaatcattagcacagataaggcagagtatacattttatgagggaatgggccctgtccttgccccagtcactcctgtgcctgtggtagagagccttcaggtgtggagagagtatgctctgtgtcgtcccagacatttctgcattccgagaaggttggagatgggtccggcaaccagtccaggttccagtaactttggtccgaaatgatggaatcatttattccaccagccttacctttacctacacaccagaaccagggccgcggccacattgcagtgcagcaggagcaatccttcgagccaattcaagccaggtgccccctaacgaatcaaacacaaacagcgagggaagttacacaaacgccagcacaaattcaaccagtgtcacatcatctacagccacagtggtatcctaactaccgtctttttgctaggacttaaactgacttgagtgtggcaaaaagttaacaaaaaaggagaaaaaatgaacaatcgtttgtggtttcttgggaaaacttttcataccaggtgatactattcaaaaaccccgttgtctccctgcaag

SEQ ID NO: 174598 - DNA, 1689 bp, Homo sapiens
  Payload ID: 14285
  Gene Symbol: RBPJ
  Gene Name: recombination signal binding protein for immunoglobulin kappa J region
  Uniprot ID: Q06330
  ENST ID: ENST00000507561
  CDS Start-End: 116-1513
agcccagtgacctgccacagcccgggcaccagatttctgccttaattgttcttccattgtctttctcctgaaatttggtgagcggcctccacctaaacgacttactagggaagctatgcgaaattatttaaaagagcgaggggatcaaacagtacttattcttcatgcaaaagttgcacagaagtcatatggaaatgaaaaaaggtttttttgcccacctccttgtgtatatcttatgggcagtggatggaagaaaaaaaaagaacaaatggaacgcgatggttgttctgaacaagagtctcaaccgtgtgcatttattgggataggaaatagtgaccaagaaatgcagcagctaaacttggaaggaaagaactattgcacagccaaaacattgtatatatctgactcagacaagcgaaagcacttcatgttgtctgtaaagatgttctatggcaacagtgatgacattggtgtgttcctcagcaagcggataaaagtcatctccaaaccttccaaaaagaagcagtcattgaaaaatgctgacttatgcattgcctcaggaacaaaggtggctctgtttaatcgactacgatcccagacagttagtaccagatacttgcatgtagaaggaggtaattttcatgccagttcacagcagtggggagccttttttattcatctcttggatgatgatgaatcagaaggagaagaattcacagtccgagatggctacatccattatggacaaacagtcaaacttgtgtgctcagttactggcatggcactcccaagattgataattaggaaagttgataagcagaccgcattattggatgcagatgatcctgtgtcacaactccataaatgtgcattttaccttaaggatacagaaagaatgtatttgtgcctttctcaagaaagaataattcaatttcaggccactccatgtccaaaagaaccaaataaagagatgataaatgatggcgcttcctggacaatcattagcacagataaggcagagtatacattttatgagggaatgggccctgtccttgccccagtcactcctgtgcctgtggtagagagccttcagttgaatggcggtggggacgtagcaatgcttgaacttacaggacagaatttcactccaaatttacgagtgtggtttggggatgtagaagctgaaactatgtacaggtgtggagagagtatgctctgtgtcgtcccagacatttctgcattccgagaaggttggagatgggtccggcaaccagtccaggttccagtaactttggtccgaaatgatggaatcatttattccaccagccttacctttacctacacaccagaaccagggccgcggccacattgcagtgcagcaggagcaatccttcgagccaattcaagccaggtgccccctaacgaatcaaacacaaacagcgagggaagttacacaaacgccagcacaaattcaaccagtgtcacatcatctacagccacagtggtatcctaactaccgtctttttgctaggacttaaactgacttgagtgtggcaaaaagttaacaaaaaaggagaaaaaatgaacaatcgtttgtggtttcttgggaaaacttttcataccaggtgatactattcaaaaaccccgttgtctccctgcaagtgctgatttgaaatgcagaagccacag

SEQ ID NO: 174599 - DNA, 731 bp, Homo sapiens
  Payload ID: 14285
  Gene Symbol: RBPJ
  Gene Name: recombination signal binding protein for immunoglobulin kappa J region
  ENST ID: ENST00000504938
  CDS Start-End: 302-731
tacagatacactggctgaggtgttttgaggtgcatcgaagtgttccaagctgtgacttaccttaacatgttcttgaagtaccatggcgtggattaaaagggtcttgctctgtcatccaggctagagtggactggtgcgatctcagctcactgcagcctcgacttcctggactcaatcttgcttcaaggtctttttcaagtgctgtgtcttcactgtctcagaagtttacacttcctatttcagaggaaataacaggaaatttggtgagcggcctccacctaaacgacttactagggaagctatgcgaaattatttaaaagagcgaggggatcaaacagtacttattcttcatgcaaaagttgcacagaagtcatatggaaatgaaaaaaggtttttttgcccacctccttgtgtatatcttatgggcagtggatggaagaaaaaaaaagaacaaatggaacgcgatggttgttctgaacaagagtctcaaccgtgtgcatttattgggataggaaatagtgaccaagaaatgcagcagctaaacttggaaggaaagaactattgcacagccaaaacattgtatatatctgactcagacaagcgaaagcacttcatgttgtctgtaaagatgttctatggcaacagtgatgacattggtgtgttcctcagcaagcggataaaagtcatctccaaaccttccaaaaagaagcagtcattgaaaaatgctgact
